United States Patent Application Publication US 2004/0214272 A1 - sequence listing, part 8

SEQ ID NO: 30428 - DNA, 924 bp, Zea mays
  unsure (1)..(924): unsure at all n locations
  Clone ID: MRT4577_127761C.1
gccgggcgtgcgccgcacccgctgccccgaatgcgggcgcaacggcgtaccggaaacgtctggtgagcagtcgaacatcgtgaccgcctctgctcagcccagatctccgatggccaccgcacccgccgccccgccgccggcctccgcggacgacgagatcatctacgagtccatgccctgcatccgcgtctacaaggaccgcgtggagcgctacttcggcaccgagttcgtcgccgcctcgacgaacgactccaccggcgtggcctccagggacgtcgtcatctcccccaacgtctccgcgcgcctctacctcccgcgcctggacgacgggaacgccaagctccccatcttcgtctactaccacggcggcggcttctgcatcggctccgccttcaaccccatcttccacgactacttcaactgcctcgtggccctcgccgacatcctcgtcgtctccgtcgagtaccgcctcgccccggagcaccccgtccccgccgcctacgctgactcctgggaagcgctcgcctgggtcgtctcccacctcggccccgctggcgacggcgacggcggccgggacccgtggatcgcgggccacgccgacttctcccgcctcttcctgggcggcgagagcgcgggctccaacatcgcgcaccacatggcgatgcgcgctgccgcggaggggctggcccacggcgctcggatccggggactcgtcatgatccacccctacttcctgggcacggacaaggtgccctccgacgacctcagcccggaggtgcgcgagagcctggggtccctgtggcgcttcatgtgcccgaccaccacgggggaggacgacccgctcatcaaccccttcgttgacggcgccccgccgctggcgtccctgccgtggcgccgccaccgcnaaaaaatacgtacgcgtgc

SEQ ID NO: 30429 - DNA, 595 bp, Zea mays
  Clone ID: MRT4577_127762C.1
aactcaaatctggaggcgagcacctcctagtgacccgacgcgcggcgcctccacggccggtgcggcagacacctgacggctgacgcgccaacgcctggctggtgctcctgccgcacggtggcgaggcgactttccgcccctccgcccgcccggtctcgcacgccacgcgtacgccgcgaaggactcctccccctcccctccaccgctccccgctttatccctcctccgcctaccccactaggccactaccgctcggctgcttctcacgggggatccttccgagaacttgcggtgcctggcgagcgatctcgccctgtggtgtcgcccgtcctcgccggcgccgagaagcggaatcccgattcccgaggtgtttcagttacatatctgatagagtcgtcccccttcagttagcaaaatgtcatttctatggaagtcaggcaatgatggaacaacggagaaaaccttgaccctggaagaacagcaagagaaaataaatgaggtacgaaagcaacttgaagaaccctcgtccctagcaactacagggtttcctttcgtatgcttcgatactgaaattccttcaagctaaaaaatgaaa

SEQ ID NO: 30430 - DNA, 691 bp, Zea mays
  Clone ID: MRT4577_127763C.1
cctgacggctgacgcgccatcgcctggctggtgctcctaccgcacggtggcgaggcgactttccgcccctccgcccgcccggtctcgcacgccacgcgtacgccgcgaaggactcttctccctcccctccaccgccccgctttatccctcctccggctaccccactaggccactaccgctcggccctctcagctgctccacatttcctccacggctgctcctcacgggggatccttccgagaacttgcggtgcctggcgaccgatctcggcgtgtggtgtcgcccgtcctcgccggcgccgagaagcgggatcccgattcccgaggtgtttcagttacatatctgatagagtcgtccccctttagttggcaaaatgtcatttctatggaagtcaagcaatggtggtacaacggagaaaaccttgaccttggaagaacagcaagagaaaataaatgaggtacgaaagcaacttgaagaaccctcgtcactagcaatacagggtttcctttcggatgcctcgatactgagattccttcgagctagaaactggaatgtgcagaaatcgagtaaaatgctgaaatcagctgtgaagtggcgggcagcatacaagccagaaatgatttcctgggaagaaattgcacatgaagcagagactggaaagatatatagggctgactacaaggacacactt

SEQ ID NO: 30431 - DNA, 409 bp, Zea mays
  Clone ID: MRT4577_127764C.1
ctcaacaaccaaaattttttattttttttgaacaacaaaccactataggggggcggggggggtttttttttttataatttcccccttcccccctcatgtaaaaaaaaaaaaattttttaaaaacctcgccgggaaagaaaaaacgcttaacttaaccctcggaggggggagcctgcaccgtataaatggggacttgcccccggcccaaaaaagattgggataagggaaacaccttggggttttaacaaaaacccacgcggggcccagggagaaaaaaataaatattataggtgttttggggggggaaaggagtggattcccttcatacccattatacggtcacccctttttttgtggggggggggggtatcccgggggggggcgcggcaaaaaaaaagaagggggggtc

SEQ ID NO: 30432 - DNA, 266 bp, Zea mays
  Clone ID: MRT4577_127765C.1
gacacgcggcagcggatccaatgcgtgcattattccacaagggtcaattgcttacagctccatgattcaccaagccctcccaccaattactagaatgggcttcgaacacccagctatccaggcctataggctacaacaagcgattgcggggagcgtcttacaacaacctagagcccaattgcagcagcaataccttgagacatgtaacaacacgaaccatcggagcgcagcagcaccatcagtgtctaccagcgctgcgccaccta

SEQ ID NO: 30433 - DNA, 301 bp, Zea mays
  Clone ID: MRT4577_127766C.1
cttatacctttcaacacacttaccaaaaggaaggcactattcaaggctagatttgaacaagcacttgaatcacaaaaattaaacatcaagaaaatagaaacccaactccgtcgtaagggtatcaatccagaggacccagttgctatggctagcatccagcgtgttgcctctacgttcttccgagccatagatgagcagcaaggtactccgtatattttccgtggggacacacaaccttctgctgggacctctgaaataaaagaaccacgtgatgaaccatctgaagatagtgatcaggagg

SEQ ID NO: 30434 - DNA, 422 bp, Zea mays
  unsure (1)..(422): unsure at all n locations
  Clone ID: MRT4577_127767C.1
gatanaaatttttagttnttantantataantggttantnaatnnnntaannngaaaccacaatttaattttgcttccgggctcctggggggccacaaataaaattacagagcccgagctccccataactttgggttttgcggtaacacagaatcaaaaaattcgaaactaattttgggggggggggctaatttttttctgaaaagcccagctgtaataatcttgccaaataattttcaactcttaaaaattttcaggggggggagggttcctgaaaaaacctttcccccccttaacatttttttttttttaaaaaaaattttttttttggattccaaaagggagattaaattcttaacccttcaaaaaatcaaaaccccccctttccaaaaatttgtttttttttttggtaaaaaagaaaa

SEQ ID NO: 30435 - DNA, 360 bp, Zea mays
  unsure (1)..(360): unsure at all n locations
  Clone ID: MRT4577_127768C.1
cgacccaganaagcgccgcnggctttatggcacaccgcaaccaccaaacgcgcccccacagccggagcgaaaacgccggggaacgagaaaagagaagaccaacgccaaggcgcgacggcaggaccccgggacgacggcggcgcnaggcccggggacgncccggaagcagaagaaggagcgacagacgagcacggagaaccgacacgggggggggggcccggcggacggagaaacgagaggagcaaaacanaaaaaaggcgaggggaacggagcaaagagaaaccgccgcagggcgacaggngaagaaggcgaagnaagcgcaggggaaggaagagacacacaaagaacaaagagaaaagc

SEQ ID NO: 30436 - DNA, 433 bp, Zea mays
  Clone ID: MRT4577_127769C.1
gggggggggaaccgggggtttttactttttggcaggaagttccaaaccggggccaggggggtggtgcgatttaaaaacacattggcagggaccactcacttgttttggaacagcctaaacggaatttaaagcaattttggtggttttttgaacgctaactaacgttactgggaaccatttttttttattttaaaaaaggtaactagggggattttaaagggaaccccggggccctgcctttttttgagggggggggccttccaagggcccccattttttttcacactggtgggggggggcgagctcacgttggaaaactcacaaacaccggggagcaatagtttttgaaagggggcctgaacattcaacaaaaaagcatttttggcaatagggtttttaaagaagggcctaacgcgttttttatatttttcaa

SEQ ID NO: 30437 - DNA, 4368 bp, Zea mays
  Clone ID: MRT4577_12776C.1
atgaagtacgatcttccgctgctggatctcgacacgcgtttctcgctgtggcaggtgaagatgcgggcaattctctcgcaatctgatcgcgacctggatgatgccctagatggatttggcaacaaggatgccaggacgtggactgatgaggagaggcgcaaggatcgtaaggcgctcgcacatattcaccttcatctgtctaacaatattctgcaggaggttctggcagagaaaactgccgctgctctctggttgaagctggagtcgatctgtatgtcaaaggatctgaccagcaagatgcatgtcaaaatgaagttgttctcccacaagttgcaggaaggaggatccgttctgacgcacatatcggtgtttaaggagatcgtggccgatctgacgtctatggaggtaaagtttgatgatgaagacctagctcttcttctcctgtgttccctccctgcatcgtttagcaattttcgagataccatcctatacagtcgtgatactctaaccgtggctgaagtgtatgaagctttgactgcgaaagaaaagatgagacagatggttaactcggaagatgctactggctcgagtggagaagctttgtatgtccgtggccgcactgatcagaaaaagtccaactcaggtggcaaaggaaaggggaagaaccagaggggtcgctccaagtcaagggggccatccgatgaattattttgcaaatactgcaagaagacgaaccatgtaattgagaactgttacaaactgcagaacaaggagaagagaaacaaggagaagggtaagactggaggtactgtctctgttgcatccgaaaataattctgataatggtgatgttcttattgcctttgctggttgtgctgctgatgatgcccaatggatcctcgattctgcttgctcatatcatgtttgcactaaaaaatctctgtttagtacctatgaagctgtgcagaacggaggtactcttcggatgggtgacaattccccttgcactgttgttggcatgggcaccgtgcagatcaagatgttcgatgggattgtacgcacattgactgaagtacgacatgttccatccatgtccaggaatctcatctctctgagtactctggacacaaagggctacaagtataccgccggtgacggtgtcatgaaggtaacaaaaggctctcttgtggttattaaaggtgatttgaaagctgaaaacttatatgtgcttcgaggtagttctggctctgctaatgctgttgttacatctgattctgagactactaaaatttggcatatgcgccttggccatatgagtgcacctggtttggcagaattgagcaagagaggccttcttgatggttgccatgctgatactcttgatttctgtgagcactgtgttttcggtaagcataaaagggtaaaattcagttctgctattcataataccgaaaatattcttgattatgttcatgctgatttgtgggggccgtcacgtataccttcacatggtggtgctcgttacatgttgactatcattgatgataattcacgcagagtttggccttattttcttaagcaaaaatcagatgcctttgagtctttcaaggtttggaagactatggttgagaagcagactgagaggaagctgaaggttctgagaactgacaatggtatggagttttgttctggtgattttaactctttctgcaggaaggagggcattgtgaggcaccacactataccatatacacctcagcagaacggtgtggcagagcgtatgaatagaacaataatctccaaggctcggtgtatgctgtccaactcaggtttgagccgcaagttttgggctgaggccgcttccactgcttgtcatttaatcaattgttcaccatccgctgctatcgataagaaaactccaattgaggtttggtctggttccccctatgattattctcagttgagagtgtttggttgtactgcatatgcacatgttgataatggtaaacttgagcctagagcaattaagtgtgttttcttgggttatggatctggtgttaaagcatataaattgtggaatcctgatacacagaaggcattttttagtagaaacgttgtgttcaatgaatctgctatgtttccttcggttgtatctaccagtgctactaaccagaattctgagtctatcagtgtgcaggtggagcacgagggggatgttgatgatcatgctccaccatctgctgaacctgctgaaaattctgtttctgaaatttcatcacctgttgtggagtctcacccccagtctcttgctgaaggccgaactaggaggcagatagttcggccccaaagactgattcaagagtgcaatgttgcttttgctttagctgttgctgaagaagttgataatgttcaggaaccattgaattattcagaagctatattgtgtactgatagtgaaaagtggatgggtgctatgcatgaagaaatggagtctcttgataagaatggcacttgggaactagctcggctgccttctggtaaaaaggcaattaagtgcaaatggatcttcaaaagaaaagaaggtatgactccaaaagagcctccgcgctttaaagcaaggctagttgcaaaaggttttagtcagattccaggaattgattactctgatgtctattctcctgttgtcaagcatagttcaatccgtacctttcttagtcttgttgctgtacatgactatgagcttgaacagttagatgtgaaaactgctttcttacatggtgatttagaggaggacatttatatggaccagccagaggggttcattgttcctggaaaagaagactatgtgtgcaggttgaagaagtccttatatggtctgaaacaatctcccagacaatggtataagaggtttgattcatttatgctttctaagggctttcagaggtctcaatatgatagttgtgtttatctaaaatttgttaatggatcacctacatatttgctgctatatgttgatgatatgttgattgctgccaagagcatgaaggaaatcactgctttaaaggcacagcttagtagcgaatttgatatgaaggatctgggtgctgcaaagaaaatccttggcatagagatagtcagggataggaagtctggactgctgtacttgagccagaagaattatattgagaaggtccttcgtcgtttcaacatgcaaaatactaaacctgtgagtactccgttggctcctcattttaaactgtctgctaaacagtgtgctgaaactgatgctgagcttgaatatatgtcaaaagttccatactctagtgctgttgggtcactcatgtatgctatggtttgttctcgtcctgatttgtctcatgctatgagcgttgttgctagatacatgtctaatcctggtaaagagcattggaaagctgttcagtggattttcagatatctacgtggttcttctagtgcttgtttatgttttggtaaatctggagatggtctgattggctatgttgattcagattatggtggtgatttagacaggaggagatctctttcaggttatgtctttactattggagattgtgctgtgagttggaaagctcgtttacaggatactgttgctttgtctaccacagaagctgagtatatggcaattgcagaagttactaaggaagccttatggttgaaaggtatatattcagagctatgtggaattaagtcttgcattaccatctattgtgatagccagagtgccattcatctcaccaaagatcagatgattactgagaaatccaaacatattgatattcgttatcacttcattcgtgatatcattgataaagggttggtgaagcccttagtggctgttggcgccggcaagatgatgatgcatttgtttaaggtggaggttgctattatgatgctacaaggaatttgtctcaaggtggagtttgttgagtttgtgatccaaattctgaagaaggcggccaagttggcgagcgaagcggagcacgcggtgacctcgtgggcggacgacggcgagtgggacgtgccgtcggcggcggaggacgaggccggaggagcggcggggaccagcgggtgggagtgggacaaggaccgcgcggcggcggaggtgacgatcaggatccccaggaggcagctgcaggagctgatggagaagagggcgcccgccgccggtgggctcctccgcggcctcgcgagccgcggggccgccgcgcaggcgcagctgctgctggcggacgtcatgaacgccgggcacgtctacctccaccgctgcagggcggcgcactggaagcccgcgctgcagagcatcccggaggctgctgtggagtcatga

SEQ ID NO: 30438 - DNA, 682 bp, Zea mays
  Clone ID: MRT4577_127770C.1
taggggccttttttttttttttttttacctttttttttttttttttttttttttttttttttttttttttttttttttttacaacaacccccccgacaacaatgttattgcacaacttcgtttctgacaaagcaacgggtttttttacagaccaaattaaccctccctcagcatataccttcaaacattgccggagaggagatttaattaagagtttttacaaaggagccctttggttggcccatgcatgcccatcagcacatgtatatgaccttaatacgtaccatgcatgggggatgggattatttacctacttgtcaatttgtccgagcttgccgaggccgttgcatttggggcaaaagatttgggcctcgtccttcctcgcggggttcgcccccagcgtcgcccccccctttcggatgaacccggcgccgtcccactccgggcacgtgtccttgcccgaaaaaattatggggaaggccgggcccaccagggccacggcccccgccccggccataaagtacttgtttcccctccgacgcgacgccccccccccgcccaaaccgagaaaagccggccggggccgccccccgccgccgtccttctcttcctacttattacgccgtccggggaaacaaataaccctccccccggggtggccccccggggcggcccaacaaaa

SEQ ID NO: 30439 - DNA, 636 bp, Zea mays
  Clone ID: MRT4577_127771C.1
ggggtagcatcccggtcaggcccttgttcgactgctcgttcgtacatctttttcctgctgggccgctgcactgaaacacttgatccagctagccgaccggagctacgctcgtccccatggctactgcaaaggtctgcgcgctcgacggccatctacagccagcgctatgtgcaaccaaggtgttattaccgtgcgcgctatgctgcgaacgcaccggggagggaggggcctcaaggtgcctttaccgtcactagatcgcccgacctccttcactgcgtcggacgggctaacacgttgcatggttgacgttggatttgattactctatcatggtgccgtaggtaatttctgttgatccatgacctatgcatacactcattaactgctcggccacatatcgtttatatatggctgatgactggtggccaccaccgatgacgcatagctctggctgtattagcacgctggatatgctgtgtaggtcaacggtacagcctggatcggggtacaatgaccactatgtttgtacactgtcgcatgagtgggtgcgtctaaggagactaaatggctgctccctgacaacactggggaatgatcttctgggcattggctgttagctttctgtactgtgaagtgc

SEQ ID NO: 30440 - DNA, 485 bp, Zea mays
  Clone ID: MRT4577_127772C.1
agaaaaccaattctctctgttcattatgctaactaggctgaggcacaaactggagcaccatggttacaggttacagccattataaccaggacgggggaggcacagatatctaacaagagaaagcggactaagttttagacacacatcgacttgaacccttaggcggaggcaaactacaaacaatgaactgggggaaaaaatacaacatctacatatgctgtaggtaaaacgatccataactacaaacaagcactaacttaatatccacttgatatgatcgcacaacttgttactcttctttttcgcgaccactgtgcactcatgtcatactaaaacaacccagccaggcttgaacacatactactacactggaccgaacatctgcaataccatccaacaatgtgataacgacaggagcagattctcacaatgcgaccttatacatcataccggacacgcatggagagctgacgaggctacccatg

SEQ ID NO: 30441 - DNA, 159 bp, Zea mays
  Clone ID: MRT4577_127773C.1
cgagctgcggtatatgtctttctttgtcaacaggacattgtaattgggctttgttctttggtcggcgagagccagacaaattggcattgttctgcggagttaccttgtttggtcttcattgtccacttgcctgtgttgcaaaattatataatgttatag

SEQ ID NO: 30442 - DNA, 446 bp, Zea mays
  Clone ID: MRT4577_127774C.1
ccgagccccaaccagccaatttagagggagggatccatttcggtccgtcctttgcttccaaccccccgaaaacaaccaacacaacccccggccggcaaggctagggtgggtggaatgaagcgaggggggcggaccgggcttttttacccgaacggccggacgcaccaaaaaaaaaaaaggacagcccccctagggggccccccgaccccacccaggggggggggggggggcggagagggacaaaggggggggcggggcggggggggggggggggggtggcccctttggagaaaacctgggggggaccgggggcgggcaggcagacgtaaaagaaccacccgcccctggactgcctggcgggcaacaacacccccctccgggaggaccacccaccctcacgaaggggcggcgccggaccccaggccttggggggaaagtcccgcccc

SEQ ID NO: 30443 - DNA, 324 bp, Zea mays
  Clone ID: MRT4577_127775C.1
atggcgatggacatgtgcgcttggctaagcgaatgtttgggtatttttgaatctacgattgactctagggagctgagacaccatggacaacagttcgcatcctcgtcctcacagcaacttgcacaaaaagcagtcgtctcgatgccaacatatgggatgccacctccgcaccttgtactgccgccaccaatgctgtcgcctccacctccaccacaattccatgtgggctttgagacacctcccgcttcatttgccgcacctagagatggaactagtcaagacgatgcatcaacgtcttgggtgaacaaccttttcaacacctag

SEQ ID NO: 30444 - DNA, 1166 bp, Zea mays
  Clone ID: MRT4577_127776C.1
cccggacttactggctggacccacgcgtgcgtccaatcagtacaatcccttcagatttggccaaaaatgtgaagatcttgaaccttgatttggggaataactttattgagaggagttcagatttgaaggtactttctgaattgcgctacttgaggaaccttaatttgcagggaaatcctgtttccaagaaagacagtcttgtcaaaaaggttaagaaatctgtgccaaccttgcgcatactgaacgcaaagcccctagaggccacctccaagagtgatacgaggtctacaaaagagaatcctcctagcaaagatgaagaccccattgggattgatgcaaagaaggataaaaggaagggatctaaacaagaggtaaagggccttgaagagcttgaagtccagagtgtttctacaggtatcaccacttcgaaccctggtaaacttgaagtgccagacggtaaggaaaagaaaaaggtcaaggaagctaagacgaagaaatctgaagagccgtaccatgccaataacagtagcttaaagaacaaagaagttcaatcttttgtctatgataccagcacgaaggacaagaaggaagccaagaggaagaaatttgttgacgaagaagatgtagatgctgaaggaattgacaatacagaaatctcgtttgcagatttaatgttttccaatgtgggcaatccagagactaagctaaagaacatctcaaccctggaagcagctcctgatggaaaatctgttggaggtctggtaattgatcacacaaagaagagaaagaaaccaaaaggtgttgtcaccatcactgactcctcagctcttaagatgttttcctcaatgccagaggtaggagcaggagggcttggcctgtcaggatgggatgagtagcgtctagctctctagtaccataagtttgctgcctgatgaatatcgttttttggtgaaaacctcaattttatgtgaactgagcagcattttcttctcttcccatcaagtgcatttatgatgtgtgatttgaggaaccaagcccctctagatgagtggtgcatcttcggttcaaccaataatttagtggaataactacttttctcacgcttgcatgaattataaactactccgtccattctaaattataaaatattttacttttcttgatcc

SEQ ID NO: 30445 - DNA, 313 bp, Zea mays
  Clone ID: MRT4577_127777C.1
aaaataaacaagctttttttaaatagatagatggatttaaaattcaaagtttttttttgctagctgggacaacactggccaaaacgcgcccgcatgaaaattaatgtttcgttgaacgaacccggggctggctagttttatttacgagggacccaaccttgtttgttttgggaaaacacaaacccaaaacctgttgttccccgttctaaagccagtttaattaaagcatatggctagccggaaactttttgggcccccggggcgggttttgattttggacataaaaaaaataagcccattttttccttttttt

SEQ ID NO: 30446 - DNA, 375 bp, Zea mays
  Clone ID: MRT4577_127778C.1
gggggaaaaccaaacacggcgcttttgattctggggagaagcttaccccagttacaactaaaagccctattagcaatttttacttacccggattctagaatctttggaaacaaaatttgcaactttactttaaaagcctccatgggccttgggttccttgccttggtctctaggagacggcaagggctgatccaaaccaccttttgggggatctccaaaaaggtccgaaacaacaggagccctgggtgacttcgttttttaaaaaaccccaaacaggtcaggggttggagcttcctttgcctcatgggtgggaggctcgctcgatgattttaccaaagcctaagcaacacgggggggtttttggtttccaggggc

SEQ ID NO: 30447 - DNA, 638 bp, Zea mays
  unsure (1)..(638): unsure at all n locations
  Clone ID: MRT4577_127779C.1
ccggccggggaacgagcacccgatcgaggaggtccggaacacggtgcccaccaccgacgacccgtcggagccgtgtctgacgttccggacatgggtgctggggatgtcctcctgcgtgctgctctccttcgtcaacgagttcttcaactaccggtcgtcccagctgagcatcggcacggtgctggtgcagatcgcgtcgctgcccatcggccgcctcatggcgtccacgctgccggggcgtcccgtccgcgtgcctctcatcgcctggtccttctccctcaacccgggccccttcagcctcaaagagcactgcctcatcactatcttcgccggcgccggctgctccggcgtctacgccctcaacatcgtcgccatcgtcaaggtgttctaccggcggcagatcaacccgtacgccgccatgctgctggcgcagaccacccagctgcttgngtacgggtgggctggcctcttcaggaagttcctcgtcgattccgcctacatgtggtggnccatcaaccttgtccaggtcacgctcttgagggactcggtgacggcgcagcagatcgggtcggggcctgcggggcctcggcatcggctccttcggcctggactggaacacggtgggccggcttcctcgg

SEQ ID NO: 30448 - DNA, 642 bp, Zea mays
  unsure (1)..(642): unsure at all n locations
  Clone ID: MRT4577_12777C.1
cctctcctccctagcaatctggcacgtttgttttcctttataggatgttgtgttctagccatctcacttcagctcaagtgttctttcttggctaaggtctgcaactctttggtagagtatatcatattattcactttgctagccgcttttatggtaaggtagaacaagtaggaaacaatatgacatgtgcagttccatttaccttgtttactcaattcttgcaggcggagacttgcaacagttatggtgaagctcaagtttgcagagcaccttaaggaggctgtgacgtacatcgaacaggggcatgtgcgtgtcggtccagatgcagtcacggacccagcctttcttgtgaccagaaacatggaggacttcatcacctgggtggattcctcaaagatcaagaggaaggtcatggagtacaatgatgcattagatgattatgatgccatgttctgagaaaatcattctgcagaaatttatgtgcccgtcagtagtgtaatcttaagcctgccacatatgggtcttttctgaagaaatctgtgggagttgtcttctgcaggctacttgcatttgtattgcacctgcagatgtgatgcaattntgtggttggttgaaggcacattataaattcatatctgatgt

SEQ ID NO: 30449 - DNA, 525 bp, Zea mays
  Clone ID: MRT4577_127780C.1
ccggccgggccgggatattacatctccacaatgctataggatctgctcatctgctgacactacaagagcacgaacctagctggctgacatcgttcccagtccaaacgccggccccaccagcgcatctagatcacaccatggataagagaagcaccgcgccactggatcctccggggctgatgcggttccctcgccgactgtcatgctgaggctggccgccggcgtcggattcagtctagctcgtcatctacctggagctgcgcgcctacaagtgggccttctacctgcatgacgttcagatgggctccatcgaactcagcgacacggggatctacctcgagctccaggagaccatcgcgtcgcggaacgataacgatggtgtgggagaatactacaagacgcttgacgctgtcgccactgactcccgatcaggcaccgacggcccccctgtcaatggctgtgatctaccaagcgcacaaggacgtgtgggcagtggacgccggtcatgtcgggcgacgcggtccc

SEQ ID NO: 30450 - DNA, 375 bp, Zea mays
  Clone ID: MRT4577_127781C.1
gtaagctcggaattcggctcgagcaaccagattggtatgttcgcatacaccggcctcaagcccgaacagatggaggctcttgccaaggagcactccgtttacgctaccaaggatggtcgtatttccgtcgctggtatcaccaccggaaacgtcaagagacttgccgagtctattttcaaggtcactggttaagggttaaattatacggattagaaggtggctgtactctggtctagaccgcgaaaaagattggatgtgtaattgtagtatgttcgcgatggaagggttgcaagcatgtcaatatggtggaggagcatagaaacaatgataagataaagatttctatttaaaaaaaaaatatctctcaaaaaatat

SEQ ID NO: 30451 - DNA, 750 bp, Zea mays
  Clone ID: MRT4577_127782C.1
ggccctgcctgatggcattgagcatcttagaacacttgagaaattatatctgcgaggagcatccaaagagctcacaaagctatttcagtgcaatgaagaaacacatgagtccaatgggaatcttgagaagatcggtcatatccgaagggttactgtttatccataagggtttgattggaagtaagggtaatggggaggattgaaggggctagaatctctcactattctattttaaatagtgaggaattctagccccctcgatctccttcgttccatttactcccaaactagccctaaaaaggatgcgaagacttggtgtcataaacccatacacttgcgtacaagtgttggccttgttaccgattgcatactactggccaactggtgtaatagctcaggacagtcaagagtaaaataaagttggtgaaaatatagttgggtctgaaccgctgaagtgagtggagactaataatttgtttttgtttccggtacttgattttactgttttgaccttatttttgtgtcactaatactcatcatgtatttgtagtcatacaggtatagattaaacgaaactcttcatcacacgcgaactgagcaaaagttgagcggtagataaattgtatatttttaaggctagttgggaactctatttttccaatggatttgtattatatttctgtatttgatctataaatatttcatgatattattttttaatacgtaatgcagaaaagtattaatcttttt

SEQ ID NO: 30452 - DNA, 644 bp, Zea mays
  Clone ID: MRT4577_127783C.1
tcgtttaaatattaatagagctcctgcagagatctgggggggggggggggggggcttgccctaccgccaggccaaccataaattctggggacctacgacgtacgacatacgcaagctagcacttccgttggacaccaacgagtccgcacgccaaccaacgtatcactctctcctagcacccctgacatcctcgctagttactggacggtggggattcgcacagcaaggcttctctgtcaacgagtgtctagtaccagtcatttgtcccaacagtccaactacagttctaacttacgagtaacacctaaacaccaagcactacgtagtgactgaagataattactcataagtcctcctggtctatttcattcattacgaggtgttattccaagttttgtaagactacgtgcacttaaatatcttcctcaacatcaaattccattgtgtcatgcactacatcgttattaccatcctactcctcaccatccactttattgttaaagatttgaaagaactagactactatcagtaccaatagataaagtatgataccttgataatcaacattgagttcgaagaaaatatcatagtatactaagtgatgcaatacgaatacatcatgagttatttatttcctgttttcc

SEQ ID NO: 30453 - DNA, 178 bp, Zea mays
  Clone ID: MRT4577_127784C.1
ctcttttatagaagacaaaacctatctgggggggcattatgggggggggtgtgcgcatataatctaatttttcaaactacaataagcaaacaaatataaacataataccagtatacagttataaataccataattttaccctatataaactagacagtattataaccaaaaaactatt

SEQ ID NO: 30454 - DNA, 1284 bp, Zea mays
  Clone ID: MRT4577_127785C.1
attgaacgctagctgctgctttgggcgctcgcttttcctcgagggctttctgaaaagttcgggtacgtgtgcccccacattctcttcggacaggcctttcggctatgtatagaggaggaacccctgtgctccgctgcccaattccaaccccagctttgactgccctcgcttggtgctcagttctttcctctgctcctccgcctcttctcgcacctcggcaccttcttcggcaactgcgagcgagatggaggcgcaagacgactgcaagtggcggcagatcccggcgttcggcgactggaacgtgtgggacggcgacatgcccgtcacccagtacttccaggcaggggccttcttcttcgcggcgccggcggagaagggcgacgcggatctcttcaaggtgccccagttgcctgccaagccctacggctacaagaagtgcgttgttcgagtgaagggggagaaagaaaccgctgtgccgccggcggcgaggaagggacgcaggaggcgctgcgtgagcgagcagcacaagtggaagcccaagggagctgtggccgggagtatcaggatcccagctttggctgcccttgcttgctgctcagttctttgccccctgttcctcctcttctcgcacctcggcgcctgcttcggcatcaactgcgaccgagatggaggcgcaagacgactgcaagtggcgccaggtcccggcgttcggcgactggaacctgtgggacgacatgcccgtcacccagtactttcaggcagggaccttcttcttcgccgcgccgacggcagagaaggacgacgacgacgacgaggatctcttcaaggtgccccagtttcctgccacgccctacagctacaagaagtgcgttgttcgagtgaagggggagaaaggaactgctgtgcctccggcggctaggaagggaggcaggaggcgccgcgtgaacgagcagcagaagtggaagcccaagggagctgtggacgaggacctctacaagatatccccgcagcttctctgcaaggtgaagaaggcaaggatcctgtaatcctagtttgcaccccacgtgtacctaaaagaagctcctgaggaatctgctgggagggtgcctgggcctgagctgcatcgcatgaccgagagacgcatcgcttaataagtttctggggagtttgttgttcggtgggtgctctgaagagttgtatagtgtctacgctaatatggaatcaatggaaacttactgctgcttttgcactcttttgaatgtaaacactagctcgcattccatc

SEQ ID NO: 30455 - DNA, 112 bp, Zea mays
  Clone ID: MRT4577_127786C.1
gcaattatttatgatgcctaaaccatttccagtgggggtgatatatactgcaacaggggatacacattacattatggcatcagacttcaagctctttggctatgatccccac

SEQ ID NO: 30456 - DNA, 882 bp, Zea mays
  Clone ID: MRT4577_127787C.1
gccggccggtccggacgtgtgccccacattctcttcggaaggcctttcggctatgtatagaggaggaacccctgtgctccgctgcccaattccaaccccagctttgactgccctcgcttggtgctcagttctttcctctgctcctccgcctcttctcgcacctcggcaccttcttcggcaactgcgagcgagatggaggcgcaagacgactgcaagtggcggcagatcccggcgttcggcgactggaacgtgtgggacggcgacatgcccgtcacccagtacttccaggcaggggccttcttcttcgccgcgccggcggagaagggcgacgacgcggatctcttcaaggtgccccagttccctgccacgccctacagctacaagaagtgcgtcgttagagtgaagggggagaaaggagctgccgtgcctccggcggcgaggaagggaggcaggaggcgccgcgtgaacgagcagcagaagtggaagcccaagggagctgtggacgaggacctctacaagatatccccgcagcttctctgcaaggtgaagaagaagaagctcctgaggaatctgctgggagggtgcctaggcctgagctgcatcgcctgaccgagagacgcatcgcttaataagtttctggggagtttgttgttcggttggtgctctggagagttgtatagtgtctacgctaatatggaatggaaacttactgctgcttttgcactcttttgaatgtaaacactagctcgcattccatctctcttggtgttgttttggtgcctcactttgttactagcagtacattaaagcggttagggctctcggcagagagcggtaaaaaaaaaaaaaataatagaaaaaaaaaaaaaaaagcggccccta

SEQ ID NO: 30457 - DNA, 1746 bp, Zea mays
  Clone ID: MRT4577_127788C.1
cggtgccaaaagccggcaactttgcagtcgttactggagagggtcagagggagagagtcgagagagacgcagacactacacaggcaggcacgcaggcagagagactgggacttgagagaccggcagagcgagaggcactgtactactgttggtaactaatccgcgcatctggcccaagtggcagtgagcgaggcaggtaaagaagagcatcatcaccaccgcgctagcgctgcggacactagctagggactcggaaagcaagggcccctggcgcgcagcatgcacggctgctgcactgcactgcactcctgcggcatgagtgactctcagtgactgtggggtgctagtactcattgcctgcctgccggggcgggcctcggctcatcagtaacagctgaacgctagccgctgctttgggcgctcgcttttccgtcacccctttctacagttcgggtacccctcccagcgttgtctgcggtgtgcccttgcattctcttcgtcctgcccctcctcccacctttgggcgctcggctatgtatacagatggcgcccccgctttgactgccctcgcttggtgctcagttctttcctctgctcctccgcctcttctcgcacctcggcaccttcttcggcaactgcgagcgagatggaggcgcaagacgactgcaagtggcggcagatcccggcgttcggcgactggaacgtgtgggacggcgacatgcccgtcacccagtacttccaggcaggggccttcttcttcgcggcgccggcggagaagggcgacgcggatctcttcaaggtgccccagttgcctgccaagccctacggctacaagaagtgcgttgttcgagtgaagggggagaaagaaaccactgtgccgccggcggcgaggaagggacgcaggaggcgctgcgtggcgagcagcacgagtggaagcccaaggctgggcggccggggaccacactcaggcaacccagctttggctgcccttgcttgctgctcagttctttgccccctgttcctcctcctcctcttctcgcacctcggcgcctgcttcggcatcaactgcgagcgagatggaggcgcaagacgactgcaagtggcgccaggtcccggcgttcggcgactggaacctgtgggacgacatgcccgtcacccagtactttcaggcagggaccttcttcttcgccgcgccgacggcagagaaggacgacgacgaggatctcttcaaggtgccccagttccctgccacgccctacagctacaagaagtgcgttgttcgagtgaagggggagaaaggaactgctgtgcctccggcggcgaggaagggaggcaggaggcgccgcgtgaacgagcagcagaagtggaagcccaagggagctgtggacgaggacctctacaagatatccccgcagcttctctgcaaggtgaagaagaagaagctcctgaggaatctgctgggagggtgcctgggcctgggctgcatcgcctgaccgagagatgcatcgcttaataagtttcttgggagtttgttgttcggttggtgctctggagagttgtatagtgtctacgctaatatgggattaatggaaacttactactgcttttgcactcttttgaatgtaaacactagctcgcattccatcacaaaaaaaaaaaaaaaaaaagcggccccgacctacagctgctttagtgcctgactaatggctgtttgaatcttaaatgtttaaattcagccttattgtc

SEQ ID NO: 30458 - DNA, 1300 bp, Zea mays
  Clone ID: MRT4577_127789C.1
ctaaaacgtgacaaacaaaaaagaatagagatagtagtagttatctactgttaatctaagagacatactatgctcttaacagtgtttattttcttttcaaacaagcacgtatgtgtcatacattcacacactgtctttcttgcttccaagactggcttccaagctttcaccagagtccagaggagtaagctttgttccgtttcgttttttttctgacaggcgcaagacgactgcaagtggcgccaagtcccggcgttcggcgactggaacctgtgggacgacatgcccgtcacccagtactttcaggcagggaccttcttcttcgccgcgccgacgacagagaaggacgacgacgaggatctcttcaaggtgccccagttccctgccacgccctacagctacaagaaggtgaaacaaaacacaacgctgcatttaatttctttcaccaatcaccctcgaaaaaaagttttcttcttccaccagctctaaagatatcagcactgtttcatgcagtactttcatttcaaatctccacttccatatagtagtacatatatacatatacccagtctgcactagcgatgagaaagatactgaccaattctgtggtcgatgcttgcatgtgcagtgcgttgttcgagtgaagggggagaaaggaactgctgtgcctccggcggcgaggaagggaggaaggaggcgccgcgtgaacgagcaacagaagtggaagcccaagggagctgtggacgaggacctctacaagatatccccgcagcttctctgcaaggtgaagaaggcaaggatcctgtaatcctaatttgcaccccacgtgtacctaagtgggtctacttcttatctagttctcgtcatgtgattggcataagcctttatctagcctaagctgaccctttgcaagtagcttttgttaggataacaacactagatagaacagctatactttgccaatatatgctgtgacctttcttcaaaagcttaagcacttcatttttcacagcaagtggagctttgccaaagatcatgagcaataaagctggactgtaaactccagaaagattttaggtgagagttttgttctcatgctcttttgtttgtgttgcagaagaagctcctgaggaatctgctgggagggtgcctgggcctgagctgcatcgcatgaccgagagacgcatcgcttaataagtttctggggagtttgttgttcggtgggtgctctggagagttgtatagtgtctacgctaatatggaatcaatggaaacttactgctgcttttgcactcttttg

SEQ ID NO: 30459 - DNA, 190 bp, Zea mays
  Clone ID: MRT4577_12778C.1
gcatcgtgcacctcccatgactgatcagtcaagagagttcaccgactgggacgaaagccctccggagcatccggttcacctgcggcaactcatcgtgcggcttctctagggcccatgaccgtcgtcgaaacttgtaatcacacgttaagccccttggatgcaatggtattgctcgctgcagcatccatca

SEQ ID NO: 30460 - DNA, 559 bp, Zea mays
  Clone ID: MRT4577_127790C.1
ttgggacccccgaggcgggccgggactcaactcgctactactacacctttcaacaactcttccaacaacaacatcaccatgtctgactccatgcgcaagggactcggcgagcaggcctccgagaagctccagcccgactccaccaagtccaacactgagaaggcatccgagactctcagcggagccggtgaccgcatcgctggtgccgttcagcctgagggccagaaatctgctggacagaagctcggtgacgctacccgctccggccacgacgacgcctccaacaagagcgagggtgtcatgaagcaggctcaggactctctgagcaacgctggccaggccatctccgacaccctctctggcggacagaagaagtaaactgcttctctcccacgcccacgctcttcacgacacgaccctggggaatgacgatcgatgatacgttgcgataggtgcaacatgactgtagcttagaagccacacatattataccctaacacctaatcgaatgaaacactatccggaaaaaaaaaaaaaaaaaagaaaaaaaaaagcggcc

SEQ ID NO: 30461 - DNA, 278 bp, Zea mays
  Clone ID: MRT4577_127791C.1
ttcgtgtttcgatataggtatatattaccatgtaactaggggtatctggttgtcgccaaatcctaaccggattggtgcaatagaaagattgtctaatgggtgcaacgaaatttctagaagtcgatcattttagggtggcatggtcacccattcaattggccgaatagtgtataattataccaatcagatagagttagttagagtgtctattgtttagagtgtatggagtataaaatgtacatttctcatcaacaataatgaggaaaacatattttccc

SEQ ID NO: 30462 - DNA, 399 bp, Zea mays
  Clone ID: MRT4577_127792C.1
actagttctagatcgcgaactgtgcacttctgtagtcaaaaaaaaaaaaaaaaaaaaaggaaaaaaaaaaaaaaaaaaaaaaaaaaaaaaaaaaaaaaaaaaaaaaaaaaaaaaaaaaaaaaaaaataaaataaaataaaaaaaaaaaattaataattataataaaacaataataaaaataaagaaaaaaataaaacaaaaaactataaataaaattaaaaaaaaatgtttgagatatccatagtctaaaatcacaaatctagatcatctataagaaacaagattattgactgaagtgactgacaaacgttgtggaagatccaaaactaaaaaactcatgcctgtggaatactaaagactgctgcatcgttatcgacgtcaaacaaaagtcacatgatt

SEQ ID NO: 30463 - DNA, 212 bp, Zea mays
  unsure (1)..(212): unsure at all n locations
  Clone ID: MRT4577_127793C.1
cgtnncttcggtgggtttttncccgatatggggccttgcagccggttggggcacctgtccccgcacccggatccccaaggtactcctgccgctagcctacgactccgccaccgccagaatcgataaaccatcgagacctggactaccgacgccgtccttcgtcgatatctttagtggtgaacagcgcccaccagatcccgcccctgcgatgg

SEQ ID NO: 30464 - DNA, 182 bp, Zea mays
  Clone ID: MRT4577_127794C.1
ccagctacgtcaagcagagaggcacgtagaagcgtagcatatagccttcgggagaattggcaagtggcatggcacgcactagcgtttaggagagaatcagcagcagctaaagattaatgtgtacatataattaagctagaccatagatggctgtggcacaacaaggcatacacaaccatgcc

SEQ ID NO: 30465 - DNA, 385 bp, Zea mays
  Clone ID: MRT4577_127795C.1
ttttacctattattattattattttcagtgttgttttaagaccacagacaagaacaacacatttctaattttggaaagtttacccttttgtaaatcaaaacataaccaacgcttccgttagcttttttgcggacaaaaccataatgaactgtttgcaccccctaaccaacccaccgaaatgggggaaggggaggtacaaacactcatatcaatcccgtttctggaaaaaatctttaaacacatgcagtttttcgagagagagtgtcccttggatccaaaagatgaaatgcatattccatggggtgcggggggaaaatcgtccgaaactaagctcctaggaaaatgctattggtcaacgctgtttttgaagaatgggaataccatt

SEQ ID NO: 30466 - DNA, 296 bp, Zea mays
  Clone ID: MRT4577_127796C.1
tacaagcctctacagttagtcctatgacggcctccgcgcgtcgagggcaatctcaagcttgccatgggagccgtcacggtccaagatggtccatcatgaccaccgcggcacgaatgcgtcgtgtccagtgacctccgcagccgttcctgccgccaaggccgatgacgcccggcgccagcgcccgcggatgcacgtgcacgtccgcgagcatgacaagtgcccgctctccacggggcaccagcacctgcaccaccatcaccatcagctgccgcggtcggcagcgttaccaaccctgc

SEQ ID NO: 30467 - DNA, 1064 bp, Zea mays
  unsure (1)..(1064): unsure at all n locations
  Clone ID: MRT4577_127797C.1
ctttttggggtggagaaaatatcttgcttcttcaaaattaagatcgctccattgagtttggtngaaaaccacgatgtcaaccatgctgaatttcttgttcaagcgtcaatgacgtatgctttttctatgcaattgtgggtgattctcaaacggttgtggctcctgcgataaacgagagaaaaaatcgaaaacatagcagaaatggtgctataattccatgaactgcagaaatggtgcctaattcctagaagaatatttgacatgcagcaatagccagtgtcatcttcttcaaggagttttcagttcttctctagggatgtgaagatgggctataggaggctaaaagagaaggtcaaggagtacaaaagaggggatgccaaattgtaaggtaacatgatttccaagctgggcaagcttgaagacacaaaaaataatgaccaaatgagtcaggtactaaacaagaaacatgggatgttatggccatcaccggaaatgtttaggagattcttcactaccgatggtagcgaggagtccatgttgttctaatccgattggggcttcatttcgactgatggaatttgtgggaaatcgtcggtgttcgcgggtgtgtttgatctgctcgttgtttatccgttcatctacgcccgcgagtcccgcctatttggcctgaaaggttgttgtgcaacattatctgctatagaagctgttctattgcttattggctttgtaggtgtctgtgaaacattatctgcataagttgatcttattagttcgacaaagctagcagccttcctaccatctgcatttgtaacactgcccgcacaagctgttctgcatgatgaaatagactcagtcgccagaccagttgtgagagaaagacttagtctaggagaagagcttctggacaaagaatttagttggtctatggagtttagtagggttcngaagtgtgtgtatggagtttagatacttttccggattgtatttatttggcagttttgccattataagtgaccaaaactttttttacctgaaattaatggaaacatattgaggcggcgctg

SEQ ID NO: 30468 - DNA, 812 bp, Zea mays
  unsure (1)..(812): unsure at all n locations
  Clone ID: MRT4577_127798C.1
ttgggtacctcgaggccggccggngccggtgaaannntnannntanaaaaaaaaaaaaaaaaaaaaaaaaaaaaaaaaaaaaaaaaaaaaaaaaaaaaatttttttaaaaaataataaccaaattaatcatcatgaacaaaactgtcattgttctttttgccattcttgctttggccgcctctgaaggcattctcagcggtatcaccgatgttgccaacaaaattagctctctcggccccaccctccaaatgttcaagcgtgacagcacctctaaaatgggtgaaatcaaatcacaaacaggtttcaacagtctcgaatcttacactgattatgctactggttccgtcaaacaaatcaaacttcctgacttgttcaaaatttgggtcaacactttccccatcaaaggtcctgctaagtccaagctcctcaaatttatgggtgaagctgaattccaaaaattcattgaacccaaccaaaaaaccgtccaagatttcaagttcactgatgccaagggtaaactttactacttgaaggtcgtcctccaacaacaccccactatggctgatgttatccaatgggaaaaggttatgtggactgccaacttccaagttgctgctcctttcatggtcgtcagcaagtccaagtgcaacttcttcggatgcaagaataaggacgaggttcaatatctccaagctactcttctccctgaaacattaacactgttaagggtctcgccattcccttcggctccatcaccaacactgttggacaaactgtttaccaagccaagcaagcataaataataaatcta

SEQ ID NO: 30469 - DNA, 834 bp, Zea mays
  Clone ID: MRT4577_127799C.1
acgtgctatccagccgctgtcatttggcgcggtctccggatccgtgtctggttatactctaaagcagcagcagcttggatgttcgtcgacgtccttgcgcagctatggagcgattgggggctccggttctctgtaatttccagcttggtgacaatcgtcgtcctcagcctcttgtcctggacacgccggcgctcgacgtccggccgctggcggtcgatcctgctgtggttcgtgacgcgcgttgtctggttggcataccagggcgccgagatagccgcgacgggcgccctcggaagcctgtccctctccggctccgatgggtcagcggaggagcagcaggtgatagcgttctgggcgccgttcctgctgctgcacctgggcggcccggacaccatggccgcctacgcgctggaggacagcgccttgtccgtgcgcaagttcctcgagatggtcttccaggtcgggggcgccttctacgctcagtacaagtacatatatcgcgcgcgcacctggacgccgctggcgacggcgtcggccatcatgttgcccataggcattgtcaggtatgtggagaagtggtacgcgctatggaaatccaaaagcatgatggaggaggaggagggggaggaggaagaggaggagaagaagaaggtcgcgggcgcgggaccgggacgattcacatccgcaacaagcagcaacgacgcgctgtgccttgctcaggatctgttccatgtctgccgtcgtgccttgtccgattcttcggtgctcccgggcacggagaagcagcgtgccagcgaggagatcttcctgctgggatgggagcgcatgtgcaag

SEQ ID NO: 30470 - DNA, 1122 bp, Zea mays
  Clone ID: MRT4577_12779C.1
cattgggtacctcgaggccggccgggggcaggctacaggtgtcccagccgcgcgccgcacgccctgttgccttctctcgacttcgagagcaccgccgcacggcataacgctcgcacggccgagccccgacattctaccgcactccctccgctgcacccctttccattctaccgccggcgacgccaaagttcttgggcctcctcatcggcgacttttccgccggcgacaggaaacaacgaaccaaaccacttctctgtcgagaggcgtcgcgctcctctcttcgccctctgctgttatttttcttaacccggctttctctcgattgctgcgtaaagttgaagatgaggaagctcaagttccatgagcagaagctcctcaagaggcacaatttcttggagtacaagagggagggcggccaccgcgaggcgctcgtcacacagcgctaccgcctcgtggagagggacgactacaagaagtacaatgggatatgcttaatggtgcaaaagctcgttaacatcataaagcagatggacccaagagaccctttcagaatccagatgacagacttgattctcgataagctgtataatatgggtgtaatttcaacaaaagagagcttgttaaagtgtgagaaactttcagtgagcgccttctgcaggcggagacttgcaacagttatggtgaagctcaagtttgcagagcaccttaaggaggctgtgacgtacatcgaacaggggcatgtgcgtgtcggtccagatgcagtcacggacccagcctttcttgtgaccagaaacatggaggacttcatcacctgggtggattcctcaaagatcaagaggaaggtcatggagtacaatgatgcattagatgattatgatgccatgttctgagaaaatcattctgcagaaatttatgtgcccgtcagtagtgtaatcttaagcctgccacatatgggtcttttctgaagaaatctgtgggagttgtcttctgcagggctacttgcatttgtattgcacctgcagatgtgatgcaattttgtggttggttgaaggcacattataaattcatatctgatgtagttgtgcaattgtctttgttaaagagcgggtttgccccggattt

SEQ ID NO: 30471 - DNA, 338 bp, Zea mays
  Clone ID: MRT4577_1277C.1
tgagctcactagtcttcggccgcccttcgttttttttttttttttacctgaacactggctgtactgcctcatcgtaggcacggcattcaaactcgacatatcgggcgtgctgatcattcgcctctgcgctcaaggagagacgcatacagcttatactactgtactgcactgcatgccctcggacgcaagcgtgctcacacaaagcactacacataaacgactagctagaggtatcgtggcgaccgagactctacatgggcgtacgtagctgccgcgacctactttaatggccatatgccgtcgagccggccgtggttcaaggcggtcgcgcgcgcggt

SEQ ID NO: 30472 - DNA, 552 bp, Zea mays
  Clone ID: MRT4577_127800C.1
aggtttcgccagaaacctcaccggctccattcgaccatatccatcctttccttatcccctcccgcttacgtctccctccctgacttccttacttcgacatggcaaccatgtccatccgctgactcgccatgggcatgtgcgacaccgcgctcccgaccggccacaacctcctccccaaagtttcgctgccgctcctctcgtcgcacatgcgcgccggggcgctcctcctcttagccaggcgccgactgccgctcgcgctcgctcgaatacgctcctccgacgccgctgaggacaagtccatagacgacgaggaggacaacgtcgtacagcccgactaaatgtaagatatccagtataaagtacgtgctattcctcaaggggcgaggctgcacgggcagtacagccgcagggatagccgccatgaggacgccaagggctacgctgggaaccttccctacgacgcccacagagaggaactcgcgcagatcttctaccaggccgacgtgcgtcgacgctcccgaggttatctacaacagataaactgtccagagc

SEQ ID NO: 30473 - DNA, 241 bp, Zea mays
  Clone ID: MRT4577_127801C.1
tctgaagtacaccacggatgcttcatttgttaagcatattgaacagtctggagaaatagttgattcgatggtaatgtaggatatgcacacatttcatccactgggctttggctttattacatactctgaccctgctattgttgataaagtgatatatgacaatcattgttatcaatggatagcatgtttaaatttagagatccatacctaaaatgtttggtgcaatttatctttaatgatt

SEQ ID NO: 30474 - DNA, 243 bp, Zea mays
  Clone ID: MRT4577_127802C.1
tgccaagttccactaccacgttgtgtgtgtgtgcatgtgtgttgcacccccaccaccaccaccaccacctacacctccaacactaattattaactactacactctcacctcatatccccatccactttgccaccgtgtgtctcacgttacacctcagtcatccacgtctcaggtcgtgtttaccagagcaataatcccatgggccgggggaatcctactgacacccgacttgccacgcactag

SEQ ID NO: 30475 - DNA, 247 bp, Zea mays
  Clone ID: MRT4577_127803C.1
gagagaactaaaagcagccaccaaaggaatcggacacaccgtcaccagggtcccgggcgccggctctggagatcgaacctgtgccatggaggatctcgccggagttcgtctactccgcaaacgctgcttgtactgtgggtagcaacatcgacgccatcatttcgggaaagcctgggcctggccaccatcgaatcgtgcaggtacctccccctccgtcgagattcgtaaaggtcaggagtagttatgt

SEQ ID NO: 30476 - DNA, 453 bp, Zea mays
  Clone ID: MRT4577_127804C.1
gcaagcgaaagaggaggctgagcgggagatagccgaataccgtgcccagatggaggctgagttccagaggaaggttgcagagagcagtggtgactctggtgcgaacgtcaagcgcctcgaggaagagacagcggcgaaaatcgaacagctcagccagcaggctgcaagcatctccccagacgtcattcagatgcttctgaggcatgtcaccaccgtgaagaactgaggaacgatgtctccaagttatgcttgcaaacttgtatcatcgaatctatttatttttgttggagtggtggtgatgaataatatgtcgcttgtatccatgattccttttcttgactacggaataagccggcacagctttagcggcaaccttgacttggtactatcagaccttgccattatttggtacatttggtaaataatattgttttataaattggttttttgaac

SEQ ID NO: 30477 - DNA, 325 bp, Zea mays
  Clone ID: MRT4577_127805C.1
accttctaccttttattgtcacgtgaaccatggtcctacaggctgctgacaagcttggctgagcagggatcccaagggcgtcggcaggacatgaggaagggttgctgggagggcttggcctcttccttgagaagacagcaaatgtatccagcctaaattaagggtagggcatcccctatccctgtcagtgggcctagatctcagagccccacattaaagactgcttatgggtgagaaatgggggtcccttagatgggggtaggcagaaaggccctcccttcagagttctcattctgatccggtttcatttgttgtgtccagggac

SEQ ID NO: 30478 - DNA, 209 bp, Zea mays
  unsure (1)..(209): unsure at all n locations
  Clone ID: MRT4577_127806C.1
aaagaacaacgcagggagccacaccccaaaanagaaagcnggaccaagcgaagggggcgcagccggacgcaagcgaccgnacaacggacaaccagcgcganaggcacaanccccgcagccggacaagcaaacggcgagcacnggaggccgagagcgagcacgagaggacggcccagcgacaagagcagaaaaggcaaacacacacaggc

SEQ ID NO: 30479 - DNA, 328 bp, Zea mays
  Clone ID: MRT4577_127807C.1
cccatagcctggattcttacgaggaacaagacatttttttataaaaaaaaaaaaaaaaaatttatttttttttttttatttttttttttttttttttattatttaataaaattttttttctttgccgcgcccccccccagggcaatttgggggggggggcccccccctggggggggtttggggcctcttctggggggccccattggccctttggggggtcgttttacaattcattggccgtgtttttacacccctctggcctgtaaaaaccctggtgttccccaccttacactctttgtgtcccatcccctttttgcggttgggggtt

SEQ ID NO: 30480 - DNA, 368 bp, Zea mays
  Clone ID: MRT4577_127808C.1
cccggacgcgacgccacgcgtaacgctcgcgatcctcaaaaagcgcgacgccgcttttttttgaggttctgaacgataacaactttgcgggggtgacatgggtactaccacgaggcaactcactgtgaacatggactcattacacatgtaaccaaaaacctttacatcatttatacgaaaggaatcaaagcgcgccttaacacgctaacttctgcctgtactaaaaacattgttatcgatactgaacacaaacggaaagctctgacgcttaagatgaacgtgaactcatctcacattacaaagcaattcaagccactgtgaataatagatcacatatacatacactcctaagacaatgctgcagtgat

SEQ ID NO: 30481 - DNA, 135 bp, Zea mays
  Clone ID: MRT4577_127809C.1
cttatggggtaaataaaattaaatatcatggaaatatatgctttattcacaggcggaacatcttcaaggtatttattagcgccaaattaaggttcgccggttcggcaaataggataaaggggcccgtatttgttg

SEQ ID NO: 30482 - DNA, 643 bp, Zea mays
  unsure (1)..(643): unsure at all n locations
  Clone ID: MRT4577_12780C.1
gacttctagaatcacccttgtaagtagtagtatatcatggaaacagatttcacacgatttaaatatcgtaaataagttccgcacgaattaactaaaaactacagcaaacaagcaacgcaggctattctcaggtgcatacatattggtagcgatgcccttgtcctactcccaggtgctattctctgtaaacatggcgacgtatgctattctctgtaaacatggcgacgtatgtctgtctgataaaacacacactggtttacacgcaagttcaccacaaaactttgaccaccttttaaggtaaaaaaaaatggcgtgccatccttttctttttttgcttgaaaggctggagcatgcctttattgacgactcacttgtttgctaccacacgatctggattgtgtatccttatgccgttcaagatataaccaccaaaagcattcatttgcatgtgtggatgggtgcgagatggaaggacctggtatcnacgcagccagggtncagaaagctgcaatccnnnnnnnnnnnnnnnnnnnnnnnnnnnnnnnnnnnnctttgcaagaggctcgagatgctggtgatatatagcaaatggggctgaataagacaaaagtggaagcatatcagcaacaagacgcttacttcg

SEQ ID NO: 30483 - DNA, 547 bp, Zea mays
  Clone ID: MRT4577_127810C.1
taaaaaaaaaaaaaaaaaaaaaaaaaaaaaaagcttaaacctaaaaaaaacaaaacaaaaaaaagaggcttgttcttgaccctgtccgtccccttggaaggggcgatcttctgcgcatttcctggccctggcgccccctctaacttgccttttgggggcccactgtcccccttttttgcacccgttttccctttcactgccctgcgttttcccaccttaatcccggtgaaaaccctgcccttttcccaccttatgtcgcttttcacgaaaatggccccttttccgcaacgctggttgcccatacagatgcagcgcccctcccctggtcgacctgttcccacccctgtcgcggccttttagccgcttggactccccctgttccgccccattaaacccgtccgctttcctggttcctcccacccggaccgttccccttgccacctccctttctcccgctcttttcgtttttttcccttccttttttaacccgggggcccgcctttccccttccagttttatgtttggcggcccctttacggttccaatt

SEQ ID NO: 30484 - DNA, 193 bp, Zea mays
  Clone ID: MRT4577_127811C.1
tggacctttgggctgattagtgcttaggatcccggctgacactcaacgcccccacgaggtcatgaaggacctggtcccagagtcatcatttactagaagctcaggaacccgcctagagttatcatccaggaccccggccagagaccaacgacatcgcccggcccctcgcataaccgaccgaaagcacacatcc

SEQ ID NO: 30485 - DNA, 705 bp, Zea mays
  Clone ID: MRT4577_127812C.1
cggccggacccaatcctccatttttgtcttctccgcgaaatgttcttctgtctgtcgtgtctttgttctggtcgtttcccgattcggtagttggcttggggattttctgtagggaagttgatcgagaagtcttggtagacatggagcagatccagtactccgagaagtacttcgacgacacctatgaatacaggcacgtcgtcctcccgcccgaggtcgccaagctcctccccaggaacatccttctctccgagaagcagtggcggttggtgggtgtgcagcagagccgcgggtgggtgcactacgcgatccaccggccggagccgcacatcatgctgttccgccgcccgatcaactaccagcagcagcaggaggaagcggctgccgcgcatgtgctgcccaagtgaagcctctgttggcgaccaggaatgttaaaaacccctagccctcttttcatctctaaaaggggcgtcgctgttgtgttgattaatccctctggctgttggttggaaacttgggatctagttgggtgtgatcttattgtgatctttgtgattgtgattgtggttagtagcgctggaatcatggttaatctgttctacgtgagattaaaattgtcaccatgcatttcaaagttcaaacatgctgaggaagaaactatcctaggatcttggctgtcattgagggcgcaagatatcatttgac

SEQ ID NO: 30486 - DNA, 297 bp, Zea mays
  Clone ID: MRT4577_127813C.1
gcgccggcgatgggcatctctcgggcacaactggcacaagcgccgcaagaccgggggtaagagcaaaccctaaccacaagcaagcggaagtactcagctgggacggccggccgccaacactaagatatggccctcgccgcatacatacagtccgagttcgaggaggcaataagaagtatcgtgctctgagattggatgtggggaacttttcctggggctcagagtgttgtactcgcaaaacaaggatcattgatgttgctctacaatgcatccaataacgagctggccgcaccaaga

SEQ ID NO: 30487 - DNA, 400 bp, Zea mays
  Clone ID: MRT4577_127814C.1
attcggctcgagcgcctagaaaaggatttcctttcgctcattgggctgttgctcctgcgttgcagcttcctgtcgctgctgctaaacagctcgttcatccgcatccacggttccaggtgtccaatacacagaaactgatggctccttattgaaactgggtggtatatgcaccagacactccctgttaggtccagaggcactgtcaaggatcttcccgttcatgaggtgcatatatgcaggccccgaagtttgacttgcgctaacaatcctgagaggcgccgcttacgaagatgagaaattgccaccaacggaggaactgtttctatgttaagttaagctcttaacgaacagtctccatcctgccagccggaggaaccattctcaaactttgggccctatt

SEQ ID NO: 30488 - DNA, 1049 bp, Zea mays
  Clone ID: MRT4577_127815C.1
tacctcgaggccccgtgataaggtacgtgccgacgcccgttgccttctcaccacaaatcctccaatttcttgtcttctccgcgaaatgttcctctgtctgtcgtgtatttgttctggtcgtttcccgattcggtagttggcttggggatttcactgcaagtctagggattttctgtagggaagttgatcgagaagtcttggtagacatggagcagatccagtactccgagaagtactacgacgacacctatgaatacaggtagatgtgaaaccctcgccttcacgatcttcacccttccacatcttttccgtcatcggtggttggcaaaaccctatcgggatcccctttatccgcgcaggcacgtcgtcctcccgcccgaggtcgccaagctcctccccaggaacatccttctctccgagaagcagtggcggttggtgggtgtgcagcagagccgcgggtgggtgcactacgcgatccaccggccggagccgcacatcatgctgttccgccgcccgatcaactaccagcagcaggaggaggaagcggctgccgcgcatgtgctgcccaagtgaagcctctgctggcgaccaggaatgttaaaaacccctagccctcttttcatctctaaaaggggcgtcgctgttgtgttgattaatccctctggctgttgattggaaacttgggatctagttgggtcgacttggtgtgtgcgtggcgctctgtttgtgctgacatttaatctgtgcgatttgatctttgtgattgtggttctggttagtagcgctggaatcatggttaatgtgttctacgtgagattaaaattgtcaccacgcatttcaaagttcaaacatgctgaggaagaaactatcctaggatcttggctgtcattgagggcgcaatatatcctttgacgatatggtacatctggatatgtggtagtgctggaatcatgtttaatctgttctatgtgagattacaattgtctttcaagaaaaaaacaaaaaattagggcgtccgccgtcatagaaagctcgtcgacccggcaatt

SEQ ID NO: 30489 - DNA, 383 bp, Zea mays
  Clone ID: MRT4577_127816C.1
cggacgcgtgggtgagaccagcaggcatcatagagagtagaatccattagcggcaagggatcatcaatggcgaccaagatattgcccctacttatgctccttgctctttctacatgtgttgctaacgcgacaattttccctcaatgctcacaagctcctatagcttcccttctttccgcataccttccatcaattatagcttcagtatgtgaaaacccagctgttcaaccatataggctataacaagcaatcgtagcacgctacatacctctatcgcccttgttgtctcaacagtcaccagcgctatctttggtgcagtcattgctactaaccatcatggcacaacagctgcaggatctcgagctacctgtgatcaaccaagt

SEQ ID NO: 30490 - DNA, 486 bp, Zea mays
  Clone ID: MRT4577_127817C.1
gcctgcgctcgcctgcgctactttctgcccggcccctcgtgtcttgcttggtcgcatgggtccgcacaagccgctaggaaagctacgctagcacctaccacctctcggacagcggtggaagtgctgcctgcagctcgtggtatagcataccagggtcggcagcttgccatggcgtgggctctgctggagcttaagcggatcgataacagatcaaccgtcatgtcaccttcgacaagctccgtaaccgcctgctcaataaggcgtacgagctctctcagctctcgtgagcacgaattcacgctcatcattttcttcaaccgggccaggctttactagctctgcaactgtcagagcatcaccaaaacactagcgaggtctgaaataatcaatatggatgaccagatgctgctgcacagaacatggagcacgatgttgtacaaagacgccttaatgagtacctcaagctggaagtccgggtggatgctt

SEQ ID NO: 30491 - DNA, 229 bp, Zea mays
  unsure (1)..(229): unsure at all n locations
  Clone ID: MRT4577_127818C.1
aaaacaaaaaaaaaaaaaaannaaacaanaaaccaccaacttaatatttacaancaaaacaaacccctccacgctgtttataataaanatccctcccctaacccaattaattacctacaaaaaccactcacaaaatcataaaactcaccttaacttacaacaatattattcaaaaacatttcactttccccaacttaataaaaacccaatacatccccactaaacaaca

SEQ ID NO: 30492 - DNA, 114 bp, Zea mays
  Clone ID: MRT4577_127819C.1
cgtggtgttgcttttttaccttaacagcttaatcacacatgttcagagcaaggagatatgacagggaggaagcataacagaggcgctagcacctatatgccctgtgaacaccat

SEQ ID NO: 30493 - DNA, 417 bp, Zea mays
  unsure (1)..(417): unsure at all n locations
  Clone ID: MRT4577_12781C.1
ctacatcaccattatttacatcgcgccaggttacctgtgcgagccctgatgacatattgactcagtaacattaattgacacacctacctgcacactgcgcctaacgttggcaccctcttacaactgcaacaattgctgccattcgaccaacttgctttgacaaacccagcagtgttctaccaacaacccatcattggtggtgccctcttttaaattgcttatgagttatagttcaataataaagctttttttgctggtaaaaaancctaaaaaaaaaacacattaaaaaaaattgaaaaacgttttttaaagaaaaaaaaccccctttgaatgggagaaaaaaaaaaaaaaaagtagagggtcccccccccggaaaccccctaaggggaatttttgaaaaattcttttaaattgggg

SEQ ID NO: 30494 - DNA, 375 bp, Zea mays
  Clone ID: MRT4577_127820C.1
gaacaggtgcgctccggcgttcgtgccggtcgatgtgatcggcagcgcctggagccccgagaagtactggatcccccacccgaagaccggcgtgttcggcccggcggctgtggaccccaagctggcagctggtggcgcgcctgacgccggctcggatgctgcaagaggcacggtgctggacctgaaggtgtggctccgcccgttcgaggacgtctagaagccgccctccgccgagtgagccgcgcggtgctgcatagcccagcccacactggttctcgctcacaaaaagggcagcggtagagcctggcatgcactctgctcgagctcagctgggctggactgattgcttatatcactactattctatactactag

SEQ ID NO: 30495 - DNA, 474 bp, Zea mays
  unsure (1)..(474): unsure at all n locations
  Clone ID: MRT4577_127821C.1
aaaaaaaaagcccccccccaggccggccttgccttttacggcgnancggccatggaggccgggggggcgccaccaaaaaagcgccttcaacgccccgnactggaccaccaactccggcgcccacggggggaacaacgacagctccctcaccgggggcgcacgagggcccatcctgctggaggactaccacctgggggaaaagctacccaactgggagcgcgatcgcatcccttatcgcgtggtgcacccgcgtggccccagcgccaagggcttcttccaggggacccacgacatcacccacctgacgtgcgccgacttcctgcgcgcgcccggagtgcagacgcccgtcatcgtccgcttctggagggggatccacgagcgccggatcccccagacgctccgcgacccgcgcgggttcaccaccaagttctacacccggcacggcaactgcgacctgacaaccaacaacttccc

SEQ ID NO: 30496 - DNA, 271 bp, Zea mays
  Clone ID: MRT4577_127822C.1
ttgtgtttttttgttaccagaaacacattcactgtattgaatgccattgtagaggagcgtgtgaagataaagggctgatacagggctcggctccgggggcagggcgaggaatggaagtgggaggacaggatatacaattcatgggcactagctcctgtcctgagcgatgcctcctgatctatccataggcccggaagatcaccactgggatgacgatgagcacattggtcatgaggatgcccagaatcagagcccatatgttccatcgctt

SEQ ID NO: 30497 - DNA, 289 bp, Zea mays
  unsure (1)..(289): unsure at all n locations
  Clone ID: MRT4577_127823C.1
ctgccaagaccaccaacccacttctgactgtccactgtgccgcgccgtgctcaccgaacggtcgaccacacagaacgacgatggccgcgtcggcgctgcaccagaccaccagcttcctcgggcaggccctggtcgcccgcgccgccggcgtcgatgccggcgtgcgcatcaccatgcgccgcaccgttaagagcgttccccagatgatatgtgtacgngcctgaccgccccaagtacctcggaccgttttcccagtatacgccgtcgtacctgtccggtcgagttcccc

SEQ ID NO: 30498 - DNA, 728 bp, Zea mays
  Clone ID: MRT4577_127824C.1
ccggccggggacgcacgccgctggtcagcagtcagcagcaagccgcctcgtcgcctcgtcgggactctctctggtgagcgtgctggtgatcaggtaccttggacgctccattgcttcgacttcgaagtcgtcgcgggtttggatcctgtgttgagggggtaacaccgtgtagctcaactgtcccctagcgccgccgcgcgaaactccctaccggtccattttgtttgtagccattaagctcttcggaggtggagatctgggctgtcgtttccaggaccctggccgcgtcggctgtgatgggtcgaagcgccttggcggttcggttggcttcccttcttgcgtttggtttggtgctcgtctccgtcgaggccagcctcggggatgttgatccgcgctacagaacttgcgtgagggagtgtcaagctacagggattattggggagaacgtcatcagccattgtcagttcaaagagaactacacttctgttggagtctcttggtataaccaggagcaaatttacatccagtggaaggaactgaactgtaggacagactgtcgctatttttgcatgatgcagagagaaggggaacggcagtcacttggtctgagccctgttaatatcatggaagtggccgttcttacgtggttctgtgtttcaggaacccctttcaactgcactatctgctgtcaacctactgatgcacttcactggctggctttcattttt

SEQ ID NO: 30499 - DNA, 1749 bp, Zea mays
  Clone ID: MRT4577_127825C.1
tgggtacctcgaggccggccggcgcgcggagtggaggtcgaccgacattgaattccctctttccttctttgccgctcaattgcccccttgctccgcgggaagctggccaccggtcctgcctgcgcaatccattttgttcgtactattattgtgtaaccattgtgctccgtggagccgtagaggtggagatctgggttgccatttccagaccctggccgcgtccgctgcgatgggtcgaagcgtctgggcggttccgttggcttcccttcttgcgtttggtttggtgctcggctccgtcgaggccagcctcggggatgttgatccgcgttacagaacttgtgtgagggagtgtcaaactacagggattattggggagaacgtgatcagccattgtcagttcaaagaggacaacacttctgttggaggctcttggtataaccaggagcaaatttatatccagtggaaagaactgaactgtatgacagactgtcgctacttttgcatgacgcggagagaaggggaacggcaggcacttggtctgagccccgttaaatatcatggaaagtggccgttcccacgtgtttctgtgttccaggaacccctttcagctgcactatctgctgtcaacctactgatgcacttcactggctggctttcattttttcttctagtgaattaccaattgcctcttagaccccagggccaagagaacttactatgaatatactagcttgtggcatatctatgcaatcttatcaatgaacgcatggttctggagctctattttccatactcgagacattgacttgactgagaaattggactattcttcagctgtggccctgcttggctactcgttgatcctttcgttgctaagggctttcaatgtcaaggatgaggctagcagggtgatgtttgcagcccctattttggcattcgttacgacgcacatcttgtatcttaacttctatgagcttgactatgggtggaacatgaaagtttgtgtggtgatggccgcggttcaacttctgacgtgggcagtctgggctggtgtaagccggcatccgtcgcggctgaaggtctggacagttgttttcggaggagcactcgccatgctacttgaactctacgacttccctccatacatgggttacgccgacgcccattcgctgtggcacgcaagcaccattccgctcacctgtctcttgtggagcttcatcaaggacgatgccaagttccgcacggcaacactcgtcaagaaggcaaagtaattaagcaaagggccacactgttaagatatagggtctgggacccatcgtgtacacgaggagcggtttggggcacacgtgttataccggacatcatgaaacctccagtatatttgctcccccccccccccatgatgctcctgtgtcctgtcctgtctcccctccactcacgaattttgtccacaaactcagcgtattctttagggcgcatgttctgccattacgatccgccttcttacctgaatgtgtaaaactcagggaattttagaatgtgttggtgggctttgctagattttgtcatcgccgaatcagttttgcattgtggaatcagacaggacaatggacatcatcggtgtgtttgagtgtttcctgtgacgtgtggacttgtggaaattcctgaagcccatttttgtaggacatttgagttccaacgttacgaaagttactgaacaatacaatgaacacgtgctaggtttgaaac

SEQ ID NO: 30500 - DNA, 1011 bp, Zea mays
  unsure (1)..(1011): unsure at all n locations
  Clone ID: MRT4577_127826C.1
gtaccactcgggtctgnccgggacttcggcagttgagagaacaaacgaactggtgggtgggttgtgggtcgtcgccgccggccggtggagttgctcgctcctgtctcctggatctgccgcccggtggtggctcgccgccaaggatggcgcgggcggagaagatacgcgccgggagcacggcgtcggagacggcgtcgacggagacgccaggcaggtcgacggaccaccggagggcgctctacttcgccgccttcctggtgctggccgacgccgcgctcgtcgccctcatcgtcgccttcgtcccgtataccaagagcgactgggacgcctacatgtcccaggtggacgcttttctggagggggagagggactacaccaagatcgagggagacacagggccattggtctacccggccggattcctctacgtctactccgccgttaagttccttacgggaggccgcgtcttccctgctcagattttgtttggcgtcttgtacattgtcaacttgagcctcactcttctgctttacgtcaagactgaagtgcttccatggtgggctttaggtttgctttgtttgtccaagagggttcactccatctttgttctccgtcttttcaatgactgcttcgccatgacattgctccacgctgctatggttttgatcatttatcgcaagtggtaccttggtctagtagttttcagtggagctgtctcaattaagatgaatgtccttctttttgctccttctttgcttctacttatggtcaaggccatgagcatcaaaggagtcttctttgccttattgggagctgctgtcgtacaggttttgttgggtatgccattcttgctgtcacatccagttgagtacatctcaagagcattcaatctcggtcgcgtgtttatccatttctggtctgtgaactttaaattcgtcccagagaaggtgattgtatcaaaagagcttgccattgcattgatgattcttccactcaacacaattatgatat

SEQ ID NO: 30501 - DNA, 1877 bp, Zea mays
  Clone ID: MRT4577_127827C.1
taaaaaaaaaaaaaaaaaaaaaaaaaaaaaaactcaatcattgggatactcacagctgaccaggatcaatcacgcacgccgctggtcagcagtcagcagcaagccgcctcgtcgcctcgtcgggagtcgggagtctggtgagcgagctggtgatcaggtaccttggaggcctggcttgcttggacgctccattgcttcgacttcgaggtcgtcgcgggtttggatcctgtgtggagggggtaacaccgtgtagctcaactgtcccctagcgccgccgcgcgaaactccctaccggtccattttgtttgtagccattaagctcttcggaggtggagatctgggctgtcgtttccaggaccctggccgcgtcggctgtgatgggtcgaagcgccttggcggttcggttggcttcccttcttgcgtttggtttggtgctcgtctccgtcgaggccagcctcggggatgttgatccgcgctacagaacttgcgtgagggagtgtcaagctacagggattgttggggagaatgtcatcagccattgtcagtccaaagagaactacacttctgttggagtctcttggtataaccaggagcaaatttacatccagtggaaggaactgaactgtaggacagactgtcgctatttttgcatgatgcagagagaaggggaacgacagtcacttggtctgagccctgttaaatatcatggaaagtggccattcttacgtgtttctgtgttccaggaacccctttcaactgcactatctgctgtcaacctactgatgcacttcactggctggctttcatttttccttctagtgaattacaaattgcctcttagaccccagaccaagagaacttattatgaatacactagcctgtggcatatctatgcaatcttatcaatgaacgcatggttttggagctcaattttccatactcgagacattgagttgactgagaaactggactattcttcagctgtggccttgcttggctactcgttgatcctttcattgctaagggctttcaatgtcaaggatgaggctagcagggtgatgtttgcagcccctattttggcattcgttacaacgcacatcttgtatcttaacttctacgagcttgactatggatggaacatgaaagtctgcgtggtgatggctgcggttcaacttctgacgtgggctgtttgggctggtgtaagccggcatccatcacggctgaaactctggacggttgtttttggaggagcactggtcatgcttcttgagctctacgacttccctccatacatggggtttgccgatgcccattcactgtggcatgcaagcaccattccactcacctatctctggtggagcttcatcaaggacgatgccaaattccgcacgtcaacactcagcaagaaggcaaagtagttaagcaaagcgcgacattcttagcatagggtcagagaggatcagattccgattccgtggtctgcacgggggacattttgggggcacacgtgttgtcggacatcatggaacctcggtacatttgccctccccaaaaaagacattcatcttcatccactcaggtttttggcccacaaaagtcaacatactctttagggcgcatgttctgcccttacgaattatctctttactgacctgaacgtgcatcctgtgattgaatcggcatcttatcattgtagtgttggtggggtttgggagattttgtcatcgccgaatcagttttgtgaaatcagacagaacaatgaacatcagtggtgtgtttcctattatgtgtggagttttgtaaattcctgaagcccattttgtatgagttctccaacgttacgaaaattcctgaacaattaacacgtgctatgtttg

SEQ ID NO: 30502 - DNA, 293 bp, Zea mays
  unsure (1)..(293): unsure at all n locations
  Clone ID: MRT4577_127828C.1
agcccccaaaccgcnaaaagccagaagaggcgangggcacacgggggaaanagagcancnaaaggcaaggcaaaaggcgcnccccaaagccccggcaagggggggcgcggggcaaacacttgtgtttaangaanggcnnggccacancccaacaaaaaacgagggaaccaaaagggcccccccccggccagcatttagnngncagccacctgaatcagggggcgccccgagaaaacagagaccccaaatccatggaggcacaggacaggaacgacgacacaggcgagcccagg

SEQ ID NO: 30503 - DNA, 413 bp, Zea mays
  Clone ID: MRT4577_127829C.1
agccttccgaaggtttaaaaacctctccgagcgaactttccttccaacgacgtaacaccaatggctcggactatatgagccatcattgggcttctcgacctttgagtcagcgcttcatacgcaccaattattccacacagctgacttgcttctagcgccactattatcacagctactgctaccacatactctaatgggctactatcataccgccgtgcaagcctactggctacaactagcactctcaaccatcgcgttacttcacccaatcgcccatttgcatctacactgcttgctacatcttactctacaaaccatcgcctcgctacatctaccacatcagcctctgtcatcactgatccatatatccatggtgaaccacgtctactacttgaaacagctagctgcttgca

SEQ ID NO: 30504 - DNA, 4232 bp, Zea mays
  Clone ID: MRT4577_12782C.1
cggctcgagattctgaagaaggcgaccaagttggcgagcgaagcgatgtcgacgacaatgaaatacgatcttccgctgctggatctcgacacgcgtttctcgctgtcgccggtgaaggttgggacacttcgctcgcaatctgatggcgacctggaacaagccacagcagaatcgggcaactgctctcggccaacgtaggacgatcaagaaaggctcacaagacgcaaggcggtcgcaaatagttcagccaccttcactaagcggctaagcctcgctacgtgcaaagagatcgtgcccggtgcgctctgtctgtctctagggtcgtactaaacaatgtttgctctatgtatgtagttagaagcatagcaagaacttaaaattgttaaaccgatggcggcagatgattgttgatgatcatgccgcacctattggtgtatcgtcgccaatctgaggtctatagaggtaaagtttggtgatgaagacccagctcttgtccccctgtgttgcctccctgcatcgtttagcagttttcgagataccatcctatacagagtgcatactctaaccgtggctgaagtgtatgaagctttgactgataaagaaaaaatgagacagatggttaactcggaagatgctgctggctcgagtggagaagctttgtatgtccgtggccgcactgatcagaaaaagtccaactcaggtggcaaaggaaaggggaagaaccagaggggtcgctccaagtcaagggggccatccgatgaattattttgcaaatactgcaagaagacgaaccatgtaattgagaactgttacaaactgcagaacaaggagaagaggaacaaggagaagggtaagactggaggtactgtctctgttgcatccgaaaataattctgataatggtgatgttcttattgcctttgctggttgtgctgctgatgatgcccaatggatcctcgattctgcttgctcatatcatgtttgcactaaaaaatctctgtttagtacctatgaagctgtgcagaacggaggtactcttcggatgggtgataattccccttgcactgttgttggcatgggcaccgtgcagatcaagatgttcgatgggattgtacgcacattgactgaagtacgacatgttccatccatgtccaggaacctcatctctctgagtactctggacacaaagggctacaagtataccgccggtgacggtgtcatgaaggtaacaaaaggctctcttgtggttattaaaggtgatttgaaagctgaaaacttatatgtgcttcgaggtagttctggctctgctaatgctgttgttgcatctgattctgagactactaaaatttggcatatgcgccttggccatatgagtgcacctggtttggcagaattgagcaagagaggccttcttgatggctgccatgctgatactcttgatttctgtgagcactgtgttttcggtaagcataaaagggtaaaattcagttctgctgttcataataccgaaaatattcttgattatgttcatgctgatttgtgggggccgtcacgtataccttcacatggtggtgctcgttacatgttgactatcattgatgataattcacgcagagtttggccttattttcttaagaaaaaatcagatgcctttgagtctttcaaggtttggaagactatggttgagaagcagactgagaggaagctgaaggttctgagaactgacaatggtatggagttttgttctggtgattttaactctttctgcaggaaggagggcattgtgaggcaccacactataccatatacacctcagcagaacggtgtggcagagcgtatgaatagaacaataatctccaaggctcggtgtatgctgtccaactcaggtttgagccgcaagttttgggctgaggccgcttccactgcttgtcatttgatcaattgttcaccatccactgctatcgataagaaaactccaattgaggtttggtctggttccccctatgattattctcagttgagagtgtttggttgtactgcatatgcacatgttgataatggtaaacttgagcctagagcaattaagtgtgttttcttgggttatggatctggtgttaaagcatataaattgtggaatcctgatacacagaaggcattttttagtagaaacgttgtgttcaatgaatctgccatgtttccttcggttgtatctaccagtgctactaaccagaattctgagtctatcagtgtgcaggtggagcacggaggggatgttgatgatcatgctccaccatctgctgaacctgctgaaaattctgtttctgaaatttcatcacctgttgtggagtctcatccccagtctcttgctgaaggccgaactaggaggcagatagttcggccccaaagactgattcaagagtgcaatgctgcttttgctttggctgttgctgaagaagttgataatgttcaggaaccattgaattattcagaagctatattgtgtactgatagtgaaaagtggatgggtgctatgcatgaagaaatggagtctcttgataagaatggcacttgggaactagctcggctgccttctggtaaaaaggcaattaagtgcaaatggatcttcaaaagaaaagaaggtatgactcaaaagaggcccgtcgctttaaagcaaggctagttgcaaaaggttttagtcagattccatgaattgattactctgatgtctattctcctgttgtcaagcatagttcaattcgtacctttcttagtcttgttgctgtacatgactatgagcttgaacagttagatgtgaaaactgctttcttacatggtgatttggaggaggacatttatatggaccagccagaggggttcattgttcctggaaaagaagactatgtgtgcaggttgaagaagtccttatatggtctgaaacaatctctcagacaatggtataagaggtttgattcattttatgctttctaagggctttcagaggtctcaatatgatagttgtgtttatctaaaatttgttaatggatcacctacatatttgctgctatatgttgatgatatgttgattgctgccaagagcatgaaggaaatcactgctttaaaggcacaacttagtagcgaatttgatatgaaggatctgggtgctgcaaagaaaatccttggcatagagatagtcagggataggaagtctggactgctgtacttgagccagaagaattatattgagaaggtccttcgtcgtttcaacatgcaaaatactaaacctgtgagtactccgttggctcctcattttaaactgtctgctaaacagtgtgctgaaactgatgctgagcttgaatatatgtccaaagttccatactctagtgctgttgggtcactcatgtatgctatggtttgttctcgtcctgatttgtctcatgctatgagcgttgttgctagatacatgtctaatcctggtaaagagcattggaaagctgttcagtggattttcagatatctacgtggttcttctagtgcttgtttatgttttggtaaatctggagatggtctgattggctatgttgattcagattatggtggtgatttagacaggaggagatctctttcaggttatgtctttactattggagattgtgctgtgagttggaaagctcgtttacaggatactgttgctttgtctaccacagaagctgagtatatggcaattgcagaagttactaaggaagccttatggttgaaaggtatatattcagagctatgtggaattaagtcttgcattaccatctattgtgatagccagagtgccattcatctcaccaaagatcagatgattactgagaaatccaaacatattgatatccgttatcacttcattcgtgatatcattgaaaaagggttggtgaagtcattactggctgatatgatgacgatgcatgtgtttaaggtggagcttgctttaaggtggagtatattatgatgctacaaggaatttgtctcaaggtggagtttgttgagtttgtgatccaaattctgaagaaggcggccaagttggcgagcgaagcggaggcccgtcgccgggaggcttgggccggagcgcagcgaggccaactggccttcccgcagcccagggacgcctggggggaacggatcgaattagggtttcacctctataaatatctgttgaagccgcaggagatagatgtataaatgggaaat

SEQ ID NO: 30505 - DNA, 366 bp, Zea mays
  Clone ID: MRT4577_127830C.1
aaggacgggcgggaacccagtgaggggtgcaccttcacctttataaggtgaacataagtggagtaaaaccccggtgcgccggccaacggaccacccgaacccataccctttttttttcgtcacaacaagaaaacaccgaacgggacgccactggtatcacacccacagggcgcgcacgggacgcgtataccacgctcgcacacactaaaccaaaaaacacataccggcgggattactccatgggttgtgcggtccggcctggcgtaatgcacgtggaaggaccgcttacaggagctccattaggggggacgggtgctttttcttgcgcagggccgacgagggaggagtgttcgacaagcgggcccc

SEQ ID NO: 30506 - DNA, 180 bp, Zea mays
  Clone ID: MRT4577_127831C.1
tctagcgcgccctggaggggatgatgcaccactcctggctggtggctggcgccagctacccgctcatggaccgggggcttgtggcgtacactcaccccaacctgatggggactcagtacgctttccaccaaaaagtggccaagcttcagcgccttgaggctgaggccttcccgcgcctta

SEQ ID NO: 30507 - DNA, 417 bp, Zea mays
  unsure (1)..(417): unsure at all n locations
  Clone ID: MRT4577_127832C.1
caggagcgtgagctgggattcagactgacaataccgtcctcaggacaaggcacctcagaagccgttgtcatgagcgccgactacttgaccccggtggacggcgagctgctcagcgcgaatgatgtttgcgtccacagtgctcgacataggcacatgttcattgactggagctgcaacctatggaacttcaactaggagatttggaaggatgtagcttcagcaacataaagtgaatcacgtgtcattcgctaggacagcgagtgggaaagcaacattgaaaactgtgagaagcantgccctcaaacacaaagcgtacaaaagaaatcttcagctgcaactatccagagtgataagagaggagaagtcaagggacaaaactgtatgacagaagcggaggattacctgcattacggttag

SEQ ID NO: 30508 - DNA, 343 bp, Zea mays
  Clone ID: MRT4577_127833C.1
ggtgaacacagcatcgtgaagaagaatggttgagctgagtagtactgctttgattgctcaaactgtggaagctgactaacgtacttgggcaacataacaagatataatctagcattgaatcgatatgtgagagacgcgaatagatgacgacagcattccaagcatgggtcagaccaccattgtcgaggtctaggcggaatgtatatttgctgctcatgacattatagaatgtaagaccatacactggagcacgagatgcgctatatatctagcaataaagttcaacttcttcgttttgttaacgagtattgcaacaagcacgccgagccgaccgggccgggcg

SEQ ID NO: 30509 - DNA, 642 bp, Zea mays
  unsure (1)..(642): unsure at all n locations
  Clone ID: MRT4577_127834C.1
cagaacaaaactagctgcatcaagctaacactatatttatatatgtaaagtcacatattagaaccctaaaatcacccgggaaagattatagaaaagctgctagtcttattttttttcctcaaccagactaatttacaaagcaatccaagaggccaacagcagcaggccaggacctcgacagttcttgaggccttccatgggggggctcacttgccccctccaggccctcccagcgtgagcacaacatcgtgcaggtcgctgctgcctcgctccggctcggacttgacggccttcgccgggaacccttgccgcgcgtggtgggcacagtccggcagcacgaagcccgtggcctgcggcagcggcactggccgggcgtggacggggatggcgtgcgccagcagcggccgttgctggggaggcacggcggagctcgtcaggatctggtgatgcaccgccggcctcggagctgtgaccccaggtcccggagcaaacagaacgcctctgaagagctgcccgttcacgacggcggtcacgaggtacccagaatcaaaggctccatcaactgtcccatgaacctctgcgccaataaggtgtggnnnnnnnnnnnnnnnnnnnnnnngcggctgatggtcggaggaaagg

SEQ ID NO: 30510 - DNA, 440 bp, Zea mays
  Clone ID: MRT4577_127835C.1
gggggggggggggggggggggggggggggggggggggggggggggggttttttggtttagaggaccttttagagagtactagaagtcagtgcacgcgcgcataactgggctcctgtaggcgcggcccctttttttttttttttggaaatgaggtagcagtagaactgatcacgagacacaagtaatcctgtacagacctggggttcccaatgggcaccccttattgccactctgtcttaactctgaagtgttgccaatgggcgaacagacccgctcagaccgagagatttgagaatatagacagctcgaatcaaacatacttttacatggagcgagctaaaacttatggtttttatttcactgaactatgccaatacaaacgacccaattgtcaagaaaattgaaaccagtcatggcgcctaggctagttctgactcata

SEQ ID NO: 30511 - DNA, 791 bp, Zea mays
  Clone ID: MRT4577_127836C.1
tcgaggccggccgagaaaaaaaaaaaaaaaaaaaaaaaaaaaaaaaaaaaaaaaaaaaaaaaaaaaaaaaaaaaaaaaaaaccttaaactcggatagatctcagtgcagtgcttccctgttccctccatcaagaaacagcaaagatccagtgcagagagagaagcgccatggcactctgaacaagaaaagaaaagaaagagctagagagagatctcagtcagccagtctctcacaacacaatgccggcaaccaccaagccgatcttgctcccaagggcgtgggcagcagcgccactcctcctcctcctgctgctcgtcctgcacgggagaggaggccactgcgtcggcatggaggcggcggagctggagatggactcggaggcgcaccggcggctgctgtgggaggcgaccacggggcggaggtacatcagctacgacgccctgcggggcgacgtggtgccgtgctccaggaccggggtgccctactacaactgccggatctcgaccaccgccaacccctacacccggggctgcgagagcatcaccaggtgcagggacgcggatccctaggctcttgctttgcttgctccatcgcattgctgcaaatgcttactaaatgaagtgtattttattctgtcttcttttttcttggtcgtccttcctcctttgccgggatatttagtaagtgtagtaaggaagcactaatactaatggatgaatctcgtgtgcaagatgttgatgagcaatgctacagattaccggagagacttcattgagctttcagattctcc

SEQ ID NO: 30512 - DNA, 446 bp, Zea mays
  Clone ID: MRT4577_127837C.1
ccggccgggggaaaagccctggcctcttccgaccagctacccgcgaccgcaactctagcctctagagctctcccctagcgacgccaatcctagcctcaggagctcttccctgagacccggctccatcgtcttctgtgacatcgtccccttctcctcgataagagtgcaaagtggaagcaatgcatgaagtcgacatgaagaagaaaaatgcaacgaactgtatctagtgcagtttaattggtgttacttgatgttggtgtttcgttgcattacagttttatgttatattgactatctgtttgcgtgaatggagatgacattgatggatggattagcttcgttacatattagatggtattcaaattaaactttgtgtgaatcatatttgtttgtgtgaatggagaccaatctgtttctgcaaaaaaaaaaaaaaaaaattcccgtcc

SEQ ID NO: 30513 - DNA, 618 bp, Zea mays
  Clone ID: MRT4577_127838C.1
tcatggtaaaagtaacatttgaaggaaacctcatcctctccccatttgagatattccctcgctcgctcagcaggacgtagcggctgctgtcaacaactggctgtccggcaccgcatttaagcttcaccctcccctctggcctcctccactaaaactcggatagatcttagtgcagtgcttccctgttccctccatcaagaaacagcaaagatccagtgcagagagacagaagcgccatggcactctgaacaagaaaagaaaagaaagagctagagagagatctcactcagccagtctctcacaacacaataccggcaaccaccaagctgatcttgctcccaagggcgtgggcagcagcgccactcctgctgctgctgctcgtcctgcacgggagaggaggccacggcgtcgggatggaggcggcggagctggagatggactcggaggcgcaccgacggctgctgtgggaggcgaccacggggcggaggtacatcagctacgacgccctgcggggcgacgtggtgccgtgctccaggaccgggtggtggcgatgcagcggaggagatcccgggcacatggcccgctccggcaaacctcgaggcgggcggcggcgacgca

SEQ ID NO: 30514 - DNA, 1103 bp, Zea mays
  Clone ID: MRT4577_127839C.1
accctccgatcctgccgggggaatagccgcttctctgaactttcgataagaaaacaatttcagaaaagtcccagttagtacaaaccattcggtcgtggtaaaagtaacatttgaaggaaacctcatcctctccccatttgagatattccctcgctcgctcagcagcaggacgcagcggctgctgtcaacaactggctgtccggcaccgcatttaagcttcaccctcccctccggcctcctccactaaaactcggatagatctcagtgcagtgcttccctgttccctccatcaagaaacagcaaagatccagtgcagagagagaagccccatggcactctgaacaagaaaagaaaagaaagagctagagaaagagagatctcagtcagccagtctctcacaacacaatgccggcaaccaccaagccgatcttgctcccaagggcgtgggcagcagcgccactcctcctcctgctgctgctcgtcctgcacgggagaggaggccactgcgtcggcatggaggcggcggagctggagatggactcggaggcgcaccggcggctgctgtgggaggcgagcacggggcggaggtacatcagctacgacgccctgcggggcgacgtggtgccgtgctccaggaccggggtgccctactacaactgccggatctcgaccaccgccaacccctacacccggggctgcgagagcatcaccaggtgcagggacgcggatccctaggctcttgctttgcttgctccgtcgccttgcaaagggaagtgggtgtggggctgctgctcctcgctccttcgacgctgcagggcggtgttgctgcaaatgcttactaaatgaagtgtattttattctgtcttcttcttttttctttcttcctctttttttttcttggtcgtccttcctcctttgccgggatatttagtaagtgtagtaatgaagcactaatactaatggatgaatctcgtgtgcaagatgttgatgagcaatgctacagattaccggagagacttcattgagctttcagattcttcaaaaaaaatgtttttggggaatatgcaactgatgaggtgatattttttttaagaaaattaacc

SEQ ID NO: 30515 - DNA, 1872 bp, Zea mays
  Clone ID: MRT4577_12783C.1
ttttttttttttttttttatactaaaataaaccgacttctagaatcacccttgtaagtagtagtagatcatggaaacagatttcacataattcaaatatcgtaaataagttccgcacgaattaactaaaaactacagcaaacaagcaacgcaggctattctcaggtggcatacatattggtagcgatgcccttgtcctactcccaggtgctattctctgtaaacatggcgacgtatgtctgtctgataaaacacacactggtttacacgcaagttcaccacaaaactttgcccaccttttaaggtaaaaaaatggcgtgccatccctttttttttttgcttcaaaggctggagcatgcctttattgacgactcacttgtttgctaccacacgatctggattgtgtatccttatgccgttcaagatataaccgccaaaagcattcatttgcatgtgtggatgggtgcgagatggaaggacctggtattcacgtagccagggttcagaaagctgcaatccaatagccatctttgataactgcaagctgtgcatgcactttgcaagaggctcgagatgctggtgatatatagcaaatggggctgaataagacaaaagtggaagcatatcagcaacaagacgctctacttcgtggccaggggcagcaataatcaaactactaaagccatgttccttccaatatttcatcttttctggtgacggtgcttttccaggtttaggaggttttgaagcatttaaggtaccgtcgctgtctttgccacctaatgaagaattctcatcttgaacaagatgctcatccaaagaaggctccgagacctccatatcacttggctgatctgttgataactgtgccttctcatctggcactgctgtgtccacttgctgtgccaaagatgattgtgcatcctcatctacagcaggttctatcatctccccttcagcgctactattgacaacagaaggggtattcccagaactttgcattgaacatagggcactaattggcgcctgaacaatcctgctgaccatatcactgctcaaattgtacattcttataatgtcgatggagctgggtgctgaaccaagatatgtgctgcaaacataccctgtacctcctaaacgttcggctacagctccaacaaactaaaccctttcccaaccatatcaaccacaagcacatctgaatacgcaccaatgtttgccatagacaacaagagagatagtgtgtcaactcgcataaaccctatacgagctggagttttcttgaagtatgtctcacaaatgcttcgagcagaagggcgtcgcaaaagaactttaggcgcatatttcttttgtttctttaacttgtacttctcctgtgagaagacagttttatttccaaatgttgagctgtttgctattaaagcttctacaatctcgtcaccagttgcaccatccctcttcattgcctctatgtcatcgctagataaattttgagctgtattattatcaaccagagacctattgtctctggtttcatcctgcgtttgtccattggcatcatctggcgtgttatgatcacgagatgtggcgtccgcggcggcgcagggaacgagtccgccggcgccgaggcggaatagggagccaaaggggcgtcccacgagcggcttcagtgaacaagtcttgttcccaatcttcaccgtcgcgccgggggtgaggcggaagaaggctaggcggtcgccgtcattgatgtcgaggaggacgctgcagccctcccacgcctcccggcaaatcggtggcggctgcgggtccacaattggtgtgggcgtgaagcgggagtggagttgggatccggccggcctcgaggtacccaatg

SEQ ID NO: 30516 - DNA, 317 bp, Zea mays
  Clone ID: MRT4577_127840C.1
tgaatataccaatttaatgtaaattctcggatcacactcagtttaatacaaagcacaaggtttcgggtgtaacgaactttgggtgacactgacacccaaactggccacgggaggcagaagcccaggcttaacctttgtgactcagtatgatgcccaagaaaacgaaaccttgtgctttgtattaaaccgagtgtgatccgagaatataccaatttaatgtaaattcattcttgttcttactgcggcatcattattaaccgttgtatgcactgtaatgtacagtctttcaaaatactatttattgtgctatatggcat

SEQ ID NO: 30517 - DNA, 289 bp, Zea mays
  unsure (1)..(289): unsure at all n locations
  Clone ID: MRT4577_127841C.1
gcgaccgctacttgaattgctaatcatcgtacatagtaacccaccgcttcaccctgaaagaacattttactatgctgctcctccannctctcctcctctcagtatcagaagacctagcacgattctcgcttaataatctgcccttcgaccataacagccgcgtctccgctcacctctccaccaaagataggcatctccttcttcttctctgctccaacgccctgagctcaagcagcgactactactcctacgtcatctctctcaataactacatgaacacacagtactt

SEQ ID NO: 30518 - DNA, 2501 bp, Zea mays
  unsure (1)..(2501): unsure at all n locations
  Clone ID: MRT4577_127842C.1
ggcggcttttcattcattgttgattgattgatcctcccggccggactcctttgtctcctcgcctcgtgctcgctcgctcccctcgccctggcgaggagggcagcagaaaccctagcggctcaggccgggcgggggttagatgctccaaggttcgagagggaagggtaggttagtggtgcgccatcgactatgggctgcgtcttcggccgggcggctgcgtcgtcctctgcagcgccgaagaagaagtggggcaaggggaggtcgtccccgcagcccgaagcggggtcgccctccgcagtcgccgccaccgacggggacgggaggccgcggcggcggctcgggggccgcagggcgtcgggacccaggcagggttgcgtccccgcggctgccgcggcggagcagctcgccgccggttggccaccgtggctcgtcgcagtcgccggggaggccctccgcggctgggcgccgcgccgcgccgacacgttcgagaaacttaataagataggatcgggcacgtacagcaacgtgtaccgggcgagggacaccgtctctggccggatcgtcgctcttaaaaaggtccgcttcgataacctcgagccagaaagcgtcaagtttatggcccgggaaatactgatcctaaggagactcgaccaccccaacatcatcaaattagagggcttggtcacctccaggatgtcatgcagcctttaccttgtcttcgagtacatggagcatgatcttgctggtcttgcggcaagttgtgatgtcaagttcacgttgcctcagataaaatgttacatacagcagctgttgtcagggcttgagcattgtcatgacaataatgtattgcaccgggatatcaaggggtcaaacttgttgttggataataatgggattcttaagattgcggattttgggctggcaacattctttgatccacgacataaacgaccaatgacgagccgagtggtcacgctatggtaccgtccaccagaattgttacttggtgccactgagtatagtgtaggtgttgatttgtggagtgctggatgcattcttgcagagctcctgtatggaaagcccataatgcctgggcgcactgaggtggaacagttgcacaagattttcaagctatgtggttccccttctgaggagtactggaagaagtctaaattgccacacgcaacaatattcaaacctcaacaaccctataaacgttgcatcagggagacatttaaagattttcctacatcggctctgccattggttgaaactctgcttgcaattgatccagctgagcgacaaactgcctcagctgcattacacagtgattttttttcaaccgagccttatgcttgtaacccttcaagtctgccaacatatccaccaagcaaggagatggatgccaagttaagagacgaggaggctagaagactacgagcggctgcaaaggccaagggagaacagaaaaggactcgaccacgtgatcgatctcggagggctggaccagcaccagaagctaatgcagagattcaagcaaacttagaccagaggcgacgaatgataactcatgcaaatgcaaagagtaaaagtgagaagtttcctcctccgcatcaggatggaggtacgggtaatccgcttggatcctatcatcatatggagcctatgttcgagcaccaggatgcttccttcagtacagtagtccccatagagaaggggacctcacaaacatggtccgggccgttgtttgatccagcagctctcgggcagtcgaggcggaagaagcaaactaccctagatgctaaggctgctgcttactcaaagcagctccaaaaggaaaagggagggatacgagcccgataacaaaatgtcgttttcctggtgagcatgtggagggaccgtgggaaaggttcatcgcctacggatgaattttcttgttttgttcctctggtggttggaaacaggcaacaatgcgctgctgtagggtgaagtcttccggattgtgtacatgtcatgtggtagcgtttccaagtactgtttagatgcttctgaacaagctgccgtcacccggacgggactttaggggtttgagactcgtatttgtgctctttatggcaattcagttgcccatgtgtatatatggagcaattctttcttgtgtatgtacagagacggcggtagctttgatttcttaataatgaatcaagtgtgatggcgaccttcctcacgtaaaaaaaaaaaaaaaaaaaaaaaaaaaaaaaaaaaaaaaaaaaaaaaaaaaaaaaaaaaaaaaaggctcagcttgcataacacagtgatgtatgttcctatcctatctcttctgttttgttagaaagaattttttaggtgcataatcagaaatgttattatgaagcaaagtatggtgctgcaggaaaacgatttangtgtggaaaaaaagtatttgcttaaaaatgttaataactagatatggagcagaactccgttggctaggtgaacat

SEQ ID NO: 30519 - DNA, 204 bp, Zea mays
  Clone ID: MRT4577_127843C.1
acgcgatctgcgacgcgcagcctacgtacaccgtctcgcggaagctgacgtcatgccggttcggggctgacatccggtacccggcgaagcgcgcgcgcgtctggctcggcaccttcgactagacgcccataccttggcccgctcctacaacgtgagcactcggaccgtgcgccggcctatcaccaggaccaactttcccgggct

SEQ ID NO: 30520 - DNA, 176 bp, Zea mays
  Clone ID: MRT4577_127844C.1
gcatggtgccaccacggcaggtagcaggcgcatgcaggtgcgcgtccgtacgtcgtctgtcgtcgcctgccgccgccggaaaagctcgagggtgactaaaggctgctcgcgacggctgaccgcccgcggtcgtttgtcgttgctccaagaactacatgccatatcgctgtatccac

SEQ ID NO: 30521 - DNA, 408 bp, Zea mays
  Clone ID: MRT4577_127845C.1
ctgcacgcgaggaaacatgctggtctaccaagatctgatctccaatgatgagctcctctctgattcatttccctacactgagattgaaaatggtatgctgtgggaggtggaagggaagtgggttgtccaaggagccctcaatgtagatattggtgcaaatccctcagctgaaggtggtgaagatgatgaaggggttgatgaccaggccgtaaaggtggttgatattgttgacaccttccggcttcaggagcaacctgctttcgacaagaagcagtttatggcatacatgaagcggtatgtcaagcacttgacgcctaaacttgatgccgagcagcaggtgctatttaagaagcacattgagggggccattaagtttctgctttcgaagctcagtgatctgcaattttt

SEQ ID NO: 30522 - DNA, 182 bp, Zea mays
  Clone ID: MRT4577_127846C.1
ggggtgggggctttttagaacagagcaacggttagtttcacatccaccattgaaacaaaggttatctttcctccgccagatctcaaaatcctggtttgtacatcaaccttttgtttcccctatccccacggttaggcctattttgcccaaggggccaagattccaagctccattcattctac

SEQ ID NO: 30523 - DNA, 131 bp, Zea mays
  Clone ID: MRT4577_127847C.1
caagaatatgatagcacgcttattcataccgaccatgtagatgattcgcccgctcacccaatgccaacctatatccgagtcgtattacgacgccatcactgaacagtcggtcccacaacaggatgactgcc

SEQ ID NO: 30524 - DNA, 320 bp, Zea mays
  Clone ID: MRT4577_127848C.1
gggcctgaaccccaaagctttattgactcgggggacccgggcgcaacgcaaccaccccttgtcgggtgccccaagggcccgggccgcaaacattagcccaaaacaaggacacggacccggggtccttgcttgcttgccagcaaattaaggaaccaggggggccccgccccccaccaaaccagggacgggccctaataaactgggacccgttgataaatgggctggaactggtctggtctggaccctctccagttgttgctccatttagttcttggggggggagtcgtcgagggcggggaaccttttgggggcccgccccc

SEQ ID NO: 30525 - DNA, 2216 bp, Zea mays
  unsure (1)..(2216): unsure at all n locations
  Clone ID: MRT4577_127849C.1
gccggccgggatcccaagctgttcgccatccatcgcaatggccgccgccgccgccgccgccgccaccgcgctcctcctcctcctgtgcgcggcgtctttcgcgtccgccgcccccgccgaggggtggtgggcctttaccaacaaccactcccaccccgacccaccgttacatatctccatctcacccgcgcgcccacgcgcctccaccacgccatccatcgcaatggccgccgccgccgcgctcctcctcctcctgtgcgccgcgtctctcgcgtccgcagccgccgacgacgggttgacgaccttcaaggtgtacttccacgacgtcgtggcggggacgaacccgacggcggtgcgcatcgcgcaggcggcgtcctccaacacgtcgtccaccaacttcggcgcggtggtggccatcgacgacccgctgacgacgggtcccacgcgcgccgcgggcacggaggtgggccgcgcccagggcacctacacgttcgcggaccagcagacgttcggcctcctcatggtcatgaacttcgtgttcacggccggcgagcacaacggcagcacgctctccatccttggccgcaacgaggtgctcagcgacgtccgcgagatgagcatcgtcggcggcagcggcaagttccgcatggcgcgcgggtacgtgcaggcgcacaccatcgactccggcgccacctccgggaccaccgtcgtccagtacaccgtcaacgtcaaggcctagctacctgttacgtacccttgcttgcgactccgggccgtggcttctcgtacgtccatccatatctccggctgctttgtacacaccttgtctgtcgtctttgagcgggattcggatttgcagagccgaatttactactaaagtttcaaaatttcacagagttgtagggtcgagaattaaatgtgtcgaaaacacgttagcgaccattcttatatagtttttgttggaaaaaaaaaaaaaaaaaagcggccatggcgcccctggcttcctcctccccggtgtaagaaaggaaagcgaaacctctcggcntgttcgctactctatccatcacgagacaaacttccgtaaggtcaccaaacttctcgaacgcgtcccggaggctccgttcggttgtgcggaacgaaagaccgctgacgtacagcctggtggcggcgccatgggaggtattcggcggcggcaggcaggcggtggcagtggacgcgcgctgctgatcgttcgcggaccagcagacgttcggcctcctcatggtcatgaacttcgtgttcacggccggcgagcacaacggcagcacgctctccatccttggccgcaacgaggtgctcagcgacgtccgcgagatgagcatcgtcggcggcagcggcaagttccgcatggcgcgcgggtacgtgcaggcacacaccatcgactccggcgccacctccgggaccaccgtcgtccagtacaccgtcaacgtcaaggcctagctacatcgatctccggctgctttgtacacaccttgtcattcttctgtgttagtactctacatctacatgacaacttgtcgtctttgagatttaatcaaggttacccaaacaaagccttaaggggattcggttcctctgagcacatctactactaaaggttcaaaagcctgcatcaatgtgtgtctcatcacggactttgctggaaccagcaatcaaagtttttttttagcaatatttgggcgcgatccttcagtcttcagctcttcgtttcgcaacctcgacaaagatcactctgccatccaggaacttcccgtgcatcccttccatggcgcccctggcttcctcctctccggtgtaagaaaggaaagcgaaacctctcggtcgcttcgctactctatccatcacgagacaaacttccgtaaggtcaccaaacttctcgaacgcgtcccggaggctccgttcggttgtgcggaacgaaagaccgctgacgtacagcctggtggcggcgccatgggaggtattcggcggcggcaggcaggcggtggcagtggacgcgcgctgctgattgcgaaccccaacggaggaggccgctggaagatgagtgcgcgaggggaaggggcatgccacgatagtgaagcggctgaagccgaagcttgtggaagcagcgacggtgggggcaaagccggcgggagctctcgccatttaaagggtggaaactcggaaggataagcctatgc

SEQ ID NO: 30526 - DNA, 4401 bp, Zea mays
  Clone ID: MRT4577_12784C.1
atgtcgacgacaatgaaatacgatcttccgctgctggatctcgacacgcgtttctcgctgtggcaggtgaagatgcgggcaattctctcgcaatctgatcgcgacctggatgatgccctagatggatttggcaacaaggatgccaggacgtggacagatgaggagaggcgcaaggatcgtaaggcgctcgcacatattcaccttcatctgtctaacaatattctgcaggaggttctggcagagaagactgccgctgctctctggttgaagctggagtcgatctgtatgtcaaaggatctgaccagcaagatgcatgtcaaaatgaagttgttctcccacaagttgcaggaaggaggatccgttctgacgcacatatcggtgtttaaggagatcgtggccgatctgacgtctatggaggtaaagtttgatgatgaagacctagctcttcttctcctgtgttccctccctgcatcgtttagcaattttcgagataccatcctatacagtcgtgatactctaaccgtggctgaagtgtatgaagctttgactgcgaaagaaaaaatgagacagatggttaactcggaagatgctgctggctcgagtggagaagctttgtatgtccgtggccgcactgatcagaaaaagtccaactcaggtggcaaaggaaaggggaagaaccagaggggtcactccaagtcaagggggccatccgatgaattattttgcaaatactgcaagaagacgaaccatgtaattgagaactgttacaaactgcagaacaaggagaagaggaacaaggagaagggtaagactggaggtactgtctctgttgcatccgaaaataattctgataatggtgatgttcttattgcctttgctggttgtgctgctgatgatgcccaatggatcctcgattctgcttgctcatatcatgtttgcactaaaaaatctctgtttagtacctatgaagctgtgcagaacggaggtactcttcggatgggtgataattccccttgcactgttgttggcatgggcaccgtgcagatcaagatgttcgatgggattgtacgcacattgactgaagtacgacatgttccatccatgtccaggaacctcatctctctgagtactctggacacaaagggctacaagtataccgccggtgacggtgtcatgaaggtaacaaaaggctctcttgtggttattaaaggtgatttgaaagctgaaaacttatatgtgcttcgaggtagttctggctctgctaatgctgttgttgcatctgattctgagactactaaaatttggcatatgcgccttggccatatgagtgcacctggtttggcagaattgagcaagagaggccttcttgatggctgccatgctgatactcttgatttctgtgagcactgtgttttcggtaagcataaaagggtaaaattcagttctgctgttcataataccgaaaatattcttgattatgttcatgctgatttgtgggggccgtcacatataccttcacatggtggtgctcgttacatgttgactatcattgatgataattcacgcagagtttggccttattttcttaagcaaaaatcagatgcctttgagtctttcaaggtttggaagactatggttgagaagcagactgagaggaagctgaaggttctgagaactgacaatggtatggagttttgttctggtgattttaactctttctgcaggaaggagggcattgtgaggcaccacactataccatatacacctcagcagaacggtgtggcagagcgtatgaatagaacaataatctccaaggctcggtgtatgctgtccaactcaggtttgagccgcaagttttgggctgaggccgcttccactgcttgtcatttgatcaattgttcaccatccactgctatcgataagaaaactccaattgaggtttggtctggttccccctatgattattctcagttgagagtgtttggttgtactgcatatgcacatgttgataatggtaaacttgagcctagagcaattaagtgtgttttcttgggttatggatctggtgttaaagcatataaattgtggaatcctgatacacagaaggcattttttagtagaaacgttgtgttcaatgaatctgccatgtttccttcggttgtatctaccagtgctactaaccagaattctgagtctatcagtgtgcaggtggagcacggaggggatgttgatgatcatgctccaccatctgctgaacctgctgaaaattctgtttctgaaatttcatcacctgttgtggagtctcatccccagtctcttgctgaaggccgaactaggaggcagatagtacggccccaaagactgattcaagagtgcaatgttgcttttgctttagctgttgctgaagaagttgataatgttcaggaaccattgaattattcagaagctatattgtgtactgatagtgaaaagtggatgggtgctatgcatgaagaaatggagtctcttgataagaatggcacttgggaactagctcggctgccttctggtaaaaaggcaattaagtgcaaatggatcttcaaaagaaaagaaggtatgactccaaacgagcctccgcgctttaaagcaaggctagttgcaaaaggttttagtcagattccaggaattgattactctgatgtctattctcctgttgtcaagcatagttcaattcgtacctttcttagtcttgttgctgtacatgactatgagcttgaacagttagatgtgaaaactgctttcttacatggtgatttggaggaggacatttatatggaccagccagaggggttcattgttcctggaaaagaagactatgtgtgcaggttgaagaagtccttatatggtctgaaacaatctcccagacaatggtataagaggtttgattcatttatgctttctaagggctttcagaggtctcaatatgatagttgtgtttatctaaaatttgttaatggatcacctacatatttgctgctatatgttgatgatatgttgattgctgccaagagcatgaaggaaatcactgctttaaaggcacatcttagtagcgaatttgatatgaaggatctgggtgctgcaaagaaaatccttggcatagagatagtcagggataggaagtctggactgctgtacttgagccagaagaattatattgagaaggtccttcgtcgtttcaacatgcaaaatactaaacctgtgagtactccgttggctcctcattttaaattgtctgctaaacagtgtgctgaaactgatgctgagcttgaatatatgtcaaaagttccatactctagtgctgttgggtcactcatgtatgctatggtttgttctcgtcctgatttgtctcatgctatgagcgttgttgctagatacatgtctaatcctggtaaagagcattggaaagctgttcagtggattttcatatatctacgtggttcttctagtgcttgtttatgttttggtaaatctggagatggtctgattggctatgttgattcagattatggtggtgatttagacaggaggagatctctttcaggttatgtctttactattggagattgtgctgtgagttggaaagctcgtttacaggatactgttgctttgtctaccacagaagctgagtatatggcaattgcagaagttactaaggaagccttatggttgaaaggtatatattcagagctatgtggaattaagtcttgcattaccatctattgtgatagccagagtgccattcatctcaccaaagatcagatgattactgagaaatccaaacatattgatattcgctatcacttcattcgtgatatcattgaaaaagggttggtgaaggtatgcaagatcagtactgataataatccagctgatatgatgacgaagcatgtttctgttgctaagtttgagctatgctcaaacttagttgagatcaatgacgggaattggatcaggtcgttgagaggcaagattacctccacggtgcagatcgaggaattcgtctccctctggtttagactccatgatttccacctccaaccacaggtgccggactccattacctggaaatggaaccccgacggtgtcttcacgattctagtttgggagggcttaagcctcctggcccaggctgaccctactcacttctccagcataaaagactggtgggaagctacatcctccccgctcccaaagaaccaaaagcgtgacttcaacggcctcatgatatacaccctgtggaacatctggaaggagagaaaccggaggatattcgaaaacagcgccctcacccctatccaattagccttgaagattaaagaggacgtgtgcactttcaagagagccatgttcctccagtattaa

SEQ ID NO: 30527 - DNA, 294 bp, Zea mays
  Clone ID: MRT4577_127850C.1
caatataaatgcgatctaatttcagctcgtatccttcttgtatccaacatgttggtgcttatggactacaataaacactatctaattatgcttcattaaacaccaattttctcgcacaaaacgttacattcctcacacagaacattacaatttaacagctcagtgtttaaactcatccctcatttagcattagcatctggaatatgtgtgcatacagcttgaactacacctagttaatcctctttgtttggatcctcagaagcgacaacccatgccttctaatttctcataatc

SEQ ID NO: 30528 - DNA, 383 bp, Zea mays
  Clone ID: MRT4577_127851C.1
aaacctcattgattggataatcagagcacagcatgtgccaactgacaactactaattgcaccgtatgctcctgatgtaaatcggagctactctatcctactatcacaaggtctttcggtgacttcagcatgtcctgcatcatcactgctatttcgcatacctcaagtacctactcgtaagtgctctccctccccctgaatctggtctattctccatacaatcgcaaatcacgcggtgctagcaagtaagaattgctcactgtctcacatgtttgatattcttctgtactatttcaacctttagttgcattcatatgcttaagtctgattcttcttctgtataatcctatctttgacagtactagaaaattattctcatgatat

SEQ ID NO: 30529 - DNA, 1058 bp, Zea mays
  Clone ID: MRT4577_127852C.1
cgtccggagaaaaactcgccggggtgcaggatgtgaggaacatgatggtgagttggcgacctccacctaccggaccaactacgacagacagacgacctgcccccgagaccgaccgtatgccgataccattgtcccatccccgccggtgcaggtggctcttaatttaccaacaaccactcccgcccggacccaccgttacatatctccatctcacccgcgcgcccacgcgcctccaccacgccatccatcgcaatggccgccgccgccgccgccgccgccaccgcgctcctcctcctcctgtgcgccgcgtctttcgcgtccgcagccgccgacgacgggttgacgaccttcaaggtgtacttccacgacgtcgtggcggggacgaacccgacggcggtgcgcatcgcgcaggcggcgtcctccaacacgtcgtccaccaacttcggcgcggtggtggccatcgacgacccgctgacgacgggtcccacgcgcgccgcgggcacggaggtgggccgcgcccagggcacctacacgttcgcggaccagcagacgttcgggctcctcatggtcatgaacttcgtgttcacggccggcgagcacaacggcagcacgctctccatccttggccgcaacgaggtgctcagcgacgtccgcgagatgagcatcgtcggcggcagcggcaagttccgcatggcgcgcgggtacgtgcaggcacacaccatcgactccggcgccacctccgggaccaccgtcgtccagtacaccgtcaacgtcaaggcctagctacctattacgtacccttgcttgcgactccgggccgtggtttctcgtacgtccatccacatctccggctgctttgtacacaccttgtctgtcgtctttgaggccttgtttgggtaagaagggattgaagtggattaaagtgtattttagggattgaaagggaaattagttcatattacacttcaatacaccttataccccctcaaaaaaaaacaaaaaaaaaaaaaaagggcatccgccaccgccttgtttgggtaaaaaaaggattgaagtgg

SEQ ID NO: 30530 - DNA, 1207 bp, Zea mays
  unsure (1)..(1207): unsure at all n locations
  Clone ID: MRT4577_127853C.1
gccggccggttccggcgaacgactctcggcaacggatatctcggctctcgcatcgatgaagaacgtagcaaaatgcgatacctggtgtgaattgcagaatcccgcgaaccatcgagtttttgaacgcaagttgcgcccgaagccttctggcggagggcacgtctgcctgggcgtcacgccacttacctggacggggtcgacgggggatcaagaagcctcatggcctaggccagtggctcgcattgcacatggtgggtgcgccggcttaccatctccccaagtgggagagtggacgtcataatttgtggtagagggggtacgcgttcgcgcggcccctgctgttttttaaaaaaaaaaaaaaaaaaaactaaagggttgaaatcaggaaacatatctccatctcacccgcgcgcccacgcacctccaccacgccatccatcgcaatggccgccgccgccgccgccaccgcgctcctcctcctcctgtgcgccgcatctctcgcgtccgcagccgccgacgacgggttgacgaccttcaaggtgtacttccacgacgtcgtggcggggacgaacccgacggcggtgcgcatcgcgcaggcggcgtcctccaacacgtcgtccaccagcttcggcgcagtggtggccatcgacgacccgctgacgacgggtcccacgcgcgcccgcgggcacgggaggtgggccgcgcccagggcacctacacgttcgcggaccagcagacgttcggcctcctcatggtcatgaacttcgtgttcacggccggcgagcacaacggcagcacgctctccatccttggccgcaacgaggtgctcagcgacgtccgcgagatgagcatcgtcggcggcagcggcaagttccgcatggcgcgcgggtacgtgcaggcacacaccatcgactccggcgccacctccgggaccaccgtcgtccagtacaccgtcaacgtcaaggcctagctacatcgatctccggctgctttgtacacaccttgtcattcttctgtgttagtactctacatctacatgacaacttgtcgtctttgagcgggattcggatttacagagcccaattactactaaagtttcaaaatttcacagagatatagggtcgagaattaaatgtgtcgaanacacgttagcgcccatatttttaaaaaaaaaaaaaaaaaaaaaaagcggccctcgagctccagc

SEQ ID NO: 30531 - DNA, 1148 bp, Zea mays
  Clone ID: MRT4577_127854C.1
attgggtacctcgagggccggccgggagcaagtattgacagactgagagctctttcttgattctatggggttacatatctccatctcacccgcgcgcccacgcacctccaccacgccatccatcgcaatggccgccgccgccgccgccaccgcgctcctcctcctcctgtgcgccgcatctctcgcgtccgcagccgccgacgacgggttgacgaccttcaaggtgtacttccacgacgtcgtggcggggacgaacccgacggcggtgcgcatcgcgcaggcggcgtcctccaacacgtcgtccaccagcttcggcgcagtggtggccatcgacgacccgctgacgacgggtcccacgcgcgccgcgggcacggaggtctcgagcgcccaccgggactacacgttaaaagacaaaaaaaaaaaaaaaaaactaaaaaaaaaaaagcctccaccacgccatcgacgacccgctgacgacgggtcccacgcgcgccgcgggcacggaggtgggccgcgcccagggcacctacacgttcgcggaccagcagacgttcgggctcctcatggtcatgaacttcgtgttcacggccggcgagcacaacggcagcacgctctccatccttggccgcaacgaggtgctcagcgacgtccgcgagatgagcatcgtcggcggcagcggcaagttccgcatggcgcgcgggtacgtgcaggcacacaccatcgactccggcgccacctccgggaccaccgtcgtccagtacaccgtcaacgccaaggcctagctacctattacgtacccttgcttgcgactccgggccgtggtttctcgtacgtccatccacatctccggctgctttgtacacaccttgtctgtcgtctttgaggccttgtttgggtaagaagggattgaagtggattaaagtgtattttagggattgaaagggaaattagttcatattacacttcaatacaccttataccacctcaatccactccaatccaagattacccaaacatgccctgagcgggattcggatctgcagagccgaattagtactaaagtttcaaaatttcacagagttgtagggtcgagaattaaatgtgtcgaaaacacgttagcgaccaaaaaaaaaaaaaaaaaagcggcc

SEQ ID NO: 30532 - DNA, 246 bp, Zea mays
  Clone ID: MRT4577_127855C.1
tgttgctggattttctgatgcactcaatggaggatatgaatcatggggatccagaaggcaaagaagacctttccaaaaagtggtccccatgattcatatcctccattgagtgcatcatggggaccactttttggaaaggtctactttgccttctgggtcattttccatctctacccattcctcaagggtctcataggtcgacacggccgaactccaaccattgtcattctgtagtcagtgcagttg

SEQ ID NO: 30533 - DNA, 453 bp, Zea mays
  Clone ID: MRT4577_127856C.1
cgcgtacagaagctaggaattcggctcgaggaccaaatcagttgccttttttcggccccaggccctggcccataacggtctgtggcatgtataaccggtgggcttcgctcccccggaggaagcccaatcagggacttcagcaagctatcctccgggttgtgacgagccacacagtgagtaatggcgcaggacgatccgggtgtttctgctcagtggctgcacaaacacttaaggatgcctgatgttcaagtaaacaagcaaaaccgtctagacagcatgcacaaatacaccttcccagacactaggacaaacgcgtcgcttcatggaccaagacggttcaaagaattgctccataaaaccgctgcgatctaggctaaggctgctggctggaccatgcccggggcgaacagggatccatggggaggattttgtgggggacagaaccctggatct

SEQ ID NO: 30534 - DNA, 176 bp, Zea mays
  Clone ID: MRT4577_127857C.1
atacacccagccacagtaggatgacgttgagtacacggttcaaccctggcgcctgcacatacaaacgaaggtttataaaggccatcaaaactcaccaggtgcttgagcgcactaaataaaagaaggctgaaagaaaccaggaaggctacttttccttacacagtaaggagctccat

SEQ ID NO: 30535 - DNA, 273 bp, Zea mays
  Clone ID: MRT4577_127858C.1
attcggctcgagggagaacaaacgaaaggtttttttggtaggctaactgtgttgctctgtcgcaactcgctcggagacacgtagatatcgttgcgaaatcgcgcgcgagagagactcgatgcgaatctgaaccagcactcgggccgacaaagtcgatcagtgttacgtacacacttatgccatattgatcagtgagataatgcagccttgagtaagaaacctgctgcgaggggaaataacaactaacagcagaggaacgaggggccgcccact

SEQ ID NO: 30536 - DNA, 562 bp, Zea mays
  Clone ID: MRT4577_127859C.1
tttggggtttttttttttttttttttttttacggagcacctctcggggggtctacaaaaactcagctcatgctatagttgagttgcagcgggaggggggactcctcacaccattatgggacacgtctttctgcgccacgggcattgggggggaggaaaaatgcgacatgcgggggtctgcggggctaggggggggcggccatcggggctgcggccctgtggcaagcgacccttgggtgcccgggacaatgtcatcgacctggggaacacccatcctctcaagggggggagcgtacggggtgggcacatcagctccaggaatcctgtcgagtggggcgtcaagatactcaaaggtgtgctctacaacagacatgcgtatttccgcgccaatcccatgtggaggggagccttcttctacggggaccaatctatggggtttcctcacagaggcgttaataggagctctatccagcgggctaatggagcgaagattgagtacctcgggactgagaccttccttgggcagtatatcagcgggctgagaggggtatcccaccattttg

SEQ ID NO: 30537 - DNA, 679 bp, Zea mays
  Clone ID: MRT4577_12785C.1
tcccttctcctccttctcgcccgcgtgttgggataggagccatggcggaccagctcaccgacgaccagatcgccgagttcaaggaggccttcagcctcttcgacaaggatggagacggctgcatcaccaccaaggaacttggaactgtgatgcgctcgctggggcagaaccccactgaggcagagcttcaggatatgatcaatgaagtggatgctgatggcaatggaacgattgactttcctgagttccttaacctgatggcacgtaagatgaaagacaccgactccgaggaggagcttaaggaggctttccgtgtgtttgacaaggaccagaatggtttcatctcggcagctgaactccgccatgtcatgaccaaccttggtgagaagctgacagacgaggaggtggatgagatgatccgtgaggctgatgtcgatggtgatggccagatcaattacgaagagtttgtgaaggtgatgatggccaagtgagctgccatactaggctagttctatctcgatgttagcagctagtttagccttgaaaactgacagcacttggtactactgttaagtccagtgaatgaacatattgctcgctcttcctttcttctcagggatgttgagaatttcgtttggattttcctgcagttgtattacctttgtacaatgtagctttc

SEQ ID NO: 30538 - DNA, 349 bp, Zea mays
  Clone ID: MRT4577_127860C.1
cactctcttccctccctctcggagtgtaggagtgagaagagagggagccagtccagcgtccaggcagccggacgcccggaccaacaccaccccgactcccccttcccccgacttaccggccctacctctaactctgccttacccacggtcccacgcacgttcacaagtctcgtcgtcgccgcaatggaatccgtcggtgacggtgactaccagctgcaccgcctcaagttcggcaagatgatctacttcgaggactccggcggctccagcagctgacccatccactgttgtggcagctcgcccgcgctttcagcgactcattagccgtctctcgtcggccgcttcgcct

SEQ ID NO: 30539 - DNA, 254 bp, Zea mays
  Clone ID: MRT4577_127861C.1
tcttgtttctaatgccaaaggacccaaatccgtttgggtacctaaagttaagaactaagtttcttttgtaggttcatgcatccattgtctcaagtaggattctcgttttcactatcactttctacattactgaatagactggggtatcattcttttactccttttatttttgcttttatgctgcggtaaatttgatggtattctaataattttagtatatgtaagtatggtttgcagttgtatatattattagt

SEQ ID NO: 30540 - DNA, 638 bp, Zea mays
  Clone ID: MRT4577_127862C.1
tcacacgcccatcagatcacacaggcaaagaggagagagagagagaggagggtgggtgaggaggaagatgatgagagatatatcctactaaactatccatccatccatcaatcaggtagcccggcagcaatcgcgtgccgcctttccactcacgtacaccaccaccaccaccacctctcagcacagcagtcggctcggttcgttcgttgccgcgtcaaatcggggcaagaagccagcagctagccagccccctgtcgcagtgttgcttcgcgtgccctgctgttgcttgcaccgcgcacgtacgtacctggagcaagctgcggtcgattgatcgaccggtggttcgctgtcgccgcggtcggcatgtcgtcctcgtcctcgtcctcctcggccgccacggtgttcccgccgtccccgcagctgccgccgcctctcctggtggagaacctgccgccgctgcatcagcttacgccgccggtagccgcggcggccgcgccggcctccgagcagctctgctacgtgcactgccacttctgcgacaccgtcctcgtcgtgagcgtgcctacgagcagcctgttcaagacggtgacgggacgatgcggccactgcagcagcttgctcaccgtcaacatgagggg

SEQ ID NO: 30541 - DNA, 535 bp, Zea mays
  Clone ID: MRT4577_127863C.1
taaaaaaaaaaaaaaaaaaaaaaaaaaaaaaaaaaaaaaaaaaaaaaaaaaaaaaaaaaaaaaaaaaaaaaaaaaaaaaaaaaaaaaaaaaaaaaaaaaaaaaaaaaaaaaaagtttttttctttgccgggggggccctttaaaaagggctattttttgcaaaatttcaataaaattgcggggccgtttgaacttccttttaaagggccaaattccccttatagggagtttttttaaaattaattggccgggtttttaaaacgtctggattggaaaaaccttgggtttaccaaatttaattcctttgaaaaaaatcccttttttcccagttggcttattaccaaaaaggcccgaaaaaatcgcctttccaaaaatttgcccaacctaaatgcgaaatgaaccccccttttaagggccaattaaccgcgggggttgtggtgtttaccccaaggggaacctttaaatttgccagcgccttaacccccgttcttttggttttttccctttcttttttggcacgtttggcggtttttcc

SEQ ID NO: 30542 - DNA, 244 bp, Zea mays
  Clone ID: MRT4577_127864C.1
ggggggaacaaaagttggtttttgggaacaaataacaccctggatgggctttccacccccaatcgacggaaggggggaaaaacccctttgtattttcccccagctatataaacccatgtcgggagccgggggggggaactagaaaccacccgaaatgggggcaggaaacaaaaaaaaattcatgggttggcaagaccagggttggtggccacccacactttgttacacaccccccacccatgtc

SEQ ID NO: 30543 - DNA, 1635 bp, Zea mays
  unsure (1)..(1635): unsure at all n locations
  Clone ID: MRT4577_127865C.1
acatcggccgcgacgccctcgtgcccgtcctcggctatctctacaccggccgcctcaagcccccggcgcaggacgccaccgtctgcatggacgacgcgtgcggccacgggacttgccgcccggccatagatttcgtcgtcgagtccatgtacgcggcgtctggcttccagatctcggagcttgcctccctcttccagcgtcgcctctctgacttcgtttgcgaagcgctggacgaggacgtggtgccgattattcatgtcgcttccacctgcgatctccaggacctgctcaatctgtgtattcagagggtcgcagtctccgctctcgatagccgctacctggacaaggagcttccggctgacatatacaacaagatcaaggagatccgccgccaaccagagaacgccattattctggaccctgagcatgacaagagggtcaggaacatcctcaaggccttggattccgacgacgtcgatctcgtcggcttgctgttgaaggaatcgacggtgaccttggacgatgcattcgcgatacactatgctgcagcctactgtgagcccaaggtgtttgcagagctgctcaaactggactctgctaacgtgaacctgaagaacagcggtgggtatacgccgctgcacatagcttgcatgaggagagagccggacatcattctttcgctggtggagaggggagcctgtgtgctggagaggaccctggatgggcgcgatgctcttactatctgcaagagactgacaagagagaaagactgcaataggaagttggacaagtacgaggagaaaagtaaggcttacttgtgtatcgacattttggagcaagaactcaagaggaaatccttcgttttggaccccatctctatctctatagaggagtcgattgccacgcctttgctggtcgataattttcacatgaggctcataaacttggaaaacagagttgcgtttgctcggatattcttcccttctgaagccaagcttgtcatgcgcatcgcacaagccgattcaacccaagagtttgccggcatcaccaacttcagcagactcaaggaagttgatctaaacgaaaccccaacgatgcagaataggaggcttcgcgaacgccttgatgccttaacaaagacagttgagctagggagacgatacttcccacactgttcggacgttctggataagttcctcaacgaagaatccactgatccgatcttccttgagactgggaccccggaggatcagcaagtcaagaggatgcgtttctctgagctcagagaggacgtgcgcaaggcgttcacgaaagataaggcagcagtggctgcaatagcttcctcggcgtcctcgtcttcgtctccgaggtgcagacgacccaataggaaatcacggtgatgtcagtctgttcaggacacctgcactgggttgtgtgtgttttgacatgtaacactgtttcagtagataatgctgattgtcagatttgctgccgctctacagaagattaagcgaccgtctgtttcaagaattattcagacagttacttgtgattctttcaagcagcagttacaaaaaaaaaaaaaaaaaaaaaaaaaaaaaaaaaaaaaaaaaaaaaaaaaaaaaaaannnnnna

SEQ ID NO: 30544 - DNA, 174 bp, Zea mays
  Clone ID: MRT4577_127866C.1
agcttgcgcatcactaactaatttaacacctttaggctctggtcaacagatcgtacatataattatgcaaaacactgtttatgctatttatataatgaaatttaaaatagaaagttggataggaggttatataaaaaaaaaaggctgctatagattggcttacaaatggaaggg

SEQ ID NO: 30545 - DNA, 279 bp, Zea mays
  Clone ID: MRT4577_127867C.1
cttttatcttcttttttttttatttttttttttttccatatgaaccgaaacaacatatatccatggtcgggaaacaggataggaacggtggtctaatcaagcatatactctcaaaaaaaaaaggataagaatcgaacatgattgctttagccgatcgacgtcagattcactgctaatatgtccaaagacacctgtcaggacacgtcactatatccaggtcctcaactatgcagcactcaaactcaatcaaatcagccggaagcagttagacccttttca

SEQ ID NO: 30546 - DNA, 284 bp, Zea mays
  unsure (1)..(284): unsure at all n locations
  Clone ID: MRT4577_127868C.1
acccattcgtacggaaagttatgcaggacctaaagccaggattcnatcacggnaaggccananagnnctgggggggtgaatttaaatttaattttgctcataaaaccttattccctactgaatgttgtcattaaggcactcatgctctattagatcataaactacgtccattctctttatcatcatattaatgtttagcgaatgtcccacttacatatggttacataacacattcttatctctatattctatttttaaattttttctttacttattattaacac

SEQ ID NO: 30547 - DNA, 433 bp, Zea mays
  Clone ID: MRT4577_127869C.1
aaaaaaaaaacttttgatggttttatcctttttttttcccccccaaaggggagaggggggcctaaatcccttttttttgctagctaggaaaaaacattgccccggttccccttttaataaataaataaatttttttttttttccaaaaaccctccctttaccaacccttctttgtttaaacaccaaatttttttgctttaatcctaatttcctttgaagcctaaccttaatccataaacctgaacacaggtgcctccaaataatcctttgaaactgaaacctccttttgttcatccccccattgggccccccttttaaccccacccccccccccatttttaagcccgtccaccaccaccctttttttaaaaaacttttttgaaaaggggggccatttaatcatggccccccctccccaaaccccttttaattt

SEQ ID NO: 30548 - DNA, 307 bp, Zea mays
  Clone ID: MRT4577_12786C.1
aacgcatacaaaacagaagatgctttgacaataatgatcataaaaaaataacacacatttaaattattcaaactggaccatatagacgggactatatggttgggctgatttttaaaatgttataacgagtccgaaagtgctaccttatgcttgaagcgctgcagatttttaatactaatcgagatgaaacaacattgactgtacgaattaaaacgatgattatgtagccttcgcatctatgcatttatgttcaaataatagggaagattctatttgtatttacacacattgctgtacgactaataga

SEQ ID NO: 30549 - DNA, 2494 bp, Zea mays
  Clone ID: MRT4577_127870C.1
acggcatcatctccaaactcccgaggggggacatcaccgctgctgagcacgcccgccgcctgcccttcctcctcccacccgtgccgcagctttcgattcctgcccgcctcattgctacctggtcgggccgcggaattaatgtcgcgcggaggaaatccgcaggtaaacaagtctagctgaagtgacgattgccagcattgttcgaccgtgcggcttctgtttggctggaaccgtgatggatccagaaaaacaaaatgagatgagcctgatcgacaagagagaactagtatacgaagttgcaagatggcctcaaggtgccatggagattcttcggtgctggacccgcagggaacttcttgagcttatttgtgttgagttgggcaaagagaggaagtataccaatgtcccaaaagctaagatgattgcttacctattgaaattagtttcacggaatagtggaaagaatggacaactcaagaatgataatccgaatgttatgttattagggcaggataacaaagatgaaatacaaatgaaggaatctgatgaacaatcacgaccactcaaaactgcaaactctgactcatcaataagcagagaggcttgtgccggtagttcagtggtgtgcagcaatgttgcatgccaagccacaccaaatgcaggagataaatattgcaaacgttgctcttgctgcatttgcaataaatacgatgataacaaagaccctagtttgtggttggtttgcagctctgataatccatacagtggttgttcatgtggtgtctcttgtcacctaaactgtgctctaaagaataaaagggctggcattgtcaagaatgggtgcaacaagttagactgtagtttctactgtgttagttgtgggaaaatcaactggctaatgaggtgtttgcagaaacaacttgcaattgctagggaggcaagaagagttgatgtgctttgtgagcggttgtcattgagccataaaataatacaagggtctgaacgttacaaggaaatagcgagcataatcagctcagctgtgaaaacacttgaaatagaagttggtagtgcattggatcaggtctctgtgatcacggggcgtggcatcgtgaaccggcttacttgtggtgctgaagttcagaagctttgttcaagtacattagaaattgtagactctaaagtggataacatcttggagttcgagtccaataatagtccaaaactcctaggtcctcagccccaaatcctttttcatgagatcactccattttctgtggttattgtgttgaactatcagcatgacatcggtaaggagcagattgatggttccaaaatttggcaccgaagtgccagggtttgcaactattcatcagagcccacatgccacatactgaggccaaacactaggagcctggtttctggtctgagcccttcaactgaatacttcttcaaggttttgccttttagcagcacacatgggtttactgagtgggagacaaaatgcagcacacgcagcctggaccatggcagcagccagtgctcaactcagaactctgagagcatgtgcctcaaagacgattcaatgcagcatcacaaaaaggatttgaatgtgcagaatcaccagagaaccattcaatatgattcacctaagggttctacaaattcaagtgagaacaatttatcatgtgatcggtattccaagcgggctaaggttgcaaggctagatggtgcaagcgacaacgatgaaagccagttgccgccaacttctgaagttttaccatttgcaagctccaactcttctccttccgaagctccaagtaaacctgacttgcttattggcaccccagattcggcctccaagaactatgtggagcagcagtacgagtactgcgtgagggtggtcaggtggctggagcatgaagggcacatggacaatgacttccgtgtaaagttcctcacttggttcagcctgaaggcaacaacacaggacaggcgaatcgtgggcgcctttgtagatgttctcatcggtgatcctgcaagcttggttggccaactggttgatgcattcaaggatgccatctgtatcaaggagaagccctctcaagcacaacagaaagatgcatgctgcaaggttgcatctgaattgtgtcgagacagacattgggcacttgagataaacttttaaggttataaaagacgataaaatgctgtagatgcttcattcggcattcaggtccatctgatctctcatttatttattccaattcagtcgatacgcggactattgatccatgaaggcaatcgtggtggaaccatgtgctgatgagacatggttcatggaccggttgagtttaggtttcaactagtgaagtagttggagtttgttagcagacaagcaattgtatgcatgtggaatgctatcttggatctgcaagctaactaatcatatcatgactttggtagatgtttattgttattagttgatagttgactc

SEQ ID NO: 30550 - DNA, 526 bp, Zea mays
  Clone ID: MRT4577_127871C.1
gtttgagcaagaagaaactttaaaacttgatccaggacgtcgctaagctgctggtgatcgagaacggcaaaattcaagctggatgctcagataatgaagattaggcactctctgcctatatgttggtctctgaagttgtgtctgttcttttattggctgttatcacctgcccaagtttgttctcgtagactttgtttgcctttgattcctgcgtgagcttttgggtagttgctctggtacgttgttctggtggtgggctttgcccgttggacttggggtccctttgccccgtgtgttggctccctcctaaatcggggtatgctttcgccttgtggcaaacttcgcgcttttagctgcaatattttgttagaggttttctgattgctgggttggtaacctttattgaacaataatgtatttctgttatgaaaataatagaaatggagatcttctcgtggcaaaaaaatgttgagacttaaacaatgaaatggaagaggacatttaccacctcagtttttacaaatag

SEQ ID NO: 30551 - DNA, 713 bp, Zea mays
  Clone ID: MRT4577_127872C.1
gccggccggttctcgtgtctcaaaagcatagcgcaccaccacgggccacggcaatacggcatcatctccaaactcccgaggggggaccatcaccgctgctgagcacgcccgccgcctgcccttcctcctcccacccgtgccgcagctttcgattcctgcccgcctcattgctacctggtcgggccgcggaattaatgtcgcgcggaggaaatccggtaagctccggcccgattttcaactctcccctccctcatcctcgattggggttgagaaattgaatcaaaccccccacacccacccacccaaaaaagtcgcccttcctcggacgagatccccccaatcagttcttattgtggccgatagattgattgcctcacttgccttccgctcgcttttggggtgctaacctaatcggtgaccctccttgtgtgctcggattgggttctcgttctcatcagcattgacctcagcggctttcttttggacaatgctgctgttttactgcttgtttctaccatctacggccgtgtaggtgtgtccgacacgccacaaaaacttttcgttatgttcagcaggtaaacaagtctagctgaagtgacgattgccagcattgttcgaccgtgcggcttctgtttggctggaaccgtgatggatccagaaaaacaaaatgagatgagcctgatcgacaagagagaactagtatacgaagttgc

SEQ ID NO: 30552 - DNA, 637 bp, Zea mays
  Clone ID: MRT4577_127873C.1
ggcacatggacaatgacttccgtgtaaagttcctcacttggttcagctgaaaggcaacaacacaggacaggcgaatcgtgggcgcctttgtagatgttctcatcggtgatcctgcaagcttggttggccaactggttgatgcattcaaggatgccatctgtatcaaggagaagccctctcaagcacaacagaaagatgcatgctgcaaggtttggcactagaaaccttcataactgttctccatcgctgtgtgacgtaagtttttctggtgactgaaggatgaaatattgaagttatcacctagcaggttgcatctgaattgtgtcgagacagacattgggcacttgagataaacttttaaggttataaaagacgataaaatgctgtagatgcttcattcggcattcaggtccatctgatctctcatttatttattccaattcagtcgatacgcggactattgatccatgaaggcaatcgtggtggaaccatgtgctgatgagacatggttcatggaccggttgagtttaggtttcaactagtgaagtagttggagtttgttagcagacaagcaattgtatgcatgtggaatgctatcttggatctgcaagctaactaatcatatcatgactttggt

SEQ ID NO: 30553 - DNA, 333 bp, Zea mays
  Clone ID: MRT4577_127874C.1
atcattattatgcttactccaaacaaaacagccttgcgacaactgttgaaaagggtaaatcattacatgatggccacaaccacaaacacgcaagagctgaaagactactcccagaccaggtctctatattaagaacacatcggggctttctggaagacggacaggcgcacaagaggggcatgtgatcttagggcaccattggcaccactgatattggcatacttagatttgaagaggaccttgctcacctcgtttgcgagctatatgatcgagtcatgtcccaggctaatgctggctaaagccttatccattgagaacaggtaatccctatta

SEQ ID NO: 30554 - DNA, 1120 bp, Zea mays
  Clone ID: MRT4577_127875C.1
ccggccgggattccgcctcatgcccgccgaccgtttgggtcgctagacggtcgccacgccagcggtccagcgttggcatccgtcctgcaagcctgcaacccaaccttgaaccttgcctgttcttcttcgatttattagcccagcgttctccctctctcgtgggcgtggcgacgacttggaggccatcgctgccgccctacgccaggtgcccagatcatctgcggccccttcgccggcgacgaccaccatccatcagaaataggatcaagcgcttgaacttacagcgagatggaaaatgatagaaggcaacttggtcagatcgatccaagaagagcccgctttccttgctgcatagtatggactccaataccattcatcacttggttggtgccctttatcggtcacattggcatctgcagagaagacggtgtaattctggacttctctggtccacattttgtatcagttgacaattttgcattcggagctgttgcacgctacattcaagtaaactgcgatgagtgctataagcttattgaacctgaaggagatgccacgtgggacggcgcgctgaagaaaggcacgcaggagttccaaaacaggaactacaacctgttcacctgcaactgccactcctttgtcgcaaacaatctgaacaggctgttttattccggccacgacgaatggaatgtggtcagcttggctgctgtgatgttcttacgaggccgctgggtgagcacggcatcggtggtgaagaccttattgccatttgcagttgtgctttccatcggtaccttccttggcggcacgaccttcctgaccggccttcttgctttcgccgctgcgatgactgtctggttccttgtgggcacctactgcatcaaaggtctcatagagttgtgattagagtatgttagactcgttgtagggggttcaagggtggcatatttttaagagttcaagcgtggcacatttttatttgtattgcattcctgtataatggattcttgatgttattcatgcacctatatgttccaaattccgaatgaattgatgcacttgtctgttgattcccttcaaaaaaaaaaaaaaaaagcggccctcgcgatctagaactagt

SEQ ID NO: 30555 - DNA, 2683 bp, Zea mays
  Clone ID: MRT4577_127876C.1
acccgtgcccccgtcccctcgtccccgtctcggtctcaaaagcctcgcacaccagtgcaccaccaccacgggccacggcaccatctccagactcccgaggggaccatcaccgccgcctgcccttccttctcccacctgcaccgccgcctccaattcccgcccgccccactgccattgtgcgcccccggaatggcgtcacgcggaggagatccggtaaaccaactctagctgaagtgacgagtggcagcattgttcaaccgtgcggcttctgcttggctggaattgtgatggatccagaaaaacaaaatgaaatgagcttgatggacaagagacaactagtatacgaagttgcaagatggccgcaaggtgccgtggagattcttaagtgctggactcgaagggaacttcttgagcttatctgtgttgagttgggcaaagagaggaagtataccaatgtcccaaaagctaagatgatcgcttatctcttgaaattagtttcacgaaagagtggaaagaatgggcaactcaaggatgataatgcaaatgttatgttattagagcaggataacaaagatgaaacacaaatgaaggaatctgaggaacaagaacaatcacgaccactcaaaactgcaaactctgactcatcaatacgtagagaggctcatgcctgttgttcagtggtgtgcagcaatgttgcatgccaagccacacggaatgcaggagataattattgcaaacgttgctcttgctgcatttgcaataaatatgatgataacaaagaccctagcttgtggttggtttgcagctctgataatccatacagtggttgttcatgtggtgtctcttgtcacctaaactgtgctctaaagaataaaaaggctggcattgtcaataatggctgcaacaagttagactgtagtttctactgtgttagctgtgggaaaatcaactggctaatgaggagtttgcagaaacaacttgcaattgctagggaggcaagaagagttgatgtgctttgtgagaggctgtcattgagccataaaatggtaaaaggatctgaacgttataaggaaataacgagcataatcagctcagctgcgaaaacacttgaaaaagaagttggtggtgcattagatcaggtttctgcgatcacggggcgtggcattgttaaccggcttacttgtggtgctgaagttcagaagctttgttcaagtgcattagaaattgtagactctacagtggatagcatcttggagttcgagtcaaataatagtccaaaactcttaggtccccagccccaaatcctttttgatgagatcactccattttctgtggtaattgtgttgaactatcaggatagcatcggtaaggagcaggttgatggttccaaagtttggcaccgaagtgccaaggtttgcaactattcatcggagcccacatgccacatactgaggccaaatactaggagcctggtttctggtctgagcccttcaactgaatacttcttcaaggttttgccttttagcagcgtacaggggtttactgagtgggaggcaaaatgcagtacacgcagcctggaccatggcagcagccagtgctcaactcagaactctgagagcatgtgcctcaaagtggatccaatgcagcatcagaaaaaggatttgaatgtgcagaatcatcagagaactattcaatatgattcacctaaggggtctacaaattcaagtgagaacaatttattgtgtgaccggtattccaagcgggctaaggttgcaaggctagatggtgcaagtgacaatgatgaaagccagttgccgccaacttctgaagttttaccgtttgcaagctccaactactctccttccgaagctccaagtaaacctgacttgcttattggcaccccagattcggcatccaagaactatgtggagcagcagtacgagtactgtgtgaaggtggtcagatggttggagcatgaagggcacatggacaatgacttccgtgtgaagttcctcacttggttcagtctgaaggcaacagcgcaggacaggcgaatcgttggcgccttagtagatgttcttatcggtgatcctgcaagcttggttgcccaactggttgatgcattcaaggatatcatctacaccaaggagaagccctttcaaacacaacagaaggatgcacgctgcaagatttggcactagaaaccttcataactgctctgtgtcgctgtgtgacatcatttttctggtaattttctggcgactgaatgatgaactactgaagttatatcacctagcagattgcgtgcggattctgttgagatggatattgtgcactctcttaaaggttataagatgctgtagatgcttcatttggcattcaggtccatcagatctctcatttgttcattcaaattcagtcggtaggcagactattaatccatgaagacaatcatggtggaaccatgtgctggtaatcatgaatcggttctgagtttaggtttcgactagtaagtagttgaagcttgttagcagacaagcaactgtattcatatgtggaatgctatggtggatctgcaagctaactattgtgaattcatatcatgacttaagagatgtttattattattagttgacttatttttttaaaaaaaaaaaaaaaaaaactcgagggggggcccggt

SEQ ID NO: 30556 - DNA, 392 bp, Zea mays
  unsure (1)..(392): unsure at all n locations
  Clone ID: MRT4577_127877C.1
gtatctggaaatgttattttttatttttggttggcctcattcattttccaaaaaactttttgtttgaattacatctttttttcaatctaaaagagggcccccccattggggtgtggggggttggaggctgctgggtttgtcaaagcaggttggccaaagggcaacatttgttgtggttgcaagagggttgcggggttagccgcaaactgcttgtngaaaggcatcatctgttgctgtgtcaagaaggaagcgcgccttgctgcagcttgcttgctaaatggccgtngtttttgctgctgctaatccgccgcggggtttattgcggccaattggttttttggaagaagttgttgttgctgtgtgttggcctttgctcgctggctaaatggtaa

SEQ ID NO: 30557 - DNA, 482 bp, Zea mays
  Clone ID: MRT4577_127878C.1
aaaaagtgtgtgggctaacaaaccaccaaaacaatgtataaaggagccagtaaacatatggggaggactaccttttcttttcacacttaaaagacgcattccatccaaggagaaaaagatgattcaaacaatgagacctacagagttcaccctagaacaacttaaaacccgcacggcccaactcttgtttaagttcaagactttatgatcctttctactcacaaacaacatcattctcatcaggaataggttgtgcaggtctttcaacaagctaatcttcatgcatcttctgtatacccactttcgaggaaacttccggcggcttaagagctactgcttcaaccaggtgaaggtccggatcaccattcttcttccttggaaggcactggcaagggtttttaaagaaccagtttcttctggccaaaatttcattagctctgggaatttttttttccttggaaaagaaaaccggcttgctttta

SEQ ID NO: 30558 - DNA, 243 bp, Zea mays
  Clone ID: MRT4577_127879C.1
caaagatttcactgagacaagctgtggaagtaacgactgcagatgctcaccggcctaaatttaatgaaggcttggttgagtttacctctcatggtgacttaaagaatgctatcgaaaaactttctggaaaggaaataaatgggagaaaaatgaaattaattgaaggcagctaaaggcacagtaggtcaagatgcaggtctcgatcccggaccagaaggtcctctaggtctcatagccgatccc

SEQ ID NO: 30559 - DNA, 362 bp, Zea mays
  Clone ID: MRT4577_12787C.1
ctcactcgtgcgggacgccgacgtcgaacatgccgaaggagcgcccagagtgagattggtcaagcaggtaattgaagctctatgagcacggggctaagttcttaaggctaacacctattccgaaaattgagaccgccttgaaacgcataccattgttctattgctgggctcatgttgagcaactgacaataccatagattcgctctacttatgccctgtttactgcaacacgcctcttatattcgatcacgagcgcaatgaatgctatgctgacctctgcactcattctgttacctcgtgtcttgagtggcttaaggaagaacgagccgctgcgtttcttactatgcgcacgcctcaagcag

SEQ ID NO: 30560 - DNA, 404 bp, Zea mays
  Clone ID: MRT4577_127880C.1
aactaattctatataaaaaaacaaaaaataaaaaaaataacaaacatacaaacaaaatacagactaacgcgtaaactctaatataaaaaaaccataaattcaattcattacctcaactattttacaactttattacatgggtccaccccttttaattacccaacttaattcccctttcccacttctccttcttattccttttttccccactcctaaaattattttactcccctgcccttttccaccttcttcacctttaaaaacccttattttccccacttttatcccctttcataacatcccctttttcccatttttactaacaccaaaaacgctctactttatacccttttaaaacattttcccccccctatatcccaatatttccccccttcttccccccc

SEQ ID NO: 30561 - DNA, 168 bp, Zea mays
  Clone ID: MRT4577_127881C.1
ctagttctagatcgcgagcgggcgcccttgtttatgttattttgaaagtatccctgaaaggcccagtgaggcaccctgtcggcttagattggggattgattacccgagggaaaggagtcacatgtgagccaattgccgaagatttccaggacctcctcatacttttga

SEQ ID NO: 30562 - DNA, 303 bp, Zea mays
  Clone ID: MRT4577_127882C.1
cgggtccacccacgcgtccgagactcggtactcggcacggatggcgatggggacggaatggccgccgacacctgcgcagcagccgaaaccggtggtgagcgccgtgtcggtcctgaagctggtactgttcctgattctcgccggccttccactgcggctgctggtggggcccccagcctagctcctgccgtacaccgtcgcgccaaacggggccgcacatcttttcgcggttccggtcatggaaacaaccaccggcagtcgcggccgccggataccttcccttaaaacctctgatgccgtttt

SEQ ID NO: 30563 - DNA, 1070 bp, Zea mays
  unsure (1)..(1070): unsure at all n locations
  Clone ID: MRT4577_127883C.1
ggtaccctcggagctcggccgggnagttccagccggagcagccttttgcctcgcccgcagcagatgagcagacgctgcagcagagcagccttttgcctcgcccgcagcagacgctgcagcagagcagccatggcgcctccgccgttctacctgcccctcctcctcgcctttctgctcctctccaccgccgccgccgactcccagcatctccacctcctccctcccgctgctgcagccacaagctgaggtggtggggtcgtccgagtcggagcccgcggctcctccttccgtcgtcgatgagcagtaccgcgacgaggcgagcccatcgcctccccctcccgccgtctacgagccgtaccgcgacgcggcgagcgctcctccttccgtcgttgacgagccgtacagcgacgcggcgagcccaccgcctccgccttctgtcgtctacgaaccgtaccgcgacacgccgagcccaactcctcccgtcgtctacgagccgtacctcgacgcggcgagccctcctcctcctcctcccgtcgtctacgagctgtaccgcggcgtggcgagccctccgcctccttctcccgtcgtctacgagccgtaccgcgcggcgagcccccagtctcccgtccacgactacgctgcgggggtggtgtactcgggctcgggcgacgacctcggcctgcagcagatcgccaaggtgctcgcgtcgctggggtacaacgagatggcttcgtcggccacgctcctcgcaggctcggcttccgtcgctacatggcccgggccggttaccgtcttcgcggccccagacgtattcctccaggccgactcctgcccggagtgctcgcgacgccacctactcctggaccacatggccctgggctacttcccctacgccgagctcgccgccgcgcccaccacgaagctaccatcggcctccgtcggcttctgcctcgacgtcgcggcccagccacagcgcgggcccttctccgtccaccacgccagcctgtacgtcgacggcgtcatggtgtcggaacctgagctatacgacgacggncgntacgtngtgcacg

SEQ ID NO: 30564 - DNA, 744 bp, Zea mays
  Clone ID: MRT4577_127884C.1
ggaggcagtgacaatgataaaatttggaagaatgatgttacttgtgtcaatatgattaggcttagtagagcatcgttctttcgcttttgtaaacttattagggatcgaggtttattacaagacactacacacatgtgtgttgagcaacaagttgctatgtttttacacacaattggccataatgttaggaatagagtagttgccactaattttggtaggtccggggaaaccgttagtcggtacttcaataaagtgcttcatgcaattggagagctacgcaccgacttcattaagccaccatcatcgacgacaccatctaaaattcaagggaacccacgctgggatccttattttaaggtagtgtttggtttgtttgcccaaattatattgattataggtagactgttgagaccttacatattgtcatcgtggttttgagcttgagcacaaggctaagtactattcttatttgctgaacaatcctaatgttgcacaagggtttgtggaggtgccattgctgtacaagcttagtatgcttactgagttcattaatggtaatatgtaggcttgctaggaatacttcattttgggtgacataaacttgtatgtcatgcttctatgtatccataaacaaggcactttgggaatacttcattttaggtgatatgaacttgtatgtcatgctaattgtatgcatgaacatggcactttggattatatgagtgttgtgatgacttgtggttt

SEQ ID NO: 30565 - DNA, 782 bp, Zea mays
  unsure (1)..(782): unsure at all n locations
  Clone ID: MRT4577_127885C.1
gggtaccctncggggccgtccgggtcgttccagccggagcagccttttgcctcgcccgcagcagatgagcagacgctgcagcagagcagccttttgcctcgcccgcagcagacgctgcagcagagcagccatggcgcctccgccgttctacctgcccctcctcctcgcctttctgctcctctccaccgctgccgcccactcccagcatctccacctccagcaccacggccacggtccccaccaccatcaccatgtctccccgtccatgacagccaccgcccgcttctacaccgcgccgtccatgcaccagaaccgcatggagtcggaggatgcccgccagtctctgcgcgtcttcagccccttcctcacccccgtggcagctcaggctccttctgccgaggaggccatgtcggcgatggtcgcagccgcggacgcgggggaccccgcgcgggcgcggctcgacccgccctcgccgccttcttccctactcgccgcgggcgatctgatgccgtcctccctcccgctgctgcagccacaagctgaggtggtggnggtcgttcgagtcggagcccgcggctcctccttccgtcgtcgatgagcagtaccgcgacgaggcgagcccatcgcctccccctcccgccgtctacgagccgtaccgcgatgcggcgagcgctcctccttccgtcgntgacgagccgtacagcgacgcggcgagcccaccgnctccgcctttcgtcgtctacgaaccgtaccgcgacacggngagcccaactcctcccgtc

SEQ ID NO: 30566 - DNA, 805 bp, Zea mays
  unsure (1)..(805): unsure at all n locations
  Clone ID: MRT4577_127886C.1
cattgggacctcgagccggccaggaccagcccgacagccgccgctgtttcttcatcttcctcgcagcgccggcgctccttcttccgctccctctccgattcgcgctcggcacgcaggcgacggcggcggcgctcgtgctcgggctctcagcgacggcgggcagtcccagactcggtgtcggcgtcagcggtcccccttccgcctgtcaccaatcgcctcgcgccctcgcctccggtcctccgcacaccgaccggcgccctgcgtgcacgcctcccgctcccctcctgcctccggtggaccgtcgacggcgctcggacccggaggctgcactgcgcgccgcgtgcgaccggcgggcagcgggagccagcagccgcgccgctttggctgtaacacattggtatttgaagaccattgcaggttgtaacacactgttatatttgaagaccagtggtgggttgacttaaaagcagggtttaaacatcactntttgtgatttgttctgcaatatctttgccatatcatgggggtttcagaccataccagtcgtacangaccttgtggtggaataaaagatgggggttgaaacctcacaagttgcgggctctgattcaatagtcataagaaagggtggaaacaaatctgagcaaggaaccctttctgctagttcccttggaaaataaggaagagaaagagtcccttgggtataatttgttatcttgaaaaaacccaggggtgatgttcctgaggccttctctccaaggagagatatacttgaattgtcaatctctagcaagtctactgatga

SEQ ID NO: 30567 - DNA, 1878 bp, Zea mays
  Clone ID: MRT4577_127887C.1
gcgtttctttaccctaaggtattagctggtccaacgaaaggcacacagcccgacagccgccgctgtttcttcatcttcctcgcagcgccggcgctccttcttccgctccctctccgattcgcgctcggcacgcaggcgacggcggcggcgctcgtgctcgggctctcagcgacggcgggcagtcccagactcggtgtcggcgtcagcggtcccccttccgcctgtcaccaatcgcctcgcgccctcgcctccggtcctccgcacaccgaccggcgccctgcgtgcacgcctcccgctcccctcctgcctccggtggaccgtcgacggcgctcggacccggaggctgcactgcgcgccgcgtgcgaccggcgggcagcgggagccagcagccgcgccgctttggtagcgcttatacccccaaatgaatccttaccgtccgcttagctcttcagcgcgctgaagcgtgcgcttagtgccgatttttggaaccctgattgttgagtgttttgacatagtaactggtatatacctcattgatatattttttcttcctttggacctgtaacacattggtatttgaagaccattgcaggttgtaacacactgttatatttgaagaccagtggtgggttgacttaaaagcagggtttaaacatcacttttgtgatttgttctgcaatatctttgccatatcatggggtttcagaccataccagtcgtaccagaccttgtggtggataagagtgaggttgaaacctcacaagttgcgggctctgattcaatagtcatagaaagggtggaaacaaatctgagcaaggaaccctttctgctagttcccttggaaaataaggaagagaaagagtcccttggtataatttgttatcttgaaaataacaaggttgatgttcctgaggccttctctccaaggagagatatacttgaattgtcaatctctagcaagtctactgatgatagtctttcattgggttgtgagacaccacgtgaaagcatctttgatccatttgctccaggacctgaggaggcagcctgtgcaccaaagaagaaagtgactagaggtgctcaagttccacctcgcaggaagctaaattttgattcaggtgactacccagttaaaaggttaagtttcgattgcagtgattctgaagaggaggatcaatatatcgaagtgattcacaagatgatcctggatctattaattctagatgtccctcttggtggacaaaaagaaactggaaagaatgcgacagatttgggcctacatggaagctgcaagacacctgattcaaagcctctacttactggcattgcatccacatgcccagatgcacctttgaggccatctcttaaagcgttaaagctgagcccaggcatttgtcgaaagattgactttgacttcgatgcagtcagtggctcaggaagtctaagttcttccatggataaagaaagtaattgatcgttctgcccttcttgattgacaatgacaagtaatgaactgtgcattttgggactgaatgaagcatcgtgatgatcttccccaggaacagctttaatctgcatatttgcatctcatgtatcagtatcctatgccgttgtggcaccttagctaaccctgatgctttggggattattgctgatggtagacaagtacttaagtagcaagcagtttatgttatacatgtaatctatctctggttttcttttgtaactggccttgtgctaattacctcctagatttatatcagttgattcgagctctgaccatattattttgtaaatcttaagacgagacttattccatctgattaaagtaatgcacccgatgcagtttcttggtagctgttaaatcagctctgaccc

SEQ ID NO: 30568 - DNA, 743 bp, Zea mays
  unsure (1)..(743): unsure at all n locations
  Clone ID: MRT4577_127888C.1
atccgctcggccgtccttggataagaatccgaatcccgccatggtgttaatctcctgcgcccagatgcctgctcgctctgctctactctccatcttccagccgtgcctgagagctctgtctctctcccctgcgcatcttcctccctcagctcacggagctcttcttctccttggccacttgtgcccagctctcctctctttcccatggcggctctctccttcctctccctcctctacgcgcccatttctcctgctcggaccaagcgtcctcgggcagcgcacgctcttcttccagcacacccagatgaacttcccccgccgcgagcttccctgtgctcgccatggcggtttccactgccggcagctgacctccttggtgccgcgccccttgctcctcccggccctggctctttgctgcgcgcctgctccaaccccctcagccgagcagcgcatcttgctccctatgcggagctcaagctcggagctctctctcgtggcgccaggaatttccctgctcggattcagctctgtgcgtgagtcccctgcctgctcaagcgcgagctcagccgaatccctctgtcacgtgcgctggccgtgctccactntgcgcatcgcggcgcttcagcttcagccctctcgactcgctcggctttaatccacantcgtgtcatgcgtcgagcaacgaaaccaaaatccgtacgcgtcgagctcgcgtgccgaatctttntctagctcatcgcgac

SEQ ID NO: 30569 - DNA, 391 bp, Zea mays
  Clone ID: MRT4577_127889C.1
gtaactggagggccagcaggcaaaaaattaaagaattctgaggttaattcctaagtttctgggaggatattttacaccaaaatcataaaaaataaaatctttaaaaagccacaaaactaggaccttcgaaatgcatccaaaaccagaacgcacgctgctggacacaaccttatatgcccaaaaaactaagtagggaaaaatctttaccaacggggaggcatagcaaaaaatcataaaatactatagtatattaaaattactggggaaaaaagagttttcctttaaggattgagggacaagagaaaagggacaagctaggaaggggaacaactccatcggaatctaaaaagcagggccaatttgaaaccaccaaaaccagggggggtttaaa

SEQ ID NO: 30570 - DNA, 444 bp, Zea mays
  unsure (1)..(444): unsure at all n locations
  Clone ID: MRT4577_12788C.1
ttttgctcactagaagttgtccgcccagcccgntgatgccgagcgcggggaattttagagccctgaggcgggtgatcgccgccgggacgccgtcggtgaggttgttggagctgaggtccagcttctgcagctgggcgaggtcgccgaggcggcccgggatggggccggagaaggagttgcagctgaggtcgaggccgacgaggccgcgcaggccgccgagccgggccgggatcgggccggtgagggagttgtagctgaggtcgaggtgcacgaggccggccaggtcgtcgatgccctccgggaacggtgccgcggacgagcgcgttttgggacacggtgagcacccggagcgagcggatgccgcccagctgcggcggtagctcgccggccagcgacgggttggagcgcacgctgagctgctgcaggcgctactcccagaggttg

SEQ ID NO: 30571 - DNA, 462 bp, Zea mays
  Clone ID: MRT4577_127890C.1
aggagagggcccttttttattatgggaaaaataaaaggtaatatgaacaggatttcgggttttaaggggggaaaaacaattgggcacgttcttacgaactacagaccaaaccaagccccggctatataggttaaaatacgcaaacccgccgggggaacacaagaaacggggaaaaaaggaaaaccctcccggggccggggggaggacccgccgggaaaaagaccccacgggtttggggcctaaggcccttgccgggagggttcgctaggggggggaaaccaagctccgggccgataaagaacccccgggtttccctttccttttggaaggagaaaaccaactttttttccacaaaaacagggagggcctgccaaaagtggccctcgggggggagaaccaaaataaactgggggagggccaacgggaacccgttcccccgggccacccgccaaaaggggcggg

SEQ ID NO: 30572 - DNA, 227 bp, Zea mays
  unsure (1)..(227): unsure at all n locations
  Clone ID: MRT4577_127891C.1
gggaaaagaatcaatagagggagaatcggtcgatatccncntcgtaacttatcaaaaaaaaaaaaaaaaaaaaagggaagggtattaattaagaagagcggacggaaacaaaaacaaggggcggccgcaaaaaaggaaccaagccaacggccgccagccaccaaagacagaacccttcaagagggccaccaaaanaaaaaccacgggccgaccntngacaacacaga

SEQ ID NO: 30573 - DNA, 268 bp, Zea mays
  Clone ID: MRT4577_127892C.1
gctaaagacctcacaatagaatcccatccagcccaccagacagagctctgagttttctagtttggaagagctattaaataacaacgtctagtgtcgattctatacttgttatggtcaagtactgggctcagcattttacattcattgtcatcttaagttctagcaatgtgaagcaggaactatgattatattgactacataaatgaagaaattgaggctcagatacattaaggaattctcccagggtcacacagctagaactggaaag

SEQ ID NO: 30574 - DNA, 628 bp, Zea mays
  Clone ID: MRT4577_127893C.1
atgttttataaaaggtcgaggtgggcaacgagccaacgaccggtgccagcagagacgaccggacccgggcctcgaccccgccgaagctgtgccgaagacgctcaaacaccaccagtaccccaccacatccgtcagaatcctctccctctgtccctcatcggcgcgccggcaatggccgggtggggaagcccacccacacggaagaagctggtaccaacagccaagccccctttgccctcgccttcgccggcgtcgtacgcggaaggttgagatcccagcattcagactggggccattcgatttgatttgatgcggagtactttgctatggccgactccatcgcggctctcgcccttctttccagggtcgccggcgctcggacgctcctaagaacggccttggagagcgcccagagagcctggacgaccgcggtgttgtcgtgaagccgggagtctcgtataatgccgtgaggacgcttaacactctcgtccacgctggcgtgcccaaggtgaactttggcaagtctgcgctggcagatgtgcaacaccataccgtaactgtaccttcgtcggtgacgaggactttctacaaccagcttcccgactggggcatggtccttgctgacatc

SEQ ID NO: 30575 - DNA, 263 bp, Zea mays
  Clone ID: MRT4577_127894C.1
ttttagcactgtccgccgcggtagcagcgctgcagacttgaactgcctccctcactacaaaatgcgaaggtggcaccgctgataactgggaagggacactcatatcggggctgcaccgagtggaggtctgaaggtccaacatgcaggaacggtcttgctactaagtggcataacagggaggcagtcactgtaggaaagacgacgaaggactgggtgcacttcacagttacattctggcacacatgcttaactagtgcatctga

SEQ ID NO: 30576 - DNA, 428 bp, Zea mays
  Clone ID: MRT4577_127895C.1
ccccccccccccccccttatgttatttaatggaaggtaccggcccgttccccccccccgggggggaataaagtttttcttttttttgggactttaaattttgggtagaacgaaattcaaaagtgcttttacggaaccttattttgtttccatcaagccgtttgggaaccgaatcttgcattttgaagagaaaaaaggacctggttcttaattctcacccggaacagaaccggccccccgaacaagggggcctaaaatgtccctcaccatgattggggaaatatcccacccccccgggaacaaatttttttcccttgcccacaaggccggtttgcccccaaatccaaaccctttcccacgtggccgaagggaacaacagggggaccccgacccctttatttaggggttttttgggggggagagcccccg

SEQ ID NO: 30577 - DNA, 424 bp, Zea mays
  Clone ID: MRT4577_127896C.1
cccacgcgaacagaaagactttttacttttaaacccacccctgcggcaaaaccccagggggggacgaaattgcaacggacacgccatgaacaccaagccgggggcccagtcacgggtcccaacaaaaaccaggcctcgcaccgacgcacaaccacttggtcgccccccctcacccctgaccgcacccaaaaacgagccgggaaaaggccacgacaccgcagctgccccccaaaacaaaaaccaaaccccaacagcccacgcaattggcttagccaaccgccccctcaaaaaaaaactacgacaaacccacagaccatacaaccccctactaaaaatagaacgccaacccccagaacggaatcggaccgcacgggacaccccaagaacgaaaaacgaggggcgaaaccggggttacaaccaacac

SEQ ID NO: 30578 - DNA, 515 bp, Zea mays
  unsure (1)..(515): unsure at all n locations
  Clone ID: MRT4577_127897C.1
tcgtctcgggctcgtcccttggccttacattggttccattgggctcagaggtctgttnctaccttggagactctgatgtcggttagtgagtaccgtaccgggtcgttggaccgggtattnncggtccttccgnngattttcaagggggcctgccgtggggccgcatccgtgatcactcgtcgcgaaaatgttgcggtgctttcttcnctggccgtctggaacccttaccttccggcttgaactntngattccagggcttggcgtggcccgttatagccatgaaaagataatctcttttcccgagggcccctcgcccgggcgtctttccggacttttcctaacngnntcgccgtcttggcctgccacagtcccggcttcnngggaaatcttaacncnncgattcccttttcgggtgaacgnnngcgtgatcgcgctatcttgccgggttttcccccggtcccttagggaatcggctttacccatgttgcaagttgccgttcacatgggaacctttc

SEQ ID NO: 30579 - DNA, 1681 bp, Zea mays
  Clone ID: MRT4577_127898C.1
ggccgggcccggggacttacccgattgttaaggctatacttggatcggtctctcgaatccatcgcatctctattccctctcccttccctcggaattcaccctagcggcgatggcgtccgcggcggcgggcgcaccgaagcgctgctactacgaggtcctcggcctatctcgcgactgctccccgacggacatcaagcttgctttccgccgcctcgcgctctcgctccaccccgacaagcagccccccggctccgacctcgccctcgccaccgccgccttccaggagctccagcatgcccactctgtcctctctgacccgcaggagcgcgcctactacgactcccaccgctcccagatcatcttctctcacccagcctccgccggcgccaaatccgcttccaccgtccccgatctcttcgccttcttctcctcgtccgctttctccggcttctccgacacgggccgcggcttctacaaggtctacggggacgtcttcgacagggtcttcgcgcaggagcttgcctatgctcgccggatgggggttcccgagcccgctgcgccgccggtcattgggaaccttgattccccctatgcgcaggtcactgctttctacagttattggcttgggtttggctcgggcatggatttcggatgggcggctgcgtgggacgctgcgcgtggggaaagtcgccgtgttcggaggctcatggaggaggacaacaagaaggcgatgcgtaaggcacggcgggagtacaatgacgctgtcaggggccttgctgccttctgcaagaagagggataagagggttgtggacatggttttaaagaagaagctggaggaggagaagagaaaggcagaggagaaggagaggaggaaggaggaggacaagaggaagaaggagcgagccatggcatatcaagaacatgagtgggcgagggcagaggagggactgtatgatgaagacgaagaagaggagatgagggccaagaaggagctgctgtactgtgtggcgtgcaataaaaagttcaaatcggacaaacagtggaagaaccacgagcagtcgaagaagcatagggataaggtttctgaactgaggatgacctttagggaggaggagtctttgaaagaggcagaggagggggaaggtgattggaatgaagttgatgtggggtttgattttaagcctacacaggagtcagatgatgagagtgcattttcagatgctgcagaagagttagctgaagaatttgaaagtaattatgctggcaatgggcatcatggtaaatgtgaggttcagcctgagggttcggtccatgttaatgatgttgatgatatcatggaagggccatcctcttctaatgtcaacaatggtgcagtaataatggtattgcagctaccatcccccctcccagtactatgttgctctcgcaggaacaagttgttttctcacttggaagaaacaggtcacgcaatgctgaagtcactcgttggttctgcatggttctcttaagttttggcacaattttgtatctgtagtgaacattttttttctagatcctttatgtgtagtgtggagatgattttttgtttataaggccatgtggtgccggtggtgtgtgtgtgtgggtgtatactgggcaggaaagacactgataattacaatatataacattatttcact

SEQ ID NO: 30580 - DNA, 1440 bp, Zea mays
  Clone ID: MRT4577_127899C.1
cttccgtcggacttcaaaccctagcggcgatggcgtccgcggcggcgggcacaccgaagcgctgctactacgaggtcctgggcctatctcgcgactgctccccgacggacatcaagcttgctttccgccgcctcgcgctctcgctccaccccgacaagcagccccccggctccgacctcgccgccgccaccgccgccttccagaagaggagatgagggccaagaaggaggagctgtactgtgtggcgtgcaataaaaagttcaaatcggacaaacagtggaagaaccacgagcagtcgaagaagcatagggataaggtttctgaactgaggatggcctttagggaggaggagtctttgaaagaggcagaggagggggaaggtgattggaatgaagttgatgtggggtttgattttaagcctacacaggagtcagatgatgagagtgcattttcagatgctgcagaagagttagctgaagaatttgaggaaggtttggaggtgcatgataaagagaacggtgataaggatttcgatagtgcagagcaggaggttgggtcatatgatgaggcaagtgtattggaggcaatgctatcaagctgcaagaacagaaagggtggttatgtggctcctccagaggaggctttgtctggtactgctgaggatgacgatcatcatagaagttctgaagttaataatgcaaaaaggaaaggacgcaggcgacgggcagcaaagaaggagcaagatgaaagtaattatgctggcaatgagcatcatggtaaatgtgaggttcagcctgagggttcggtccatggtaatgatgttgatgatatcatggaagggccatcctcttctaatgtcaacaatggttcagtaagcaaaggagataagcagaatggtgaaaacacgaatcctaaaaagaacaagaaaggcacaaaaaagaaaccaactgtttctactgatcagaagagtatgtcaaaggctgaccagaagagcacatcaaaagggaagaaacaaaaggaggtctcgaaggcacctagtaatgattgcgatacttgtggaggaacttttgagtcgaggaacaagttgttttctcacttggaagaaacaggtcacgcaatgctgaagacgcggcagaagaatcgtcgttgagggaaataagttgaacttccaagcacgtagttggttctgctagttaccacataacagcatggttctcttatgttttggcgcacttttttatctgtagcgaacatattttttttctagattctttatgtgtagtgtggagatgatgtttttgtttataaggccatatggtaccgggggtagggggggtataccgggcgggaaagacactgataattacaatatgtaacattatttcattatttgtgcgacctgtgccatccttacaaattttagtgttacaatggctgccc

SEQ ID NO: 30581 - DNA, 291 bp, Zea mays
  Clone ID: MRT4577_12789C.1
gatcctgcttcttttgcaccacatggtcctggatgtgttgataccgctgatcaagctggggctccggctcaagatgcatgagcgctatgaactcctctgtcctggcggagacacgcaccgtcgagcgggccaccgttgcactcggcgtgtgcccggtccagaaagccgggcccgattccataaaggacgttgctgaatccggcgaggtcacacacgccagaccttgcgggagaacatgacactgtaatccgtcaacctgctgttcacacggtataggaagatggatctgtt

SEQ ID NO: 30582 - DNA, 826 bp, Zea mays
  Clone ID: MRT4577_1278C.1
gcagcgagtcgtcacgttccttccccgcgtgcgaccccaaatcctaaaccctttccccatggccgccgccgccggcgccacctcgcccaagcgcctgagggtctactcgtccgccgccggcgacgccgactcctccaacggcgcgggcaacggcaggcgcgtggggacccacaacggcagcttccactgcgacgaggcgctcggctgcttcctcatccgcctcacctcccagttcgcaggcgccgacgtcgtccgcacacgcgactcccagatccttgattcgctggaggccgtgcttgacgttggtggtgtctatgatcccagccggcatcgctatgatcatcaccagaagggcttcaacgaggtcttggacatggctttaacacgaaacttagcagtgctgggcttgtttacaagcattttggtaaggagataattgcaaaggagcttcagcttaatgaggagcatgaagatgttcaccgcgtgtatcttgccatatacaaaagctttgttgaggcacttgatgcaatcgataatggaatcaatcaatatgatacagagcaaacccccaagtatgtgaacaatacacacttgtcttcacgtgttgggcgccttaatccagactggactgatccagatcaatcacctgagaaggaaaatgctgcatttcaacaggcgatggctcttgccggaagtgagtttatggagagtgtccgctttcatgttaagtcgtggctacctgcaagatctattggtcatgggagtgtttgctgtcaagaggaaatgttgatccaagtggagaaatcatggttttagatagatctgc

SEQ ID NO: 30583 - DNA, 412 bp, Zea mays
  unsure (1)..(412): unsure at all n locations
  Clone ID: MRT4577_127900C.1
cttccgtcggacttcaaaccctagcggcgatggcgtccgcggcggcgggcacaccgaagcgctgctactacgaggtcctgggcctatctcgcgactgctccccgacggacatcaagcttgctttccgccgcctcgcgctctcgctccaccccgacaagcagccccccggctccgacctcgccgccgccaccgccgccttccaggagctgtactgtgtggcgtgcaataaaaagttcaaatcggacaaacagtggaagaaccacgagcagtcgaagaagcatagggataaggtttctgaactgaggatggcctttagggaggaggagtctttgaaagaggcagaggagggggaaggtgattggaatgaagttgatgtggggtttgattntaagcctacacaggagtcagatga

SEQ ID NO: 30584 - DNA, 392 bp, Zea mays
  Clone ID: MRT4577_127901C.1
cgggacgactagctgactaggcgcgggacgaccttccgttttggggagcgaactattcgacgggcgacgttcccttctttcgtccgaccgaaaaatgaaaccatgacccgccttcccatcgggacaaacaaagaagacatggctgagctgatacatcaaagcccctccacaacgatgtgtttcaacagaacaaggaaagctctgcccgagcctgcaccctcaactcaaacggaaagggtgtgccctgcttgttccctacacttggacatggtgagacgcccgtgcccattgcaacaagtgcccatgggcaactacctgcctccccataacagaggtgccccgtgttcactccagtgcccagcaacacggggctaccacgtctcctgccagct

SEQ ID NO: 30585 - DNA, 261 bp, Zea mays
  Clone ID: MRT4577_127902C.1
aagcagtggtaacaacgcagagtacgcggggaattaagaaattcattcagattgctatgtgatcacagtaaccaactatgtgcagcacttgatatttggaagtatccatagttttagtttatcgaaagatttgctactttttaccaggagcacactgccaccaataaactacagtgatttggggagcttgtagggctgctattcttcaaacaaataaatcatactatttgttgatgatacaattaactaggctttcgcttc

SEQ ID NO: 30586 - DNA, 559 bp, Zea mays
  Clone ID: MRT4577_127903C.1
acaaactttcactctctcgtgagcagaacctcttcttccccgatcccgactcatctctccctctctcgttcgcctggaacgtcctcggtggtgcgtgagactgcttcttcaccggcgcgtgtgcttcttcgccggtacggaggactgcttcttcaccgtagaggcggcctgcttcttccaggaccccaaggcctgcagaggacgcgacgcggcggcctaccgtccggacggatccgcggactagcggatctccggctactggaagatcttcggacgcgtcgcggcgctctaccgtcgggatggatccgcagacgaacggatctccggcgtggggccttgcttcttcaccaacgtcacgacctgattctccgatgggacggcggcctgccgatcttctccaggtgtgcacacgcggaagcctgccgatcttctccaggctggtggatgttcacggctcatcgagttcaagaagagaagcgagcagattttctccgacgcatcttccgagacgttaaatgtggaacaggatctacgctctgatggactcatccctgctcca

SEQ ID NO: 30587 - DNA, 513 bp, Zea mays
  unsure (1)..(513): unsure at all n locations
  Clone ID: MRT4577_127904C.1
gtgggcttgtcgcggctgctttgggcgagctgctcacgtgcgtttgttggctggttttttgcttgctgcctctcatgggtgggggggggggtgtgtgcttccccggcttttccaccctgttggctcctgcgcgctgtcgctgggcgcggcgtgccttggtcacccttggcttgctgtcgccgggcctgtcttgggtgctcggcctggctctcgccatgttggcgcatcctctgcttcatctcgtgcggcgtgtggtcaaccatggtggctttggtcgcacctttgctgcctgctgtgctgcgacagcatttacttctattgagccntctgtgtgcactgaaccctgctggttatttgccgcgccttctatgtaccattcagccagctcgctgctgcctactttcttcaacaacaacttcttgcatgtaaccaattggtcgctctgaacctcgctgcttatttgctgcaggggttcttactaccatttagcctgctagctgcaacaagccgtgc

SEQ ID NO: 30588 - DNA, 658 bp, Zea mays
  Clone ID: MRT4577_127905C.1
ttccggtcttgatgttctaagcattcctttttatatattcttatcatctgtcgatggataggccgcttattagcaaatcgcgagagggacaataccgaaatgccagaagaccaggcgcgcttaggggatgaccgcggcgccgaggatgtgcgtgaggcggtatactatcaaccccccaccgcttactctgccttaccgacaggcgccagaagaccattaagctctgaatatgacatcagctgcttgatatacctagctgctcggtcctaattcatcgatgacatacatgcagattaacttcaggacgaacgtacattgatttactccgcgggatacatcctagttattcgaggatgcactacatagctgtgcgcagtcatctacataggacaacaacgctcgtgctacatcactggggccaagaagccacacatcaatgaccgatgacatctcttgatcgctctatacgcatacgagggaatagtgaatctctatcacactcatgtgcactccgaggcactgcagaagatggaaacgtgtgatcgcgatctatttttcgtaatcgagtagaatacattgaggattagccgtatcactgctgacgcttattattctgttggctatgaaatgctctatcgagccgtgaaaaagattctac

SEQ ID NO: 30589 - DNA, 919 bp, Zea mays
  Clone ID: MRT4577_127906C.1
cagtgcggcgctcgaagcggattcgtcttgcagtagcatggcgtatcaggctatcagctaacagatcggtgacggagttgcaccggtcataccaacataccactgcttgtgctagtttagattgctgcttgcttggatcggaagatactttgtggtttgtacgcttctagtaagcgtcaggcgtacgcagggttgatcctttgcttaccagaagatgcagttgaaggggggattttggatgcaacggagtttggaaacttcttgcgtggatacgcatggactgctcgagagctcattcgtcttgcagtagcgggcaggcaagtcgcatggaatggtggcggcagttgtcgggcggcagcttagctgcctaggttattagtagatctataggagttcgccggtggggttagcagcggctctagaccgtgtcttcttcctccgggccgatgatgtgcccatgggaggcgccgccggttctccttcccgagccagccgtcgacgtgcttgacggggtcggatttctctatgcccggctcggcgaggtcacccgaaccattcatcttcctaacgcacccctggttgcgggatgttgcccttggtgactgctaaaagtgtaacggccattactggcccctcctcatcggtgcagatttgagttatgtttcctccggtcatgtctggcgatggtggattggattggagatgaagctctgcctgttgggagccatgtttttttatcgtacattatgtgtgtaccagtgttttccattgtagattttgtgtgtaccaggttcctgttatgtaatatgcatgctattcttgatctaatataagtcacctcatctaaaaaaaaggaagaaaaatcacaaatttagatgaggttttttctttccaaaaaaaaaataaaaccccacaaccc

SEQ ID NO: 30590 - DNA, 269 bp, Zea mays
  Clone ID: MRT4577_127907C.1
cgttgtggaagtcctgcctacgaggtacgatgctgagtgtggtttgctcgttagagcatattattcggagatctaaaaaacatgcttcctatgtggggtgatggttatctttatatatgtatgtgaattagactcttctgctgtgaaatatcgcgtaagttggtcgtgtcgatggagaatcgtacgcagctcccttctttttgtgctactcaactatgctgtgattctggctgatgtatcggcggaaacacttctatatgctggagttg

SEQ ID NO: 30591 - DNA, 462 bp, Zea mays
  Clone ID: MRT4577_127908C.1
aacaacccggtttttttgaaaaattttgggacccccaaaaagggaaacttttttttggaaaccccatacaggggggttaaatccccaaaagggccataaattaaaaaaaggggggggggccctaaactccaacccccggggggggggaaacttgcccaaaaccttggttttaaaagggtttcccttgtcccaggcaaaaattattattattttttttccccaactttaccaacccatttaaaaaggggggcccccttaccccaggggccgggggacggaaaaaaatttgctttttaaatttttttggaaacccgaggcagttgggcaaaaacccctttccttgggggggttctttgccccccccccagccttagggaccccccttgtttttcccctcgggccaaattcctgcacccggggggacccacttttttaaaaggggccccccccgggggggacccc

SEQ ID NO: 30592 - DNA, 1190 bp, Zea mays
  Clone ID: MRT4577_127909C.1
agcggctgatttaatttctcctttcctcccggcggccggcgctgctctctccttcgacatccgcggcagcgaagactaggccacaaaatcgcggtagcaagcagcagacaggtggggaagatgtcgtcgctgcggaatgcgatcccgcggcgcgctcacaaggagcgcgcccagccggaggcgaggaagaagtttgggcttttggagaaacacaaggactatgtcgtccgggcgcgagcttaccacatcaaggaggcaaccatcgctaaactgaaggaaaaggcggcattcaggaatccggatgagttctattttaaaatgatcaacagtaggactgttggtggaattcatagacctaagcctgaagataataagtatactgaagaggaacttcttctgttgaaaaataaagatatgggatatatccttcagagcgttcaaagtgaaaaaaagaaaatcgaaaagctaagctcaacactccatgaacttgataacaagcctcaaaacaagcatgtttattttgctgaagacagagaagaagcaaaagaaatacaatcaaggataggacaaagcagcaacatgcctgatcttgacaacatcccttctcgtataaagaagaaaatagcctcttcgtacagggagttagaagagaggaagcagcggcttcaaaagcttgagaaattgtatgcagacatggccttgcaaaaagaattgaagaaacctggacgcaagaggaaactgaaactccatgaagatgaagagacggacaatcaaacatcacggcctgtttataagtggcgagcacagaggaaacgatgagatgatatgaatgggctatggagggagtaaaaggcaacatgttagtagtggaagtactggtcagtggaaccgctccttcggaccttaaaatacttccctgtagaagtagccctccacaagaactgtgtctttgtcaaactattgggcttaaagatcagattctgtatgattcaatcatgtgcatcatatatcaattcattgttctgtattatgttgaattcgcctagggatgggctatttttgtgatccattttgagatcagcaagtaatgccagatacaataggatagatccaacacaatgtatccctatacaatgtatccctatacaataggatagatcagcaagtaatgcctagcgttgggcttgacc

SEQ ID NO: 30593 - DNA, 315 bp, Zea mays
  unsure (1)..(315): unsure at all n locations
  Clone ID: MRT4577_12790C.1
ggtaaacccnaancgtgaccgccgcgccagcgccagcaactgaagtttcgtcctcgcgggcttctctccctccactcgaaccgcgccgacgagcgacgacaaccgttgctgcattcttcaatggcgactgggcgaggttactcatgacgttgcctggaaagactgacgggggtgagctcaggacgggggggacccgtgcaaggaaancctaacggggggggggggggtctgtncgctggccctgacagggcgtgaggggacnaagaggccgngncgaactacacccacagagaggcctaaccttgcggcacacgc

SEQ ID NO: 30594 - DNA, 1934 bp, Zea mays
  Clone ID: MRT4577_127910C.1
gattaccgtacccaacaacagacgccgaccgccgaacaatggccttgtcaacgcgatagcaaccggcaacggcaagcaaccatctgggcactcggctctcccccctggccccctcccacgctctgctctccggagcaagccagcaaacagtctcccgtgccacctcagcccgctgcctgcgaggctgcgaccttctcccttcactcccctcgccgacggagcaaacggcgatcggaagtcgagcgccgtcacctgagggacagatggcggcggcggaggggcaggtgaggcgggacatgtgggggcaggagtatcggacgtcatccgccgactgcgcggcggcgctcgacgcctactacgccgccttcatgtccttcggccgcggccgcgtggcggccgtcctccgcgccgccgcggccgacccgacctgcgccctcgccgccgcgcacgccgcgcaatcagtcgcccccagggaccccgcgggggccgccgccttcctcaacgccgccgcggacaacctcgggaaagcaacggagtacgagagggccgttttcgggacgctctccgtgctggtgggcgagaagagggacgaggaggtggcgatcgagcggcacttcgagcttctcgagcaattccccagggatctcctgtctctcaagagagcgcagctcatctgcttctatatgggaaagccagatttgtccctgaaattcgttcaacaagttttgccgaagaatcaagatcagaatttcatatatggcatgcttgccttccctttgcttgagcttggacggatggatgaagctgagagagctgctcgaagaggcttggctataaacaagaatgacttctggtcacagcataatttgtgccatgtttttcagcaggaatgtcgtttcagagaagctactgagttcatggaatcatgttctccgtcatgggaggcatgcacatcatttctgttaactcacaactggtggcatgtagctgtttgttacttagaagctgagtcccctttgtgtaaagttctggagatatatgatcacaacatcatgaaggaacttgagaaaagtgattgtgagacagcagaggtgtatttgaatggtctagggttgctgctgcgattattcatacgcggtcatatagattcagctaaagagaggttaacgacattgctagatgcactaaagaatgaggtattgactcccaggaacatccttgatctacatggcatgtggaatggctccttgacttgcttatattgtgggcactatcaagtatgggtgagctaaaaagtgcacataatatgttggaatcattgaagtcaagggtacgtttaatggacaggaatcggcagcaagcgatgcagaaggcaatcaagctggcggaggctgcttatgaatatgggaaaggagatcacatgaaagtctatgacactctggggtccagactttgatgcgcttggttataaaatgattggtgcatcagatgaacaagtggatgtcttcaatgaagtttggtacactgttctaataaatgctggagaaacttccaaagcaattgagattcttggcaaacaaattaggaaacgagagggtgcacctttcttgtggcgcttgctggagaaatcatactcattggctggcagaagcgcagatgcttcagtagcatctaaaaaggcaaatgctctgcaatcctcttacttccattagctcatatcttgttgaataatgaatagccttgtttctggaaggtcttgtaacttttattttactgatggaagttaccagtatgcaccataggaagtctacagtcagtatatataccgcataatcaacagtttcagaatactggaacatgtgccgtgtatcaatatgtgcgtacatggaagttttatgttcagtaaccttatgggtatagatatgacatatgtc

SEQ ID NO: 30595 - DNA, 524 bp, Zea mays
  Clone ID: MRT4577_127911C.1
atttctctcctttcctcccggcggtcggcgctgctctctccttcgacatccgcggcagcgaagactaggccacaaaaccgcggtagcaagcagcagacaggtgcgggaagatgtcgtcgctgcggaatgcgatcccgcggcgcgctcacaaggagcgcgcccagccggaggcgaggaagaagtttgggcttttggagaaacacaaggattatgtcgtccgggcgcgagcttaccacatcaaggaggcaaccatcgctaaactgaaggaaaaggcggcattcaggaatccggatgagttctattttaaaatgatcaacagtaggactgttggtggaattcatagacctaagtatgtacaatgtagcccctcggctcctattaactctagtattgtaaggtttggtctaccctgcgttttagttttgactgtgtcatgcatttcaggcctgaagataacaagtatactgaagaggaacttcttctgttgaaaaataaagatatgggatatatccttcagagcgttc

SEQ ID NO: 30596 - DNA, 760 bp, Zea mays
  Clone ID: MRT4577_127912C.1
aataattctgttaatgacgacaagttgaaggctgctgaccttgtattcctgggaaaaaagttgacagccataaagtccagaccaaaagtagttaagttggatgctgaggatttcctcagttctatgatgcctagtgcaaatgttccgaaagaagaccccttgtctggtgttctgcgtgatgtgctcttcggtagtgatgctaaggcattgtcttcacaaaggacttcagatataaacttggaaggaatgctaaacaaaacaagcagtaatgaatctagctctcagcagatagagaatttaggaagccatcccgcttcatgttctagaacaagcaaggaacaaaacaatgataaagtgaaaggtacaaatcctcctgaaagtgatggcaaagaaccaagaaagcacagaagctctggtagaagtggacatcgtcaaggaaaacataagcatagagaaaagtctagtactcagcctgatgctatacctcaagctccagtcattcaagatttccttctgtagcatctgagagactcatttggtacacttgagttacccaatatatgtgttttttttgttccttaaagtttatgaattttcattctattttgacctgtggtgctgtttagtctttgatctgttgctggtcgtgctgtgccatactgtcataacacttgatgcaattgctctttgataggtctattgaaatatgttagttcatatgtcatactttagagggccaaacacagttttttatttagcc

SEQ ID NO: 30597 - DNA, 329 bp, Zea mays
  Clone ID: MRT4577_127913C.1
ttcgggtcgctccgcgtcgcatacctgcctctttgcgtattgcttctgttcaggcaggcggcctaaccttcgtgagggatatgatgatgggcggcggagaagactctcataatatagcacgcctgtgtcttaccacaaagcgtgtggggtgggtaaaatcctatcgcgcataaacgtctttccgagggggtaagatcccacggtcctgacacgtgtgttgacaaaagggcgccatagacctccacaaatagcgcggagacctgcctcctgatgagctgcaacgcctgatgactgtggtgcccaaccactgactcttctaggtggccatc

SEQ ID NO: 30598 - DNA, 142 bp, Zea mays
  Clone ID: MRT4577_127914C.1
gcgggcctggggctttgttttgtgggaattattgaccaataaaatgccatttgaaggcatgtggggtggggagccggatttgcctgttgttttcaacaaaaggcgccaacttttccttgagagaacccccaagaacctgggg

SEQ ID NO: 30599 - DNA, 710 bp, Zea mays
  Clone ID: MRT4577_127915C.1
atatgacaactgattctcattcgccgtgtgagccggtcatgcatattttgggcccacagtatggatgaccttcctggcaggcaaatcataagcatttgtcacttagccatcccagtgcggcagtcacccagggtggcgcactcctcggcgagccccgaacctgcagcagcgtggagcccaggactgctatgagcttcgtccaagttctcgttggtggagttgacgacggcgtcgacctcgaggttccacggatggcctcgccagaggtagatcttcgagttgatctcgtaatcgacggggaaccgcgacgcgccacggcccccggcccccgcggccgcgtcgtcgccggtgagcgggtcggagaaggagaggaaggacgaggccggggtctcggatccggcggcggtgggggacagcagggagatgcgctggtccgggtcgctccagcgcggaacctggtcgagcgtcacggccggctcaaccccgccgacgcccggcgccatggcctccaccgccgcggccgtcggggaggcggatgccgaagccgcctccggcgagcggtgctgcatggctatggccggatcagaaccgcgagggcatggaggacgtgtgctggaggctggagcgatagaaggagatgcgcgcgaagcgggaggaggcggaggtgaccggtgtgagcgaagctcgggggatcgaagcgacgggacggg

SEQ ID NO: 30600 - DNA, 480 bp, Zea mays
  unsure (1)..(480): unsure at all n locations
  Clone ID: MRT4577_127916C.1
ccctcngagatttcttttgatgtcttgcatacattgctcattaatntnccccctcngagatttcttttgatgtcttgcatacattgctcattaatntnccctcaaaccaagtcatagattgaaagggaattagagtcttcggcgaagacaaaggcttccactccactccatcaaattacaatcctttgtcgtcgcttcgagcctctctccaactttggtataatcttcactcatattttgttcgccacagggggagaaagtggttataagggcttatatttcactcaagtatccgtttttggcgattcgtgccaaagtggggagaaagtattagcccaaaacaaaaggaccgcaccaccaccaatnttcaaaaatttgagttaagaagattttgaaatgatgaattcttcaattggtatcttatttttgaaaaaatttcaaattggaaaaccctcttcaaaaactaatatctaaaccctc

SEQ ID NO: 30601 - DNA, 535 bp, Zea mays
  Clone ID: MRT4577_127917C.1
aagcttttttttttttttttacaagcttttttttttttttttttttttttttttttttttttttttttttttttttttttttcaacataaaaatcgggaaaggaaacttcttatttcgggggggccacaaacataacccaaaaaacttttttatggaataacaactaaaaagcaatcaaaaagggggcccccccaatgatgggttgtgggaaggaggctgcggggtttgcaaaagcaagtgggacaaagggcaacaattgttgaagttgaaaaagggttggggggttacccccaaactgctggaaaaaaggcaacaactgttgctgggtaaaaaaggaagcacggcttgctgcacctagctggcaaaagggaaaaaaaatttgctgctgcaaaaaagcaggggggttcagggcggccaattagtaaaatggaaaaagttgttgttgataaaagtaggcaaaacctacctggctgaagggaaaaagttgttgccgcaaataagcagcagggttcagggaaaatagttggttgaatg

SEQ ID NO: 30602 - DNA, 401 bp, Zea mays
  Clone ID: MRT4577_127918C.1
aaaaagggaaaaaacgtttaattagggggtttattaaaggagaaataaaaagcccccccacaaggggcaaaattttaaaaggggtttaaaaaacaaaaaaaaaaaccggggacaagattgaaaaaaaaaggcccccccccacgttccttggaaaaagctaaataaattggggggaaaaacttggaccgggtaaaaacctttaaacccccatgctttggggccggccgggggaaaaaaaaaagggggggggaaaccttttaggaccccatttttcccgttgatgggattacgggccctgaaagcgggagggcaaatttttgcccaattttttaaaaacccccaaaatgggaagggggaacaaaaggttaaccctaacccccttggccttaagggggggaaaa

SEQ ID NO: 30603 - DNA, 980 bp, Zea mays
  Clone ID: MRT4577_127919C.1
cgtccccggagctcggggcttgctgatcaacacctacgagtggctggaggcgcgggccgtcggggcactcagggacggcgtctgcgtccctggtcgccccacgccgccggtttaccccatcggcccgattatcgtcatgggccaggaggcggcggagaaaggggagcggcacgcgtgcctgtcgtggctggacgcacagccggaacggagcgtggtgttcctctgcttcggcagcctgggcgccgtctccgcggcgcaggtgaaggagatcgctcgcgggctggagagctccgggcatcggttcctgtgggtcgtgcggagcccgccggaggacccgaccaagttcttcctcgcgcgtcctgagccggacctggactcgctgctcccggaggggtttctggagcgcacgagtgacagggggatggtggtgaaagatgtgggcgccgcaggtggaggtgctgcggcacgcagccacgggcgcgttcatgacccactgcgggtggaactcggtgctggaggcggcgtcggccggcgtccccatgctgtgctgccgatgtacgccgagcagagggtgaacaaggtgttcgtagtggacgagatcaaggccggggtggtgatggacggctacgacgaggagctggtgagcgcggcggaggtggagaagaaggtgaggctggtgatggagtctgaggaaggggagaagctcagggagaggctggcgttggcaaaggagaaggcggcagaggcgctggctgatggcgggccgtcgcggatggcgtttgaggagttcttgaaggatatcatgctcgccaaatgatcatgcactaaagtgagcatcatggctgatcctgttacctgatctgttctaatgttagcttggactatgatctatgtgagatatttccgggtttgttcggttgatttctcccaaagagattcgagggagcatgagtttgacaaataaatatgtgctgggtgat

SEQ ID NO: 30604 - DNA, 757 bp, Zea mays
  Clone ID: MRT4577_12791C.1
gggtaccctccgaggtctcggccgaaaaaaaaaaaaaaaaaaaaaaaaaaaaaaaaaaaaaaaaaaaaaaaaaaaaaaaaaaaaaaaaaaaaaaaaaaaaaaaaaaaaaaaaaaaaaaaaaaaaagaaaaggggggggggggccctaacctttccttggtttccactggaaatttctttttggagcccagccggtggttaaacctggccctaaaagaaacccaaccctttattgggtttaaagggggttaaacctttggaatttccccatggtttaaaaaaatggcaaaaaaacttttggcttccgggaaagggggttggtggcgggcaaaaataaaacttcccgaaaccctgaaacctttgggggttgggtggggcccccaagttttggattggggtggaaaggggggggattttttgttgttaaaacaaaaacttgaaaagggggtttgggcccctgggggggggggaaaacctttggaatcaattaaaaaacctggcccagggttgtgggacctttgtcccaaaactcgtggggttaaaaagggccgaaaaaagtttaagcctggggggaaaaactttttgggggccaaccctaaaaaggggggatttccccaaaaacaaaaaaaacttaataatgaacctgacccttgccttgggaacaggggggtttaaaatggaagcccacttgccgggggggcctgttttggaaaccaagatttttgggacttgggccaaaaaaaaaaacttgggccaaa

SEQ ID NO: 30605 - DNA, 507 bp, Zea mays
  unsure (1)..(507): unsure at all n locations
  Clone ID: MRT4577_127920C.1
cccacgcgtccgcgcacgcgtgcgcagcagctcaccgtcgcgcctcctccatggcgatccacgccgtccgagagcacatcgtgtaccgtcctttcccagggggcgcgcgcgcgagtgcggaggctgccgctgctcgcgtcggacccggctgccggncagcgagagcgagggacaaagaccgatcgaccgagcagctcgagctgaatgaacagccgcagaccgccccttcagataatgcacacgctggatcatccgctaggtgcggcgacacccgccagccgcgcgacttactgcggccatcagagatgcgatcccgagggcggcgtacgcgtcggcggcggggctcacgctcatgcagtcggagaaggccaagggagcggagtgctaggatgaaagcttaccaggccaccacctgcacagagggtttagatcaggagcagacagtgggctcgccaatctagagggcgaaggctggggcaatgagaggagcagctgtgtgttccgcaa

SEQ ID NO: 30606 - DNA, 317 bp, Zea mays
  Clone ID: MRT4577_127921C.1
gtggggggggggtttttttttttttttttttttttttttttttttttttttttttttttttttccccaataattatttttcacaaacatgaaatatagaggaaactacaggaacaaaataatccattcccctgggctacaatgttagcgggggggggggaaccctttttttaaactatatgcccaggatctcccttttggggcacacactcatttgatatacaaagcatatgggcattctttcgccaaggggggcaaaagcggaaacagaaacaattacgggggaacttacatagggaaaatcttgctcaaagttgc

SEQ ID NO: 30607 - DNA, 105 bp, Zea mays
  Clone ID: MRT4577_127922C.1
gaaatttaacagcatgaacgacgactgttcataccggctcttgatttcgtggttagtgacgttgcaggtggtttgagtcgcgctacacgctgtacataccttttg

SEQ ID NO: 30608 - DNA, 270 bp, Zea mays
  Clone ID: MRT4577_127923C.1
agcaggaccaaggagcaccattttttcctttagggttaacgttagacaaatcctggcaggagttacagagtgcatggatccacagctcatgctggttagatgcatgggtctgctgcagcaccagatgaatagaggggggacaggtgacacatagcgagctctgcactcaaaacacaaatgggctagaacaaacatgactaacgaagataaaccctctggtactagggtcaacatcacagtacgctaacctatagcttggcctagcgggcc

SEQ ID NO: 30609 - DNA, 382 bp, Zea mays
  Clone ID: MRT4577_127924C.1
gagattcatctctgtgattctcttaatgaacagtgccagccttcttgctcaagaagtcaagtccgcagtgaagtaccggccatcgacctagcccgggttctagatttggggcccatcactcggagaggtgcacagtctcccggtgtcatgaatggaacccctagcactgcagggttcctggtggcctggcctatggtcctcctgactgtcctcctggcttggctgttctgagagctccgctgagcatctggccttgaagtttgtgttcttccctctggcaatggctcccttcagcacttctgctttccactccaattcacacagccttggtattaacagaatcaaggccaggctaggtcaggaaaagggaagagctttcacc

SEQ ID NO: 30610 - DNA, 810 bp, Zea mays
  Clone ID: MRT4577_127925C.1
ctcgtacttctctcaaaacgaaaagtctgatctgaagctcagcagacgtgaaaccgacagcacgtacgtacgtacgtgtgagggctgctcggcggccatgggagaatggtgcttcaagaaacgcgcagctctggtgattattgtggccattattagctcgctgcagctgctcctgataactgctcaagaagctggaggagaccacgaggtgtggtcgtcgtcatcctcgccggccggtggtcgtggtggcggcgccgtcgtcgtcgtcgtgttcgggggaggaggcggtggtggtgtaccagagcagcgccaaccctctgcccagcggcatcccggcctacaccgtgcagatcatcaacgtctgcggcggagggtgcaccgtgtacgacgtgcacgtctcctgcggcgacttcgcctccacggagctcgtcgacccggccaagttccagcgcgtcgccttcgacgactgcgtcgtcaagggcggcgccgccttggaacccagcgagaccgtctccttccagtactccaactccttctcctaccagctcagtgtcgcctccgtcgcgtgccactagagatcatcgaccactactactagatgatcatcgtcggtcgtcgttacgttgtgctgtactagtactactgctgttgttatgctaaccagctagttccacgtacgttaattgttgagtctatctgcatgcacttctgtttaatttccatcgtgtgtgtgtaactatatatttctacggtcgtcgtagttcggcatcaaactggaagtgatcatcaatggaaaaatctctatctccc

SEQ ID NO: 30611 - DNA, 929 bp, Zea mays
  Clone ID: MRT4577_127926C.1
aaaatggtgcgaggcaaggcgggcgggggtatcatacatgtgttcaaaacgaaaagtctgatctgaagccagcagacgtgaaaccgacagcacgtacgtacgtacgtgggctgagggctgctcggcggccatgggagaatggtgcttcaagaaacgcgcagctctggtgattattgtggccattattagctcgctgcagctgctcctgataactgctcaagaagctggaggagaccacgaggtgtggtcgtcgtcatcctcgccggccggtggtcgtggtggcggcgccgtcgtcgtcccgacggcgcggatggggccggacgggtcgtcgtcgtgttcgggggaggaggcggtggtggtgtaccagagcagcgccaaccctctgcccagcggcatcccggcctacaccgtgcagatcatcaacgtctgcggcggagggtgcaccgtgtacgacgtgcacgtctcctgcggcgacttcgcctccacggagctcgtcgacccggccaagttccagcgcgtcgccttcgacgactgcgtcgtcaagggcggcgccgccttggaacccagcgagaccgtctccttccagtactccaactccttctcctaccagctcagtgtcgcctccgtcgcgtgccactagagatcatcgaaccacaggaccactactactagatgatcatcgtcggtcgtcgttacgttgtgctgtactagtactactgctgttgttatgctaactagctagttccacgtacgttaattgttcagtctatctgcacttctgtttaatttctatcgtgtgtgtgtaactatatatttctacggtcgtcgtagttcggcatcaaactggaagtgatcaatcaagggaaaaatctctatctctactatattaaagcactaattttctggtttataaattgaagttattactc

SEQ ID NO: 30612 - DNA, 148 bp, Zea mays
  Clone ID: MRT4577_127927C.1
cccggtcgcccacctcgctacgttcttcagactagctgtgtgtgctctttgggctgaatttacttaggcacgtgcaggtcatgtgggctcgccgctttcttcatcatggatgatcttgtcttcgatctctgggctgtctgtgtggccc

SEQ ID NO: 30613 - DNA, 381 bp, Zea mays
  Clone ID: MRT4577_127928C.1
ccaacaagcaacatacaacgtttttttctagtagcatcaatagagcaacaatggcggccaatatattttccatccttatgctccttgctctttctgcatgtgttgctaacgcgaccatttgacctcaatactcacaagctcctatagctgcccttcttccaccataccttccatcaatgaccgcttcaatatgtgaaaacccagcccttcaacccttcaggctccaacacgcattcgtgaccagcaacttacctttatcactcctgttcttttaacaatagccaggagtatctttgttgcactcattggtacaaaccatacaagctacacagctgcatctactcgagctactcagtgatcagccaagtaattttaccacac

SEQ ID NO: 30614 - DNA, 497 bp, Zea mays
  Clone ID: MRT4577_127929C.1
cgggggaactcgccgccgccccaggctagctagatgattgggtgcgccaagccactcgcggcgccgatgcaggcatggactcgaccgccgactccagccggtcgccgcctccccccctcgatctgagctcctgacacctccccagctatcacccgcgccggcaagagcccaagccagtatcagtctgacgacgccccgccaccacgctcagatgaggcgcggggggacctagcaccgagcgcgagctcacatctcaaccgatggtcccgggcgggggcgctaccgtcgggacaccgaccagagctgaaccgcgcggctctctcctaggcctcggtctcggcgccgccggaggtcaagtcgccgtggaccaaggacactgccacggccctagaggacggccaggacgacgacgtaatccaggacaaaaggaacgacaagaacgcaaagaccatctacataatgacaaacggaaccgataaaaccgaagaaacactcca

SEQ ID NO: 30615 - DNA, 598 bp, Zea mays
  Clone ID: MRT4577_12792C.1
ccggccgggctttttctgtcgacgcgtaccaaaatctaggattcactaaccctagaatacgtctcctccgcatgcatgtctatccgacctctcttgccgtaggaagaaacaagaagaccaaccaaaaagcggcaaagtcatacgatgaatatctacaacctccttcgttcttctctaacgattataggccaaagataccaaaagcaacttcaatgctgcgattgtcgaaagactctttatgagccttaccaatctgctagcattttccttgagccgctcttgtcaacctcttggataggaaaagagaaaaacattgttgagatagttgatactctcacagatgctctcacgataacaagaagatccagcaatgaatattactgccttgaggctcaacgaaacaggaaagaccagaatagtcaaagatgctagttatggacacagcatatgaccatgtatgctctctgatctccacatatgcatgagaactgatccctcttagccatgatcgcaagaatgtcccaatacgagaataggtacttctggaaagatactgtagaggcgaattctcaccacagaggcatatcttcgctacatg

SEQ ID NO: 30616 - DNA, 482 bp, Zea mays
  Clone ID: MRT4577_127930C.1
ccacgcgtccggtcctcccgccgccggcgctttccgattttgtgcactccaaccttcacgtgtctccgccgcccgtccaaagcaggaaggagctccgccccggaccgatcgagaagcgagcgacaaataagggttcctcgggccgccgactgaccacctgacgcctccagctctatcatcgtccctccaacgacccgcgcagcaaagcagccggtcctcccgccgccgccgccgacatgggcgggggccgcgcgcaggtgaacaaggcccacaagagccgcttcgcgtccaaggcttcccgccacacgcacaagatcgacaaggtcaggagcgggaagtcagaaaccagccaccgcgccgctgtaaagggggcccgcgccgcccgcatccagcagagcaaggcgatccgtgataaaaaacgtgctgctttgctgaaggagaagcgctcgtcaactggaccttcaagcgcaccgcgcgtcatt

SEQ ID NO: 30617 - DNA, 844 bp, Zea mays
  Clone ID: MRT4577_127931C.1
ccctcgaggccggccgggccggcctcatacctcaatcatcatcttctttaatcaacactgcgagagcctccctcctcgttcggttcggacttttgcttcggcgactttacgcggtaggccaccgtaaaccctagccccagaccgcgggtcatagccaacgagatgcagatcttcgtcttgacgctgacggggaagaccatcacgctcgacgtcgagagcagcgacaccatcgataatgtcaaggccaagatccaggacaaggagggcatttcgcctgaccagcagaggctgatttttgctggcaagcaattggaggatgggaggacattagctgattacaacattcagaaggagtcaacactccctttggtcttgaggctcaagggtggaactatgatcaaggtgaagacactaactgggaaggaaatcgagattaacatcgagcccaatgacacaattgataggatcaaggagcatgttgaggagagagaaggcatcccacctgttcagcagaggctcatttatgctgggaagcaacttgctgatgacaaaactgccaaggattacaacattgaaggtggttcagtgctccatcttgttcttgctctgaggggtggttgctagattaaaaagttcttgtactttctgcttatgctatctgttacatggagttgttttagaattgaagccttgtattgggtggttgattgtaccatgtgattagcacactactagagtcaggtgtcatctgtactgtttaagaaatgcttgaactagttcattcagttgtcaactcattctaattaaaaggcccctagggccctggtctgccctttcacctgca

SEQ ID NO: 30618 - DNA, 297 bp, Zea mays
  Clone ID: MRT4577_127932C.1
aggcgtctgaaggcaagatgggtcaccagcagctctactggagtcacccgcggaagttcggccagggttctcgctcttgccgcgtctgctctaaccgccacggtctgatccgtaaatacgggctgaacatgtgccgacagtgcttccgtcagtacgcgaaggacataggcttcattaagttggactaagcgacctgaatggatgattcgactgtctacccaatgaaaccaactgtctaccctgtgataccaatcatgctagtctttgtgcacacagaataaaaaactgaaggcctct

SEQ ID NO: 30619 - DNA, 1949 bp, Zea mays
  unsure (1)..(1949): unsure at all n locations
  Clone ID: MRT4577_127933C.1
gcacgagccgatatcggggctctcggcgtccccaaaaacctcacccctctcttatccgccccaacggccgcccgccggccaccacctcaccggcgagatgctgacctgcggccgctttatctcctcctccgctgctaccagcaccgcatcctttttcccgtttcggactctcactcgctccctcgttcgccgccccgctccccacctcctctcctctgcctccgccgccgccgccaccgccgtggaactcgacaccaatggagacggtagtgcgggaggtggtgccggtgtggtgaggccgcagtggaaggccgcgattgatttcaaatggatccgagacaaccgggatgccgtcgccgacaacatccggacccggaactctaccgccaatctggacctcgtcttcgagctctacgatcagtacctcacactgcagaaggaggttgaaaggctccgagctgaaagaaatgcggttgccaacaagatgaaagggaaactagacccatctgttcgccaagcccttgttgaagaaggtaagaacctgaaagagggacttatagcactcgaggaggatcttgttcagctgacagataagcttcaacttgaagctcaaagtattcctaacactacccatccagatgttcctgttgggggtgaggaaagctctgtcctcaggaaagaggtaggcagtcagaggagcttcaattttgcaatcaaagatcatcttcagctggggaaggaacttgatttgtttgactttgatgcagcagccgaggtcagtggttcgaagttctactacttaaagaatgaagctgttttgttggagatggccctagtaaactgggctatttcagaggtctccaagaagggtttcacaccactcataactccagagatcgtaagatcatctgttgttgagaaatgtggctttcagccaagggccaaaaacactcaggtatactcaattgaggacagtgatcagtgtctcataggcacagcggaaattcctgttggaggcatccacatggactcaatacttgccgaatccgctttgcctttaaaatatgtagcatattcacactgttttcgcacagaagcaggtgcagcaggtgctgccactaggggcctctatcgggtacatcaatttagcaaggttgagatgttcatattctgtcggccagaggagagtggaaaatggcatgaagaacttattacaattgaagaggatctttatgcatcacttggacttcatttcaaaactctggacatggcaactggggatctgggtgcaccagcctaccggaaatttgatatcgaggcgtggatgcccggcctagagcgttatggtgagatctccagtgcatcaaattgtaccgactaccaaagtaggcgactaggcatccgttaccgcccatcaccctcggagcctccatcaacgagcaccaagaaagggaagggagctgcctcaggccctacgcagttcgtccacacgctcaacgctacagcagtggcggtgcctcgtctgatagtttgcattctagagaattttcagcagggcgatgggtcgattgtggttccagagccactaagaccctatatgggtggactagagttgctctccccaaaattcaagtgaccctctacggtcacccgctgttgtgcttgtgtggacttagaactgtctggctgaagtacaagttaaaggaaggtcatttctcactacaaatatacactactgagtttcgtgattggggcttctgtttcataagcagtcgactactctgatctgatctgcatagcattatactggtcggctactctgatctgcatagcactacaaagcttatgtgcatgcattaggccctctatggttcccaagaatcgagtgacatttaaaagtaatctaatactccttacattctaaaaaaaaaaaaaaaaaacccgcggnc

SEQ ID NO: 30620 - DNA, 428 bp, Zea mays
  unsure (1)..(428): unsure at all n locations
  Clone ID: MRT4577_127934C.1
cggacgcgtgggtttttnttttttttttttttttttttttttttttttttttttttttttttttttttttttttttttttttttttggaaaactaactgcctttttttcctgaaaaaatcaagggctggccaaagttttttattgggaaggaattttttttggattgggctggccaaaaccttaaacttgggttaaaacctggggaccaaacttgacttttgccccttttttaaaaatactggacgttcttggaacaaattttggtgggggggggattttccctggggatgtaagggctggaggttttttttttttaggccccaaggaattttgagctggtttgggtactgttgttttttgaactgggggggcccccttggacaactgatcttttggaatttttggggccctcttttgtttttttaaa

SEQ ID NO: 30621 - DNA, 1078 bp, Zea mays
  Clone ID: MRT4577_127935C.1
gcacgagggcagcacagcatctccatctatccaaatggcagccagcagccgtccccgccctccacccgctgccatcctcgcagtcgcagcccctcaccatggctgccacactctcctccgtggctgccccttccctccccaagcacgtctccgttaccagagctcagcagcaggcgcctccttccatcatctcggcatcaactcaaagactgccttccatggggtgtcgctggtggtggacaggaggtgggcggccggccaccggagaggcagcggccggcggaggctgctgcaggtgaacgcgaggaccgccgccaagaacatcgaggtggaggtcgagaagccgcttggcttagccttgggccagaagcccggtggtggcgtcgtcatcacttctgtggagtctggagggaatgcagccagagccggtctgaaaaccggggaccaggtcctgtacacaagcagcttcttcggagacgagctgtggcctgcggataagcttgggttcaccaagacagccatccaagcgaagtcagactccgtctacttcgtcgtgagcaggggtgccgaagttgacgtgaagcgcctacctaagaggccggcgccaccccggtttggacggaagctgactgattcacaaaaggagagagcaacgcacgtctgccttgattgtgggtacatatacttcctacccaagccttttgacgaacagcccgacgactacggttgcccacagtgcaacgcgccgaagaagcggtttgcgaggtacgacgctgccaccgggaaggccatcggcggcgctctgccgcctatcgccgtgatcgtaagtttggtgatcggcatcgctggggtaggagctctgctcgtgtacggcctgcagtagcctgctcgttcttgttcagaaccttttttttttttttgctgtgctcaagaagctcagctgactgctgctgtactctgtctcacaagacattccgagtgatatacatacataaaagggaagaaggaaatacacagtatttgaggctaataaaaagaaaaataaaaaagcaaaaaaaaaaggaaaaaaaaagcggcc

SEQ ID NO: 30622 - DNA, 565 bp, Zea mays
  unsure (1)..(565): unsure at all n locations
  Clone ID: MRT4577_127936C.1
ttgcccagcaggncgactctagacgctatgccaactactgtcccaacagggctgcttatactactccagctccgatgaagcagggtcaagcctcagcaggcaagaatcagcccttatttgtcaaccgggggcaggtcaaccatgcagaagtagaatctgaaccttgtgaacctgaaaaccaagaagaagtgctggttgaaggtgaagaagttggtgaaaaaggcaatgaacaacaggattagagtaaaaataaatatataaatatacatatttttaggagtattatttgtaagacctaaatattactttagttagtagctagtattttactatattaggaataataataaggtctatctgaccctatgttttgctaataagttatgcatcatgttgagatttttgtttgtgcatatgtttcgagacaaaatttggatacatcatttttcttactaatcttgaggacgagatttcttttaagggggtagaatttgtaatttccttaatcctattttacgatttatgggaaattcaccttagaagtttgagtaaaattttttttaat

SEQ ID NO: 30623 - DNA, 336 bp, Zea mays
  Clone ID: MRT4577_127937C.1
acgccgcagcgtacaaagaggaatacagtcagtccgatagagcaacaatggagggcaagatagtgtacatgcttatgctgcttgctcattctggaagagtggctcacgcgactcattgctcgtcaatactaacaagctcgtatagacgtcctgcttgcccgataccttccatcaatgacagctgcagtatgtgaaaagccagtccttcaacagtacaagctgcaacatgcaatcgcaccaagcatcttacgttgatcaccacatgactttcaacaatcgtcgcgcctatctttggtgctgtcatgtgtacaaaccatcacggcacaacagctggag

SEQ ID NO: 30624 - DNA, 710 bp, Zea mays
  Clone ID: MRT4577_127938C.1
agggaactcacccacgtccgcatcgcgtggaacatttccacgcgaaggcgaggggagggcgacgcgtgcggctagcgaggcgatggttgcgcgacacgctgacggcgacgcctgcgaccatcgatcatccattgttcatctccatccccttcggtggccaattttctctccggtccttagcgatccgaagaaacatgcaatctgaatgtatattggacctacagacttgcttgcttctttaccattgcaatctgaatgtctaatatgcattttgggcttcttttgagtcatgttgttggtgtggaaccgtggaagtaggatgtggactgcaaggatggctagtttactctttactggcattgacagtttacttgtcgttcttcagtcatttggtggcatgtatcatcaagcttctgtcctttctatacattgttatgaacgttgctatgccttttatttcgaatgctgatgcaatctacgagtttctatccttgtatgtgtgcatagacattgttatgaatgctgctaatgtcttttattttgaatgcttatgcaatctattgagttgtatgtgtgaaaaaaaaaaaaaaaaaagggtttgccggcatgtatcatcaggctcctatcatttcttgtatatgtgcaaagacattgttatgaacgttgataatgccttttattttgaatgcttatgcaatctacaagtttct

SEQ ID NO: 30625 - DNA, 477 bp, Zea mays
  Clone ID: MRT4577_127939C.1
ccggccgggcccggacttttctcatccattttccccgagtctagccagggaactcacccacgtccacatcgcgtggaacatttccacgcgaaggcgaggggagggcgacgcgtgcggctagcgaggcgatggttgcgcgacacgctgacggcgacgcctgcgaccatcgatcatccattgttcatctccatccccttcggtggccaattttctctccggtctaatatgcattttgggcttcttttgagtcatgttgttggtgtggaaccgtggaagtaggatgtggactgcaaggatggctagtttactctttactggcattgacagtttacttgtcgttcttcagtcatttggtggcatgtatcatcaagcttctgtcctttctatacattgttatgaacgttgctatgccttttatttcgaatgctgatgcaatctacgagtttctatcctaaaaaaaaaaaaaaaaaagcggcc

SEQ ID NO: 30626 - DNA, 1352 bp, Zea mays
  Clone ID: MRT4577_12793C.1
ggccggggtagcgagttgcacagaccgccgcgaggctgacgggagataccgctccggaccccaccgcgcagccgccgtgtcggtcgcttcgtcgccgtggaccgcggtggtcgaactagtcgcctactcctccagacccacgaggccacgaccccgacccaacctgggctggggcggctgggcggcacgccgctgaaacggtctccaaccccactgggcaactgcaactgcctgcgccagcgcccccctcgattgaaatctcgccgccagttcggtcgcagtcgcaccgcagccgtcttctccttcccttccctcctcgctaaaaagccaacgcaaccgcttctcctcctcctccgcctcctcctccctccccaactcccccccagcacgcctcagcccgcattccgccacccacgcgactgatcgaccgacgacttccccattcccgccccgcaacccgcagggctctgggctcggaggaaccgagggcgggggacctccgaccgggccgggcgacatgttgggcgacctcctctccaggatcctcctgctcctgttcggctacgccatgccggcgttcgagtgcttcaagacggtcgaggcgcgccccaacgacgcccgcatgctgcgcttctggtgccagtactggattatcgtggccatggtgatagctgttgagagcgtgatctcttggatgccaatgtattcagaaatgaagctagctttctttgtgtacctgtggtaccccaaaactaagggaagtgacgttgtatatgacacctttcttcgccccatagttatgcaatatgaaccgaacatcgagcagagattgctccatctaagggcaaaatctgggcagttaatttccttctacatgaagaattttgcggataaaggaacagccttcttcatggatgtcctccgttatgtcgtatctgagaaacctgaaggatccaatgcagagcaaaggagcaagaagtccggctggagccccttcgcgaccaagcgccgaccaccatctccgccgccggagcccctcttcgacagcaacccggacgccgccgtgctggccgaggccctgcgtggcgccatcggtgcaaagccccggcgtgcgcccaacgacaagcattactagagggaattattaagagcgattttagggatgattgtttgtacatagaatgaacgaacgaatcaatcaaaggcacagaggggggaaaagagttagtacatagcaaaatccagcaatacattcaccattgtgaagaacggatggatggatttgtacctagtacggttcaagtaaatctgatatgatggaaatggttagtttttattgcgtcgaaaaaaaa

SEQ ID NO: 30627 - DNA, 668 bp, Zea mays
  Clone ID: MRT4577_127940C.1
ccggccggattccccggacttttctcatccattttccctgagtctagccagggaactcacccacgtccgcatcgcgtggaacatttccacgcgaaggcgaggggagggcgacgcgtgcggctagcgaggcgatggttgcgcgacacgctgacggcgacgcctgcgaccatcgatcatccattgttcatctccatccccttcggtggccaattttctctccgggagaaagctggcgcgggttggaggtgggaagaaagagaaagaagatgttgttgcgccttcgattggattgggttggccttggagcgcgtactgccgccgcatgtattcgctgttccggccctgattctatggtgcaccactgtgctgtgcgccgccccagccctcgaggatttagcaaactgctcagatctgttctcgctttgcttcatcagtgaacactgaacacgtcatttggtggcatgtatcatcaagcttctgtcctttctatacattgttatgaacgttgctatgccttttatttcgaatgctgatgcaatctacgagtttctatccttgtatgtgtgcatagacattgttatgaatgctgctaatgtcttttattttgaatgcttatgcaatctattgagttgtatgtgtgcaaaaaaaaaaaaaaaaaaggggcggcc

SEQ ID NO: 30628 - DNA, 347 bp, Zea mays
  Clone ID: MRT4577_127941C.1
gccggccgggccgggataaaactaactgaccacacgctgagagaggtccgcgattctggtaagaacgaacatgcgagatgggcacctcctaaaccgtgatgaccgcgttggggcacaccaatacaagcgttgtgctgctaagctacgcgtctgagtgccaccccctagatgggtaaatcccggtacgcgacaacatcaatagcttacgcatctgacccgagtagcatgggaggacgtcgaatcccccgagaatcaggaaggaccaccttgcaaggttaaatactcctgggtgaccgatatggaaatacttccgagaggaactactaaaacaacaaggtccctaaggt

SEQ ID NO: 30629 - DNA, 291 bp, Zea mays
  Clone ID: MRT4577_127942C.1
aaacaaaaaacttcttgaaattaatgttttcttctgatgtaataatggaaggcagagaagtcacatttcttaaaagagcccaactgtatccttgaagttactggaaccaattttatattcagtaatcaggatgcatttgtgtaactccttgactgacacactaataaacaatgtcttaaggtacattgtacactcgcgcttgttttcccctttagtagtgtaaagcctgaaaaagggataaacttgattaatatgtggatttcagttaaaaaaaaatagccccctacaaaa

SEQ ID NO: 30630 - DNA, 235 bp, Zea mays
  Clone ID: MRT4577_127943C.1
acgcccacgcgtccgcccacgcgtgctgcttggccttcagatccgctgaggcagggcttacaactcctgctagctggcagcccgacacgcactctcgcgccacaatggacgtcacaggacgacgacaacacgctggcggccagcgcgtcgcctagatcatccaggcgtagacacctaatacagatgcttctacacgcctccatgacgctagaactacgacccatcgtcaagtacg

SEQ ID NO: 30631 - DNA, 280 bp, Zea mays
  Clone ID: MRT4577_127944C.1
ttttataaaaggaccctctcacggtggatttttttagtactgtgctttacaaccggaaagtgcggatgatgggctggtcatacacacaggctccctctaaaagtatggcagcaacgaccatgttcttaaactggtactaaccgtgaaatgcatgtatacaaaatggagccttgcccccaacagaaaaaaagggtttgggtctaatttgtccaaagcgaacgaagagggcgagagcgtgcgaattgaccaggatgggtcggacacggctagtgggagaagg

SEQ ID NO: 30632 - DNA, 374 bp, Zea mays
  unsure (1)..(374): unsure at all n locations
  Clone ID: MRT4577_127945C.1
aagaagcagcacggccccaaaaccccaaaanncgaannggccnacaagggggggncacggaagcccaaaaaaaaaaacccncagagacaagnangnnnacaggcgggggggccnangaaaccgccgaggggggaccaacccagggaaggcccagcnaaaancaagcggaacacaaaanccagggggggaacaaanncncacagcaccccgaaccaaccaggcaggngggcccgggaaccaancaaggggaacagcacagggaggancnaancancanaanccaagccancnncgncgncnagcccggaacnancaaccccacccancagcgaaaggaacacaagaacggcaacgagggggggggccaggaaaaa

SEQ ID NO: 30633 - DNA, 372 bp, Zea mays
  Clone ID: MRT4577_127946C.1
ggtcgacccacgcgtacgtgctcgacgaccatggcctggccgctgttcaagtgcttatcttagctcatcgcccccatcaccatgagatccgtgaggacagccaaacgctgccccgccatcatagaccacgtcatgtatcacgagatccgtgtcaagtacctccgctataagaccatctttcaactgaacgcgggcgggcgcttcgtcatggacgggccgcacggtgacgccaccctcgccgggcacgtgatcatgatcgacacactacggcgggtgcggagcccacgggggtggtaccttctccggccaggacaccaccatggcggaccgcagcggggtctacgtgggcaggcgtggcgtctagagcatcat

SEQ ID NO: 30634 - DNA, 654 bp, Zea mays
  unsure (1)..(654): unsure at all n locations
  Clone ID: MRT4577_127947C.1
nttccaaagaactgccccactcagaaaatcagtcgtcggagatcgacatcccatgtaagcagtagcgtaacaccccacgacgccgtgatgaagcgcaaaccccgcgtgacgagatcccgccgtaagtgccgcaaggcacactatcacggacccgtcctcagaacaccgcgtgatcatgtacgcggcgctattgacggagctccgccacaagtacaatgcgctttccatccctatccgaaaagacgaccaggtgcaagctcagcgtctcacctacaaggggcgtgagagcaaatcgatgtactggtaccgccgctgctggggcatctacgtttagtggatcacccgcgagaaggtgaacggatccacagtgaacgtgggcatccaaccttccacatgtcatgtcatacaaagttgaatgttgacaaggaccgcaaggcgctcatcgaacgcaaggtccggtgccgcacagtatacaaggctatgggaaagctcaatgccgacgacaccaccaccgatgctgttggcgcctgcgacactggtatgtctctacatcagatcaactaagcacttcgagaagatctgatggagatgctaccacctattactcattatcgctctagttttcgctatcaatgattatgtgctacgagtttt

SEQ ID NO: 30635 - DNA, 392 bp, Zea mays
  Clone ID: MRT4577_127948C.1
gtgtgtgtgtgtgtgaccgtgcgtgaggcgtgagtccgtgaccattcccgtcggccgtccccaaagaagcggaaatttacaacccagtccaccacgggccacacaatccccaaatctaaccctccgacggcgatggggatctcgagcatgccggagccgcgggacagcctgcctcgagacctggctccggtacgagcgcgccacgtgcccgctctgccgcgcccacgtgcccctccccgccgacgagacgccgctgctccgctacccggagttcgaggatccgggtaaaaaccaccccggccccccaccccccggcgagcggtgaccgcccccgtcgcgcgcgcctcggctgtgtgctgcaagttccgtgtggccttccgtgtacgcgtagc

SEQ ID NO: 30636 - DNA, 286 bp, Zea mays
  Clone ID: MRT4577_12794C.1
gaaattgtatttagcacgttattttatcaagaaaaatgaagattttacaggaccttgtaacacacacaatccaatcacaacccacatcataaacactgtaatattataaactgatgcctttcatttttcaagtaacagaatgaaaacaatatatattatgaaaccattaattgacatatcactaaaaattactaatgccaattgcttaacatttcattttcaaataactaatttaaattcataatatatataacaacaacattttcaataatattatacattcaaa

SEQ ID NO: 30637 - DNA, 389 bp, Zea mays
  unsure (1)..(389): unsure at all n locations
  Clone ID: MRT4577_127950C.1
ncgggaaagaagtgatgttccacgtagtagcgctgatccagatgcgcgcccggtggaggcatggggaagccggtaggatttgggtgtgggagttcttggcagacgccgaaatgttgagggttagggtacgacaacatctgtggtgcactgtttgtacaagcttctagctagtaagagaagagatctagctagttctagtggtactgccactgctactgcttcttcatcatcttcttcgcttgctggagaggaggcacggccgcgcgggccgtgggcgagcggccgagcgtgctgcggcgctggagtactggagcctggagaggacagaggagggcaggaggcgcgggccgcgggcgagcgcgctgcggcgctggagctgaagaggaggt

SEQ ID NO: 30638 - DNA, 955 bp, Zea mays
  Clone ID: MRT4577_127951C.1
ccggccggggtgtgtgtgtgaccgtgcgtgaggcgtgagtccgtgaccattcccgtcggccgtcccaaaagaagcggaaatttacaacccagtccaccacgggccacacaatccccaaatctaacccctccgacggcgatggggatctcgagcatgccggagccgcgggacagcctgctggggtacctggtgtacaacacggtgatctcgatcgcggcgctggcggggctggtgcgggcggcgctggtgttcctggacctgcaggccgcgctgccgcccggggacgacggcggggaccgactggcggcgtcggcgcccggcctggcggagcggttcctcagggccttccggccggcgctgtacgaggtgctggcgtcgacggcggcggcgacgactgcagcgtgtgcctggccgggttcggggcgagggccgtggtgaaccggctcccctgcggccacctcttccaccgcgcctgcctcgagacctggctccggtacgagcgcgccacgtgcccgctctgccgcgcccacgtgcccctccccgccgacgagacgccggtgctccgctacccggagctcgagtgatccgggcctcggcggccgtcgcgcgcctcggctgtgtgctgcaagctccgtgtggccttccgtgtgcgcgtagcaaaaggaaaaaaaggagtataggagcggtagtagtagagttgctgttgctttccctttctcgttttgtgttttgcggttgccctgcccccatgctcttgttgtttccgcgctgtcgctgtagcgtgtaaatactccggttcgcccttggcagcagagagtagtagagtgctcacgtggctgggccgatggtgtagcaccttttacgagctcagctcgtgtgtgtacatttgcatgctttcaattccaatttcccgagacaaaatatcgaggacaaaaaaaaaaaaaaagggcggccg

SEQ ID NO: 30639 - DNA, 222 bp, Zea mays
  Clone ID: MRT4577_127952C.1
attcggctcgagccgggtcgacattttgactatacgcacgtcgcccatgttttatggatggttttcaagacaccaagcgtgcaaccagaccggattaaaccagcgtaggcgggcctaaaaacgatcaaacctttcctccttacagactgacccaagaaaatttgggggagggacaggaatctcaaataacccccactggggggccaggagttgaaacaaaac

SEQ ID NO: 30640 - DNA, 2746 bp, Zea mays
  Clone ID: MRT4577_127953C.1
ggcagaaccgccattgaagcgggaagaaatcgaagaaccctcgaaataggagaaggaaacaaatcatcctcccatcccgagaagagatggcaacaccaacagccaacagaaggtggggggaaggggacaccgaggcgggcaacgggagcaggtcgggtgggcggtggggggaggaaacgaacaaggccgcgcggtgcgcgggccgccatgtggacgccatgcgcggacgcggcgtggacgtcgtgacgacgcgacacccgccgctcctcccggcccgcaccgccatggccccgccgccgccgcaatgcgcctcaaaacgtccctccgcgcctgcccccgccctccaggtaggggacatggcggaggaggcgtcgccgtcgccgtcgccgcccaagttgctctacattgccatcgccgacggcggggtccgccgggcgttccggtacacgcgccccgtgctgcagagcaccctgcatctcatgggatgcaagcctcgccatgccttcaagattagcaagagagtattcaatgtgatgaagagtgaattcttggccacatcaaagtcagatggggcaaccaaacaagaaaattatcctgcctttggccttggagatggtacagatactccaaaaatgttggagagaagcaatagcagcgtaccatttgaattatacaagaaccagactaccgttgttgtttcaagagaggagtttgtaagtgttgtatgtgatgccctctctttgtacaagtatgttggacccaaccagaaagctgacctgcttcttgcttgcagaattaaagagagaaaggaatcggtggcaatactcttgtgtgggacaagtggatgtggcaagtccactttatcatctttgctgggtagtaggttgggtatcacgacagtagtttctactgattccatacgacatatgatgagaagctttgcagatgaaaaacaaagtcctcttctctatgcatcaacctaccatgcaggtgaatatttggatcctattgcagttgctcaggcaaaggcaaagcgcaatgcaaataaacccacagttgtttctcatccaaataccagtggagacaaagatgtgacttcaggtgacaaatctcagcatggatcttcagaattacctcctagagctgaattgattggcaacaagcaaatggcagtagaaggctacaaggcgcaaagtgagatggtgatcgacagcctggacaggttaattacatcctgggaagagcagaaagaatctgtgattgttgaaggagtgcatctaagccttaactttgtggtacgtattagtcaagaaacagtgcagggatgggattaatgaagaaacatccttccataataccatttatggtatacattacaaatgaggataaacacatggaacgatttgctgtacgtgcaaagtacatgactctagacccagcaaagaacagatacatcaaatacattcgaaatattagagctatccaggaatacctatgcaaccgagctgacaagcatcttgtgccgaagatcaacaataccaatgttgaccagagtgtggctgctatacatgcaacagtcttcagctgtcttcgcaggcgagcagccggggagcaactgtatgacctcaacacaaacactgttgctgtagtggatgaggaatacaggaaccagcgtgcagctaacaccttgggttctaagggcatgtttcagttgatccaaaggaaggggtcttcaaggaatctgatggcacttcttaacaccgacggttcagtcaccaaagcttggcatgtaagtgcaagtgatggcaatgggaatcttaatggtatcacaaacaacaagaagtctcctgaaaatcctatgctggatccctcacaaatcgggaaggcagaagccgtcaatctccagtttggtccttttgggatcagtgcctggatgagtgacacgggtggaaccagccatactgggagtgtggaagacctgaggcctgatagtgtggagactggtggtagaaattattcgtcgtgctgcagttcgccaaagatgtcagattccacctcgaaggagcttatggaggactactcagtctatggcagtgacgaagaagctgacgaccctcgtgatgctgaaactgatgatgacctaactgatgaagaaagagacatgcacgagatagatgcaggctctgtagacgagcactcaaccaagtcggatgaggaatacgaggacttagccatgcgtgatgtgatggagaatggtgactggtctgacgacgaccaagctgtgggcaaaaccaagaactcaccagcccaggagagcatccatgggagtggggcagctgaagatgatggcataaagggccggtaccaccacaacctggacctgttcctgaaaatgtccaaggaggtagctggcacaagaatgccttgcgcgtcatagtgccaccagggtggagagaaggccggcgacacgctgctctggtcccagtgggtggtatgtttcttgggcacctgcttttgtgatgctgtgagcttgtgctgttgagtgtacaccggtggctgtggctttgtagcatgtacctgtccaaactacaaaatgctctcacctggttgtaaagagaggacctgatgctttgtcatatcatgtagtaggagtattatgtttgacaataatatgctctcacctggttgtaaagagtggacctgatgctttgtcatatcatgtagtaggagtattatgtttgacact

SEQ ID NO: 30641 - DNA, 552 bp, Zea mays
  Clone ID: MRT4577_127954C.1
ccggccgggctgccgcgcccacgtgcccctccccgccgacgagacgccgctgctccgctacccggagttcgagtgatccggtaaaaacccaccccggtcgcgtcgcgcctcggctgtgtgctgcacgttccgtgtggccttccgtgtacgcgtagcaaaccaaagaagaagaaaaaaaaggtgtaggagcagtagtagtagtgcagggttgctgtcgcttgctttcccctttcgcttcttgtattccccctccctcccattctctttgctgtttccgttccgtgctgtagcctgtagcgtgtaaatactccggttcgcacttggcagcagaggcagagtgtagagtgctcccgtggccgtggctgatggtgtagcactttttacgagctcagctcgtgtagtacattgcatccttcttcctattcaattctcccccgactggctaaaatatcgaggactgtttcgaaaaaaaaaaaaaaataagtggcggtgcagtgcatactgtaataataactccacagcaaaaattacagcaaaatctgcagaattcat

SEQ ID NO: 30642 - DNA, 748 bp, Zea mays
  unsure (1)..(748): unsure at all n locations
  Clone ID: MRT4577_127955C.1
gttttgatttaaaacccctanagaattatcctcattttcacaggattgaactttatggtgttacaaagaaactgctctgagcttgaccccatatacaattagtccatgttagccaaacgggacatttgctgagacattgatgtgtactcacccttgcttaaaacaccaaaaacaccaggttgtccacattgcaacccctactgaggagaagatgaagtcgtgacagaggatttgcaggagttccaagactatgatgagttctaggtgtgggttagcggcaacccctagtcggctgcccgtgaaggccgagttttactacgtttcgttttcgcactttgatctatgtttaagactatgtggatgtctcgggcatcatgatgaaatcaaattaatacctctttacgtcattatttgagcattgtatgatgatgtccagttatgtaatcgatgtgtatgtgaatttctgatcctggcacgtacatggtttgcattcggtttgccttctaaaaccgggtatgacaccatcgaggaagatgaagttagcattccataaccctaacttggcggcaacggtggcgatagcccttaggcagagcgagggtggggacggtacacaccgtgggtgaggggaggtgggtactatttttttgtctgccttagttaatcgtcgcttataaaaggtgcacatgtcgctctaaaatggctaagcctttcgtgtggtacatacacattctcttgggctacctaa

SEQ ID NO: 30643 - DNA, 797 bp, Zea mays
  unsure (1)..(797): unsure at all n locations
  Clone ID: MRT4577_127958C.1
ccgctgangcgacctaccagacctcgtcctcgctcccgccgcacggccgccaaccatggccttcaccgctaaaccctactgctccaccaccgccaaaccttccacacccaccgcccatcgctcgccatcccctccatctccgtccgtgccgccggcaagccgtcccccagtgttgttagcctctgcgcgctggaccagtgcatccgggagcagcaatagcctccgcgacgatggtccgacatgcgcttcttcgacaccacattgtgcgacgggaagtagttgccgagcgccactatgacaagcaccgagaagctcatccacgcgcgccagctagcccgcctcggcgtcgatgtcatcgaggtcgggttctcggtctcctcctccaacgaacttgacacagtgtgctccatcttcatcgaggttggcaacccgccgggggcaacagcacccacgtgcccgtcatctgcgacctctcacggtgcaacaggagggataccgaagatgcatgggaggccggaaggcctgatgcgctccagtgaggtgtgggcgtctccggcggcctgatttgtacgaggcgagggcgtatcggggctggggacacgaaaggccaagcgcacaggacgtacgacagtaagcccgccagcaccgcaccagactgccacccgcgaggcgcccatgtcatggcgccatgggggcggcacgctgacccatcgacgtcaccctcttccacccttcgatcgacagcctccagtttccttaataggcttcgagccgactctctgccacacacgtttctc

SEQ ID NO: 30644 - DNA, 444 bp, Zea mays
  Clone ID: MRT4577_127959C.1
ggggggcgggaaacaggggcattggccttattaaactacaaacatgcccatgggtttttacaaggcccgcaataaagggtccaggaaaaaaacggggggcccatcaggccccggggacaaaaacaggggggggaaaaaaagggggcaacggggggaaaaatttttacagaggatcccaatctacaatttatggattttaaaaaaaatttgggaggccttggttacacaaaatttacactagttcaccgggccttgttttcaaaattggggaaaccaggggggggggcaaaaaacagttttttaaatttgccgaccaaagctttttaaccttgggggggatccccgaacttttgaaaaactaggggaaaaaataaaacccccaaacggggttttatgacacccgatgttatttttgggccataaaaaccaggtgcccggtcaaaa

SEQ ID NO: 30645 - DNA, 588 bp, Zea mays
  unsure (1)..(588): unsure at all n locations
  Clone ID: MRT4577_12795C.1
aygcagaatatgcytytttaytcaagaaagaaaaagaaaaaagagagtattaatacacgsacgacgmaaaagagaamgcacggaacagcgcgcccggygadatttatttatttatttatttyttttctttgaggamattggagagaagaaaactcgatttsgssyccaayscdgyangtaagaagaasacmccsgcdacccgcttatsgcccksgcccctccgggwagttgdtctggaagaagtttgtgagmatstygtmmcacgyggtaggtgmtgagggsctatgccccnatsccgggaagaatccctscaccgmctttgadstagttaatgamccccggatgsmmccrgttgmccgaamtgtaattgraytggamgcccgcgggsytsctccttgttsaaascccdcmagttgttccasmaggccmaggccgmngaccttcycccgagacctccgaggatgccgagaccacccagagtcccgccgagtaccasgtgagscgcgaygtttgttccccytgtcytgscaataattaagracagscaagaatgcchaagtttgttgcttggatagatkccgtsgtgcg

SEQ ID NO: 30646 - DNA, 817 bp, Zea mays
  unsure (1)..(817): unsure at all n locations
  Clone ID: MRT4577_127960C.1
agtttaccctcttcttcgccaggttactgagtggagcagagccgcgaccgtgggtccgccgtttcggagaagaactgctcggtggtttcctcacctccgaggagctccggccggcgagaagcccaggggaatcaaatcagtgttggaatttcgcattctgtaccatggcttctttgctctgttcacagataaaactaaacaaagtatatgttaggaggcaggttcatgagaatagacttacgagattgcccaactctcttcattgtagccccttgcagttgggccactttaaaaacactgcattgcgatgcactgagaatttgccttgggaggcctctcttccgtatgcttccgcagaggatgatgccagcatcatcatgggaacaaatattgttgaagctattgatacagaagaagctccagagattccaatcctccagagtgaccaggatgttgtggacgtgaagaatgaaccttctaagcagctagcaacatttaagctgccaatgtggctgttagggccttcagttctgttggtcaccggtatagttccaactctgtggctgccattgccttcagtgttccttggccctaacatcgctggccttctatccctagtgngactcgactgcatctttaacatgggagcaatgctgttcttccttatggccgacgcgtgcgggcgtccagagaacaattcgttcgacctgacaaggcagatcccaacttcttacagaatgtggaatctaatcgccagcgtactaggcttcgntgctcctctggncctgcctttcgcgtctcatcagggagctctgca

SEQ ID NO: 30647 - DNA, 299 bp, Zea mays
  Clone ID: MRT4577_127961C.1
gaaaggtatgagatgtgaggatgatttctgatagagattcaagacgttccaaaggaattgcttatgtggagttcgtcgatgttagctcagtgcctctagcaataggattaactggccaacgagttttaggcgtgccaatcatagtacaggcatcacaggcagaaaaaaacagagctgcagcaatggcaaacaatttacaaaagggaagtgctggacctatgaggctttatgtgggctcattacacttcaacataactgaagatatgcatcgtgggatctttgagcctttgagagattga

SEQ ID NO: 30648 - DNA, 135 bp, Zea mays
  Clone ID: MRT4577_127962C.1
tctcggacgcctgggcgcccactgaacgggggctgttgagtcacttgacacgttaaccgcccggaaaaggttcgagaagactgagtcaagttagtgtccactctctaaatcctgcgacttcatgagaacaagtac

SEQ ID NO: 30649 - DNA, 301 bp, Zea mays
  Clone ID: MRT4577_127963C.1
ggttttattgttctcattcttgcccttcttttcgtttggtttgagaagccttagacgcacttattaacggaacccccttccagccaattgggcgacccacatggaaggcgcacaatatacaccgtcacgcgctgccgaaaaaaagcaaaccgtgctttttttacaccggtgcatggcgcattatatactgggccagacatgtgacacaaccaaaaggccgtaacggggccccattaaaaagcccatttaacgctgttacctcgggaagcccaggagggcaaggatgagcgcgataaagccg

SEQ ID NO: 30650 - DNA, 289 bp, Zea mays
  Clone ID: MRT4577_127964C.1
cctcattgtattcatagacaaatttttttcaatatattttgcaagaaaaatctttgaataagactaactgcatttaaaaggaataacctccttctccctttccccaactacaaaaatgtttggcaactttgtgtttacatttaaagatcatttgctactttttcaaggaaaaaaagtattgagtaaacaattgtttacatatatcatttatgcttttttctagcatgtataacttttttaaataaaggtagtatttaccattaaaaaaattttagctaatgctttttat

SEQ ID NO: 30651 - DNA, 229 bp, Zea mays
  Clone ID: MRT4577_127965C.1
tggaagggagtcctagcaatcggtctcattcattcatcatccgctggtgaaaagctatgtggttcatatacaccatacctgaccaaatgagtttcaaagtacagcggtatctcttatagtctagagaatgcatatacagatggtgttttctgatcaggaagcaaatcgagaaggtgcaatgggctatcagaaccatgtccgactgacgcggtgagcaatcaggcaacag

SEQ ID NO: 30652 - DNA, 903 bp, Zea mays
  Clone ID: MRT4577_127966C.1
atgatcaccagccttgtggttgggagaagcaagccgggctacagcctctgccccgccctcagcttcaaggatgttcatcatccgggctggggaggagggcgcgccgggttgggtcctgcatcccgcgtgggccgatggcccgcttcttcctccagcattcgtgggagaagggcatcctccagccctgcggaggagacatcctccagctatgcgggggaaggcgaactgctgctgcctggacagggtgtagctgtccatcctccacccgagcgacgatcgtgccgtgcgcaggtggctgctgtcgccggtgctgaagtggtggccgccgctggtcgggaaaaccgtcgagggcgctgccgacgtctaagtctaggtaccattgttaccccaaggttcgagacggctcttgacgaggccgtcaagaactgcaaggcgcttgccgaggcggctgggcagaaggaggctgagcgtgtggccatgtccgaggctatctcggccctggaggccgagcgtgtggccatgtccgaggccatctcggctttctgccaggcctttggcctcgaaggcgtcccctcgggtagctccccccagagtcatctacgggccttgggtgaccatgtgtgcaacagactccgcggggcgctgcaccacgacgttaggcgggccttcgccgtgctcgcttcccactacgacatggatctggagcgggttagcgaggggtactgcttatccgacgaagaggaggctgccttagccgaggtccagagtcttgacgcggctgtcgagggctcaagtgcggcgctggcttcctcctttgaggtggaggtccatccgcccgtgtcgccgtctgaggccgtgccagatcctgccgagggtgccgctcctccccctgccgatgtctga

SEQ ID NO: 30653 - DNA, 672 bp, Zea mays
  Clone ID: MRT4577_127967C.1
atgcggggggaaggtgaactactgctgcctggccagggtgcagctgtccgtcctccatccggacgacggtcgtgccgtgcgcaggcggctgctgtcaccggtgctgaagcggcggccgtcgctggtcaggacaaccgccgagggcgctaccgacgtctaagtctaggtaccattgttaccccaaggttcgagaaggctcttgacgaggccatcaagaactgcaaggcgcttgccgaggcggccgagcagaaggaggccgagcgtgtggccatgtccgaggctatctcggctttttgccaggcctttggcctcgacggcgtcccctcgggtagctccccccagagtcaactgcgggccttgggcgaccatgtgcgcaacagactccacggggcgctgcaccacgacattaggcgggccttcgccgtgctcgcttcccacaacgacgtggatctggagcgggttagcgaggggtactgcttacccgacgaagaagaggctgccttagccgaggtccagaggcttgacgcggctgtcgagggcccaagtgcggcgctggcttcctcctttgaggtggaggtccttccgcccgtgtcgccgcctagggccgtgccggattctgccgagggtggaaacgacgccgagggtgccgctcctccccctgccactgtctga

SEQ ID NO: 30654 - DNA, 254 bp, Zea mays
  Clone ID: MRT4577_127968C.1
attcctggggggggcgctttgctgggtttggttgggaccaccccccgtcgtttattaggttgtcgctgccaactttacggccacaatgtatacgcacgcccggtgatgtcacacaaccaaaagacggcctgccactccattccaggatacacgcgtaaccagcgcacctgtcaccacggacaggggcatggctctgtaagctcaagcggatgccccgcacttagggagaacacgggtgctttatgggggcacgc

SEQ ID NO: 30655 - DNA, 485 bp, Zea mays
  unsure (1)..(485): unsure at all n locations
  Clone ID: MRT4577_127969C.1
aatccaaagccgaacaatttattaaccaaatgtccttttttcacacaaacaaggaattataccataatacatcaaagacgtcaaacaaaacacacataaacatccaaagtgaaacttgaaaatctcagttctcatattcttaaagctccttctgcaccggaacaacagtggagccaagtgattgtggagactcttcaacggaatgaggcgattttggcttcacctcctccgtcgcaccaccaccaaaccagccagatgattttggagcctcttcaacagaatgtggcgattctggcttcacctcatcagtcgcaccaccaccgaaccatcctttaatcctcccaaccattcctcctcctcctttcactttctcttccaccgcctcaccctcctccgatggctgccttctcggtagagatcttctccacttcctttggcggcgnttcctttttctcttcttctcctccaatctgaagtttctcggc

SEQ ID NO: 30656 - DNA, 213 bp, Zea mays
  Clone ID: MRT4577_12796C.1
tattccctgtcgacccactcgtcctaccacacttctcaccacacatactcaccattcttacaaaaaaatctatcttaaatctaaacgagaattcttaaaaattgcttgcctatcacataattattttatacacaacattattccctcaacttacttttgattcaatcttataatctactatatcctcttaacaaattctattctttttcttta

SEQ ID NO: 30657 - DNA, 259 bp, Zea mays
  Clone ID: MRT4577_127970C.1
tctacagcgctgtcatcaaccacacacactcacacacgtttcaaactgactgagaccatggctgatcggtgagcaggaagacgtcatcgatggtggcagcaccgtccgtggtggtggcgctgctgctggcctttgcgtattatgctttggaggcgatcacctgcggtcaggtggggactgagctgtgcccgtgcatccattccactacggcgagggcaagctcgctgccgtcatcatgctgcaaaagaatgcgcagcct

SEQ ID NO: 30658 - DNA, 301 bp, Zea mays
  Clone ID: MRT4577_127971C.1
ttttaccacgcacaatgggtatatacccactggcagataccacaagtggaatacggacgttatagaaagagataacattagcaaggccaagatggttctgcagactacaaagtgacaggttgcttagtgtcgctcgaaaacaaactgtcccgtaaacgaccactcatgactataattagggagaacgagtgcagtccacacactataggctaacagaatagcagtctgtcgagggcatgtcgcctgtcactgcccggtagatgatgaaaagggcgagccggatttccatctattggtacac

SEQ ID NO: 30659 - DNA, 324 bp, Zea mays
  unsure (1)..(324): unsure at all n locations
  Clone ID: MRT4577_127972C.1
gcgggtcgtaattcttcacagcagntcaagtctagttctaatagctacaaaggggggaactggctccgcttctcgctgctgccatgcaacacgctgcaccccatcctggccctacgagccacccacaacgacccaaccatgagagcttcccacggcaccacctgccgacttcttctccacagagcaccaagcgcaagagtaaccttacctttacaacacgaccccgccacagccgccacccaaaacggagcccaaatgtagaccccctcccacaacccacaaacgcacagcctcccccccgactccaccctcccagccgccact

SEQ ID NO: 30660 - DNA, 308 bp, Zea mays
  Clone ID: MRT4577_127973C.1
gcgacgggttttaataaacatgggggtgagtcaacacaggcatagggcaatgcctgagggcacataaacgttcaaaagggggaaaacaatcaagccaaaagactgacacgacaagagggagagaaccagcacacccaatacctgagttcaacaagcacatacacttgatgcgttgttctaacgagatgccagcggaaggaccaaaccaggtggcaaaggagatgtggttgagaaaaaaaacgatggcgctgggccacccctgggatcattatttgttacccgagcacgcgcaagtgggggggcacccc

SEQ ID NO: 30661 - DNA, 422 bp, Zea mays
  Clone ID: MRT4577_127974C.1
ggggtgtgggggtttttttttttttttttttttttttttttttttaaaaaaccataatgaagaaatttagatagagttaacccatgatatacattatacgaacaccacaggaactgggtttttttttttaataatcatgacatccatacatgggggggggggcgaccaataaacccaacatacccaaagtttgggaccacatttcaacattctacgacattacgaccatattgacaaacgccataatttttgtaacccaattttattttaaaaaaagaccgaggggaaatggctttttttaaaccacgcaggttcgacgaccggagaccgaggtttaaccggggatctgaatggattttattttagggtttttggggggtttttttgggacagggactgtaagaacggtgttttgaatgggg

SEQ ID NO: 30662 - DNA, 348 bp, Zea mays
  unsure (1)..(348): unsure at all n locations
  Clone ID: MRT4577_127975C.1
acaccacagggcgacgcagccccgcaaccgcggaccaagccgcggccgcggcaccagcggcaagngcggcaagaagnaccccgaccggcaggagaccagcaccgccgcgcaggccaccaacccgaggggggggggcggcctttaaaaacgccccgccccacatcactacaccgggggggagaaccgccagaccggcccgggagacaccccggcggcaaccgcaacagccaccccggcacccgcggatcacagcgaccgccgacccgacacgggaggacaacctaccaagcggagggcgggggaaaaaaaagactaaccgaggccgggcgggcaacccaacaccaacac

SEQ ID NO: 30663 - DNA, 645 bp, Zea mays
  Clone ID: MRT4577_127976C.1
cggctcgagcgcgtttcacgcgtcttcctcgtgtcgttgagctggaccgaaaccgtctcctgactcctgcaggtcctgctggtgctgctgaacctcgagaacaacctgttggcgccccagttcgagcctgtggtaagacacagagcgctcttctggttctctggctgaacctgaagcttccttttagctcactctgcttgctccgatcttcatcttctctcgacagagaaggctgctgtcgacgtatgatccgacaagagccctgtctggccagttgtagagcgcaaacaccttgagacaagctggcaagtgggagctgcagcctgcagctaacacgcacggatggacggacgtttttttccccaagttgttttgttcgacgaacgaagcaaggaggaggctgaaacgcagcagaatagatgggttagacagacaccaattacttacgtttaccaattactcccatgtaccgattgttaaggactggagtagtacacgtcattctagcgttttttgttgttgttgtaaaagtcatgtgtcgattcagatgatgtccgatacaagatgcgtgtcttgttctctgcatatatttgctttggcaacaaggatccatgtttgaactggacagaaatgtgccagaacgac

SEQ ID NO: 30664 - DNA, 465 bp, Zea mays
  Clone ID: MRT4577_127977C.1
gcggcgcgtgcggtcctgctcgcctgtctcctggtcttcctcgtcttcgccgcgtgcgcgtcgaccagtttcggcggggtggggccgatcgtggcggtggacttcttgcggcgatcgttctggtcgacggagtacccgttcgtgtgctagagcacgctggtcctctgcgcggctgtcgtgggtctcaccccgatcctgttgacgctagcggcgctgatggttggctctgactgagcccgccagttgaactcatacatcctgactggacgatgacatatgctgaagtactggccaaagttgatacactaattggatgagcgtgctacacagttcatctaaaaaataggacaccaatggatctggctggtacagtgctaaactttggacctcgaggtggttcaagtgctggatcacatggttgcttaccctcacgcactggtggctgtactggatagccaatatgtt

SEQ ID NO: 30665 - DNA, 470 bp, Zea mays
  Clone ID: MRT4577_127978C.1
ggggttggcataggcatgctcgcgggcacaacagcgaccacccggcactgcgcgacctgctagggcggcggcggggcgccagcggaactgcctcatgacagggtaccggcgcacggggcgaggcaagggtgcaccgtcaaagctggtgtccatgtatagcggcaggtgcccgtgccagggctggtgccccgcccgcagggggactgtggtgagcaggggtctatgtgggacacaaggaggcttaggatcgatgaagacgaccacgcacctgactagttgttggatgaatagatggcggaaggctcaatctacaacgagaaaagcgcaaggttccatgtgtaaatataacaatgcacctggtgctgtagctctggagaagcacggcatggctgacgacggtgacatccagcatagcttggaacaccaggggcatctgcggggggtgtgactgtgtaggaacagataagtga

SEQ ID NO: 30666 - DNA, 718 bp, Zea mays
  Clone ID: MRT4577_127979C.1
cggctcgagcgcgtttcacgcgtcttcctcctgtcgttgagctggaccgaaaccgtctcctgaaccctgcaggtcctgctggtgctgctgaacctcgagaacaacctgttggcgccccagttcgagcctgtggtaagacacagagcgctccgcccggtctccggctggtcctgctgcgccccggtacctcgagaacaacctgccggcgccccacttcgagcccctgagaaggctgctgtcgacgtatgatccgacaagagccctgtctggccaggtgtagagcgcaaacaccttgagacaagctggcaagtgggagctgcagcatgcagctaacacacacacggatggacgaacgtttttcttttttttcccagttgtttgttcgacgaacgaggcaaggagaaggctgctgaaacgcagaatagatgggttagacagacaccgatgtgcctggtttttctggatgacagactatatatagcagagcaggccttaacaaattcttttgccgtatctagataaaagcctaattagtccataaagaatacttacgtttaccaattactcccatgtaccgattgttaaggactggagtagtacacgtcattctagcgttttttcttgttgttgtaaaagtcgtgtgtcgattcagatgaggtctccgacaagagcaaaaataaaaaaagagcccagaccgcgacccagacgcaaaaaaaaa

SEQ ID NO: 30667 - DNA, 346 bp, Zea mays
  unsure (1)..(346): unsure at all n locations
  Clone ID: MRT4577_12797C.1
gggaaagggngttcggttcacccgcaagaaaggnnananaggattttcctccttcgactttctcctgcctccacgctctcggcgtgattngttttaangnatngannctacgantacgaggagggagagaggattgatggnggngnagntgnggnanatgatgagnnattattttggtannnnanntagnaaggaggttgattaagatntgtantangnnttgagggaaaagggaggtttganntnnaaggaggaggagaagatttttgttttgtttttgagtnngtggagggtagttggtgggggtttttttttttggtnaggggggggggggggggggggtgtt

SEQ ID NO: 30668 - DNA, 507 bp, Zea mays
  Clone ID: MRT4577_127980C.1
ttttaaagaaaattctaattaacacgttacaaaacctagacacaattctgccataaaaggaatttccagtatttacaactttcaatttaatgctcaaattacagacaagtttttgaagtaaataaatagtttgataaaaactattattgattggcaacacagaataatgcaagatcccccgctctgctgaacaaccggtttcccttgtggcattagcatgtgcaaaagccgggagaaaagtaacatttctgctaaaatctcactgagttttagcaagggaaactgaaaaatgcaagaataccacgtatagcttggtccaatacgcctctacaatcaaggaaatggaaactacccaatactcaaacaaaatcttagagttgatcatggcttcagctatagagtggttgcaaagagtttttgaccaggtgcttgctggtcattttgtacagggatgcagcagattcagatggtacctgtggaattgcattgtgccccaacgacaaagca

SEQ ID NO: 30669 - DNA, 380 bp, Zea mays
  unsure (1)..(380): unsure at all n locations
  Clone ID: MRT4577_127981C.1
attacttgtaactggctaccctactttaagaatgacataaacaggagaggttgcatacacatttgtttgtgcagctggngcgacggatgccttaccatcacctgttagaggtgatctgtttgctcttgaagaagcagcataatgatggacaattgctcttttgtggagaacattctttacaacatctagtgttgcgggggtatttatggggctgattgagttttgtctgaaagcaaaatgtggtctctttgagcaaggcggattgatcatgtatgatctcagtaaaactgacagcagtctacactactacagatctaatcgcaactatagtgcttgggattatggtggaatctttggaggcctctttaactatctgttgg

SEQ ID NO: 30670 - DNA, 252 bp, Zea mays
  Clone ID: MRT4577_127982C.1
cagtgagtatgtggtgattcttgtgctcatgccgcagatgtctcaccttactgtggccagcgctgatggagcaggtgcatcccaaggccacgtcgccgcagaacgcagccgtggacagctccatcgctggccgtccaatccatgttgattccgactgatcttgcgcgagcaatgaaagcgtggatcgtcacctgcagtagtgcaagcagctcggtcaagggctcatcaaggatcggggtgcggatatatagc

SEQ ID NO: 30671 - DNA, 917 bp, Zea mays
  Clone ID: MRT4577_127983C.1
gcggggctcggcgcggtcgaccccgtgcgcgagcgcggagaggaggcgcggcgacacggcatgtggctgcacgtggacgcggcgtacgccggcagcgcggccatctgccctgagttccagggcactctcgatggcgccgagctcgccgactcggtgagcatgaacccgcacaagtggttcctcaccaacgcggactgctgctgtctgtgggtggcaagcccaggtgccctgacctccgcgctgtccaccgacccggagtacctcaagaacgtcggcacggacggcacggggaagccggccgccatagactacaaggactggcagatctccctgtcacgccggttccgcgccatcaagctctgggtggtgctgcggcgctacggtgccgtcggcctgcgcgcgcacatccgccgacacgtcaccacagcaaagtggttcgagcggacagtggcggcggacgaacgcttcgaggttgtggtgccgaggaagttctcgcttgtatgtttccgcctccgggagaggttcgcaggggacgacgcggcggacgagttgaaccgggagctcctcacggcggtgaacgcgagcgggcgggcgttcgtgacgcacttcgtggtggacggcaagttcgtgatccgcctcgcggtcggcggtgctatgacggagatgcggcatgtcatggacgtgtgggaactgctgcaggccagcgccgaccacgttttacgccgctactcctactagtgtattctgctgcacgtatacgtacacttttacgcgcacatgtaccaaaaaaaataaagtatacacctactctccttgtgcttggtttagcttcaccactctgcacgccatgtactttcgcacgctgaggaccggaaatagcaagtgatttcatatcccattgaagattaaaaaaacca

SEQ ID NO: 30672 - DNA, 1005 bp, Zea mays
  Clone ID: MRT4577_127984C.1
cattgggtacctcgaggccgggacatatcccgccggccgggccgggactccctggcatagcacgcgatgcccaccgactgctcgacgcaattctccagccgctgatcgcgccgcaccctttcccacccgcgcccatcatggcctcctccctccccgcgccgccggcctcgccctcttcctcctggcgcggactcacgccccgctgccctccgcctcgctgcggtcccctcctcgcccgcgcggcagcgcgttcttaccgttaccgcttccgaaccgacgacgacggcgtggtggacgtggccgtcgccgggaaagacggcgatgcggggtatgtggtcgctatcgaggctcctacccatggacagaggggcggtcttgtgctccgccccgccggctccggcgagggcgtccctctggccccagccgcgccgggaggtgccctcgtggctgagttgtcctacgacgtggcccgcgcgccgttccacgtctcgttcacgctggccgacgcgatgggagcggagatacggacacaccgcgggacgagcttccgcgtgcctgttggcgtcggacggggctgcccctcgccgctcggcctgtcccagtccaaggatggggccgctaacttcgcggtttacagcaagatcgccaagggcatggtgctctgcctcttcggtggtggcggcggggacggacccgcgcttgagattgagctcgacccgtacgtccaccggaccggcgatgtctggcacgtctcgatggagagcgtggaggggtacgcccgctacggcttccgcagcgggctgttcgcaatgtttggcattgaccgcccgctactcgacccgtacgccaaggtgatcggggacttcgtcgctggcgactctgttgatgaggatgggctagctgtgccatccataaggtgtctcgcgtccttgaagaatgcacccaactacgattggggcagggacaagcacccatgcttgccattgcagaagctggtggtctacc

SEQ ID NO: 30673 - DNA, 469 bp, Zea mays
  Clone ID: MRT4577_127985C.1
ggtgcggcgcgagtgcggcgccgcggactggcgcgtgctccgcgcgctcgagcccgtgtccatgggcgccggagtcatccccgccgccagctgcggcggcggcgagggcgacgtcatgtacatgcgcgcgcggttcgagcgcgtcgtggggtctcgcgactcggaggccttctacatgatgaatccggacggtagcggcggcggcgctcatggtcatggcgggcccgagctcagcgtctacctcctcagagtctgatcggccgccatggcagtggcagtgacatctgcacctcgcccctgatcgtttttttctgtgcatgcccacctggggaaatcgccctagtaggcacctaggtgtagctgttagcacttctagggggtgtttgataaagtggctaagtcccttcctttcacatccaatgtttgatgctagattaaagtattaattatattttaattataaaaaata

SEQ ID NO: 30674 - DNA, 265 bp, Zea mays
  Clone ID: MRT4577_127986C.1
agctctggtgcgagtcgctgcgccgagactggtggcctgcacgtgccggtccggggtcccgggtcggcccgcgcgtccgcccgacggtctcccgtcccgtccccgtgtgcgtttcgggtccgcgtcaggtctcgggtctgggtctcctccttcggcgccggttgcctgctccagtcggcgtccgccgtcggggagaccagtgaccatggacgccatggaggagctagtcgagctcggcgagtcgatgcgccaggcggcgtcagtc

SEQ ID NO: 30675 - DNA, 638 bp, Zea mays
  Clone ID: MRT4577_127987C.1
ccccaaaccaaaccaaaaaaatttagttttttcctttaccaggggcaaaaaaaggagggagtcttttgctaatccatccccaattccccttcccctttttggtccccctttggctaccttacttaggcccatccaaaacctttggccggcaggcaccccccaaaaaaataaggggggaacaaaatcacttccccggtttcaaggaaaagggcagggggggggcctccaaaaaaaaaaaaaggccatggagggccccagggacctggggggatatataggcccgagcccaaggaaccctacctcggaaaaccaggggggggttgctaacctaacctagctagaagcccccccaccaaacaaccttggaaacccacccccggccaattaaaaaccccccggggggttctttcaccgcctccacccattttttggacagccgggacaacaacaacaacaacgacgacaactattccgttgggaaggcgggggcccctgcttgttgttgttgctcccgctgcaaaaaaaacggggcgggggcaaacctccctggggttgttgaaaacctggggcctgctgaaaaactcctgttgttgcccacgctggccaagaacctccggttgacccccccccccgggggg

SEQ ID NO: 30676 - DNA, 1520 bp, Zea mays
  Clone ID: MRT4577_127988C.1
gtctcggcctgggcgtggcggcattccagcccagcttctgccacccggccggcaatgccgcggcggagcgggaggccagcccgaccgcggcggacgagagggagcggaggtgctctcccgccggcagcccgacgtcgagcggcagcggcagcggcagcgggaagcgcgtcgcggcggagaggtcggccggcagcggcgacgaggacgacgacgggggtgctcgcaagaagctgcggctgtccaaggaccaggccgccgtgctcgaggagtgcttcaaaacgcaccacaccctcactccggtaagggcgtaactaaggcttcatccttcgatccgacagacgtcgccgttcctcgccgtctgtcggtcggctgatttgatcttggcggtggccggtgggtgggtgggtggctgaccaaggttgtgtccgtctcggcgctgcagagcggccgcggcggcggcatcgtcgtcgcccaacaacagcgcgagctccttcccgacggacttctccgcgcacggccaggtggcgcccggcgccgaccgcgcgtgctcccgcgccagcgacgaggacgacggcggctccgcgcgcaagaagctgcgcctctccaaggagcagtccgcgttcctggaggacagcttcaaggagcacgccacgctgaacccgaagcagaagctcgcgctggcgaagcagctcaacctccggccgcgccaggtggaggtgtggttccagaaccgcagagccaggacgaagctgaagcagacggaggtggactgcgagtacctcaagcgatgctgcgagacgctgacggaggagaaccggcggctgcagaaggagctatccgagctccgcgcgctcaagacggtgcaccccttctacatgcacctcccggccaccaccctttccatgtgcccctcctgcgagcgcgtcgcctccaactccgcgccggcgcccgcgtcatcgccgtcccccgctactggcattgcggccccggcaccggagcagaggccctcgtcgttcgcggctctgttctcgtcccctctgaaccgcccgctggccgcccaggcgcaaccgcaaccgcaggcgccggccaactcgtgaggcgctctctactctatctccggcgacgcgaacggaggtggatctggctgtaaatacgatcacctttttttggcttcctttttcttttgttttcacttgatgcggttcttgagattttttttttgtggattgccgatgggttggtttaccggtttattagagcgcatcatctggccgtcggattggactgcggacggccgggtgcagaaaggaagtgctgcgatagagtttattaacctcagtagcatcgatcatgttttgttaccttgctatctatcttggcgtcaatataggccttgaaatccgaagttaccctgatgatgatgaaatgggtggtgtcaccaaaaaaaaaaaaaaaaaaaaaaaaaaaaaaaaaaaaaattggtctaattgccttttaacggatacaagcatatatacatt

SEQ ID NO: 30677 - DNA, 648 bp, Zea mays
  Clone ID: MRT4577_127989C.1
atctcagaagatcataattacttattgcccttgcaatcgcatagatagagacagcatgagatccatccgctgcattatggcttcagaaccttgcccgctaaggtgccggttcacgatgccaaaaactccaaaaggcgatacctctacgacttgcctgacatccacataatgatgatggacgacgatacgactgctgctattgattaccaccccaaccagggtccctatcttcaatgacaccgatcctcgtctgcatctgcacatcgaggtgcaggattatgatctatccaaatgaatgaacttctgacatcgccatgtgatagctgctgcgtgcttctcaatagtggatgtggagatgcgcttcgatcgatactataatatgatattgacaataatgctgtactgattatggatgattaagaactatcactaataatgtgcatactctcacaattatatatatgaaaatgtgattctttgtgtggacgacgacccattgaatgagatggtccctatgcaccaccatgtcattcctgtgttccccctacgaacaagagaaatcgcgcttatgcccatgattgacctaggtgaaaacgatgacaagataatatcacgctgcgatgacgatcctgatatatcgtcactaca

SEQ ID NO: 30678 - DNA, 230 bp, Zea mays
  Clone ID: MRT4577_12798C.1
gggggttcggcgcgaggttctgctggtgtctccgccgtttggtttggcctgtgttgtggagtgagtgatgtgtgtgccgtcgctcctggtgtgtggtggtgagtgactggttggtgtgtgtggtgctgtgctgtcttttctccgtgtgcgtgttttgccggcgcgtgatgaatgtgatgtcagtgctgctaagggggggggggggggggctcgagggggggcccggtgcc

SEQ ID NO: 30679 - DNA, 182 bp, Zea mays
  unsure (1)..(182): unsure at all n locations
  Clone ID: MRT4577_127990C.1
cgctaaatcaaatgaataaccacccgaggaggtggccacgcggtgactcacgtccncacttccnctctccaaaaccccncccgtcccctcncatcgtccctctctccgccgactgcaaaccctaaccctctcgctaacctcctcttcccctcagcccatggcttcgccccctacccccaaaa

SEQ ID NO: 30680 - DNA, 277 bp, Zea mays
  Clone ID: MRT4577_127991C.1
gttaaacacgaaaaaaaaagaagattggctcaacacgacatgagcaacacaagacgcagacaggttgtccatctcaaacacatatattgttcaccgaccgccaccctgaaccgtggcaagactcatatcaatttggcccacagcgccaaagcggtcctactgtttacctgttacttttttttggaccacctgtcgcgccatgttttctggccgtggtagcctgcgggggtaggcacctcgagatgggtaccagtcttgcgctaggggattggaacct

SEQ ID NO: 30681 - DNA, 567 bp, Zea mays
  unsure (1)..(567): unsure at all n locations
  Clone ID: MRT4577_127992C.1
gtacccgcggccccccctcgagttttttttcctctcttctccctcccccccccccccccttccttcttttctttttttttttttttttccccaggaaacaaaacaactttttctttttggaaggaaagttttttaaaagggggtttaacaggaggccccacgaaaaagggaccaagcccaaattcctaaaaaaaaaaaaagggggacccaaagggaaaacaatttttgaaaaaaaagggttaacaatttgcttatgggcccaaaaaaatctttaaaagccttaactttttttttgttctttatttccggaaacgcccaaaatttaattggcggaattttttccttgttaacaccaataatgttcccgatttcttgaagggtttttatccaaccttcttggacccaaaacttaaaaaaaaaaatttgtttttggggagggggaaaagtttttagggccatgggaacctcttttttaaggaacattttgtgaaacattttttaagttgtttaaacattggaataagttggaacctcctgatttgtaattgncggggaaacaattttttt

SEQ ID NO: 30682 - DNA, 248 bp, Zea mays
  Clone ID: MRT4577_127993C.1
cccacgcgtccgatcatcatcaccacacacatttctgtacacagttttacagaaaaagaagaagaggatttttcttttgttttattccattcggagctgtgatgaggtgtctgattgcgtttcttgattcctttcccctgattcttcctgtactttctctgtcactggttgtatgtgtactactgtgatggcaggcgtggtcatgaagtggaatgaaatcaatggatcggcatggattttcttggttt

SEQ ID NO: 30683 - DNA, 319 bp, Zea mays
  unsure (1)..(319): unsure at all n locations
  Clone ID: MRT4577_127994C.1
tttttaaacaactaaacatgtgagtaaatcagagttgcatacattttttcggtcctcgtgccacgatcattcacaagcgcatgcttgcacacacgtgtacatacgatagattatttttttttttttatccgngcattttttgggggggggcatacgttttcttcgcacaacacggcgggcgctcggtgtgagtgtgacacgcgcgcgtggcgcacggggagggacgacgatccgggaggatcagtgtgccggagaagtggtgcttggttgtcgccggcgggctgcttggtctccttgtggggcttgttgttctcttggt

SEQ ID NO: 30684 - DNA, 255 bp, Zea mays
  Clone ID: MRT4577_127995C.1
gaccttcacttccatttttctgacagcgacttactctaaccaaagaagaacaaccttcagagcccaaaagcttacgaggtaacagcaatggagaattcgtcgtccgctgcagcatgccactgtttggttctccaagagccatgcggcatcaacctcttcctcaaattcctcacctggtccgtctcagtgatccagatactcctcccctgctcatgcaaaccctgcaactgcaactgcagctgcagctgcaaccaa

SEQ ID NO: 30685 - DNA, 359 bp, Zea mays
  unsure (1)..(359): unsure at all n locations
  Clone ID: MRT4577_127996C.1
acccacgcgggcgaaaggccaaggncgcgaaccgngaaccacaaaccaaacgcggagcggcgcgggccggccgccgggcgaggngcggggagctgccgacgaggggggccggagccanccaccaaggacgcggcaacgaccaaaacgccaacaagacccgcgagcgcaacngggagaagaacaagggggccaaggggagccagcncgagaccaacaagaaggccaagagcacccagngcaaagngcgcangcaaacactangngnacacgaccgaagcgaagngccgggagcacgccgaggccaagcancccaagacagacgggnaccagngcnncccccancngaagaagngaaaggc

SEQ ID NO: 30686 - DNA, 318 bp, Zea mays
  unsure (1)..(318): unsure at all n locations
  Clone ID: MRT4577_127997C.1
aggaatccgggcgacggggggctggatctnaggggatcggggttttttttttttttgccactaacaatgcccgggggggggggggggggtttgcaaaggattaagcccgccgcccgttgggggggggggttttaggnggtcggttacggggggttgggcgagcaggttgagccaatgggacgggcccttggggggcgaacgccctaatgtgggttgggggaaggggggggnacaggcgccggttgttagtttggattttgatttaggggggttnngttttaattngggatagggtagttttgggcctttggtttttta

SEQ ID NO: 30687 - DNA, 798 bp, Zea mays
  unsure (1)..(798): unsure at all n locations
  Clone ID: MRT4577_127998C.1
cggggaacatgcacactaaatcataataacactagcaacaaagtgaccgccaatattactttcagatccctcatactgctttaagctgatgagacctaaactgatttagaaaactatacaagatgaacttcaggaaatgattttgtaactaaaaacaataagtttatacatcggggtagttcaaaccttctcaaggaaatactacacatgtaaggaactatgtataggacaaccaacaggagaaacagatgaacaggaaaagcacaacacaagtaatgcacacctgaactagggatcttagttcaagcagctatattggacaaaagcaagacatgcacnatcctgtgttacatacaccagataatgaagtaatagtgatttgctaaccctttctttttccattttcgctttctcaggatccttagtctcaaaccatttttgcatcttaacagttttcttattctgagaatcaaccagagcagttaataagcgatgcgactttgaagacagggaggatggcataaatcgcattttgtgcaaaagccttccttgtgattgtagaattccctgtgataaaattcaatgtcaatagtgcncaaaaaaactactttggtgattgggaaaagcagtggtactagaaatattgtaaagaagacttagtttaccttcccatgcctcaaaaacagatgggactggtcatgatgcgcctcatgtacagatatatcaagaacctcattgccaatcagaagctgcatagtcccatcctttcatttacaaagcgtgcattgctttcacact

SEQ ID NO: 30688 - DNA, 509 bp, Zea mays
  Clone ID: MRT4577_127999C.1
ggaaaaaaggtgaaccaaacgggccctataacggtttacatggtgggggattttttcagcattaggcacattgaagcatttccaaaaaaaaaatgtttgtgggaaaatgattttggggggggttttaatgttttttttcaatggggggaaaggggcacttgggatccgggttttcctttttttttatacaaaaatacacccccgaagacgggggtcctttttagaggggggctttcgtttttttttttggggggctcaacctcctaaaaaagcataaggaattttttgtttcctcaaggccttcgaaaacaaatagcttgggcatgggaaacttgaaggccatttaaaaccctgttccttttttggaggggaacccttttgaagcatacaaaaacttgtcactggaaggggaactgttaaaacccgctagcaaagcattgttacggaatccttggtaatttggaaacaaccctataacatttggggaggatttttttttttttgaattg

SEQ ID NO: 30689 - DNA, 803 bp, Zea mays
  Clone ID: MRT4577_12799C.1
gataaaaagaaaaaaaaaaaaaaaaaactcgcaaaaccgcgagacaagactcgcgggagccctcgcgcctccgcgccccaccgccgttcttgcggcatcgtcgacccgggcgcccaatccgcgggcgcatcgctccaccgcagtagcggccatggcgcagccgctagtcgtgaagaaggatgacgacttagacgaggaagagtactactcgccgtttctcgggatcgagaagggcgccgtcctgcaggaggcccgcgtcttccacgacccgcagctcgacgcgcggcgatgctgccaggtgatcaccaagcttctatatctgctcaaccagggtgacacctttaccaaggtagaggctactgaggtcttctttgctacgaccaagttgttccagtccaaagatgctggacttaggaggatggtgtacctcatgatcaaagaactctcaccgtcagcggatgaggttattatagtgacaagttctctgatgaaggatatgaatagcaagactgatatgtatcgtgcgaatgctataagagttctttgccgcatcattgattcgactcttctcacccaaattgagaggtatttgaagcaagctatcgttgacaagaaccctgttgttgccagtgcagctcttgttagtggcatttacctgcttcagacaagtccggaagttgtgaaaagatggagcaatgaggttcaggaggctgtacagtcgagagctgctcttgttcagtttcatgcccttgctctacttcatcaaatttagacaaatggaccggttggctgttagcaagctt

SEQ ID NO: 30690 - DNA, 361 bp, Zea mays
  Clone ID: MRT4577_1279C.1
aaaaaaaccggaaaccccgaacaaaaggtgggaggggggggccaaagacaggcaaaacacccgataaacggggggggggaaaaaaagggggggttttaaagaaccaacacggggagtgaaccagggaggcaccgatataaagaggcgcccataaaaagcaggcgctgtgggacatcaaaaaaaatcccaaggcccaaagctcggccctggtgaaagacaaggggctctgcccaggccataacataattacccaaggggggtatcaggccgccatcctccccacgggggggtgggggctaaagaagcccgcccttggaacgaacctgagaagacgggaaccaaaccccttgggggggggggg

SEQ ID NO: 30691 - DNA, 844 bp, Zea mays
  Clone ID: MRT4577_127C.1
gggaccctcgaggccggccgggaaagattgctactgttggtttgtccaatttctatttggatgttgcaaaggatcgcctttatgttggaggccgagtcagcttcacaaggaaaagttgtcagactgtgctcatggcacatctgctctaccttgttagggccatttccccgattatgcctcacctagctgaggatgtctggcagaacctaccctttcaatacaccttgcaggatggatcccttgcaaactttgtttttgatctgaaatggccagaaaagaatgaagaatggctctcggccccgaaggatgatgttgatttcctgggtgttatcctggagttgaggtcagaggtcaacaaaattttggagaatgctcgcactggaaagttgattggttctagcttagatgcaaaggtttatctccataccgaaagttcagatacggtattaaagctaaaggagctatcttctgcatccaatgatgcagacgctctgcatcgcctgtttatcacatctcaggtcgatattcttccaatcctaaatgaagagattacatcatctgtaccatacacaggaaagttcagtaacccacgcactggagtcatatggattggtgtgactcgtgcggatggtgcaaaatgtgagaggtgttggaattacacacaggacgttggatctttccatgaccatcctactctctgcgttcggtgctatggtgtcattgagttgcagacacaacctgcggccgccgacggatgccaagtcgacccaacgcgcaaaacattacatatagatttcaattgttttgttgtttgatgatcaaagaaactatttatacttaggtc

SEQ ID NO: 30692 - DNA, 389 bp, Zea mays
  Clone ID: MRT4577_128000C.1
gcgccccctgagcccccggagcgcggaggctttttcggcggcgccacgacgccgcggcctgaggtggccgggccgagcgcgccggccccccagaaggcgatcctctcggaccagccggacgccgacatcgcggtgctggccgtcggctccgtggtgaccgcggattatcgccctaaccgtgcccgccccttcgccgacatcggcgcccagacgccccaccccggctgatagtatacgagccagccgctatttcctttccttgccccagagcccggcacaaatacatacacgaggaaataacgcgggcatgccgaacaatggatgtgtgaattctcactaattaagtagtgagtaagtaaacgcaccccaatgtctcgcaccaacaaaac

SEQ ID NO: 30693 - DNA, 137 bp, Zea mays
  Clone ID: MRT4577_128001C.1
ctcaccttcgctcgagcacttcccttccttcctgagctcatcgtgctggttgagagcggcatatatatggcgcgtcaggggatgggcagtgctcgtggcagcagcggcgccgtcgtgcttgcgctggtcctcctctg

SEQ ID NO: 30694 - DNA, 483 bp, Zea mays
  Clone ID: MRT4577_128002C.1
gggggaccctacaaacaacgggaataaaataaatatttaaaataaagcctttcaagggggggcgcaatttagtcccccaaaacaaaaaaaaaggaaaaaaaaaaaaaaaaaaaaaatccggggggacggggggacctccccaccgcacgtaccaccccccaccaaaagggagggggactgcactaaaactacaccggccaaaaatacaagggggggccccccaccgggtgaattcccgtaaccaattcctgtcgtcgccccccccggggtgcgggggggccgtgcaagggccaccccttcgcgcgcgcccccgtgcctaaggaaaaagggccacaaggcccaacgcggcccccctttttttttttttttttttttttttttttaaaggggcaagccaaaaaattaatttaacctttgcaaaaatttttcccctgggaaaaaccacaaaataaaaaagcaaaagggctctcaaatttttgcctc

SEQ ID NO: 30695 - DNA, 491 bp, Zea mays
  Clone ID: MRT4577_128003C.1
ccaaaataaagtgatctccgggttaataaagaacaatatattccatggggcctaaaagaacaaactaaataaacttatccaaaaattagattagataagtataaaaacttgtaaagtttttgtgaatcaagttagcaattcaccctgcaatttcctttacagcgccttcttttgaattaaggctcatcaaaaattaccctacatatattgcctccaatattcacaaagttttatttttttttttatattgagaaaatgttaggacagcactgtttggtaattccggggagagatcccagacaacaatcattctgggaggttccagagaaaatatacctagcagcaaaacttgggatttatatatatatatatatatatatatatatatccaaggagagacacatctccccaatagtcttaagtttccaacaaaaacccaacaaaaagcacataaagcaatattaatagggaagaaaaggaatggaagtccc

SEQ ID NO: 30696 - DNA, 785 bp, Zea mays
  Clone ID: MRT4577_128004C.1
attgggtacctcgaggccggccggggccggggataaaaaaaaaacggcagccgtcgatcgccggacgggatcgacggctcacatgagtgtcgagtccaattccaaccacgagggctggaaggaaaaccatccgtgctggtctggactttttgccaaactccattcagccattcgccgactgaaggtactacctcaaggacgcggtgctggacggcggcgtcccgttcaacaaggcgtacgggatgacggcgttcgagtaccacggcacggacgcgcgcttcaaccgcgtgttcaacgagggcatgaagaaccactcggtgatcatcaccaagaagctgctggacttctacacgggcttcgagggcgtgtcgacgctggtggacgtgggcgggcggcgtgggcgccacgctgcacgccatcacgtcccgccacccgcacatctccggggtcaacttcgacctgccgcacgtcatctccgaggcgccgccgttccccggcgtgcgccacgtgggcggggacatgttcgcgtccgtgcccgccggcgacgccatcctcatgaagtggatcctccacgactggagcgacgcgcactgcgccacgctgctcaagaactgctacgacgcgctgccggaaaatggcaaggtcatcgtcgtcgagtgcgtgctgccggtcaacacggaggccaccccccaggcgcagggcgtcttccacgtcgacatgatcatgctcgcgcacaaccccgggcggcaggagcggtacgagcgcgagttccgcgagctcgcaaa

SEQ ID NO: 30697 - DNA, 1021 bp, Zea mays
  Clone ID: MRT4577_128005C.1
tgggaccctcgaagccggccgggccggggttatgataattcggcacgaggttggatcaaagagaggagggctttgctttccgttttccttctccaaatggctcattagctcgtgcttcttccttccttgctaccgagttcggggcgctaaccaatgcgcagcgacaagctgatctcttcttagctctgccacgggatggaggtggaggctctagagaaggggtacacagcttttgccaaggcggtgaagtcttttacttcttcagaacggtacaagcgatcagagaggcctattttgaggacatgtatggtacagatgctttgcgttcttcagacaagacaattgttctacctatgccagaagctgtaaaggctaaggtgaaaggtgatatcagcaaggaagctcaacctggaaggggagcacaaagcaccttgagaaaggagatccttgagcttgagaagcacttcagggaacaacagattgtgagtggtgcactggaaaacgctttaggacctaacgccggtacagtcaacttttcaccagagaatccaatgccaaaggcagctaatgaactgatacgggagattgccacattggagctcgaggtgaagaacatggagcagtatctcctgacactctaccgcaaagcattcgagcagcaagcgccggcactctctccccctgattgccgggaagcttcgaagccgtcagtgagctcatgctctgggcagctccgagaaacacccgtggcggcaaagtcttgcaagagtggaggggatgtggcactccggtccagttacccgccgccggcgcataagaaactgaacgatccgttggcagactgctgcacatctgctcgctcagctgatagagcggttgattcaggtgtcctccgctgccagtcagccctgtcgtactcgtaccgcggagtttgctcgtccagggtactgccttcagaagaggatgatagcctcgcgagggctcttcggtcgtgccactcacagccattctcgttcgcaga

SEQ ID NO: 30698 - DNA, 466 bp, Zea mays
  Clone ID: MRT4577_128006C.1
cctcgaggccggccggggtcgcatctcacgccatcagcagctagcgcgctcctcgagcccagcagagaaaggccggcagcgctaatcgtaatagccatgggctccaccgccggccatggtggaccgcatgctccgcctgctcgcctcctacgacgtcgtccggtgccagatggaggaccgggacggccggtacgagcgccgctactccgccgcgcccgtctgcaagtggctcacccccaacgaggacggcgtgtccatggccgccctcgcgctcatgaaccaggacaaggtcctcatggagagctggtactacctcaaggacgcggtgctggacggcggcatcccgttcaacaaggcgtacgggatgacggcgttcgagtaccccggcacggacgcgcgcttcaaccgcgtgttcaacgagggcatgaagaacccctccggtggtcatcaccaaagaagctgctgg

SEQ ID NO: 30699 - DNA, 553 bp, Zea mays
  Clone ID: MRT4577_128007C.1
ccggccggcacggtgttagggctcttactgcggcgacgactgacagagcctgtgccagtagatcaccggctacggtctggggggttggctatggcgctgttcggacgcggtaagcggaggaatatacaccaaggcgggagacgtgggcgacagacgctcgacgtgaatggtggcgcgcaacattctcgaggacgaccctaggaacccacggggccgatcgcggacacacgcggagcgataatcgtgggacgacaattggacggccagtggtggtcgtgaacctgttgcggcctactacgcacgaggccacctgtgcggttgctgtctcgtcgttgtccatgcttctctcgtcggcgctagacgcacaactctgcggtaggtgggctatccagctgcatcatcagctgccgggtgctcctgtgttggctgtaaccacgctctttacaacggacctgatgaaggtgaacaccgtgcgtggcgtgctgcccatgctgaagctgcagcacatgatatgcaccgtgctgaagaccgtcacagcgctcgacatgcactt

SEQ ID NO: 30700 - DNA, 659 bp, Zea mays
  Clone ID: MRT4577_128008C.1
gacgcgcactgcgccacgctgctcaagaactgctacgacgcgctgccggaaaatggcaaggtcatcgtcgtcgagtgcgtgctgccggtcaacacggaggccacccccaaggcgcagggcgtcttccacgtcgacatgatcatgctcgcgcacaaccccggcggcaaggagcggtacgagcgcgagttccgcgagctcgccaagggcgctggcttctccggcttcaaggccacctacatctacgccaacgcctgggccatcgagttcatcaagtgaatacggctaccaccgtcgccgcgatgagatggcttgcttgcttggtcctcgtatcgtacgtcgccgtcgtcgtcttcttctcgctctcgcgtatgcatgtacttttgcttaattttctttcttcatatcatgcactctggctggcctagactgcccctgatccatggtggccatgtcttcggtacgtcttgtcgagctcttgcatgtcgtggattctaaattcttcttctgcgtcgaattgtctctgccatgtgcgagtaataacaatcaaggttatacttaccatacaattacatggtggtttaattgctctcttttggtgaatcgaatcgattgtactgaattcttctctgtttgatgaaatgccctttgtcttttggatt

SEQ ID NO: 30701 - DNA, 187 bp, Zea mays
  Clone ID: MRT4577_128009C.1
aggactgaatggcatgaatatcaccaatggtctttcagatcatgcgaataaatccaattggaaccagcagccagtttccaaccgaaaggccaaacaagacctttctttacaagatttacagatgaaaggatttgtggataatatcggttcccctgaggtttcagtgtctaagcactatagcacctca

SEQ ID NO: 30702 - DNA, 388 bp, Zea mays
  Clone ID: MRT4577_12800C.1
ccggcaaaaaaaaaacaaacacaagaaaaataaattaaaaaaaaacaatttttattttaaaaaaaaaaaaaaaaaaaaaaaggacatggcccaattcataaaatcacattaactacaaaaacaaacctccgctgtaaaaacatcctttatataaccacttgtcctttaaaaaccccacttttaaaatataaaaaacgccttccaaaaaaaaaaatccaaactaacaatacacgtgcatcctacctctaaaactctcccctatttctcacccaaacttaaaaaacttaacctttttttaaaaacgtcccaatttaaaaaacccttactttacttaaaaaaaccgtcattttaaaaaacccttcttttccaacttttattaccctaaaaa

SEQ ID NO: 30703 - DNA, 1384 bp, Zea mays
  Clone ID: MRT4577_128010C.1
cgggtgagcactatattattggccaagtcctttttctgtatccgcaaaacggcagccgtcgatcgccggacgggatcgacggctcacatgagtgtcgagtccaattccaaccacgagggctggaaggaaaaccatccgtgctggtctggactttttgccaaactccattcagccattcgccgactgaaggtgaatcttcagacagccagattgtttggtgtctagtgtgtgcgaagatggcgtagaaaagactgagagacagttggctcacacagacaagtgacaactgactatagtatctgcctgcctggctgatgctgatagagatggggactcttgtcctgtctgtttcttgtatgcgctgatctgattctgatcactgccactctgccaggtactatctcaaggacgcggtgctggacggcggcatcccgttcaacaaggcgtacgggatgacggcgttcgagtaccacggcacggactcgcgcttcaaccgcgtgttcaacgagggcatgaagaaccactcggtgatcatcaccaagaagctgctggacttctacacgggcttcgagggcgtgtcgacgctggtggacgtgggcggcgggcgtgggcgccacgctgcacgccatcacgtcccgccacccgcacatctccggggtcaacttcgacctgccgcacgtcatctccgaggcgccgccgttccccggcgtgcgccacgtgggcggggacatgttcgcgtccgtgcccgccggcgacgccatcctcatgaagtggatcctccacgactggagcgacgcgcactgcgccacgctgctcaagaactgctacgacgcgctgccggaaaatggcaaggtcatcgtcgtcgagtgcgtgctgccggtcaacacggaggccacccccaaggcgcagggcgtcttccacgtcgacatgatcatgctcgcgcacaaccccggcggcaaggagcggtacgagcgcgagttccgcgagctcgcaaagggcgccggcttctccgggttcaaggccacctacatctacgccaacgcctgggccatcgagttcatcaagtgaatacggctaccaccgtcgccgcgatgagatggcatggctgccacatgcatgcttgcttgcttggtcctcgtatcgtacgtcgccgtcgtcgtcttcttctcgctctcgggtatgcatgtacttttgcttaattttctttcttcaaatcaagcactctggctggcctagactgcccccgatccatgctggccggtacgtcttgtcaagctcttgcatgtcgtggattttaaattctttttttgggtcgaattgtttctgccatgtgcgagtaataacaatcaaggttatacttcccatacaattacatgggggtttt

SEQ ID NO: 30704 - DNA, 352 bp, Zea mays
  Clone ID: MRT4577_128011C.1
tttgcgtttgtatctagtcacttgttgaaatctctagaaagacaaatatttaggaacggagggagtacataagattagccttttcccatagggaacatgtgagttcatatataaactgtagattgtgaattcacgacacagtagcgagctacaccaatgccggtctgaattcctagattcagcaaactccttttgtgtgtcatatagaacatccagattagatagagcaaagacagagaccgattataagagttcagggatatgtgcaagagggaggggatgagcccgacgcttacgagctattgaaataatcagacgtgcatggcttcttgaattttcaatttctctatct

SEQ ID NO: 30705 - DNA, 1727 bp, Zea mays
  Clone ID: MRT4577_128012C.1
cattgggtacctcgaggccggccgggtactagagtaatcatcgccaccactatcggcgacagaaacgatgggccccgcttctcttaatcacggtgcttgaattagtgcgcgcatagtagtgaaaataatagtgaaaaataagcagtgcgtgttttggtgtggtggttggtgagccgtccggcccaataaaaacccctcgcaccacctcgtccctcttcgtcgcatcgcacgccatcagctagcagctagcgcgctcctcgagcccagcagagaaaggccggcagcgctaatcgtaatagccatgggctccaccgccggcgacgtggccgcggtggtggacgaggaggcgtgcatgtacgcgatgcagctggcgtcgtcgtccatcctgcccatgacgctgaagaacgccatcgagctgggcctgctggaggtgctgcagaaggaggccggcggcggcaaggcggcgctggcgcccgaggaggtggtggcgcggatgcccgcggcgcccagcgaccccgccgccgccgcggccatggtggaccgcatgctccgcctgctcgcctcctacgacgtcgtccggtgccagatggaggaccgggacggccggtacgagcgccgctactccgccgcgcccgtctgcaagtggctcacccccaacgaggacggcgtgtccatggccgccctcgcgctcatgaaccaggacaaggtcctcatggagagctggtactacctcaaggacgcggtgctggacggcggcatcccgttcaacaaggcgtacgggatgacggcgttcgagtaccacggcacggacccgcgcttcaaccgcgtgttcaacgagggcatgaagaaccactcggtgatcatcaccaagaagctgctggacttctacacgggcttcgagggcgtgtcgacgctggtggacgtgggcggcggcgtgggcgccacgctgcacgccatcacgtcccgccacccgcacatctccggggtcaacttcgacctgccgcacgtcatctccgaggcgccgccgttccccggcgtgcgccacgtgggcggggacatgttcgcgtccgtgcccgccggcgacgccatcctcatgaagtggatcctccacgactggagcgacgcgcactgcgccacgctgctcaagaactgctacgacgcgctgccggaaaatggcaaggtcatcgtcgtcgagtgcgtgctgccggtcaacacggaggccacccccaaggcgcagggcgtgttccacgtcgacatgatcatgctcgcgcacaaccccggcggcaaggagcggtacgagcgcgagttccgcgagctcgccaagggcgccggcttctccgggttcaaggccacctacatctacgccaacgcctgggccatcgagttcatcaagtgaaccaccgtcgccgcgatgagatggcatggctgccacatgctttgcttgcttggtccttgtatcgtacgtcgccgtcgtcgtcttcttctcgctctcgcgtatgcatgtacttttgcttaattttctttcttcatatcatgcactctggctggcctagactgcccccgatccatggtggccatgtcttcggaacgtcttgtcgagctcttgcatgtcgtggattctaaattcttcttctgcgtcgaattgtctctgccatgtgcgagtaataacaatcaaggttatacttaccatacaattaaaaaaaaaaaaaaaaaaggcccctagggcc

SEQ ID NO: 30706 - DNA, 1176 bp, Zea mays
  Clone ID: MRT4577_128013C.1
cttcgacctcccccagtgatctccgaggcgccgccgttccccggcgtgcagcacgtcggcggggacatgttcaagtcggtgccggccggcgacgccatcctcatgaagtggatcctccacgactggagcgacgcgcactgcgccacgctgctcaagaactgctacgacgcgctgccggagaagggcggcaaggtgatcgtcgtcgagtgcgtgctgccggtgagcacggaggccgtccccaaggcgcagggcgtgttccatgtcgacatgatcatgctcgcgcataaccccggcggcagggagcggtacgagcgggagttccgtgacctcgccaaggccgctggcttctctgggttcaaggccacctacatctacgccaacgcctgggccatcgagttcatcaagtgaaccaccgtcgccgcgatgagatggcatggctgccacatgctttgcttgcttggtccttgtatcgtacgtcgccgtcgtcgtcttcttctcgctctcgcgtatgcatgtacttttgcttaattttctttcttcatatcatgcactctggctggcctagactgcccccgatccatggtggccggtacgtcttgtcgagctcttgcatgtcgtggattctaaattcttcttctgcgtcgaattgtctctgccatgtgcgagtaataacaatcaaggttatacttacgatacaaaaaaaaaaaaaaaaaaaaaaaaaaaaaaaaaaaaaaaaaaaaaaaaaaaaaaaaaaaaaaaaaaaaagagctccttgctgtcgctcttcagaggcagaaaaacaagaggaagggcaggaggagaatcaatccgtcgacgtcccctcaggcagccacgagtgaccgccagaccagggatctcccaaacggactgatgacgatcttgccaggtagcagtggacctgcagcactgtcaactcctgttactacaaaagttggtgtagaaatttctgcaccgatgcagcggtgctatcgatccaagaatgctgagccattgcctattggtcctgtgaaggttgttcctcgtgctatgagtatgacgaaagcagcaccaagaatgtgtcactgctgcggggtaaagaaggcagcgcgtgttgccaattgcaagaactgtgatacgaatttctgtaacagctgcattaataaatggtattctaag

SEQ ID NO: 30707 - DNA, 1665 bp, Zea mays
  Clone ID: MRT4577_128014C.1
cctcgaggccggccgggatagtgaaaataagcagtgcgtgttttggtgtggtggttggtgagccgtccggcccaataaaaacccctcgcaccacctcgtccctcttcgtcgcatcgcacgccatcagcagctagcgcgctcctcgagcccagcagagaaaggccggcagcgctaatcgtaatagccatgggctccaccgccggcgacgtggccgcggtggtggacgaggaggcgtgcatgtacgcgatgcagctggcgtcgtcgtccatcctgcccatgacgctgaagaacgccatcgagctgggcctgctggaggtgctgcagaaggaggccggcggcggcaaggcggcgctggcgcccgaggaggtggtggcgcggatgcccgcggcgcccagcgaccccgccgccgccgcggccatggtggaccgcatgctccgcctgctcgcctcctacgacgtcgtccggtgccagatggaggaccgggacggccggtacgagcgccgctactccgccgcgcccgtctgcaagtggctcacccccaacgaggacggcgtgtccatggccgccctcgcgctcatgaaccaggacaaggtcctcatggagagctggtactatctcaaggacgcggtgctggacggcggcatcccgttcaacaaggcgtacgggatgacggcgttcgagtaccacgggacggacccgcgcttcaaccgcgtgttcaacgagggcatgaagaaccactcggtgatcatcaccaagaagctgctggacttctacacgggcttcgagggcgtgtcgacgctggtggacgtgggcggcggcgtgggcgccacgctgcacgccatcacgtcccgccacccgcacatctccggggtcaacttcgacctgccgcacgtcatctccgaggcgccgccgttccccggcgtgcgccacgtgggcggggacatgttcgcgtccgtgcccgccggcgacgccatcctcatgaagtggatcctccacgactggagcgacgcgcactgcgccacgctgctcaagaactgctacgacgcgctgccggaaaatggcaaggtcatcgtcgtcgagtgcgtgctgccggtcaacacggaggccacccccaaggcgcagggcgtgttccacgtcgacatgatcatgctcgcgcacaacccaggcggcaaggagcggtacgagcgcgagttccgcgagctcgccaagggcgccggcttctccgggttcaaggccacctacatctacgccaacgcctgggccatcgagttcatcaagtgaatacggctaccaccgtcgccgcgatgagatgcatggctgccacatgcatgcttgcttgcttggtcctcgtatcgtacgtcgccgtcgtcgtcttcttctggttgcgctgctaccttgctgctctcgccctcgcgtatgcatgtacttttgcttaattttctttcttcatatcatgcactctggctggcctagactgcccccgatctatgctggccggtacgtcttgtcgagctcttgcatgtcgtggattctaaattcttcttctgcgtcgaattgtctctgccatgtgcgagtaataacaatcaaggttatacttaccatacaattacatggcggtttaattgctctcttttaatttggtgaagaatcgaatcgattctactg

SEQ ID NO: 30708 - DNA, 287 bp, Zea mays
  Clone ID: MRT4577_128015C.1
gtaagtttccagactccaatttttatggtaatcgaatttcagatggtcccattgtcaggcaggaggactatgccaagagttatctacctgggcctatttatggtgcttactcgttcattcatattgacaatgacatggaaatgcttgatagccttggtcagagttccaaaaatatggctgaggttgctgtagcagccaatatagtcgaaagacttgcaaaagagtgcactgagaagaggcagagaacacgtgttggtataatatctccttatacagctcaagtgatt

SEQ ID NO: 30709 - DNA, 1588 bp, Zea mays
  Clone ID: MRT4577_128016C.1
taccctccggggggctcggccggggtcgcatcgcacgccatcagcagctagcgcgctcctcgagcccagcagagaaaggccggcctacccactctctctctctctctctccagtctccaccggcagcgctaatcgtaatagccatgggctccaccgccggcgacgtggccgcggtggtggacgaggaggcgtgcatgtacgcgatgcagctggcgtcgtcgtccatcctgcccatgacgctgaagaacgccatcgagctgggcctgctggaggtgctgcagaaggaggccggcggcggcaaggcggcgctggcgcccgaggaggtggtggcgcggatgcccgcggcgcccggcgaccccgccgccgcggcggccatggtggaccgcatgctccgcctgctcgcctcctacgacgtcgtccggtgccagatggaggaccgggacggccggtacgagcgccgctactccgccgcgcccgtctgcaagtggctcacccccaacgaggacggcgtgtccatggccgccctcgcgctcatgaaccaggacaaggtcctcatggagagctggtactatctcaaggacgcggtgctggacggcggcatcccgttcaacaaggcgtacgggatgacggcgttcgagtaccacggcacggacgcgcgcttcaaccgcgtgttcaacgagggcatgaagaaccactcggtgatcatcaccaagaagctgctggacttctacacgggcttcgagggcgtgtcgacgctggtggacgtgggcggcggcgtgggcgccacgctgcacgccatcacgtcccgccacccgcacatctccggggtcaacttcgacctgccgcacgtcatctccgaggcgccgccgttccccggcgtgcgccacgtgggcggggacatgttcgcgtccgtgcccgccggcgacgccatcctcatgaagtggatcctccacgactggagcgacgcgcactgcgccacgctgctcaagaactgctacgacgcgctgccggaaaatggcaaggtcatcgtcgtcgagtgcgtgctgccggtcaacacggaggccacccccaaggcgcagggcgtcttccacgtcgacatgatcatgctcgcgcacaaccccggcggcaaggagcggtacgagcgcgagttccgcgagctcgccaagggcgccggcttctccgggttcaaggccacctacatctacgccaacgcctgggccatcgagttcatcaagtgaatacggctaccaccgtcgccgcgatgagatgcatggctgccacatgcatgcttgcttgcttggtcctcgtatcgtacgtcgccgtcgtcgtcttcttctggttgcgctgctaccttgctgctctcgccctcgcgtatgcatgtacttttgcttaattttctttcttcatatcatgcactctggctggcctagactgcccccgatccatggtggccatgtcttcggtacgtcttgtcgagctcttgcatgtcgtggattctaaattcttcttctgcgtcgaattgtctctgccatgtgcgagtaataacaatcaaggttatacttaccaaaaaaaaaaaaaaaaaaaaaaa

SEQ ID NO: 30710 - DNA, 753 bp, Zea mays
  unsure (1)..(753): unsure at all n locations
  Clone ID: MRT4577_128017C.1
gccggccggtccgggacgctcaacctcaccactcccacgactctgcgccctttgcgaaactacacatataccccctcatccccacccacaaacacaatcacacacacacacacatccatacaccactcacaaactcccaccatgcgttccaagttcaaggacgagcacccgtttgagaagcgcaaggccgaggccgagcgcattcgccagaagtacaacgaccgcattcccgtcatctgcgagaaagtcgagaagtctgacattgcaaccatcgataagaagaagtacctggtacccgccgacttgaccgtaggccagttcgtctacgtgatccgtaagcgcatcaagctttcgcccgaaaaggccatcttcatcttcgtcgatgaggtcctgccacccactgccgctctgatgagctcgatatatgaggagcnacaaggatgaggacggtttcctgtacattacgtactcgggcgagaacacgtttggcgaggctctgtaaggggctcgcttcatcctcacattccccttatctatcggctgtcgaggctgcggcgaactcgggcgttttcggatcatgggtttcttgatattcacgcaacagtataccgttaggatgattgattgatttgaatggcagacggctggtgcaacggcaacccgcgcagcatcctgggncagtcaaccttgaccagaagctgcgaggactgatacagcaaagccgaggcggaaagcacgacgacnagccgcatc

SEQ ID NO: 30711 - DNA, 332 bp, Zea mays
  Clone ID: MRT4577_128018C.1
aaaaaaaaaaaaaaaaaaaaaaaaaaaaaaaaaaaaattaaaaaaaaaacaaaaactataagaacccggggcacgtggagcactacgctctcgttgcccttaagagggggcatacattgctgcgctgggctgtaattgtcgatcttagcacaattcctgagagaatacgatatccgatcacaatgccgcacagcatacgatgccgaagcataaagctaaatgaatggggggcctaaggactgattgtaactcaaataaatcgcgaaaccttcattgccagtttatcagtcgaaaaactcgcccagccagatgaattaatgaacggatcaacc

SEQ ID NO: 30712 - DNA, 1697 bp, Zea mays
  Clone ID: MRT4577_128019C.1
cggacgcgtgggcggacgcgtgggcggactcgtgggcagtcgcagcgcacgccatcagctagcagctagcgcgctcctcgagcccagcagagaaaggccggcctacccactctctctctctctccagtctccaccggcagcgccaatagtaatagccatgggctccaccgccggcgacgtggccgcggtggtggacgaggaggcgtgcatgtacgcgatgcagctggcgtcgtcgtccatcctgcccatgacgctgaagaacgccatcgagctgggcctgctggaggtgctgcagaaggaggccggcggcggcaaggcggcgctggcgcccgaggaggtggtggcgcggatgcccgcggcgcccagcgaccccgccgccgcggcgcggccatggtggaccgcatgctccgcctgctcgcctcctacgacgtcgtccggtgccagatggaggaccgggacggccggtacgagcgccgctactccgccgcgcccgtctgcaagtggctcacccccaacgaggacggcgtgtccatggccgccctcgcgctcatgaaccaggacaaggtcctcatggagagctggtactatctcaaggacgcggtgctggacggcggcatcccgttcaacaaggcgtacgggatgacggcgttcgagtaccacggcacggactcgcgcttcaaccgcgtgttcaacgagggcatgaagaaccactcggtgatcatcaccaagaagctgctggacttctacacgggcttcgagggcgtgtcgacgctggtggacgtgggcggcggcgtgggcgccacgctgcacgccatcacgtcccgccacccgcacatctccggggtcaacttcgacctgccgcacgtcatctccgaggcgccgccgttccccggcgtgcgccacgtgggcggggacatgttcgcgtccgtgcccgccggcgacgccatcctcatgaagtggatcctccacgactggagcgacgcgcactgcgccacgctgctcaagaactgctacgacgcgctgccggaaaatggcaaggtcatcgtcgtcgagtgcgtgctgccggtcaacacggaggccacccccaaggcgcagggcgtcttccacgtcgacatgatcatgctcgcgcacaaccccggcggcaaggagcggtacgagcgcgagttccgcgagctcgcaaagggcgccggcttctccgggttcaaggccacctacatctacgccaacgcctgggccatcgagttcatcaagtgaaccaccgtcgccgcgatgagatggcatggctgccacatgctttgcttgcttggtcctcgtatcgtacgtcgccgtcgtcgtcttcttctggttattgcgctgctacctcgctgctctcgcgtatgcatgtacttttgcttaattttctttcttcatatcatgcactctggctggcctagactgcccccgatccatggtggccggtacgtcttgtcgagctcttgcatgtcgtggattctaaattcttcttctgcgtcgaattgtctctgccatgtgcgagtaataacaatcaaggttatacttacgatacaattacatggcggtttaattgctctctattaatttggtgaatcgaatcgattctactgaattcttctctgtcgtttaatgaaatttcctttgtcttttggattatataaaaaagtcgacgcggccgcgaattc

SEQ ID NO: 30713 - DNA, 729 bp, Zea mays
  unsure (1)..(729): unsure at all n locations
  Clone ID: MRT4577_12801C.1
gccacagtccatacatacatacacacancaacgtactacaasagatcacccgcacaagcaaacacatgcaaatcactcagcccacccagcacgacaacacatagcarccacmagaatggagagcaagctcgcamaccraycgcgcgtgvagacgccgacgcgcggcatgacgatcgcggtccgcgccgggcgcagcagcccgcagcgsgatcagtggcagcgccgacccggcggcacgccgtcccgcctcgtcgcccgcgctgtcgacggcggcstsgscagcsggctgagctcygmcgcscgcgtcggagacgcccycgtcccagagggcgccgcgccacggcgtrctccgctgacscsccccmgcgsctsctccyccgggccsggacgcccgccgggsgcgcaggcgccgcacgcgcctgccaggckggcgtsgtagcagcggcggctccccaaagtccacggcctcgcgcasctcccsaggcaaggacgggaaggcgccgcgcacggcgcgcgsngctcgctcgtcgcgcacgtgtgttgagccaccgacgcgggtcgngcggcgcgcgcccgccgcccgccgcgcacatcgcccgcacagcaggngccgggacgccgcgcacgatctgcgccggcgcgcgcaccgcccagcgcgaacgcagagcagtggccgcacgccacggkcgcgcgcgcgacagggtccccagctccacaccgcggagctcg

SEQ ID NO: 30714 - DNA, 171 bp, Zea mays
  unsure (1)..(171): unsure at all n locations
  Clone ID: MRT4577_128020C.1
cagaaaattagtanaataacaattagcccatggtatccaaatgtgccctaagtagtgtggtgggtgatagagcaacacacagccttttttttggttcagttgtttcatggcatggcatgatgagccaatgacttcattgaggagcagcaacagtgagatgcatagctcagt

SEQ ID NO: 30715 - DNA, 332 bp, Zea mays
  Clone ID: MRT4577_128021C.1
atctcttctccatgcactagctaaaccacctagcaccgtcgatcgctctgtgctgcaataaggaacagatacggtcctcctcccatgagctgaccaaggcggcgggcctggttagtgaggctgatgctgctgccattgaggtcgccacgcggacatggtcggtgcatgctgcggctaggagacgatcctcggtggcgccgtgcctcgggtacacgatgatcagcgcggcgtcgccctccgcggcgtgctgcagagagttgcgatcgctcaacagccgcgcgtcgtccggcggcagaccggcaggccacttgtaactgcctcaagagcatgac

SEQ ID NO: 30716 - DNA, 319 bp, Zea mays
  Clone ID: MRT4577_128022C.1
gggaaaaaaaaagtttttaagaaattccaattccattatacgggaaaaaaaaccggagggggttttccaggggtttttaaaaggggcaatgggaaaaaggggttcatccctttccggggtttccccccctttaaacaaaaaaacccagattcctggcctttaaaaacccagttggaaaaacagttttgttttgaaaaccccccttaaaaggaagccgtttccggaagttttttcaaaaaaagggggccctcccctgaccccgcctttggaaaggttttctttgcattggggacccgtggaattcttgcccccccctttg

SEQ ID NO: 30717 - DNA, 214 bp, Zea mays
  Clone ID: MRT4577_128023C.1
acttgggaatttttttctttttcttttattcgaaccaccttggcctaaccgggaaatttcagagcgggacctaaggagggacaagtttttctttgagagaaatatttaaaagctggcaataacaaagaacatacgggccgcaggaataaaaagtaaagcctgggaaaattaaagagaaaattaactcacattaatttaggggcaatgactgggg

SEQ ID NO: 30718 - DNA, 806 bp, Zea mays
  Clone ID: MRT4577_128024C.1
gtatgtctctcttggggtagggggaaccgtatctgtgacactaatcaactatgcaagcaaactaatacttgtggaagggtgtcaaggacgagttcatagaggcttggatctcctccagggttcttcctttggtttccggcactagccgatgcacaaacacgaccgtgagtccgcaaatggccgcgaagatgaagaaggtgccgtaagaacttcaaatcaacaggaagttgaaggcgtacgatacaatccacgacccgagccaacttactaaggtcacaaggctccctgccgaccctttcatgtttatagggaaaatctctgacattataacccatggtatcccgcccatacccagtgaaaaggatccgatgaaaaccagaagtccggccaaagccaacacgttcaggtccctttcccagtgctgctccttggacaagaatgacagaccaactagcaggcaacccacgcatgtcccagctgcagagatcatcaacagtggcctccttccagccttgtccatcagaagcacccctagtccgaccatcggaacctgcactaccgccatggccactgttcccgtgtttcccgacgagaaaccggccgagacgaacacttcactggcgtagaagagaacgccattgacacccccaagctgctggagggccatgagcccaactccagctatgacagcacggatgtactccttctgaaacaggtccaaccccttcgacttcggaaggcgctgaagaatttcagtaaaacttttatttctgaggcctcttcagagattcggttcggacgggtgt

SEQ ID NO: 30719 - DNA, 354 bp, Zea mays
  Clone ID: MRT4577_128025C.1
ggtgttggggggggctccattatcttattataggtgctccgccaaatttcaaagccacatggagcgcatccgcggtacatgcatactacggagagtttgcagatacgttgatgttccataatgcttcttaccacggcagattcttaggggcttgtagagggcgccaatattctttatcccctccactgcccttgccaccgtacatgactaagtggcggttgttgcctcacgcaagtcttggcttagaacttgtgctcccttttatccgtagtttactctaaacactagtggattctacgctactgttgccctaatgaactttgcaatatgtttgccgtatgaataagcctgggt

SEQ ID NO: 30720 - DNA, 395 bp, Zea mays
  Clone ID: MRT4577_128026C.1
aaaggggaaaaaaaaagggcccctttttacccggggaacctctaaaacaaaagtggcttcccccaacaccgggaccctgaaagggggaaaacattttccctttttgggaaagggggaaaaattctgggggcccccccaaaaatttgggataacccccccttctaaaaagaacccttggaagggcaaaaaagggggaatttccctgcctccccactaaaaatttttaaagaaaaaaaaggggggggcccaacccccggaatccgccccccccttgaagggcccccccccatgggggggaatgaaaatctgccctttgagggggatggcggttacttttttgggcaaacttaatacttgggggggggccccccaaaaaaaatttggtttgggggggc

SEQ ID NO: 30721 - DNA, 369 bp, Zea mays
  unsure (1)..(369): unsure at all n locations
  Clone ID: MRT4577_128027C.1
cccccttccaaataggaacctcctgtttccaaaaattgcaaaagtaacgggccctttaaaaagatgggggacatcaccacanccgccgtggcggcatgcggctctgtgcttcccggccctggtggccagggccgtctgccaaggctaggtcgagcggcacacgctcacggacctgcaatgcttgcaggaggtccaggagagcccgctcgacacgtgcctccacgtcctcaaccggcagctaaccggcagctgcctctgccgccctttccgggtgaacacccggctccccattctgtgctgccagcatctccacaacctaagaccggactgcccctgctccaacatccgctacatggtcacaacctacta

SEQ ID NO: 30722 - DNA, 221 bp, Zea mays
  Clone ID: MRT4577_128028C.1
cggacgcgtggggctgtctgcatgctctgggcgggaaggagagagagagagcgagagagagagagagatatagtagagaggctagtaggtggtcctcgaacggagatatttgcggtgttcagcgggcaggtggtggacgtgccggcggactggtggcggcgggcaccggacgccgtgcccaagacgaagcgtcgcagctcgtggggcgcttcctagccgcg

SEQ ID NO: 30723 - DNA, 630 bp, Zea mays
  Clone ID: MRT4577_128029C.1
gccgttcgactgcaggacggcgcaatgccaggcgcctccgacgtccggcacgcctgggtcgggccccggtggaccttcacagccactgtccccgccagggagctcgaatacgccgtcgcacccatccccgcctgggagctccaacacgccgtcgtacccttctccgccagggagctccaacacaccggcatacccgtctccaccagggagctctacgacaccgtcgcacccatccccgccagggagctctaccaccccgtcgccaccagggacctccacgactccgtcgtacccgtccccgccagggagctccacaacaccgtcgccaccagggagctccacgacaccgtcgccaccagggagctccacgacaccgtcgcacccatccccgccaggaagctccaccaccccgtcgccaccagggagctccacgacaccgtcgcacccatccccgccaggaagctccaccaccccgtcgccaccagggagctccacgactccgtcgtacccgtccccgtcagggagctccacaacaccgtcgcacccatccccaccagggagctccaccacgccgtagtacccgtcgccgtccgcagacggcaatagccccaagccatcaatgccgtcttc

SEQ ID NO: 30724 - DNA, 240 bp, Zea mays
  Clone ID: MRT4577_12802C.1
atggtggagaaaggccacgggtcgcgcggcagaatgacggtcacccgatcggccatcaccaagcgagggaggtggcggcaaagcggacaagggaccgggaaaggggacactccgaaagggatcgttctccgcgaaggaagcgggccccgagccctcctactgatcagaggttcgaaggctggcccctcggaagggttcgacagccgcctcggagcactcgggccccacgcctactactga

SEQ ID NO: 30725 - DNA, 371 bp, Zea mays
  unsure (1)..(371): unsure at all n locations
  Clone ID: MRT4577_128030C.1
gcacacccaccgggggggaaggagaggcacacaaaagaagcaccaacggagacggcaacccaccaacggaacagcggagccaccccaagcgccgccggccgccacccccagcaaggagancaaacccacccgcaaaggcaccccaccacaccccaacgcaggagacgacgcagggggcaggagccagacaacaccacacngcaacaagcaacgccaacacgacaacccaagacaaacccagaagcaaagacacggaacacngcaagcacanagagcacgaccacccaggaaccagagacaaccagncaggcgcgagcaaaaaagagaaaggacaacgaaccagaaaggggccgcaaggaaaacacgaaaaa

SEQ ID NO: 30726 - DNA, 1520 bp, Zea mays
  Clone ID: MRT4577_128031C.1
gccgttcgactgcaggacggcgcaatgccagccgcctccgacgtccggcccgcctgggtcgggccccggtggaccttcacagccactgtccccgccagggagctcgaatacgccgtcgcacccatccccgccagggagctccaacacgccgtcgtacccttctccgccagggagctccaacacaccggcatacccgtctccaccagggagctctacgacaccgtcgcacccatccccgccagggagctctaccaccccgtcgccaccagggagctccacgacaccgtcgcacccgtccccgccagggagctccacaacaccgtcgccaccagggagctccacgacaccgtcgcacccatccccgccagggagctccaacacgccgtcgtacccttctccgccagggagctccaacacaccggcatacccgtcgccaccagggagctctacgacaccgtcgcacccatccccgccagggagctctaccaccccgtcgccaccagggagctccacgacaccgtcgcacccgtccccgccagggagctccacaacaccgtcgcacccatccccaccagggagctccaccacgccgtcgtacccgtcgccgcccgcagacggcaatagccccaagccatcaatgccgccttcgtcccatggtggctcggctccgccgtcaggctaccagccgccgccgtggtcccagtgggcaccgtcgggtcaaccagtaggcgtaccaccacccacagagcaccccggtggcgtctggccgccgcacacgccaacggctcccggcacaccaggatcgccgtccacaccgacgactccgggcacgccaggttcgacattcccgccgacgacccccggcgcaccagggtcgttgccatacacgccgacgactccgggcacgccaggttcgacgttcccgccgacgacccccggtgcaccagggtcgttgccacccacgccgatgactccaggatcgacgttcccgccgacgactcccggtgcgccagggtcgttgccacccacgccgacgacgcctggctaccaccctccgtccccaggcgaccacggcggcagccaggggcacaccccgccatcggcacctggcagcagcggcggcgtcctaccgttcccgcgtgccgacggcgtggcctactcgtcgccgcctccgccgccgttcgacccagcagcgaggaacccgccgtcgttcccgcccgtccacggcgtgtcctactcgtcgcccccgccgccgctcccgcccgtgtaccccgtgtcctacgcgtcgcccccgccgccgtacaagagcaactagctggccgcgcgctgatccaccggccacggccagtgacaagagtcgccgtgacgcttcagtacatcttgcactgtagcgctcgttctttccctcccgcccccgctatttttctcccttgttgtagtagtttaaaagttgctccatttcgaggtttggttgcgttcgatcggattggattcaaaggctccgcggattcttttttttc

SEQ ID NO: 30727 - DNA, 430 bp, Zea mays
  unsure (1)..(430): unsure at all n locations
  Clone ID: MRT4577_128032C.1
ggggggccccgccttctcagtttgcntcttacggtcgttngcgtggggggtgcggtctccctctgccctattgccccacccatccttagtgggtgtgtgtctccaaaaagtcgcagcgcagcagctccgnccgcggttgcttccgcccgttggtcaagtgggtgcngcgncccttgctgcttaccttcggcngcggcgntttcttcccttgggtcaactngctggggggggccctgctgnttgcttgcgggcgccgcgggctctaccatgcaaccaacttggcgggggccctgctgccttcttattgcggcggcgggtgctgccgttccggctgcggggtggggcnncctttgctgctttcttgccgccgccgccggggctgccattttcccccccggggtggggggggcgttgacgccttgttggcgcg

SEQ ID NO: 30728 - DNA, 283 bp, Zea mays
  Clone ID: MRT4577_128033C.1
gggggggggggggggggaagccaggcggccgaagggtaataaagccgtatctactggagatagccagccgtgcagtacggtgagtgtggcatgcgcgagtcgtgcaaagggcccaatgctcgagtctttacaaccagtgtccagctaccggtggcgtagtcatgtgcaatacttacttgagaggccatgcctacctaggctataatctcagtcgttagcgcgaggtgccaaattactgcgcacggggccaacccgtcttatctacgctaaccttacgcctagg

SEQ ID NO: 30729 - DNA, 363 bp, Zea mays
  Clone ID: MRT4577_128034C.1
cgacaccattgagggtgttgctcgttgctatcgctctcctggatctcgctgcgagcgccaccttcacgcatacaagcggcatgctgtggctgccagccaccgacgccggtttatctactcgccgtcggtgcatctgccacttcaggttaaactgccatgttcggagcatctctcaccttcggtccacctgcaggcggagggccagatgccaccggcggagcatgtgccgccggcgggtcatatgccgccgacaccatgccactacactagtcgcccggactggcataagcctcattcccagtcacaaccatgcgcgtgccaacagccgtaaccaaagcactgccacctgcagggaacttgcgg

SEQ ID NO: 30730 - DNA, 285 bp, Zea mays
  Clone ID: MRT4577_128035C.1
ctttcatgcatacttgaagattatggtccagcttctgtgccaatatctcagggatggttagctcttgtcctttctgagattcttggggacaacaaggcccaaggttcaaaaggaacgacacagcctgaaccagagaaagtgaagaatccggttgattaccataatgcttcaactgcaactcaggtcctgaatcaattaggtagtgctgttgttaaattagcaagcacccaatcgaactgtgagcctgggtctgatgacaaagataaaggaccactttctgatttt

SEQ ID NO: 30731 - DNA, 185 bp, Zea mays
  Clone ID: MRT4577_128036C.1
ataacacatgtgagctcgaccatgggatccctctctaataacatcatggtcaaaaacggcaggcttaaaaaaatcggcggcggcacaaactaccgaccccctaaagtgccacccagacccaacatcaccaccaactacaactgcaaatggctcaccactagagccaccttttactgtcagaccaa

SEQ ID NO: 30732 - DNA, 420 bp, Zea mays
  Clone ID: MRT4577_128037C.1
gggtacccctccgaggtccggccgggattagtctataatgcaatattaacatctatgtattgaccattaatataatgtatcatcaatctcatataatgatgtcttgctgtttattacggaattgctgagtctacactctgcttttcaatactggtgcttgttcaattggctttgttttttctaacattttagtatggtatatagctaaaatgtttattctcctaagtgtgctaactattcaagttatattttaatggatctttttctactagttgattttattagagttgtacttgcagcatgtttgtgttcgttcagtggtgtcttattgttattaacttgctgttaggttcatccagcacttgcagttggatgcaattggtttgttctgtccctcatggacatgaaataatcatgaaa

SEQ ID NO: 30733 - DNA, 377 bp, Zea mays
  unsure (1)..(377): unsure at all n locations
  Clone ID: MRT4577_128038C.1
ctnnnntttttttttttttcatatattttttttttttttttttttttttttttttgtgttgatttatttttttttcattttttatttgggggagcgggggccttttaaaggtgtaaacccgaagggccctgcttaaaaagcatacagaggggcccaatttaaaactgggtgagggcccccctggggtacaaaatgggcggggggccccaatttttttgaaattttgaaaaacttacggagggtttaatttccaacagttccccccatttcaaaaaaaaaaaaaaagtccggcgctaaaaaatggcacttatgaacctattttagggttttaaaaaaggggccctttaatccaaacgttacaatgggggtgggcttaa

SEQ ID NO: 30734 - DNA, 276 bp, Zea mays
  Clone ID: MRT4577_128039C.1
gggggtagtcaaaatcaaaattggccctaacggccaaacaaagaaaaacccgacatgaccacagtattccggggggacacaaaaaaatttaacttcgcatggaaaacacggaaagggggaaaggcccgatgttccaaagatgaagaaacccgggtggacaagaaacccatcaggaaaccacacagtgaacgtggggacttcgtttattcaaaatcaaacaagaaaaaaagcgccggtcgcaaaagccaaaaacggtgagggaaatagttctcaacc

SEQ ID NO: 30735 - DNA, 395 bp, Zea mays
  Clone ID: MRT4577_12803C.1
agcagtggtaacaacgcagagtacgcgggatacctaaaactgtagaaagatcacttgtttgccagcaagagctctgctgctgaagccagcgaacggggagatgacctggaccacaatcctacaatttggcaagtttcagagagttcataaacaacattgatgatgcgaaatggtcatatacaataaggttactaacttactacatgtatcgacagggaactaaagcctatgttatccatgtgcaagtcgaaaaccatgagaagatgaaattcgtctacttggccacttaccaagccctgaaactatcattcccaaaagtagaatgaaagctacaagacatcaaaaaaaaaaaaaaaaaaaaaaaaaaaaaggtcctctgcgttgttaccactgct

SEQ ID NO: 30736 - DNA, 433 bp, Zea mays
  Clone ID: MRT4577_128040C.1
cattgggtacctcgaggccggccggggaccatccaccgtgcccggccccgatcgctatctgggtcactctcacgtcacgaggcctcccaatggttcgtagctgcagcatgacggagacggctgcgccaccactggatcaagcgccgctatccgcctcctggcatgcgtcacgacgatactgccgaccccggccgtcgacataagctgccacgccgcgctgatgaaggcgcacttataccgttacagatgcaccgcgtgggaacatttgaagggccatgtcgcgatggcactagatctcgaccgaccccgactagctatacatctaggtgtgccatctcttctgccatgaacgccactttgaaaggggccaagcgacactgtagacatatatgacgccgagagacacaaaaaaaaaaagaagctgcccccaagg

SEQ ID NO: 30737 - DNA, 2016 bp, Zea mays
  unsure (1)..(2016): unsure at all n locations
  Clone ID: MRT4577_128041C.1
gnnnnnnnnnnnnnnnnnnnngtgctaaaagttcagcattgccttggtatccatatatcaataaacaatgaacacacgtttcttggttgtctctatgtgaaacaagccaggtgagggcaaaatcagcccctccttccaagacactataaaacaaacctggagccacgagtgttctcattttacaccatggtgccaacatggatgaaatgggcgtgttcacaggccagtaaatgtttcgaataggttagctgctagcgcactacacaaacagctcaggccgacgttttcagtgtttgaccggcaaaatgagcaaacaaataaaagggcgtactcttatcagttgggacaatgctgatgcttgaagccccccctcctctatgtccactcctataaaggccgctgctctgataaatatgtacactcccagcgaaaagagccatgcctggattcgcaagccggttcaccaaactgcatcgcgctatctcaaaaagtgggctacctttgatggttgatggcctggtggcatggctgttgcaaatggattgatgttgatggtcatcaacatgtgctgcaatagtcctatgagctcagcaaaactacaactcggtgtcaccggatgtagcttctaacgaaagatgttcctccgacgcaacttaaactgtcagaactctgggactttggagaggggaacacgttccaaaaccggagcgtttcatcaccagcaccagtaactatggtctggccatcaggggaaatagctaagtacaatactctgtatgtatgccctgtcaaagtggcaagcttcgacattgttggatatctccaaacaattatttggttctgagagtagccgtgggtgctaacaagctcatttacattctttgaccacgcaagattgcagacctggctgccagtgtccacacagctcaagtgtgcatttgtggtcgtattccaaaatcgtatgcatctatctgcagttcctccaccagatgcaagcagcccatggagatgaggtgaccaggcaatagctttgacagctgctgtgtgctcagtatacttcagtactggctgtactgaatgtggattccaaacaaaaagtctgttgtcattgccacccgatgcaagctgacgattgtcataagaccacttgagtccacaaacctcagatttatgcccggtaagcttgctaacatgatcttcttgagcacggatatcatggtggaggatgctcttgtcacggcttccagaagaaagcaacgaagaactccatgcaagagcacctacacgcatgcgatggctttccattgtccttattcttttacagcgagttgcatcccagatctgaacttttccttgatttgttcctactgcaaggtgagtgccgcgctgcgcccaccccacagaacaaacgttgtcatccacccccaaatcacaaagcttggtgaccttgctgctgcatgcattccacaggtaaacgcaattgcccaacccaacagcgaggacgttatgtgaagaccaatcgacgaggttgaggtagaagtcgtcctgcaacgcaggcgcatccagcaccttgtagggcgacctcgggaccttccttggtcccgcgcccctggtggtgaaaatgccggggaacagggcgtcctcctcctcctcccctccggaaaaaagcgccctcttggcgttccggcgcacctccgtcttgaatctgaagatgttcccggtggcgggggtgcccacaggcgagagccccggggaggaggaggaggacgagcacgcggcggccgaggacgcgacccggtcgggcgtgtcgggcccgaagagcgcggcgcggaggagcgcgcagtagggcgacgccgcggcgggcgcagatccggacgaggccgcggggccggcctcgtgggaggaggacgaggaggcggcggcggcggcgggcgagggcgaggggccgaggtcgaagagcgcgaggttggatccggcgcggctggggatgaagcggtcgctgtagacggtgcgcga

SEQ ID NO: 30738 - DNA, 922 bp, Zea mays
  Clone ID: MRT4577_128042C.1
tagagcgcccgcctttttttcttttctttctttaaaaaaaaactatgctaaaagttcagcattgctttggtatccatatctcaataaacaatgaacacacgtttcttggttgtctctatgtgaaacaagccaggtgagggcaaaatcagcccctccttccaagacactataaaataaacctggagccacgagtgttctcattttacaccatggtgccaacatggatgaagtgggcgtgttcacagtccggtaaatgtttcgaataggttagctgctcgcgcactacacaaacagctcaagccgacgtattgagcaaacaaacaaaagggcgtattcttatcagttgggacaatgctgatgcttgaagcccccctcctctatgtccactcctataaagccgttgctctgataaatatgtacactcctagcaaaaagagccatgcctggattcgcaagccggttcaccaaactgtatcgcgccatctcaaaaagtgggctacctttgatggttgatgcaaatggagtgatgttgatggtcatcaacatgtgctgcaacagtcctatgagctcagcaaaactacaactcggtgtcaccggatgtagcttctaacgaaagatgttcctccgacacaacttaaactatcagaactctgggactttggagaggggaacacgttccaaaaccggagcgtttcatcaccagcaccagtaactatggtctggccatcaggggaaatagctaagtacaatactctgtatgtatgccctgtcaaagtggcaagcttcgacattgttggatatctccaaacaattatttggttctgagagtagccgtgggtgctaacaagctcatttacattctttgaccacgcgagattgcagacctggctgccagtgtccacacagctcaagtgtgcatttg

SEQ ID NO: 30739 - DNA, 393 bp, Zea mays
  Clone ID: MRT4577_128043C.1
acagggagggcatgaccaaacacagtctttttatcaaaggtaacaaacatagaacaagctacaaaggggaaacactccaattaaggtcaccatacacgggcaggacacacacacaaacatgggaccctcatgcgcgcccccaaaaatattgaaaccggaaatgccaggagggggcacgccgggacacactgggaggctcttacttctggagcacaccaccacttcacatattattggaggcccatgtgccctcagcggacttggtcacctacagcaacgcgtgcattggaccaacattatggtcttgctggtcaagaagtttgatcagcttttagggggctagctagggcgggcctgtccaccaatgtaagaagcggcgggcattgcggattc

SEQ ID NO: 30740 - DNA, 392 bp, Zea mays
  unsure (1)..(392): unsure at all n locations
  Clone ID: MRT4577_128044C.1
tcgggaaagctgccctcgccacggtcacggcttcacctcgagatcgagaagaaaagaggtgaggagagcacggggaggggacgcgcaggccctccgctccgctccggactggcgctgtgatggcgcaacagcggcgcagcgcagcggcggcggcggcgncgtcntccgcctcgccgcgctgctcctcctggccctggccttgctctcgccctgcctctcccgcgccgacgccgtggccgctccttcggctcctctcgcgtctgctgctgccgccgcctcggactcggngcttggtgtggcgnccgcncgggngattgctgtngcncngggtggcgttgtggngtggttccnggncttcggcggcccccgcgccctttcccggcccgtcccgc

SEQ ID NO: 30741 - DNA, 626 bp, Zea mays
  Clone ID: MRT4577_128045C.1
gataaaaaatatatatttatgctaaaagttcatcattgctttggtatccatgtatcaataaaaaatgaacacacgtttcttgattgtctctatgtgaaacaagccaggtgagggcaaaatcagcccctccttccaagacactataaaacaaacctggagccacgagtgttctcattttacaccatggtgccaacatggatgaaaggggcgtgttcacagtccagtaaatgtttcgaataggttagctgctagcgcgctacacaaacagctcaggccgacgttttcagtgtttgacccgcaaaatgagcaaacaaacaaaagggcgtattcttatcagttgggacaatgctgatgcctgaagcccccctcctctatgtccactcctataaaggccgctgctctgataaatatgtacactcccagcaaaaagagccatgcctggattcgcaagccggttcaccaaactgcatcgcgctatctcaaaaagtgggctacctttgatggttgatggcctggtggcatggttgttgcaaatggattgatgttgatggtcatcaacatgtgctgcaacagtcctatgagctcagcaaaactacaactcagtgtcaccggatgtagcttctaac

SEQ ID NO: 30742 - DNA, 587 bp, Zea mays
  Clone ID: MRT4577_128046C.1
gccggccgggccggggagtttcgatctctcccatccgagtgtctcctccgccgccgccgccgccgcttccgtcgtctccgcccgccgaggccatgccgtcccacaagaccttccggatcaagaagaagctggccaagaagatgcgccagaaccgccccatcccctactggatccgcatgcgcaccgacaacaccatcaggtacaacgccaagcgcaggcactggcgtcgcaccaaactcggattctgagcggtggaagaaatgctggctaatgacgcttggggggtatagggctctgcaggctaggaagctcttgtttaaatttttttgcttgtgttatttgtcattgtagtaccatgttttgtctgatggttaaagaaccgcctttatgctatggtgaatttatttaaccttgcagcgccttaatcagttgatctctagccaattatttttccagtttgctatgcttctctgattgtacatggttgtctattcctcggttaactgtctggttttaacacttatctctggtttagtgttatatatgtgtatgtatgcatggatgccttatgtgcacaggtacgtttc

SEQ ID NO: 30743 - DNA, 276 bp, Zea mays
  Clone ID: MRT4577_128047C.1
ctggtcctactaaaggcacacagcccgacagccgccgctgtttgttcatcttcctcgcagcgccggcgctccttcttccgctccctctccgattcgcgctcggcacgcaggcgacggcggcggcgctcgtgcttgggcctctcagcgacggcgggcagtcccagactcggtgtcggcatcagcggtccccctacagcctgttaccaatcgtctggcgccctggccttcgggcctacgtacaccaaccggcgccctgagtggacgcctgccgctccc

SEQ ID NO: 30744 - DNA, 1738 bp, Zea mays
  unsure (1)..(1738): unsure at all n locations
  Clone ID: MRT4577_128048C.1
ctcgactgtctattacttcaatacaagccaggcgagggcagaaccagccctccttttcaagacaccaggaacgaaaccatggaacaagtgctctcatcttacaccgcgccagcatgaatgagaaatgggcgccacaggtcagtaagcgtttcgaataggttaactgctagcgcactagacacacatcccaggtcgacgtttgacccgcaagatggacaaataaataacaacaaataaagggggncgtattcttatcagctgggaacaatgccgatgcttgaggcctccgctatgctgcactcctgtaacacgcgccgttgttgctctgataaatatgtacactcttggccaaaagagccatgcccggattcgcaagcctctcccatcggactgcgtcgtggcatctcgacgattcgattacatggttgtcatgaatgggatgatgctgatgatcatccacatatgctgcaataaccttatgagctcagttcaaactacgtttctgcgggtcaccggatgtagcttctaacaaacgatgtacccccgatgcaacttagactatcagagctctgggactttggagaggggaacacgttccaaaaacggagtgtttcgtcaccggcaccagtaactatggtctggccgtcaggggaaatagctaaatacaatactcggtacgtgtgccctgtcaaagtggcaagcttcgacattgttggatatctccaaacaattatctggttctgggagtacccgtgggtgctaacaagctcattcacattctttgaccacgcaagattgcagacctggctgccagtgtccacacaactcaagtgtgtatttgtggtcgtattccagaatcgtatgcatctatctgcagttcctccaccagatgcaagcaggccgtggagatgaggtgaccaggcaatagctttgacagctgctgtgtgctcagtatacttcagtactggttgtactgaatgtggattccaaacaaaaagaccattgtcgttgcctccggatgcaagctgacgattgtcataagaccacttgagtccacaaacctcagatttatgcccagtaagcttgctaacataatcttcttgagcacggatatcatggtggaggatgctcttgtcacggcttccagaagaaagcaaagaagaactccatgcaagagcacctacacgcatgcgatggctttccatagttcttattcttttacaacgagttgcatcccagatctgcacttttgataacattgtgcctacagctaggtgagtgccgcgctgcgcccaccccacagagcaaacattgtcatccacccccaaatcacaaagcttggtgaccttgctgctgcatgcattccacaagtaaacgcaattgcccaacccgacagcaaggacgttatgtgaagaccaatcgacgaggttgaggtagaagtcgtcctgcaaagcgggcgcatccagcacctacaagcaagcaacagaaagaaactacaaaattcgcattatgtccgttaaaaaaaacgtctctttgagcatttcggaatgcaattggcgagatgccaaatctttcacgccgcccccaagaagcagcagaggcttgtacggcgaccgtggcaccttccttggtcccgcgcccctggtggtgaaaatgccggggaacagcgcgtcctcctcttggtctcccgaaaaaagcgccctcttggcgttccggcgcacctccgtcttgagtcaga

SEQ ID NO: 30745 - DNA, 810 bp, Zea mays
  Clone ID: MRT4577_128049C.1
atctcgatcgcagttgatccagtacacaattgcagagagctagaagacacaagaacatggcgtccaagcgactcctcgtgctagtagctctcctgctcgccgccgttttccttgccgtctcaggagcagctaacgacgaccaagcccaaccgaggaaggacggcggcgagaacaaagccgccgcttccgtcgtctccgcccgccgccgccgccgcttccgtcgtctccgcccgccgaggccatggtacgtatctccggcctttgcgcgtaagctcgcggattcatgggttagtcgtgttgtacctcgtcgatcttacgcctttttgtcccgtcgttgcgctgcgtccccgcgcagccgtcgcacaagaccttccggatcaagaagaagctggccaagaagatgcgccagaaccgccccatcccctactggatccgcatgcgcaccgacaacaccatcaggtacaacgccaagcgcaggcactggcgtcgcaccaaactcggattctgagcggtggaagaaatgctggctaaagacgcctagagggtatagggctctgcaagctaggaagctcttgtttaattttttttgcttgtgttatttgtcattgtagtaccatgttttgtctgatggttaaagaaccgcctttatgctatggtgaatttatctaaccttgcagcgccttaatcagttgatctctagccaattatttctccagctcgctatgcttctctgattgtacatggttgcccattcctcggttaattgtctggtttcaacacttaaaaaaaaaaaaaaaaaaaaaagcggcc

SEQ ID NO: 30746 - DNA, 494 bp, Zea mays
  Clone ID: MRT4577_12804C.1
gaattatacatcaaaagtaccattcattctgaaagtaataaatagaaggggaaaatatgtttttagcaaacatttaaatagaagggaaaaatagatgaaacctgggtgattgaattatacaacaaaaaataccattcattgctgcccgttttgcccaaagactagcttccaccacatgaacaaactgcactgaatttacttacctgtcaagctagagttgccctcttgccttttgtatcccttgactgggcagcaaccgatctttttgaatccaggaactggtgatatatattgccgaggctgctcttctcttgttctgaaacagatggtctatccttggatgctgtgaacttcagaagagcatcagtaataactggtgctttttctggcctagaggcatccacactgtccagaacatcatgaaccgctgcaagctgcgcatctgagaggagagcttggagatcagctccactgaatacctcggtcatattagc

SEQ ID NO: 30747 - DNA, 833 bp, Zea mays
  unsure (1)..(833): unsure at all n locations
  Clone ID: MRT4577_128050C.1
natctcctatcctcctcacctccccctctctcacctcttcctcgccctcccctccctctccaacccccggcagccatagccaccgggagggctggagccggggaaggaggcattccttggagcctgcgcgccccctacccagatccgctttttcgggtagtcttgggcgatctggactctcccccaaatcgttcgttgcagagacaagaagttgccctcgcctctgctcgttgttcttcgtagcctcggatcaaaagcagccgcctttgcattcattcttcgtcggccccttcggagaccgccctcgtcaagatttggtgggaacccaattcgcaggggttcctcgtggaaaggcgccgcttcgattcttgtttctccaccgtcttccacccccctatatatctccacctcctgtccacctactcgcctaacttccttttattttgatccgccccgtctcggtattcgatcgctgtccgtccggcagtttcttgatttgacgcaggccagatcgctttctggtgttttcttttccccggagtggttgaggcggtccccgtcctcggtcggagtcatggcggcggcgaacggaggcggcgcggcgctgttcagcgacgaggaactccgggatgtgagcgggctgcgcctgcgcgagggcttcgtggagatgatgtgcggatgcaccagccgccgctacggcgacgccgtcggccgcctcctaatctacccgtccggcgagctggagattagctgcgactgcacgcccggttgccgcgaagaaaagctgactccttcagcgtttgagaagcactctggaagggagactgcaggaa

SEQ ID NO: 30748 - DNA, 422 bp, Zea mays
  unsure (1)..(422): unsure at all n locations
  Clone ID: MRT4577_128051C.1
cctgggcccccggaaagaaaatccaagaatttgggggggcttgggccccactgtttaagaaaggggcttccaggggcatttaaagggggaaggagcccctccttcgggaagggatgttcttggcttttgcgggggggttggtggggccttaggtgccccccaaagggttttttcccggccgggggggcccaaggcctggccngggccgggggggggctttgggggggtaggggtggtgccccngggggaagggcccttttggtttctagggggcccggggttttgccggtgtcctttgggggctttttggggggccccttgggggggggttttggggggggggggtnttttttgggtgttggcccctggggttgtggctcgggtgggggtttttgcgggggggggtgtggggtttcccgggg

SEQ ID NO: 30749 - DNA, 835 bp, Zea mays
  unsure (1)..(835): unsure at all n locations
  Clone ID: MRT4577_128052C.1
acaacaaaggtagccagacaaggttcagcattgtcttggtgtccatacatcaacaaacaacaacgaacacacgtttctcgactgtctattacttcgaaacaagccagtcgagggcagaaccagccctccttttcaagacaccaggaacgaaaccatggaacaagtgctctcatcttacaccgtgccagcatgaatgagaaatgggcgtcacaggtcagtaagcgtttcgaataggttaactgctagcgcactagacacacataccaggtcgacgtttgacccgcaaaatggacaaaaaaataacaacaaaaaaagggggcgtattcttatcagctgggaacaatgccgatgcttgaggcctccgctatgctgcactcctgtaacatgcgcgccgttgttgctctgataaatatgtacactctcggccaaaagagccatgcccggattcgcaagccacttcttccatcgggcttatgagctcagttcaaactaagtttctgcggtctttccggtgtagctctcaagaagcatgtcacccaaggtgtaaccttgctcttctcattgaccttaggggtatatgcattcctgaagcaatatagccataggagccagcaattgcagacatacactgtgatgagccatagtcatcagatttgtgcacggtaagcttgctaacataatcttcttgagcgcggatatcatggtggaggatgctcctatcacggcttctagaagaaagcaaagaactccatgcaagagcacctacacgcatgcgatgcctctccatagttcttattcactcccnncgacttgcatcctagatcaccaatcctat

SEQ ID NO: 30750 - DNA, 675 bp, Zea mays
  Clone ID: MRT4577_128053C.1
gacacgactctcggcaacggatatctcggctctcgcatcgatgaagaacgtagcaaaatgcgatacctggtgtgaattgcagaatcccgcgaaccatcgagtttttgaacgcaagttgcgcccgaagccttctggcggagggcacgtctgcctgggcgtcacgcgagtttcgatctctcccatccgagtgtctcctcctcctccgccgccgccgccgccgcttccgtcgtctccgcccgccgaagccatgccgtcccacaagaccttccggatcaagaagaagctggccaagaagatgcgccagaaccgccccatcccctactggatccgcatgcgcaccgacaacaccatcaggtacaacgccaagcgtaggcactggcgtcgcaccaaactcggattctgagcggcggaagaaatgctggctaacgacgcctgggggtatagggctctgcaagttaggaagctcttgtttaattttttttttgcttgtgttatttgtcattgtaataccatgttttgtctgatggttaaagaaccgcctttatgctatgttgaatttatttaaccttgcagcgccttaatcagttgatctctagccaattatattctccagtttgctatgcttctcttattgtacagttaactgtctggtttcaacacttatctctgatttag

SEQ ID NO: 30751 - DNA, 185 bp, Zea mays
  Clone ID: MRT4577_128054C.1
gaataccggctcgacccaccgtccgtcgggtcaatccgagtacgcgccgtctacctcgaagcccgcgagtgggccgacggcggatttaagaggccagcaggcgcctacaatctatcacctcacgagcatctctagcattccaccaggctcccactgcttcgtgcccgcatcccctgagcccaacc

SEQ ID NO: 30752 - DNA, 540 bp, Zea mays
  Clone ID: MRT4577_128055C.1
gaggcgcaaaaaattttacatgcaagcatccgggacaaacaattttgcaatgaagccccgaagcaggggggggggacaaacagaaaccgactcctcaaaaaaaaatcatgatttgcgctagcgacaggctttgttttgaccccccttctaaatatcagcagaaaccctgccccagcccccaaagcacggaattgtcaaaagtccccgggcgactttgaacgaaaaacaaccagcacccaggcaaaacgaatcctgatcgatctcggcaacaaacaggttatggggaaaaccacaaggccccccatgccattggaaatggggaccggccccatccccattcccaggtggaatcactcgacacgggggtgctttacaatctgtctactgctacgggagtcgggagcacacccccaataccacacgacgtttagcacgaccacattaccgggctagcccaacagggttggggccacctgtacaccaacccctccccaacgggggggttggtccagggccggccgccttcctgccccttgtttt

SEQ ID NO: 30753 - DNA, 593 bp, Zea mays
  Clone ID: MRT4577_128056C.1
acccttattcccccttaaacctgtcatattggggggggagatgaggtaattttattgcgttagaacctttccaataactatcctttttagtgatcaccaatgtatcccccatttctcaaattggtaggaggggttgatgtattgctaatctgctgcaggggcgcccccaataatttaaaaaaaaacagtattggtgatcactaataccactattggggatgaattattgatgagctgctggagatgctcttatgcatcctgattcctggagtggaaatctagctgggaggttctgtactgggaaatcctaatactcttagcgctgtaaaggttctgctttctagctgggagtgccatcaaacgtttgtgttgcagtcgtcccaactccccagagtttagggccgtggctgccacagctgttttcagcgagttgttttgtggtattggtccagttggaacgcaatgcaacaaagtgaaacgcaattgaagattctttttttaaagagttttagagctatgctctagtcttttgactgggttcaactattgcagcacatagggggattggcataatgcataattgcataccaacc

SEQ ID NO: 30754 - DNA, 185 bp, Zea mays
  Clone ID: MRT4577_128057C.1
attcggctcgagagcagttgcatagattggtcttaatgccttattctgcgctagccatactgggggtgtctcaagctgcatgcgggttcaatcacaacagcctggatggttcctaatttctttgacctctaaagaagattacttgtaatgcaacccctgctaccgacttggcgcccttaacaaca

SEQ ID NO: 30755 - DNA, 120 bp, Zea mays
  Clone ID: MRT4577_128058C.1
ggggctcccacggtcacctataactccatcagatgggtcaccctctgatgaaatgatagccctaagctccttcttttacatgcttacccgtctgctggtctaatagatccaaccttgcct

SEQ ID NO: 30756 - DNA, 365 bp, Zea mays
  Clone ID: MRT4577_128059C.1
cgaaaaaacatccacaaattcttgggattaaatttcccaaaacacacctgggtcccacatattcgtggtagggggaccttaccggagtgcgccaccctatacatgggggctgcaaacaaaaaaccatgctagtgggacgaaaaccagtcgtcctagagcctcaaacaaaaaaggatggccgggtccaaccttgtcctggcacatacctacgggagggggtggtactccaatattccccgcccgcacctaaaggggccccaacttgagcgcgttggttcttcccggttacagcaaccttgccagtaagaatgaccccatttgggtgtgcacacccgcgcactgccctcaaagcgggggcctaaccc

SEQ ID NO: 30757 - DNA, 961 bp, Zea mays
  Clone ID: MRT4577_12805C.1
ccccttctcctcttcctcccgtccagcgctctcctcctcctaggccctaacccccaaatttcgttcccaaatctcgccgcctgctgccatcccatccgatcccctcgcctctccgcttcctcgcccttcacggacatggctgcctccaccgtttcctcctggtttccacgttcccttcccgagtccgccgcccccataggtttggttctcctcgacaggtgttgccacatcgccgacctcaccaacaacaccaccgcagagagcaccaccagccgcggcttgcctatcaaggtgaccttccacgccgccggaccgccacttgtctcccacttttgtgtccactgccctggcctggcctaccgcataggagggcccaagatcgtcgctaccgacgcagatctcgccctcctctgcgttcccaacaaccccgactgtacctcctgaggattggactgggactacttcgtctacgggccgcgcgcccggtggttacatcggctaccgaacccggaccccagggtgctcgacgaccccgcgactgccctcattagccaccaagacggcgcttcgtatgtcgtcgctgctctcggtgttggccgccccctgtaccatcgccgcgcgctcattaggtatgacttcgacgtccacatgtacagatcctcagattcacaagggtggatctccaagcggctgtcagtgattgagtttcagagggacaagcttatccctttacctcgagcggtcgacaggctgtaccacgagacggagaagaccatcaccattggtggtgagcatggcacggtcgcctgggtggacctctggcgtggcatctttctctgggatgtgctcaaggaatgcccagtgctcccaagatggcccactgccatagccgggaagggctaattggaaaggcctcctccgagaatctaaccccagttttttgggggacgtaactatcaac

SEQ ID NO: 30758 - DNA, 1136 bp, Zea mays
  Clone ID: MRT4577_128060C.1
tacaatttgaatgtataaaacatttataagttttaaaatacatgctagcttaagtgacaatcctcaataaagaagctaaagatgggatatacttatataagaaggccgagcccaccggcacttagcagcatccacaacagaacaaaattataacctgggataacactaagtgttgttagatgatgaccacttggtgagcatcttccatcctggcacttgatcagatcatccattcctctggtttattcgttagcatcactttgaggttaatccaacacttttcctccacatcgtgcgatcaaataacgtacctgggataacactaagtgttgttagatgatgaccacttggtgagcatcttccatcctggcacttggttgattcatccattttagcttcgtccatcagcatcacttggagatcacttccactcgtcttccatagcacatgatcaattaacgtacctaaatgcggacgaggagcaacgaggctgacagatccggcgaagcgagatgcgaagacgtcgggactgcacagatcgacagcacagggttgcaaatagagtcgacgcatgcgacgcggagggatccgaggcttgctgctgcgtacaagacctcgacttgggttgagctcgacgagcagccacgggacatagagacgttgggactgccactattccccgaggtggaggtgtcgcgctgagattggagtcggaccagggagcggcgctggtcacaaatggaggagatccagtgagggggcgcctgcagggagaagtggagcgctggctgccatggaggctggcgttgagggagttcggccggcgagctggacactcggcacggtggggagcagcgacaaagggagcaaggacgcgcgctggaaggggtgtcgagcagagcttgggtaccatggacaggaaagggcagttcccgggcaagcaccagggttggcggcgtccaaggagatgggctgggcgcaggggccaggctcggccaccagggaacaggcgacatccttgctgctagtgtggggaggtgagggggaagggcaaagggttgctggcgagctaggctgagagtcgaacagcggcgttgaggcagacactcggatggccagcgcagagaaattagagt

SEQ ID NO: 30759 - DNA, 308 bp, Zea mays
  unsure (1)..(308): unsure at all n locations
  Clone ID: MRT4577_128061C.1
cttttctctttttttcttctttttccctctcctttttcccggggtngggttttttttttttgggaaggaccaacctgcccaaaaaaaaaaaaaatatgaaaaaaccctcaccggcaaagaccttaaagggtaaaaaggggctgcccccgcccctcaactttgtacccctaaacaaaaaatcatcggccccgaccccaggagctggcgcctccattggccacttttgggctgctgaaccaacgaccatccatgggggttaaacctaaatgaccgaaccccgacccctggccgacccccgggttcccccg

SEQ ID NO: 30760 - DNA, 807 bp, Zea mays
  unsure (1)..(807): unsure at all n locations
  Clone ID: MRT4577_128062C.1
cctcgaggccggccgggaattagtttgctgcattgcaattgcgtctgctcaatacaatgcgtacgtggccctactgcagtgcatgcaatcgctcctcatctccttctctccctcgcgcagtcgcactcacactctgccctcttctctgcctgtgaaaaaggtgaagctgcatccatgtatttaacaggcagagatgtgatcagccttgcccattccatggctgcccgctctgttgcgtgatcctgctgcatgcacttcttgaattaattatataagtactaactagtacggtagtacctacctgacgatcctgacgcgcgcaaggggttctgtggcatttcggcagctagcacgcagtgaccacggtagctatcgccgaaagcgggaactgaagaagatgttggggaggatggctgggccagggggcggcggagtctcggagcagcggcagcgcgaggccgcgtttgatttcggccgacacacgggcactgccgccgctgtgccgtcgtcgtcgccgcatactcccatggtgcctcccaagctgttcttggctgcagggagcggcggcgtcgtctccggagaggaggcgttctcgccaccggaggagctagcggngggcgtcgtcgtgatggtcagccccacctcgacgctgcagacaccgaccggcagcgctagccctacgtctgcagcgacgtccacggccgttccgttcctcccgtcgcggggcgacctcgccatcatcacccagcggggacgatcgtcgtcgggtgcagagcaggagccggatccggagccagcgccccctgg

SEQ ID NO: 30761 - DNA, 2915 bp, Zea mays
  Clone ID: MRT4577_128063C.1
cgcggttgcagcttgcagggttttccccttccgttctgcattcctcgtcccgtccgcccccgatacggcggccacaccccacacccccacacttctccgacaagggaagggaaccccagatctccgccgccccgccagccgctatgccgactgccgccaaccccgccgccgcgctgcccctcaccctcgacctcgaggacttcaagggagacttctcattcgacgctctgtttgggggactggtggacgagctgctcccggagtaccgcggggaggacgacgccgcgcccgcgccacctcctccgccgcccgtgctcggggcggccccgcccgtcttccccgctgtcgacgagcttcttgggctgttcaagcactcgtgcaaggagctcgtcgacctccgtaggcagattgataagcggctccagaatcttaagaaggaggtggcagtgcaggatgccaagcatcgcaagacgctaggggagcttgagaaaggtgtggatggactatttgatagctttgctaggttggattcccgcatatccagtgttggtcaaacagctgcaaaaattggtgatcatttacagagcgcagaatcccagagggaaactgctagtcagacgatcgatctcatcaagtatctcatggagttcaacagcacacctgggggaccttatggcattcctcgtcccgtccgcccccgatacggcggccacaccccacacccccacacttctcctttattttctgatgacagtcgtgttgctgaggctgcttcaattgcacagaaattgcggtcatttgctgaggaggatgttggtagacatggcgtgtcatcagctgtaggctctgctaatgcaagccgtggtttggaggttgctgttgcaaatctccaagaatattgtaatgaattggagaatcgactactggctcggtttgatgctgcatcacagagacgggagttgtctacaatggcagaatgtgctaaaatattgtcacagttcaaccggggaaccagtgctatgcaacactatgttgcaatacgaccaatgtttattgatgtggaaatcatgaacactgatattcaagttgttctgggtgatgaggggttgcaagctgattgcgacagtattgcagatggtctctctacattgtataaggaaattgcagatactgtgaggaaagaggcagctacaataacggctgtctttccttctccgaatgaggtcatggcaattcttgtccagcgagtgctagaacaaagggtaacgaccattcttgacagaattatagtaaagccctctcttgctagtttgcctcctctcgaaggaggccttctacaatacctaagaattctggcagttgcatatgacaaaacaaaagaactggctaaggatttgcagtctattggttgtggggatttggatattgaaggtcttactgaatccatatatgttgcccacaaagatgagtacacagaatttgagcaggcatcactcaggcagctatttcagtcaaagatggctgaactgagagctgaggctaagcaacaatctgagtctactggctcaatcggacgtgcaaaaggagcatctttgaccacatcaccacagcaacagatatctgttactgtagtaacggaatttgttcgctggaatgaggaagccataaccagatgcacactactgttttctcagcctactactgttgcagctaacgtgagatccatatttgcatgcttgcttgatcaagtgagccaatacttaactgaagggcttgaccgtgctagagagagtttaaatgaggccgcagctttgcgggatagatatgtcatcgggacaagtgttagtaggagagtggcagctgctgctgcttctgcacaagaggtggcagcttcagctggtgagagcagctttagatcctttatgattgctgtgcagcgttgtaccagtagcgtagctattcttcagcagtacttctcaaataccatatctcggctcttgctacctgttgatggtgctcatccgtctgcttgtgaagatatggggtcagcagtatcagtagttgaggctgctgctcacaaaggactgctacaatgtattgatactgttatgtctgaggttgaaagattgttgtcttcggaacagaaggctacagattatcgaacaccagatgatggagctgcaccagatcatcggccaactaatgcttgtataagaattgtagcctatctctctcgtgttcttgaggttgcattcagtgcccttgaaggcctcaacaaacagtcctttttgactgagctgggaaatcgcttgcataaggggctgcttaatcattggcagaagttcacatttagtcccagtggtggcctacggttgaaacgtgacataactgaatatggggatttcgttcgtagcttcaatgccccctccatagatgagaagttcgaactgttgggaattgtggcgaacgtcttcattgttgctccagaaagtttagcatccctgtttgaaggaacccccagcatccgaaaggatgccttgaggttcattcagctccgggatgattataagacagcgaaaatcgcttcgatgctcaactatatcatgtccgagtaatgagtgaagtggaaccgttagaccgttacactttgctgctctcgtggactattgatgccgtttgtataaatgaccttcgaaattatgtttattcttggttccaatttatttgttttcctatcctttttctttttgggctttgctcaatttgagctgtacatgtggttcaggtcctttagacctctacttgtataaatgatgagaaatttctgtggctgtttacgtgcgaaaatttacgcaaacgctgtctgatcttttgaaatggaaaatctggagaaacgggaatacactaataaaaaa

SEQ ID NO: 30762 - DNA, 352 bp, Zea mays
  Clone ID: MRT4577_128064C.1
cctcgaggccggccgggacttacctggacggggtcgacgagctatcaagaaggctcgtggcctagatcagtggccctcattgcactttggagggtgcgctggtttaccatctccccaagtgggagagtggacgtcataatttgtggtagaggggtacgcgttcgcgcggcccctgtaaaaagaaaaaaaaaaaaaaaaaatatataatcccttgcgtgtagtaagcgatgaactgaatgcatccagaatatcatgtcatgataaacttgaatatagtttcatggttgttatttcagactgaaaataaaatcagtcttctgttccggtgaaaaaaaaaaaaaaaaaagcggcc

SEQ ID NO: 30763 - DNA, 360 bp, Zea mays
  unsure (1)..(360): unsure at all n locations
  Clone ID: MRT4577_128065C.1
cggacgcgtgggcagatatctgttactgtagtaacggaatttgttcgctggaatgaggaagccataaccagatgcacactactgttttctcagcgcaggagaactgcgcgtcatttcatttaaggaagaaacctactactgttgcagctaacgtgagatccatatttgcatgcttgcttgatcaagtgagccaatacttaactgaaaggcttgaccgtgctagagagagtttaaatgaggccgcagctttgcgggatagatatgtcatcgggacaagtgttagtaagagagtggcagctgctgctgcttctgcacaagaggtggcagcttcagctggtgagagcagctntagatccttta

SEQ ID NO: 30764 - DNA, 795 bp, Zea mays
  unsure (1)..(795): unsure at all n locations
  Clone ID: MRT4577_128066C.1
gccggccgggccgagggttttccccttccgttctgcattcctcgtcccgtccgcccccgatacggcggccacaccccacacccccacacttctccgacaagggaagggaaccccagatctccgccgccccgccagccgctatgccgactgccgccaaccccgccgccgcgctgcccctcaccctcgacctcgaggacttcaagggagacttctcattcgacgctctgtttgggggactggtggacgagctgctcccggagtaccgcggggaggacgacgccgcgcccgcgccacctcctccgccgcccgtgctcggggcggccccgcccgtcttccccgctgtcgacgagcttcttgggctgttcaagcactcgtgcaaggagctcgtcgacctccgtaggcagattgataagcggctccagaatcttaagaaggaggtggcggtgcaggatgccaagcatcgcaagacgctaggggagcttgagaaaggtgtggatggactatttgatagctttgctaggctggattcccgcatatccagtgttggtcaaacagctgcaaaaattggtgatcatttacagagcgcagaatcccagagggaaactgctagtcagacgatcgatctcatcaagtatctcatggagttcaacagcacacctggggaccttatggaactttctcctttattttctgatgacagtcgtgttgctgaggctgcttcattgcacagaaattgcggtcatttgcctgagangatgntgntanacatggcgtgtcatcagctgtangctctgc

SEQ ID NO: 30765 - DNA, 387 bp, Zea mays
  Clone ID: MRT4577_128067C.1
aaagttttctcaatcccttcagatacagcctaggtagacgtgagcagtcaggggtcctttaaatgttgtctgggaggccaaaagccattttagacgtgagcagtcagcagcaccagccttctcccccattttagacgtgagcaggcagtatcagcagccttctccgccattttagtcgcgaaaaacagcatctgagcaggccaaccaaagatgagcagctcttctgaaggtatggatgttgtgcttcttttgcctgttcttactctttgttatctgctatcttcccccccctgttcgttattcctctttggtcagcaagggctgggactctggaggcagagctgctattaagatgtttgaactcgcagatttgcatgacattatggg

SEQ ID NO: 30766 - DNA, 913 bp, Zea mays
  Clone ID: MRT4577_128068C.1
acgggccgcgccctgcgtgccttccctgcgcgcagctcgccgggatgccctgctccagccgacttccctccccgtcttctccctcccactcgcccggcttcgaagttgcctgcgcgcaccctctgctccaccgcgttgtcgccctgctctgttgtgctcgcgtctagcccctaccatggacgccggtgtcctctgcttctccttgccgagcgccgctcacccagccatctcccatggtcgcgtcgcgcgttctggggttcaccgcgtccagcctgcctgcgctcctttggccggacagccccagctctccatcgcggcgcacagcttcttccccaactgcgccctgccctctgttctgctcggccgcgctttctgctcgccacgcgccctggcgtttgccgtggccatcgcaccgagctcttcgctattgtccgtgcgcgtcgagctcccgagccgaattcagccccatgttaacgtgtctctgttccagcttgccgtgccacgtcgtcatcatttcctatcgtgagctcgatccccgttgtcatcgggcttcgcgtgtgctcgtgtttgtcgtcgagcttcgccttgttcgttgtcgttcgtcaccgtatcgtgtgtgctcgtcgtcgccaaaatttggccctacgagctccacgcgttttggcggcgctcatcgtgtcctccataaatattttcgcctagccacgcggacctcgccgatgtcttgatcgtcgatgccacgcaaccatccacgcgtggttgtccccacgaacaccgtttcacaccatcaccctatcttcaccgtccgtagtgtcgtcgttgggatgtcttagctacaacaccagcgccctggaccgtatccaaagctctatattggattcgtcagcgtgctactcgtccggcggctccttga

SEQ ID NO: 30767 - DNA, 520 bp, Zea mays
  unsure (1)..(520): unsure at all n locations
  Clone ID: MRT4577_128069C.1
ttccggccgcgtcgacgggtggacgcgtatggtctacctgnnnnngactttgcctcgcccctcgcctggtacatcgaccactggttcccctgcgccagggaagggaagaggtgccgagcaatctgcggataatgcagtggcaggtgtgcaggaagaagcagaacaagctcgagttcctcatgccgtggtgggatctgcagctcggcgtctctgtcaaccagttcctgcccatcttcgcctcgaagaattccgacttcagaaacagagcattggcgttcttgtttacccatggcgccagcgaggaactgagctcgctgcaggtggtggaggcacacgcgttccctcagcacttctctgagatgaaaacgaaagtagggctcgcccctgctgcaattgtttcctctaggggttctgacaactcggtgctgatgatatgtttccgttgcaacgcacgagcatccatctagtagatcaataaggggctgcgccatcgggtattacaggtattctttggaatacc

SEQ ID NO: 30768 - DNA, 361 bp, Zea mays
  Clone ID: MRT4577_12806C.1
gccggccgttgatcaaagatatggcattatagtagtactctactctggctgcattaacaagcaagcgagggatgggagggagacaggagaacgagctctccctgcttcggcacgcggcattccgggatccaatctgcagccggccgccgatgcctctggcctctctgcgctcgccgcacggcacggcacggcatggcatgtgtggatccgacggcaggaggcggacggagttggcgtgcaattacttgatgaatcgtgcggcgccgtcttatagtcaactgacccgcaaatgcagcgtctgcgatttgaaatcacgccaagaaaagacacaaacacccataaatgtaacccaccttttttc

SEQ ID NO: 30769 - DNA, 219 bp, Zea mays
  Clone ID: MRT4577_128070C.1
ttttgtctatctttcaaagaaacaagtgacacatatgggcaggatttcatacaaaggaacagcgacaagtggacaaaagaacacaacgcgccccacccaatgacaactggccgacgagcatcattcggagctgactcacaacgagagggaacaactgggttactgagttataccagaaccctccagctgacggcccatccattccatgagaggacccta

SEQ ID NO: 30770 - DNA, 296 bp, Zea mays
  Clone ID: MRT4577_128072C.1
cctcccacggaaactctagcctcaaacaactcactacccttcacatattggaccattctaacacactaccccacaaaaataaaaacattcatctttatcaaccaaaaaactaaacgaacgctcgctaaataaatttcacaatacacactactttgaaaaccccatttttacaacgaacttttattttgctcacgaaaaatgaactaatttaccttcgacaaataaaaatccctacacaaaattacgctcccaaactattcctaaccaaccctatttttataaaaaaatttttattt

SEQ ID NO: 30771 - DNA, 577 bp, Zea mays
  unsure (1)..(577): unsure at all n locations
  Clone ID: MRT4577_128073C.1
natccacgccgtggccaccagcgtccaacgtagcctgggggtgagtgcagaggggttcgacggattgggggaattcgtggcggcggaatctctgctggcgctacaagcttcgcgggtgtgcgccgcacctcatccacaccctttccctccatcgaacgcgagcgtccccatcgtccaccaccaagccgggatgctccgcggcgccatcttccgcctcggtgctcgacattgcctccacgccgacccttgtgcggcttcttcgcaacgtgtgggtgatgttcatgacttcgcacggcgggatttgtggccgatgcgctcggtatccctcactatcgtcgttcaatgccatggatctgcgcctgttcgagaacatgtgtgtctgtgtagtcagctacgcgtgaggacacgtgtcatctgaagagcaagttggtacctggaatctcaagtcccaggtcaagaacaggtatcgcaggatgaggcgcatggaggatgctgcgatgagttcgtgagagagatctaggccgtcgtctcccagtcaactttgggttgctggaccgttgtctccttataatgtaat

SEQ ID NO: 30772 - DNA, 753 bp, Zea mays
  Clone ID: MRT4577_128074C.1
ggctcgctcgcggccgggccgggaagttaccaacgctccaagtccaaacccctctcctcccccgcgtcccgcgagctccgtcaccgccgccgctggcgagatgtcatcggtgacccgccctcagcgggaggccgactttgcacgcttcccgtcgtccacccccatcgtcatcgacaacggcgcttctaccttccgcatcgggtgggcgggcgaggcggagccgcgcctttcgttccgcaatgtcgtgcagaggccgcgccaccgcagcactggtgaaactgtctcaattgttggggacactgacccatctctaatgaaattctttgactgcacaagatcggcagttcgctctccatttgacgatgatgttgtctatcagttcgagtacatggaatatattcttgactatggctttgatcgattaggtgtcgattcagaggtgggccatccaattcttatgacagaatgtgaatgtaatccgtccttttctcgagcccgaatgtcagaactacttttcgagacatatggtgtaccatccatagcatttggcattgacaacgcgtttagttataagtacaatcagaaaacttggaaactgtaacgaagacgggctggctatttcatgtgaacatggaaacttgtcatgttgttccatttttgaaaggacagcctgtgttgagggcttgctgcagaaccaatatcgggggattcacattactgatttttctgaggcagcttctctgtctaaaatat

SEQ ID NO: 30773 - DNA, 1220 bp, Zea mays
  Clone ID: MRT4577_128075C.1
atagccagccacagccacacacaacgactgacctaccccatgctatctctgcatatttgcgttcttgatcgcgctcttattactcctcaccgtcgacatcacgcgcacgcatcgaactttgtatagcagctagagcaccagagccaggagcggcgcggcacgggacatggtgaagggcgcgcatttccaggacgcggcggtcgacggcggcgccggcggcaatgcggaggcggcgatgcagggcggcgccaagcggcagtacaagggcgtgcggatgcggagctggggctcgtgggtgtcggaggtccgggcgcccagccagaagacgcggatatggctcggctcctactccaccgccgaggccgccgcgcgcgcctacgacgccgccctgctctgcctcaagggctccgccgccgccgacctcaacttccccgtgcacctccccttccacgtccccgccgccgccgccatgtcgcccaagtccatccagcgcgtcgccgccgccgccgccgccgccagtggcggcgccacatgcagcccgccggcgccactcctccgtgcagctacggcgacgcgtcgtcgtcgtctggcgttagctccccggagaccggccggaacgctggcctgtgctacggcacgacgcactacgacgacatggacatggacttggcgggcgacgccgacgcggacctcgccgcgctcgcggacatcgaggccttcttccagtcgcctaagtgcatggagtacgccatgatggacccgtgcagcacgttcttcgcaccggcgcccgtggctacggacgcggccagcgagtgggcggaggaaggcgagatcgacctctggagcttctcgtccctcaactgatccaaccatcgtcagctcctccacagacatcagtttagaggtgaagcaaaagcaagcctcacgtgatcatcgtccatccactcaacacttagcgattaattacagctgcaacctacgtgatcaagaattggtcacggtataaataagcattaaggattaattgattcatactagtattagttagttattttactatactactagtgtctcatggagctacatgttttaaggcagctttccatggagtcaacgacctcccctcagttgcattgcatggcatgctatgggtaggggtaggaagctgtgtgtttctgcaagtgcaagtaatggattataaattatgatgatgtactcct

SEQ ID NO: 30774 - DNA, 549 bp, Zea mays
  Clone ID: MRT4577_128076C.1
gctacaacacaatatctatttgagatctctttatcgcttttgctttcccaaaggtctaacaattgctatgcaggtccttttacatatatatcgctttttccgaatatgatatcaactacagtcacaattcaactctaaagaaatgtcaaaggaccataacaggtgtctccaacatgaccatttggtgggtttccatgaaataggcgataaggtggcacccagtggggatgacgatagctaaactaacaagaacttcttcggatcatatgcttttctggctcctgagagcaagcctgctataatcctgaaagcagtaaatgtttattcgttacatgcaaaacatgtatcatactgaaacgaattcaacaacacagtaatctgatgctttgtgtacaaccaggaccatggtgagtatttgcctgcactctagactgcgcgcaaagcttcccagataaaactgcaccttccatggaagccaggtatttctgctttgtgtaatcaccagcaacatggaaacctttgatcggtgacctcggtgtcttcacaaca

SEQ ID NO: 30775 - DNA, 1350 bp, Zea mays
  Clone ID: MRT4577_128077C.1
gccagccacagccacacacaacgactgacctaccccatgctatctctgcatatttgcgttcttgatcgcgctcttattactcctcaccgtcgacatcacgcgcacgcatcgaactttgtatagcagccagagcaccagagccaggagcggcgcggcgcgcgacatggtgaagggcgcgcggctccaggacgcggcggtcgccggcggcgccggcggagacggcgatgcagggcgccgggggcggcgccaagcggcagtacaagggcgtgcggatgcggagctggggctcgtgggtgtcggaggtccgggcgcccagccagaagacgcggatatggctcggctcctactccaccgccgaggccgccgcgcgcgcctacgacgccgccctgctctgcctcaagggctccgccgccgccgacctcaacttccccgtgcacctccccttccacgtccccgccgccgccgccatgtcgcccaagtccatccagcgcgtcgccgccgccgccgccgccgccagtggcggcgccacatgcagcccgccgcaactgcaagccggcgccgccgcgtcggcgccctactcggccggcggtggcgccggcgccactcctccgtgcagctacggcgacgcgtcgtcgtcgtctggcgttagctccccggagaccggccggaacgctggcctgtgctacggcacggcgcactacgacgacatggacatggacttggcgggcgacgccgacgcggacctcgccgcgctcgcggacatcgaggccttcttccagtcgcctaagtgcatggagtacgccatgatggacccgtgcagcacgttcttcgcaccggcgcccgtggctacggacgcggccagcgagtgggcggaggaaggcgagatcgacctctggagcttctcgtccctcaactgatccaaccatcgtcagctcctccacagacatcagtttagaggtgaagcaaaagcaagcctcacgtgatcatcgtccatccactcaacacttagcgattaattacagctgcaacctacgtgatcaagaattggtcacggtataaataagcattaaggattaattgattcatactagtattagttagttattttactatactactagtgtctcatggagctacatgttttaaggcagctttccatggagtcaacgacctcccctcagttgcattgcattgcatggctatgggtaggggtaggaagctgtgtgtttctgcaagtgcaagtaatggattataaattatgatgatgtaaaaaaaaaaaaaaaaaaaaaaaaaaaaaaaaaaaaaaaaaaaaaaaaaaaaaaaaaagtactctgcgttgttaccactgct

SEQ ID NO: 30776 - DNA, 421 bp, Zea mays
  Clone ID: MRT4577_128078C.1
ctgctggttctttgactcagtcttctgccccgataggttttgctgttgtttctcagtcttccaccgagagatcactttctactcctactttaggatcgacgcatgggtcacctggtttgtactggccctcgccgctatgattctcagcgtctttgggagcatgactggctttgtcttccttccaatgtgcctgccggtcttgatggatctgcttctggtgcttctacctcgtcgtttgcctagtggcttcatcgtctgggtcatctttgtggcactcgtctatctatgttaattcgtcgaggtcttttaggttcagttttagatcatgagtccttacatcattgtctgggttgacgtttaggcaaacccattctacttccttatcattctagtgagtcagtgtcccatcgcacttttgatc

SEQ ID NO: 30777 - DNA, 305 bp, Zea mays
  Clone ID: MRT4577_128079C.1
ggttgaaaaaattgacccattaattgattgattaatgattaatttacaagtccaaatacatttgagcgagttacaagctataatctgaattaattaacattttaactgtttactgatacactaatcacaccatattattacacctccaaaattcacctcctagggctttgctaatcgttatttaacagcagtactccagggaccatgattcatcagctagagtagtcggcatggcaaacgagcagcttgacaagccgcccttgggcagcgggctccggggtggcgaccgttgcccctgcccgtcc

SEQ ID NO: 30778 - DNA, 572 bp, Zea mays
  unsure (1)..(572): unsure at all n locations
  Clone ID: MRT4577_12807C.1
tataaaanattacactgncatgggtaatctcacaacggggtccatgaccaccacagcatcattgtccttgagcaaaatatcacatcacagcatccctcagcatcataacacgaccatttcaaccttcacctacattttttttcagttccccaaaacccaaaacccccccttcgacgacccaaatctactaccgtactaccgacgaaactgcaccgcacaactaatagagagagagagagctatgcagggaataatcaccacacgctcagaagcacacgacggtacgaaacatcacgacatttgccaaattctggttggtagcctagctttggtcacttacctaattttggtcaggcttctttgctccacaaccaaacaggcccatagggacgcgcacggcgcacggctagttccgtcgcggccaggtagatggagagcggcggggaagatgcaggggaagataccttgaggtcgatgttggagcgggaggagaggaccgggctgaactcggggtccttctggaggtccgcctttgccgcgcccggcttggcagcggcgcgacgcatcctctt

SEQ ID NO: 30779 - DNA, 854 bp, Zea mays
  Clone ID: MRT4577_128080C.1
cccctcctccgtgtctcttctccctccctctctccctctccgccgaatcccggctcctcccgtcgccctcgcattgcgtccggctccggcgagtttcctccgcttcctttcccaatccgaaccgccggagaccgcggcttcgaccgtctctgtctttcccgcacgtctgtcttgtgcacccgagagaaccatcaggaatcatccagactaggagagccgcggcggccttctagggaagcggtgcaggaagttgcctttcttggcttggctgggtccgaggaatggggaggaggatgcggcaagccattgccgcgctgggcgtcgcgtgcgcggccgccttcgccgtcgccgccgccgaccgtgggctctcgctgcccagcgaccgcgccgtggtggtggcgccggaggagatcagcctcctcaacaagattgccaatttcatgtggcagaccgataggaactcgtaccagcatgtttggccgccaatggagtttggatggaaaatggtgctggggtcgctgatcggattctttggcgcgtcatttgggagcgttggaggtgttggtggtggcgggatctttgtaccgatgttgacattgatcatcgggtttgatccaaagtcttcaactgccatatccaagtgtatgatcactggtgcagctgtctcaactgtgtactacaatctcaagctgaaacatccgactttggacatgccggtgatcgactatgacctagcactgctcatccagtctatgctaatgctcgggattagcatcgccgctggtttcaatggtaattccccggactgggtggccacggtcctctgaaaatcctttttccagggcccatcaact

SEQ ID NO: 30780 - DNA, 270 bp, Zea mays
  Clone ID: MRT4577_128081C.1
caccaaacaccgatacactcgagaatcgattgcccgtagacaaagcaagactggcctcctatttataaggaaaggaaccacatggtacaactgcacccgctggaagctatttatgtgcgcacagaattcagagctccaactatggctgaacgctaaacctgatgcctcttgtgctccgaaagcacttgatgacatgcatggctacaaccgatttcggttcagatacagcatcaagttactccttcagccttttttggcccaccttatatt

SEQ ID NO: 30781 - DNA, 152 bp, Zea mays
  unsure (1)..(152): unsure at all n locations
  Clone ID: MRT4577_128082C.1
tgagataaatgctgatccttttaaaaacgggtgggttttaacaatggaggggggtgggctcttgngagcaaaggttctctatttgtggtgaagagaggtttagcacattcaattgttttttttgnccgcncggctttttttttttttttttt

SEQ ID NO: 30782 - DNA, 700 bp, Zea mays
  Clone ID: MRT4577_128083C.1
tctcctcctgctcccatcgcccgtcgcagccatgtctttgcttcgtcgcgacacagtcgtgaggtgccacctaatcttgttcctcctcttccttttcgatttacaagttagaattcaggttatttccgattggagtaggtataattttgtgatttcgtaggtatactatatgtttcgcgtggtctgttctctttgattcaggatgtctgaagaggtcgttcccgtgactgacgatttgcctcatcagtacatgtctatcccttaagccaagttcgtctgagattttctggcgattcgcctgtgatggccgaatcagtcgttgatgggtcagattttctggcggttcgcctgtacatgtctatcccttaagccaagttgcgtaggtataattttgcttgttaattagcaaggctagatctagatccatacattgtttgtctcctttgttactttcacaaattccctaattccttttcatgcatgagccaatatattctctagatgagttagccgattttctgtacgctgttcagatatcgacaggtggtgtgttctctttgattcaggatgttgtgccatccgaagaggtgcttcctgtggtgactctccagtagatgtctatcccttgatccaagttcgtctgaggttttctggcggtccgcttgtgacgcctgaatcagttgatgcgccagatccgtca

SEQ ID NO: 30783 - DNA, 435 bp, Zea mays
  Clone ID: MRT4577_128084C.1
gcgccacatcagtgaacctggcgtgactgaatctgggctggatttgagcattgttgccaacattgttccctgtcatcttgctgtcggtatgtttccctgaaggaagtgatggagatggcacagtttatgctgagggcgatctgatctccttaacattttgcacaactgatgtaactgtaggcctgatttttgtctctgggttactgaacttggtggtagcagtaacatctgcatgttttcttggtgtctttggtccactggagctgtcaactgctgtatgagtagatgtcagatgcgatgttcttccagttttctgacttgagcctgtctctcgtcatactcaatgtggccctctgatttagtccaagcaaggggtgctcgtgcttcttagagggctttacagtcagagtcctgatatctgaacttgcacactca

SEQ ID NO: 30784 - DNA, 189 bp, Zea mays
  unsure (1)..(189): unsure at all n locations
  Clone ID: MRT4577_128085C.1
gnccatctccatcctccggcggccagcgaaaaaacccggggggcttatatcaggaatgtgggggacaaaaagcccatgctttactcccaaaatctacacgggaacacaacggcataacaagcctatagatctttcggccatgggcgataaaacatgccttcggtacttgagccccacgaacaaaacccc

SEQ ID NO: 30785 - DNA, 3107 bp, Zea mays
  Clone ID: MRT4577_128086C.1
aattcggcacgagggtcggctttcagccactaattttcaaagcaaattttctcgcttcgcctttccttctcccatctctctcgacgaggctcgccatcgccgctattcccattcgccctcccctcctcttctccacccccgcaaaaccctagccgccgacccctccaatcccctaccagcgcccgattgccggccccaatcgagctagggctcgccaatttctggccgagctcgttgaaatttcggccggtcttttctggtgaatcctttggtttatcctgaggggatattttgatttctgcggcgcacgatggggagcagaagggaggaggagaggaacgagaagatcatccgcggactcatgaagttgccgcccaaccgcaagtgcatcaattgcaacagtgtggggccacaccgtgaattcactcaccgtgttaagtcggtgtcaatgtccaaatttactacccaagaagtgcaggccctcgaacaggggggtaaccagcgagcacgtgacatctacctaaaggattgggattggcaacgaatgaggttgcctatcaacaccaatccggataggataagggaatttatcagggctgtttatgtggataagaagtatgctggtggatcctctaacaaaccagccacagaaagtgagagtatgaagagcaatgaccatgacatgagaagacctagttcttatcattcatattcccagagcccaccctatgattttcaatatgaagatagacgatatggtaagcaagtgaacacacttgctagaaggccttcagatagggcgctcttcgatgggaaacttggcaacctactattcagtccaggtcgtttgcgagatcagatgaatgaagaccgttttgccaatgaaagttcaggatcaaggttttctgacttctcagcctcaagcactggcgacttcagaaatgatgtgctttctcctagctctcaggagacaggctacagtagtccctcagtccaccattcaagaaatgtctctgctgacaatcctcaaacccagaaatgtcctaacgcagcttcacaaatagatttcaatggagttcgacgtccacagcgaacaacttcttctggaagttttggatcatttgatggtagctcagtttccaacaaatcaattgaatcaggttacccacctgatgcaccaacagaaaagtcagtgcattgtgctgtaaaccatcagactgtaccttctcctgaggcctgttcgacacaacaatatgcctccccatccgacaatcacaacttgatacctcacaaacctgctgatttaggtagccaaattgttgccaccaggaaaccagtgcaacatagttgcgctcagattgaaaatgtggtgccgatgcatgctccagtacaaccaacgacttccacacctcttggcctctttgatcaatcaactgtgcaacagcctgtcacatctgctgcgccgatagatctgtttgctggctttaatgaacagttaccagcttctcataatacagatggtgtatccagtcattctgttgttgctaaagaacctgcccataatgttgttcagaagggcataatgccatcagctgaagcactcgccacatctcatgctgtgcaccaagatttgttcagtctgtcaattttgcaggaaccagcaacaccctcaccctctcagccaatagatctgtttgctggctttgaccaacatttgccgcatttgtctactgttcagaaaattccatcggcagttccatttcctgctaatgatggatgggctttctttgacgtgcaacatggattgttgacatctgtttcaaatgtgcaaggtcaggtgcctgctgcattctctccatctgatggtattgctaaaggaattgaccaattaacattaccaacttcgccaccaaatgtaattgggtcacaaaattctccggctatgatggataactggagtttaaatgctgaggaagtgaagatccctgtcctcaacgaaaattctcagtcttggaatgcctttggtgaatctactcagagcgcatcaaatgatctgttcacatttaatactatgtctcaagtagaagctcatcaattctctatgccaagtggtccatatgttgaatccagaattccacaggatttagttagggatgagcctgaaaggccaactcctagggatgtgttttctggcttcaatatttcacatgttgaggtggttggaccatcgtctccatcactccagccccatttgggtggcatggtctctcatcctgaaaaatcaacaaatccatttgacatggcatttgaatccgacgttgacgccaatgacatgttcatggatttgacctcactgcaagaaacattaccagatcatcacactctcacagattattcggggagcttaacagagccatggatttctcagaattccactatgtcatatattccttctgggcctcaaggaggtttatcctatgtggcaggacaggactctcacatgttgagttcaacacatcaaggagcttttccacctaggaatccatttgagtgagactagtaaagagagttttgctggatagtggtggacagaagaggaaggcaatcagcaccggtcgaaactcaaatggatactcaggtctactatactagatgcattgaaagcaactgtgcatcgaatctgaaaccctgaggtaaatatgtgtcttggatttcattgtctatggtctctcgtgtatcagaaaggactgcatagaagtctacatggcaggagtgctggaatttttgcccgaagcaaaagctgtcctctactcccatggactaatgtatctctggcaggcagtgctggtccagcatcaaaaaatttctttcatttcgacatttgcccaatagttgtgttcatgttcttgttaaaccctgttgtgaatgagaagggacgacatttacctccttaatatagtaaaaacatgttcgtcaaaaaaaagaaaagaagtgcaaaaaaaaaaaaaaaaaaaaaaaaaaaaaaaaaaaaaaaaaaaaaaaaacttgtggagggcccggtacaatatgaatgctcatcatagtaaaggatcatgatgtacattttt

SEQ ID NO: 30786 - DNA, 410 bp, Zea mays
  Clone ID: MRT4577_128087C.1
cggacgcgtgggtgacagcagaggctagacagacaatgcgcggcgtagcctctgcacgttcttgagctggcaggtgacgggttccgagaaagcggctggagtagtttttatgcttggaatcttcggtcgcggacggaagtatggctcaacaactccacaactcaagtgtgcatgtgaaagctgtcgatcactcaagttaaccttgatccagcgtcgtaaaaattccattttttttcagatgaactagtggagttagtgtctgtattgttgcctttccgtgcgtgctgatgggtgatggctgatgctgatgcgtgctttggtcttccgccaggtgatggcgatcctggcgcggccggacaagacgtccaaggtgcggcggttctggaactggtaccaccacaacatcgggc

SEQ ID NO: 30787 - DNA, 626 bp, Zea mays
  unsure (1)..(626): unsure at all n locations
  Clone ID: MRT4577_128088C.1
gcgggcataatgcgccgttactccatggacacctgaggatgccatttggctttttgaatgccttctatttcttgtaatctccctgtcatagtgctactggataactggaatcagtttacccaagtgtcaaaacaggattattttaccatggtaacaatttgatgaattttatttcagggtggcatggtctctcatcctgaaaaatcaacaaatccatttgacatggcatttgaatccgacgttgacgccaatgacatgttcatggatttgacctcactgcaagaaacattaccagatcatcacactctcacagattattcggggagcttaacagagccatggatttctcagaattccactatgtcatatattccttctgggcctcaaggaggtttatcctatgtggcaggacaggactctcacatgttgagttcaatacatcaaggagcttttccacctaggaatccatttgagtgagactagtaaagagagttttgctggatagtggtggacagaagaggaaggcaatcagnaccggtcgaaactcaaatggatactcaggtctactatactagatgcattgaaagcaactgggcatngaatctgaaaccctgaggtaaatatgt

SEQ ID NO: 30788 - DNA, 343 bp, Zea mays
  Clone ID: MRT4577_128089C.1
ctcctctccctcccgtatctgtaagccttgatcccgaagccgagcatccatccaaggcagacatgtctccatccggggagctgctggattccatctcctacgacttcactgtcgccttcgtcctcctcgcctgcgtatagctcggcgacgccgccgccgccggcgtccctgtctaccaactcatccaacacgacctcgacgctgaatactgtcgacctcccgcgacgaggtactcaaacaccaccttgccgcgatgccgatccccgcgggcgcagacctctcccgctccgcacacgacgggccgctacctgacctcccgctctctttcctcataccaccaccc

SEQ ID NO: 30789 - DNA, 1414 bp, Zea mays
  Clone ID: MRT4577_12808C.1
atatcagcgcaacggcacccagcgatccaggcctcctcctcgctcgcatcgccttccctccgctcgcgtctgctacacttcctctcccggcccggctagatctcgccggcaggagatggcggacgcgaagcagcagcaggccgcggcgcccaccggcgtctggaagacgatcaagccattcgtcaatggcggcgcctccgggatgctcgccacctgcgtcatccagcccatcgacatgatcaaggtgaagatccagttgggcgagggatctgcagctcaggtcgcaaagacgatgtatgctaatgagggctttggttccttttataagggtttgtcagccggtttgctaaggcaagcgacctatacgacagctcgtcttggatccttcagggttttgacaaacaaagcaattgaggcaaatgatgggaagccattgccacttgttcagaaagcgtttattggtctgactgctggagcgattggcgcatgtgtgggcagtcctgctgatttggcactcattaggatgcaagctgactctaccctaccagcagcacagcggcgtcactacaaaaatgcattccatgcactctaccgtatcactgctgatgaaggtgtccttgcgctttggaagggtgcaggcccaactgtggtgagagccatgtcactgaatatgggtatgcttgcgtcctatgatcaaagtgttgagctgttcagagacaaattgggtgcaggagaaattcctactgttgttggagccagcgctgtttctggattctttgcctcagcatgcagtttgccctttgactatgtgaagacccagattcagaagatgcaacctgatgcgaatggcaagtacccatacacagggtctttggactgtgctgtgaagaccttcaagagcggtggcccattcaagttctacactggtttcccggtgtactgcgtcaggattgcaccccatgtcatgatgacctggatattcttgaatcagatccagaagtttgagaagaagatcggcatataggattcccatcggacggatacagggttgacagttctatgctattactgcttgactctgtaataacattccagctgctttcgcaccatggtagttggttttggtagagacaagtctgttacaattttttaccttagctttccaattattgtgttgcaataatcgaattaatcgttgctgggggatttttttgggggggttgggagggtggcatgcttttgttggctgggatgtagccataaggagagggggatactgcctagttatgtcattgaatggaattggaccatattttatacaaaaaaaaaaaaaaaaaagaaaaaaaaaaaaaaaaaaaaaaaaaaaaaaaaaaaaaaaaaaaaaaaaaaaaaaaaaaaaaaaaaaaaaaaaccc

SEQ ID NO: 30790 - DNA, 1093 bp, Zea mays
  Clone ID: MRT4577_128090C.1
gggtaccctcgggctcgccgggtttaaagcctctgcactcgcttcgcctttccttctcccatctctctcgacgaggctcgccatcgccgctattcccattcgccctcccctcctcttctccacccccgcaaaaccctagccgccgacccctccaatcccctaccagcgcccgattgccggccccaatcgagctagggctcgccaatttctggccgggctcgttgaaatttcggccggtcttttctggtgaatcctttggtttatcctgaggggatattttgatttctgcggcgcacgatggggagcagaagggaggaggagaggaacgagaagatcatccgcgggctcatgaagttgccgcccaaccgcaagtgcatcaattgcaacagtgtggggccacagtatgtgtgtaccaatttctggaccttcatttgcctgtcatgtagtggaattcaccgtgaattcactcaccgtgttaagtcggtgtcaatgtccaaatttactacccaagaagtgcaggccctcgaacaggggggtaaccagcgagcacgtgacatctacctaaaggattgggattggcaacgaatgaggttgcctatcaacaccaatccggataggataagggaatttatcagggctgtttatgtggataagaagtatgctggtggatcctctaacaaaccagccacagaaagtgagagtatgaagagcaatggccatgacatgagaagacctagttcttatcattcatattcccagagcccaccctatgattttcaatatgaagatagacgatatggtaagcaagtgaacacacttgctagaaggccttcagatagggcgctcttcgatgggaaacttggcaacctactattcagtccaggtcgtttgcgagatcagatgaatgaagaccgttttgccaatgaaagttcagggatcaaggttttctgacttctcagcctcaagcactggcgacttcagaaatgatgtgctttctcctagctctcaggagacaggctacagtagtccctcagtccaccattcaagaaatgtctctgctgacaatcctcaaccagaaatgtcctaacgcagc

SEQ ID NO: 30791 - DNA, 347 bp, Zea mays
  Clone ID: MRT4577_128091C.1
ctcggggtcttttttatatttcttgggcgtctttacccccacctaaacccaaaaaacggggaaatggtgccccacaaaccacaaacctaaacacccttctggtataatgaactttaccaattactccctctcccccaaaaaaaaaaaccaaaccacccagacagatagacacaaatgtaaaaaaaaaacaacaacaccacaaaccccatcacaacaccagggaagcaggcaccccccttccgtccggccgcctcaaggcacatatgcacatattaaccgggcgccccggccacccttttagtccttcccgcgacccacacgagacatccggaccttttctcttttta

SEQ ID NO: 30792 - DNA, 335 bp, Zea mays
  Clone ID: MRT4577_128092C.1
attggaacgcatgccgtccccgcggcgtgctcggttctctttctgtcagcgcttccctcgtcactgagccgacgccgatcgagcgtcgtgtgtgtgtagctagctataccttgctctgggcagcatcagtcgctgcctgcctagtggctgctggcgctagtggggcggcagacgctgagacgccaccaccgatactggaaggcaaggagccaaggagggagggggaagggaagggggagagagaggaattggcacgggcgggtgcggtggaaactgtgccacgcagccgcgcgcgcgcagagatggtcaatgacgacacgcatgctgctagggga

SEQ ID NO: 30793 - DNA, 416 bp, Zea mays
  unsure (1)..(416): unsure at all n locations
  Clone ID: MRT4577_128093C.1
ttttngctggctgtctggctgtttttatttttaaaaaagcaaggcctggggtgaacattaaccaaaaagcacctacccgaaggacggaaggcccaggtgcttttatgcaaagcatgtccaaccacctaactatggtgaaaggcaccaatgggaggcctttgttttccggggggtacatatcactgcgatgatcttagagggaacagggattccccgggggaccaccagcaaatccctgggaacattggcccccagaaacgattttctttaaacccctgtcggggggacgaacaataaacctttacatacccaatgaggtacttttccctccttttacggtccgtaaagtcctactttggccgtgctgtctggtgaatgagggcaatcctgggggacaatagggtcccccggattgg

SEQ ID NO: 30794 - DNA, 829 bp, Zea mays
  unsure (1)..(829): unsure at all n locations
  Clone ID: MRT4577_128094C.1
gtttacctgccctagttgtggagcgacccgtcggcgggcgatggcggtgcttgatagttgagacgctacctagctactgacctaatgaccttaatgctgattgtgccacgccatcacgcattttgttagtctttgaaggccacaacattttcttctcttttttcccttcctcacatgaaaatgtataataccttagaggatgtttgatttataggaactaatttttagtctcttcgtgttattctattttagtccctaaattgctaaatacggaaactaaaccgtatttaacaatttaagtgctaaaatagaataagatggagggactaaaaattagtactaaaaacaaacgcccccttaagttttctgttaccataattcaacaacataatggctcagtcacaggtcacgactagattttcagggggtgggaggatgctacgtactttaggatcaccaaactgagcaaagatgcatggaacaaattgttttagagttcactgaccaaacatgcatgtaaattgtgataacatgatcattagtacaacacaggggtggcatttcgcccagcgaacccgacgaaacacatagcaaaacaccccaaaactaaccaccaaaacaagaacccgccgcgcatggcatcgagctaccagtctaccactgccccaaggcttgtcaggtctccgtcagagacgagcagctccggagctgcattgaacttgctcatcgcctgangggagtcctgggaacttgatcacctcaccatcaccattcagcctgagagccatagaacagtagtatcctgccggctgagttactggataataac

SEQ ID NO: 30795 - DNA, 353 bp, Zea mays
  unsure (1)..(353): unsure at all n locations
  Clone ID: MRT4577_128095C.1
ctcgaaccatcaagngcaagaggagcaagaaaccaccattttaacattttatgcaggnacgaagaaggcggcgaacacggcgaggctgaccacggaagcggccgaggccccgagccaacaataaacgacagggcccgcacggggccgacagcaccgaggggatggcgacacaagacaaaaagaacagccgcaaggaactgggcaactgcaataagaacctgggccctgaggccttccgtccagggaaacccgtcaactactacacccgtggctgcaacccgatcaccggttgtcgcggctgaacatatttctcttggtgatgtgctcccaatgacaatgtggcatccgcgtgc

SEQ ID NO: 30796 - DNA, 1411 bp, Zea mays
  unsure (1)..(1411): unsure at all n locations
  Clone ID: MRT4577_128096C.1
tcacaagcacaaaacagagagacagtgaggtgaatccgtggaagacgagagagaagtttaacaaggaaaaccttgccaatcctggaaacaagactctaggaaataatggcaaaactgccaagactgatcaaacgagaaggcaagcacaaagtaaaccttcagataagcaagtcatggaaaagaaggtgcagagttaccgtcgaatgcagagtgaaacagccattcagaacctagaacagaagaggccactgaaaccagaaccagcgcattcgaacacgaaggagaagcttcagtctgtaacaccgacagaaccgctaacggacgagtgcacaaaagtagatgataccagaagccagaaaccatcagacaacacgcccggtgatgatggtgtatgcgaacaatctgcagcggagatggaagatagcggcacaaaagctttgccgtaccaatcggaaaaggaattgactgaagaaaccattgatccgatcaccgcagcacaggctacacctgaatcaattgctgagacaaatgatgacagcacagtcagtgaggctagtacagacaccggaaacatttcctgaggaagaacagcagcaacaaatgaaagaagtgaacgatgaatcaacgaatggtctggatcatctcatgaaccccagtaacccgaatgatttgagaaaccacaatatggatgttgtctcatgcgattccttcacagagaaccagctcctgcttgcagagatgttgctgaaggatccctacctactcgaaaccacgaaggcgatcaccgggttccacgtcccagccagcacagctcaggttaacacggggaagtggttagacgaaggcaacagggttctttcagacatcgggcgcgaagtgatcagaaggaaaggcaagcgaatggaggcgatggtggatgtcagcgcgacacgtgccgctaacctgaagctgcggactctggacgatctcgtcagggaactggacagcgacatccagtctctccacgtcccgaggaaaattcagcaacggggggatgaccacagcacagctgagaacctgaggatggtcctccgctacgacatggagggcacgcactcggacgctaactcggtgtgggactttggatggaaccgcgcgtgggacctgccggtcgagaagaacgaagtcgtcagggatttggagaagaacatattgngtggtatcatcactgatgtagcaagggagcttatcgatgtatccatgcgccagcgccatggcccatgggtgctatgcctgtgagtattatcttgactgactgggatatatatatgttgtaatcttgaggatagggtattttcaatctgggtatgtacgatggttttcagtaaaacattcatatgatttttgtgggataaataaaaggagtgtgtcc

SEQ ID NO: 30797 - DNA, 372 bp, Zea mays
  unsure (1)..(372): unsure at all n locations
  Clone ID: MRT4577_128097C.1
accaattactagcttttatagcttgagctagctcgtctggggcaagaagtgtagagaaacagcaggcatggaggggaaggaggagaacggccgcctgggcgcaaacatgttctcgaagcgccagcctattgaacggcggcgcagggtacggacgacaaggactataaggaagcccccgccggcgccgctcttcgagcacggggagctcaagnactggtccttctaccgcgcctgtatcagcgtagtacgtatataccatactacgactatacatanctcatctctcatcgcaatgtgtcgttttgaggtgcacagtcaagcagcgataccgtcgagaagcagggcatcgtcttgacccgtcgttggacatga

SEQ ID NO: 30798 - DNA, 255 bp, Zea mays
  Clone ID: MRT4577_128098C.1
gggtcacaacccttggctctatggactttcatcgctaccatcgccagaacccacggccttctgttgcaccagaacgtgcgcttgcactttcacgaccttccagctataagaccctgggtctggcgacagtgcactctaatgagcagatgctgaggctgatacttctccgtcctacgcagaagactcgggtcgagactatgcggaaccagatcggaatcaagagcactgtgattcggaatctcgctaagaattgcc

SEQ ID NO: 30799 - DNA, 590 bp, Zea mays
  Clone ID: MRT4577_12809C.1
ggggggaaaaaggaaacccttccccgttaaacagggggagctaagcgggaaaaaaaacgccccccaggggccattttggccaacccagttttggcccacccccaatttattacaatggccccctttgggggggggggggccccgtttttttttaatttcccctttaattggaaccgggggggccaaagggcttccaaagatcctgggctaaatacagggaaaagggacccctggggaatttgggccccggggcaattcgattaagggggtcccttaaggggggttgggttcccccaaaggggcaaacccaaattgggggggttttttgggggcagtccctggcaatggggcccaaaaaacagggggggggggggaaagccaaaggggctcgagcttttgattcgcttgggccttaaaataaaaataaaaatctgggggccccaaacgggatattggtcccaaatttttttcaaaaccgccccccaaagaggggccccggaaaaaattaacattttccgggggggctttaattggagaaggggacccccgctcatcgggttcatcagggggggggggaaaagcgggggaaa

SEQ ID NO: 30800 - DNA, 444 bp, Zea mays
  Clone ID: MRT4577_1280C.1
ccaagccttccgctgacacataccaccgaattttcacacatttgaatctgagctcgatatgtctaaacagggtgatataaatgtaaatcctcgtgttcttcacactgcacaattttatcacatgagacaacccatgcataatatatgccctctctgcaaatacactctctctatggtccccactctccatatgtgaaacgcacatactagactctctctgtgaacacacaccatattttgctctttgacaccatttctaaagagtgctttgacaccacatgggtacacatatatggcgaactatatataacacactccaaaacagttcacccacaatctcacttatatgccagacaccttaaaacctatcccaaagacatatttgttttcaatatatatggcaccgctctctataatattacattctacaaaacacatgtatat

SEQ ID NO: 30801 - DNA, 1160 bp, Zea mays
  Clone ID: MRT4577_128100C.1
ggcggggagggatgagccatcctcttcgtctgcagctgctcgctcgcgattgcgattcccactcagccctccaggcacgaaacctaacccacccgcccggggatcccaagcggcggcggcggcggccatggagccctcccccgtcggcgacggtggctcggcggagcggtggcgcgcggaggcgtcgcgggcgttccagcactacctggaccgcgcggcgccgcacacggcggggcggtgggcgggcacgctcgtggccgcggcggtgtacgcgcttcgggtctactacgtgcgcggcttctacgtcgtcacctacgggctgggcatctacctgctcaacctcctcatcggcttcctctcccccatggtcgacccggagctcgaggcgctcgaggccgggcccgggctccccacccgcggctccgaagagttcaagcccttcgtccgccgcctccccgagttcaagttctggtatgccataacaaaagccttttgcattgctttcgtcatgaccttcttctctgtattcgatgttcctgtcttctggccaatacttctctgttattggattgtgctctttgtcctgacaatgaagcgacaaattatgcatatggtcaagtacaagtatgtcccattcagctttggaaagcagaggtatggcggaaagaaacgccctggagccagtgcatcaaaagagtaaagaccggagggtcttgtacctcaaagagcaaatgcctgtgttatctgtgaggcattttgctggcatcatggtattttgagtaccagctactgatagtgaatgcacaccatattcactagtggagtctgcagagaagctaaccagacttttgcattggttaatgattcctgtttcacaagtcggtagtttatgtacaatgacatggaacatagctagtaaatcagattctcagttcctcttgtgctgtgcttttgtcgacaagttgtggacctgttgaactgttgcaaatgcaaagcacgcgaagaccgagaaaacaaagtcgaattgaggctgtgaaaaaagttttcttttattattattattattatctctccaaaaaaacccatttcgttacttggaccttccaacattgagtgcataccagtaccagcgatttgtagctgcaactgcttttctctaa

SEQ ID NO: 30802 - DNA, 457 bp, Zea mays
  Clone ID: MRT4577_128101C.1
gcacccgctcatgaattttccaagaatttccttcggagtcatctttgtgtacctgtgatggtcgtggataagatttacaagatgaggatcaataacgataaatgaccttagcattagtcagacgacatcatgatccgtccattttgtacttccatagctttgaatcttgttcgccagggtcttgagcctattgtaagtttgagttggcttctctccccttatcatggtgactctcccaagctcgtcttccaccagttacatcttggaaatcatggtggcgtcattaccctcgtgagagatcttgaaggtattccatatttgctttgtattgtccaagccacagactttgttgaattcattccttcatagggatgcttacaaaacaagtgtatcttgtgcaattttatgaatttgcttaataatcaatacaggattatcagtactattcaaatgcatt

SEQ ID NO: 30803 - DNA, 918 bp, Zea mays
  Clone ID: MRT4577_128102C.1
cattgggtacctcgccgcgggccgggctgcccaaaccacaccaactcacccaaatcatcctactcctactactattcgagcagctagcccagccaatcactctgctgaaaattacttcgagaccttggcgcacaagaaaccgtgaacgattgatcatccctgcgatagcaagcgcagcaatggcggcgaagcgtctgtacaacgggtacgagcaggacggggaccagcccaatgacaagcgcatgcgccggctgccgtccttctcgacggtgatccgggaggccatgatgcagaagcacatgcagagcctgttcaggtgtctggagcctctcctccgccgagtggtgaaagaggagctccatgcagggctgacgctgatgcagagcccgcgctacatcgagaggctgccggcggagcgggcggcgtggaggctggcgttccggaccccgccgcagctgcccatcttcacgggcagcaagatcgaggacgaggccgggaacccgctggaggtgatcctggtggacgcggacacgggctcgccggccgcgctcccgcaggcgctgcgcgtcgagctggtcccggtgtacggcgacttcccgcaggacgggcgcgaggactggtccgacgacgagttccagaggaacgtcgtgaaggagcgcgcggggaagcgcccgctcctgaccggcgacgtgagcctggccctgagggacgggcgcgccacggtgggcgagctccagttcacggacaactcgtcctgggtccgctgccgcaagttccgcatcgccgcacgcgtggtgcccggcgcctgggacggcgcccgcgtccaggaggccatgaccgaggccttcatcgtccgggaccaccgcggcgagctgtaccgcaggcactacccgcccgtcctcgccgacgacgtctgga

SEQ ID NO: 30804 - DNA, 567 bp, Zea mays
  Clone ID: MRT4577_128103C.1
cattgggtacctcgaggccggccggggccacacatgcaaagaactggtccccgcctcccgtctcttaccgacatgagcgtacggaacgggtgcacatactatgcttggcgccgacacctgcatccgcaagaggctgccgcccacgacggcgacgacccggtgtgggctccacctcctgatctgtgccgttatggaggcgtcaatgccgagctcctgcagcgtgtacaggaaatataatgtggacatgaaacatctgcaaatcagtggaatcgctcacctggggatgcatcatgatctgcgaccagagaccaatgaaaatcaccatggcaaatccttgcctcccagatgaccaacctaatgaaatcccacgatctgtggttcaccgacagcttgtggaaatatttcatggcccagtgttggaaactgatactgtcgacgacaatcaaggtgttccacagggacgtttagagggtaatgaacttactgatcaaacatgtcacgaaactgctgcacaatctgatgttagcctacagaatcagacttctgatcctggagctatttatcgat

SEQ ID NO: 30805 - DNA, 395 bp, Zea mays
  Clone ID: MRT4577_128104C.1
caatgttctacttctactaaaacaacatttgcagctaaagttggtgcggatagcccaacaactgacggctgtgtgcggcctgcagaagacgactccatgcccctacgctgctgccggcggtgtcgccggggggagaaactatctgctgcatgatagccgctgtctagctagctaggtgagtcatttaccggcgatgattgcgttataatgtgtcacgcattaccatgggtggctttgtctgtgtgagctttgtccttggtgaacacttgaaatgatccgaaacaaggctctccttctggtccaactttagggttttgttttagtgcttctcgccccctgggggcccctctacttctttgggccggtggtgtccgctttgggccttcgccctgcta

SEQ ID NO: 30806 - DNA, 248 bp, Zea mays
  Clone ID: MRT4577_128105C.1
ctcgcacactacggatttgttgacgaggctttgtcttcttcgggcccttgggctatcaggagtgatcaagttcgcatgatgcgacatgaatcatgtggactactctctgtgtattatacttactctctgatatggacaaatgataactgccctttctactaattgattgaagcctagaagtttgacgatctatattcgtcggactacaagatgctacctatctgaacaaatcttgtgctggatatcat

SEQ ID NO: 30807 - DNA, 972 bp, Zea mays
  Clone ID: MRT4577_128106C.1
aattcggcacgaggcgcggtcgcgcctcacctcgcccctccctccctcctttctgccggccactcccggctcccgagccacagcaattacccagctcagcggctgccgaaccccctccgcttcccggctctccaggtcgagaagggcgctgctcgccacctgcctttctttctacagttcgacgcactttggtggcggtgccgctactctccttcccgagttcctaacttcctaactaggagggcgggcgttgtctgcctgtgtgcttttggcgattcgggggcttgggctcggatctgcgcgtgccttcctccggacccgagcgaggctcgggcgcgaatttggggcggatcagcgcagatctggaggcacatgaggaggaggaggcggaggggtagcgggagcgatgcggtgcttctgcgaagggcttgagccgacctgggaaggtgattctggaggaggtggcggtggctgcggaggcggagggggaggctggaggagggatggaagacgtcgtagcagtcgtggcgtcactctccgcgccgccggcgccggcgtttagccccgccgcggcggggctcacgctgatcgccgcggcggtcgcggacccgatcgccgcggtggtcgtcggagccatggagggggtctccgtgcccgtgactgtgcccccggtcaggacggcgtccgcggtggacgacgacgcgctggcgccgggagaggaagggggagacgcctctttggccgggagcccgtgctcggtggtcagcgactgtagcagcgtggccagcgctgatttcgagggggtcgggctgtgtttcttcggcgcggcagcaggcgcggagggtggtcccatggtgttggaggactcgaccgcgtctgcagccacggtcgaggcggaggccagggtcgcggctggtgggaggagtgtcttcgccgtggactgcgtgccgctgtggggctacacttccatat

SEQ ID NO: 30808 - DNA, 489 bp, Zea mays
  Clone ID: MRT4577_128107C.1
ctggccggggcccccgggctcctgccgccttcagatctcgcttggcgccgttgcctcgcagttgggatcatgtcataccttggcgaagatgaaggagatcctgcacatgcagggagggcaatgcggcaaccagattgtcgccaagttttgtgaggtggtgtgtgatgagcatggtattgaccctaccgggcggtacacttggcagtttcgaccttgaggtggagcgagttaatgtctactacaacgaatcctgctgtgtacgctttgatacccgcgctgctgtcatggatcttgagcctgagacaatggacagtgttcggaccggaccctatggacagatcttccgacctgacaactttgtgttatgcaatatggtgctgtcacaattgggctgatgtccaatacaccgagggtgctgatctcattgattctgttctgtatgttgagaggaatgaatctgacaactgacactgcttgcttggattgcaa

SEQ ID NO: 30809 - DNA, 809 bp, Zea mays
  Clone ID: MRT4577_128108C.1
tggtaaggtcatacaatggaatggttatcgagtttttggtgttcttgcaatgtcgcgatcaattggtgacagatatctgaagccatggataattccagtcccggaggtaacaatagttccgcgggctaaggatgatgagtgccttattcttgctagcgacggcctttgggacgtaatctcaaatgaaaaggtatgtgaagttgctcgcaagcggatacttctgtggcacaaaaagaatggcacaagctcatcatcagccccacgggttggtgattccgcagacgcagctgctcaagcggctgccgaatgcttgtcaaagcttgctcttcagaaggggagcaaagacaacatcactgtcgttgtagttgacctgaaagcacagcgtaagttcaagagcaaaacctaaccatgatgacttaatggacaattatagcgacaagttgctaggaacctatagatttggagaatccaaatttggtcagtttagtcgctgccttagtacattacttagcctagttctttttaagcaatttgggctgccaaaggtttgtattcctgtatatggtacaaattgtaaaatccgtgccagggtttatgtttcctgaccgtggcgacggtcctgttttcactcttctttcttcattgccctgtattctttttgtctgcattcttttttgtcaagcttggcgtccaagtatctgtcaatgtatttttttttaccatgtagggtacaaaagaaacgaaagtgttataaaggtttgtatcctacctgccttaatttggaaaatctatcaattgcatcagctggt

SEQ ID NO: 30810 - DNA, 2230 bp, Zea mays
  Clone ID: MRT4577_128109C.1
ttgggttaccgggtccctccctcggattttttttttttttttttttttttttttttttttttttttttttttttttttttttgggggggggccaaaccacttttttttttttttttccaattaaggcaggtaggatacaaacctttatacactttcgtttcttttgtaccctacatggtaaaaaaaatacattgacagatacttggacgccaagcttgacaaaaaagaatgcagacaaaaagaatacagggcaatgaagaaagaagagtgaaaacaggaccgtcgccacggtcaggaaacataaaccctggcacggattttacaatttgtaccatatacaggaataccaacctttggcagcccaaattgcttaaaaagaactaggctaagtaatgtactaaagcagcgactaaaatgacccaccagattgcgagtccatatttacattaccagctgatgcagttgatagattcccaaattcaggcaggcaggatacgtacccttcataacaattcgtttcctttgtatcctgcaagctcaaatatacattgccaaatacttggatgcctgccccagcttgacaaaatgaatacagggcagcgaagaaagaagaatgaaaacaggacagtcaccacggtcaggaaaacatataaaccctgatatcaccaaaccatccctgatagggatttcgcgatctgtaccgtatacggggaatacagcccttggcatggcttaaaaagaactgagaaaaataaggaactgggctaagcaatgcactaaagcagcgaactaaaatgaccgaacttgggactgtccgaatctataggttcttagcaacttgttgctacgcttgtcacggttaagttttgctcttgaacttgcgctgtgctttcagatcaactaccacgacagtaatgttgtctttgctccccttctgaagagcaagctttgacaagcattcagcagccgcttgagcggctgagtctgcggagtcaccaacccgtggggctgatgatgagcttgtgctgttctttttgtgccacagaagtatccgcttgcgagcgatttcacatacctcttcatttgacattacatcccagaggccgtcactggcaagaataaggcactcgtcatccttagcccgcggaactattgttacctctgggactggaattatccatggcttcagatatctgtcaccaattgatcgcgacattgcaagaacaccgaaaactcgataaccgttccattgtatgaccttgccaccctctgcctcaatccttgcatactcatcctccctgttaggtttatgatccaccgacagaggcacaggctgcttgcctcggcagagcactgcccgtgaatctccacagttggagacaatgatatgtgaggagcagatgacagcgacgaccgccgtcgaacccaccgtctcaggtgccacaggttctggcacgagtgtcatagcagcatcacttgtgcctgcttcttcaccacctcccctcatcgtgtttcccccaacctcgtcatccactctagcataagaatccacaaagaccttttcccactgtttcttgaactccatgtctcccaagttagctgcacacgcagtctcctctatcctgctcagctgctccagtagggccacatggaggcgttcccgacagtaatttgctacctgtgcaccaccgtgtccgtcatagacaccaaagaaatgtgcaggtaagcggaacgtcatgggatcgaggccatcgaccatcgcattgccggtgagcaaccagagtggcaagtcaaagaatcgcggcactatagcaacggcatcctccatctccggacggccggccgcatatagtggtgtagccccacagcggcacgcagtccacggcgaagacactcctcccaccagctgcgaccctggcctccgcctcgaccgtggccgcggacgcggccgagtcctcgaacaccatggggccaaggccaccctccgcgcccgctgccgcgccgaagaaacccatcccgaccccctcgaagtcagcgctggccacgctgctgcagtcgctggccaccgagcacgggctcccggccagagacgcgtctcccccttccccttccggcgccagcgcgtcgtcgtccgccgcggaggccgtcctgaccgggggcacggagaccccctccatggctcccacgaccgccgcggcgatcagcgtgagctccgccctcgtgccgaatt

SEQ ID NO: 30811 - DNA, 294 bp, Zea mays
  Clone ID: MRT4577_12810C.1
tttttatatatatatatacctttaccactgtcactgcaacatctgcagagagccagctagggcagggggtggggaaagacacacagaaagtcagggtacttgttatttaaatgtgccatttcccaggttgacattgccacacttcacagagtttaggcatgcagtttgcttagccagtgtaggaagcctcacgaaaacaaaaggattaacagcctaagtgccaatggtggggtcatcaggaagactgatgttggagacaatcaggtgcagattggtgctaatttaaacaaaaga

SEQ ID NO: 30812 - DNA, 1380 bp, Zea mays
  Clone ID: MRT4577_128110C.1
ctgatcatcacgtgcgtgattcctctggtgggtgcgcagggttacgcccaggtgaagttcttgaagggattcagcgaagatgctaaggagatgtacgaggatgcaagccaagtggcgactgatgctgtcggcagtatcagaaccgtggcgtcgttctgcgcagagaaaagagtggtcgcagcgtacagcgacaagtgtgaggctctgaggaagcagggcatccgaagcggagtcgtcggagggcttggttacggcttctcgttcttgatgttgttcttcacgtatggcctttgcttctacgtcggtgcgcagtttgtgcgccaggggaaaactacctttccagatgttttcaaggttttcttcgcgttagttctggcagctattggagtctcgcaagcgagtgcgctggcttctgatgcgaccaaagcaagggactctgctatttccatcttcagcgttctggacagggagtccaaaattgactcgagcagcggcgacgggatgacgctggaggttgtcagtggcaacatcgatttcagcaacgtcagcttcaagtacccactgcgtcctgacgtccagatattcagcgacttcaccttgcgcattccatctggaaagacagtggcgcttgtcggagagagtggcagcggcaagtcgacgataatcgctttgctggagcgtttctacgacccagattccggttgaatatccctggacggcgttgagatcaagagcctaagagtgagctggctaagggaccagatggggctggtagggcaggagccggtgctgttcaacgacacgatccgcgccaacataacgtacgggaagcacggcggcgccacagaggaagaggtggtggcggtagccaaggcggccaacgcgcacgagttcatatcgggcctgccccaagggtacgacaccatggtgggcgagaaagggatccagctgtccggcgggcagaaacagcgggtggcgatcgccagggccatagtgaaggacccgaggatactgctcctcgacgaggcgaccagcgccctcgacgccgagtcggagcgcgtcgtccaggacgcgctggaccgcgtcatggtcagccggaccaccctcgtggtggcgcaccgcctctccacgatcaagggggccaacgtgattgctgtgctcagggaaggcaagattgtggagagaggaaggcatgaagccctcatgcgcatcagcggcggagcctatgcttcccttgttgagctccgctccaagactgaatagcactggtgtatctttatagagtacagtttgtgcatttatttatacaagtatactgtttttccgcaacccaattgttcgtaacttttacaagttgaaatgaaaattacgcggtaggtg

SEQ ID NO: 30813 - DNA, 309 bp, Zea mays
  Clone ID: MRT4577_128111C.1
atgacttctcttgtctctaataattatcgtaaactgttctctgtcagcgtcagtagtcctgcctgattttgcttcgccacaccgcaaatttccacaaccaccccattcatgtcatgctcatgcaaaaggagcaggacaacattccctcactagctagaggctagagctgtgtcctgactgcagctcagctcaccaccaccaaccaaccacaccttcttcccatataaccatccatcgatcagcagcagcaactcaaggccggccgctggggagtctggaacatacctctagcagcctcgcctctgtagc

SEQ ID NO: 30814 - DNA, 529 bp, Zea mays
  unsure (1)..(529): unsure at all n locations
  Clone ID: MRT4577_128112C.1
gccgttcgggggccaggnccacttaacctcggggatgcgcctggtctgaccgctggacactcgtggcgggtgataaagagggtcttatacagctggcacgcgacagaccctactgagcgactacgttgtccatactgttgtctgcaaattcctgtggatgaggaacgctttgttggtggactacaaagacgtccacctcatcctctccgaactggaagtccgcttgtgatgaaatataccctaacctggtgtgatacatgctgttggctgtctggaatcatgtggtctttggcatgtggccgtcaatgtgtaacaagctgaatcgacgttattgtgtatctcgtactaaatggtcgatgttgcatnccttgagctggtgctggtacattggaacttagtgcatgctcgaattgggactatttaggccgacctcatatactctgatgctggatgcatctgaaacaaagaaatgtatgatgttaacgctgcagtatgtttttgctactatggtgtgaaggacctgctgcgg

SEQ ID NO: 30815 - DNA, 396 bp, Zea mays
  Clone ID: MRT4577_128113C.1
aaaacgcatccgtaaaaaaaaaaaaaaaaaaaaaaaaaaaaacaaaaaataaaaaaaaatacaaggtgataaacacataaatagcaaacgtcataaactcatctataattaaacctattggtcggttcacttaccggttccttacttccgtcccctcttttaaaaccctatcttttcccaatttagtcccctaaatttaatatacctgctcgcggtttaacaccttttcgccaggaaaacccttcccttaccccttcttaacctttttgcaaaatatctctttttcgccactggccctataaccgaacattcccccccggttcccttttccaaacactttcccatcccgattgccaaatgggcccccccttgtacggtccttttaacccctccctt

SEQ ID NO: 30816 - DNA, 278 bp, Zea mays
  Clone ID: MRT4577_128114C.1
ggaaagaaaccactggccggtgctgatcttcttgaccttgctaccgcaaaagcacagctgagggccttgaatcgctcaaggggctcaagggacctccctgagtttgagatgtttgagggcactgatgagattacaaaaatgacacacacagatggagatgatacattgagtcgagggaaaaagtcaaagcgcatgaagagttcatcgaagaagaaaactgacatttccaagcattcagatggactctaaactggttctgttgcttgactgcataacat

SEQ ID NO: 30817 - DNA, 380 bp, Zea mays
  Clone ID: MRT4577_128115C.1
cccgggtgccgtttggaaccgttccgactatcctgctaacccaaggccttggcctagcttaaggccaacgcgctcacaaactggcgaatgaccatgttatgcatgttcgcattgttcgtgcatgccatcggctccggtaagggaccgatcgagaacctttctaagcacactggctacccggtataaaaaaacgcttggtcctactgcaggaatttcgtgccttgtgagtgaaggaggcgccgtccgcgacctccaggcgtctggataactgtgaccgcaagctggttttcgcgttgtaccacgacatcaactatatgataatcgacagagcattattgcgttgatctgaattaatatgccggtttctgtttcctgcgtgc

SEQ ID NO: 30818 - DNA, 1402 bp, Zea mays
  Clone ID: MRT4577_128116C.1
gcgatcgcaaccgcccgagcccggccggtcccatgcatcgacgccagtgtgcattattacgccccgcccgcggccggccggcaactcgacagggaaaaggaagacgcagcaccgctagagctgagatgtccttcttcttccgcatggcgtcgcggctgcggccgtcgacgccggaggaggtggtgcgctccatcaaggactccttcctcgcgctccacacgcgcacccacgccaaggctctggaagaggtcgagaaaaatatgtcatctttgagattgttgatctttggtgatggagaagtcgaaccaaatgaagagcaggtcctgcaaataacccttgagatttgcaaggaggacgtcatttccctgatcgtccaggatctgccttccttgggctggggagtaagaaaagatctggctatctgctggtgcatcttgcttaggcagaaggtcgatgaaacttattgctgtgtgcagtatcttgaaaatcatctggagcttttagatttccttgttggttgctacaagaacttggatattgcattgaactgtggaaatatgttaagagaatgcataaagtaccctacacttgcaaaatacatattggaatctggtagctttgagctgttctttgagtatgttgagcttccaaactttgatattgcttcagatgctctgaacaccttcaaggatctgcttaccaagcacgaagttgtagtcgcagagttcttgagttcccactacgagcagttttttgaactctactcaaggctcttgtcatcaactaattatgtaacaagaaggcaggcaatcaagttcctttcagagttcctgctagagactcataactctcaaataatgaagagatacattgtggaagttcgttttttaaatattatgatcaatctactaaaggattcaagcaaaaatatcagaatatgtgccttccatgtttttaaggtatttgttgccaatccgaacaagcctcgatgtatcgttgtagctttgctagacaatcgtagagaagttctgaagctactccacaatcttccttcaagtaaaggcgacgatgaactcgatgaggagaaagacctaatcattcaggaaatccagaagttggcataacacaaaagcatcaagttatcgtttagcaatgcaagactctccttatagaggacatattgccaaggccagaaccatgtatatcacattgcacatgtagccttcaagagttgtatttttggaggttttttcttttcttttggtctcagaaaaccatagcaaagtattctctttttgaaggaattatatacatgattttggtgaccaaggaccgttggattaattgagctagacccataactaatctagcaatgaattaaagaattctaaggaccatgttg

SEQ ID NO: 30819 - DNA, 182 bp, Zea mays
  unsure (1)..(182): unsure at all n locations
  Clone ID: MRT4577_128117C.1
ttttttttgcncaggggggggggggggggggcnnctttaacgtggggaggcacgaagtaggaatagcaatatgacatagagggattatactgacgtataacagcaggagcaggattttaacctatagctcggcctagaatgcggccctatgaataattgatcgcagattgactatagcctaa

SEQ ID NO: 30820 - DNA, 286 bp, Zea mays
  Clone ID: MRT4577_128118C.1
ccccccggctgtatgaattccgcacgaaggcgtcttctacatgcaatgagacctcagtggtttgctgattacagcattcttcccttgaggatgccgaaggcattaacaaattgacatgtgtagcctaagaacaaggaaagaacaaagacactttccttaaaaacttcatgctaggaaagctggaagagtgttttcatttgctaatagaaagcaacacggattctagaagcaggagtgatggacagagattatcacactaaccaagatcctgatattgaaacatagt

SEQ ID NO: 30821 - DNA, 772 bp, Zea mays
  Clone ID: MRT4577_128119C.1
tcctccaggtttcctttcacccccgccggtccagcgccaacaccagtcggcgtagcggatctccggtgaggtcgagggatggcgaatggcggcggctacgtgtgggccctcgcggcgggtttcaacgccgcactcgccgcaatctccgccaagttcttctccactctgcctcaaagctttgtcatccctccaggcaacagtgacaaacttcgccgccaacttcatttcatctgggcttgcggggtgtttcctgtttgatgagcccttgccttctaagtggtttgcaggtgccagtcttatcatttttggcgtctttatcctcagcaagtcaagcatcgaggagaaacagaactcagattaggaggaagttttgaccatagcgttagctggtaacataaggtgaggctgcttatacttagggctagtttgaaaaccccattttttcaagtgatttgtattttttcaagagaaattagctcatttttccttaagaaaaaaaaggaatttcttggaaaaaaatagagttttcaaactagctcttatatatattttttccatgggatgtttgtccatccccaccccatgcaaagacaaatcagaccatggctaatacaatgtaccaattattttctgcaagctgtcacttgagcttgttgttttttcagtagtctaacttctcttctaactatgacatttgacattttccatggtgctggtacattgagaattattgctgtaattgtatgcatagtcactaaactttagttatccc

SEQ ID NO: 30822 - DNA, 470 bp, Zea mays
  unsure (1)..(470): unsure at all n locations
  Clone ID: MRT4577_12811C.1
cgcgcgcaaggggcagcgagcgagccacgnacgaaggagggcgggcggggggcgagcnagagccaanggcgagggcggnggcgaagcccgnggcccnggcccnggcgccgancgnggcggnggcgagcgcgggcggcgcggcggcgcagcagngcagcgcggcgcagcnggcggcgngcgccccggcgagcagggggggggggccgcccacggcgncgngccgcgccaaccggcgcgcgcaggagccgngcnncngccagnacgcgcgcaacccggcgnacagcagcnacancaacagccccaacgcccgccgcacgcccaccnccngcggcancgccgncccgagcngcnagggcgccagcncgcgccccgnggngngggngaanaaaaagacgcangccgancgcgggccaccggcaccggancnggaggaccgcgcgcganangaacaanaggnaggagggacgaag

SEQ ID NO: 30823 - DNA, 479 bp, Zea mays
  Clone ID: MRT4577_128120C.1
ctcaaagagatacccgaacttatgggggaagtgaggcagaagcaggaatcctctccgtgcttcccctccctggggggggagtgaggcagaagcaggaatcgtggcctgtcgtcagcccgcgggcgtcgggcgtagtaaagatcgtgtatttacaacggaatagtatacaaaggaattcttcgaacacatataggttaccaggatacctaacaaacttctcaaaaacccaaacaggaagaaccattacccttactagtaccaaggctagagatccggatttgaaccaaggaatggaatctcatgccacaagaaaaaggtatgaatgaaccgttagaaacaagctaagatatctggattgccaatcaaaggaagtaagacactattctcttctcttttcttttcaggttctagtatacgcctatataaagagaaaccttaaccttgcttgcttgtcttgtaactggaaaccataaacccgg

SEQ ID NO: 30824 - DNA, 833 bp, Zea mays
  Clone ID: MRT4577_128121C.1
ttgggaccctcgaggccggccgggcttctcagtccagtagcgcgcgctttcccgtatgcgtccggcgctttcggccctttcgtcctccaggtttcctttccacccccgccggtccagcgcaacaccagtcggcggagcggatctccggtgaggtcgagggatggcgaatggcggcggctacgtgtgggcccttgcggcgggtttcaacgccgcactcgccgccatctccgccaagttcttctccactctgttgctcaaatatggcatggtgatacttttcaacgtgacaatgtgggggtgctatgtcaacagcctcaaagctttgtcatccctccaggcaacagtgacaaacttcgccgccaacttcatttcatctgggcttgcggggtgtttcctgtttgatgagcccttgccttctaagtggtttgcaggtgccagtcttatcatttttggcgtctttatcctcagcaagtcaagcatcgaggagaaacagaactcagattaggaggaagttttgaccactagcgttagctgtaacataaggtgaggctgcttatacttagggctagtttgaaaaccccattttcccaagtgatttctatttttctaagggaaattagctcatttttccttaaaaaaagtagaaatttcttggaaaaatagagttctcaaactcgcccttgtatatatactaggtacatgcccgtgcgttgccacggaatttaaatattagtataaaatatatatatagagcttagttgatgtttgattgtagtgaacaatgtagccatcaaactgtacttgtacatgctcagccctaaatgattttacgc

SEQ ID NO: 30825 - DNA, 360 bp, Zea mays
  Clone ID: MRT4577_128122C.1
acctagttcaacatcttactgcttccagcgcaaaaagaagcggaagacatggggctagcaacccctaaaactctgcaactgtccaagcttcaagaactaataatccctaaatgaaagcagttggatatttttttagagaacattattacctaccacggcctaacaccaatcaaatgagctaaactgatcactcttaggagggagtctacaccattaacaaataattcaggacttcaacggtcaatcaagggtgttggaaaccagatttaacttcttcaaacgcagaagcaaccatctcccgctttttctcctgacatattgtgcggcttaagaaagcatcaagagcttccaacacctggg

SEQ ID NO: 30826 - DNA, 1164 bp, Zea mays
  Clone ID: MRT4577_128123C.1
aattgaactcgctggccgcgtctgcagggcccagtacttccagctagaatctgaaagaaactcgtcaccagctcgatctcgtccttcctcccttcgctcgactcctctgcttctcccccatccggtacgtgcggtgcggggaggctagccgggcggccggagctccaaccgcaatcggtctcttgctctgctgctgcgatggaggcgtcgtcgttggcgctcgtggccgccgtgctcctcctgtcctccacgcttgccgcgtcagatttctgcgtgtgcagttcggaccagccgacggcggtgctgcagaaggcgatcgacttcgcgtgcggtccgcaggggggcgccgactgcacggccatcctgcagggcggcgggtgctacagccccaacaccgtcgccgcgcactgctcctgggccgccaacagctactaccagaacaacaaggccaggggcgccacctgcgatttcggcggcgccgccgccgtctccaccacagaccccagtttctccgggtgcactttcgcttccagtgccaccagcgctggcgctgggaccgggacggcgggtaccaccaccggcaccacgaccgcgggcggtgcgacgacgggcaccctgagccctggcgtgggcatcggcggcctcaacggcacggggatgggcggcagcaccggcctgggaccggcggacaacaccctggacgccgccgcgcccggcctgctccccggcgccgcatccctcgccgccgccgccgccgccctctccttgctcgccctgctgcagcattgattacgtgggctagctgcttgctctgtggtccgtgaaaaagaaagggggcacgggggattgtactggagaatgtgaattggttcggttggttggaggacggatccgatttcacttcacccatctttgttagtagtggcaggcggtggttgggggcggtgtattctttctttcttttccttatgcctttttgatgtatggtttatttagcggtaggatgccagtctctttcctacaaggaccattgtctctcctctctctctctttctttttaaattttgtttatttataaaagttgtacttgctatcctcttttcttaacctctctgtttttattaggcccgtttccataaaaatttttaagaaggattgtttttt

SEQ ID NO: 30827 - DNA, 526 bp, Zea mays
  Clone ID: MRT4577_128124C.1
cgtccgcgcgctcggcatccggttcgacaagtgcaacggggacctctacatcgccgacgcctacttcggcctctccaaggtcgggcccgagggcgggctggccacgccgctcgccacggaggccgagggcgtgcgcttcaacttcaccaacgacctcgacctcgacgccgacggcaacgtctacttcaccgacagcagcgtcctctaccagagaaggcatttcatgcagttggttttctctggagatgcctctgggaggctcttgaaatacaatcccgaaacaaaggagacaacagtccttcaccgcaacctccagtttcccaacggagtgagcttaagcaaggatggctcgttcttcgtcttctgtgaaggatctcgtggaaggttgagcagatactggctgaaaggtgagaaggcaggcaccgtcgatctcttcgccatcttgcctgggttcccggacaacgtgaggaccaacgacaagggcgaattctgggtggcaatctattgccgacgcagcgcatacgcc

SEQ ID NO: 30828 - DNA, 475 bp, Zea mays
  Clone ID: MRT4577_128125C.1
gggggggagaaaaaaagcaaaattttacggggggggggggccgggcctggaagtccgggccgggtccgggaggcaaaccgggggggggtaagggggggtgaaccagggcctggggaaagcatgggcaaagacctgggcggaatgaaaatgaagtcccaatcccagggcacataaaatccggggggaaaaactaaaaaggcaaggggggggaggcaaaagggggagccaacttaaatgcattggggtgagcgcactgccctcattccagaaacgaaacctggcgggtcgactgattgaaagaatcgccccccgcgcggggagaggagggtttcggaacgggggccggggtggttttttttttgggcggggggggggggattatttgcctgcactggacgggcctgacaggaaagaatttaaacgagcgggccaggttgggttagcccaagaagaaaaaattcggtggggggggggg

SEQ ID NO: 30829 - DNA, 355 bp, Zea mays
  Clone ID: MRT4577_128126C.1
cccacgccttcgtcgactcttgcgctttacttttaacgtaccacatctcaaacccgcggcggagtacctcagcacccaaactgcaactccacaatgaggccctcgctgatgagatccacctcccaactcctccatcgccactactactactccgcatcccttcagacccatctgaaactggccatcctatacacagagccagcatcgggcatcctctgtcgctcctcatgaagctcaacccactgatctacttcctctcactctactatatcgcttgcaccccaggagtcgctgccgacgtctcccacatcaacttcccctcactggttaaaagtttcatggctgatgagcaact

SEQ ID NO: 30830 - DNA, 223 bp, Zea mays
  Clone ID: MRT4577_128127C.1
tgataatttggttaaattttaagatggcggcctacccaattataatcataggccaggaaataattactcaaaacatgatgactttgatttggcacaaactgagccagttaagctcatggcaaatattgagcaaggcaaaactcgtacaacctattccaggatgtcactcgtaaatctcgattgaacagatctccccatcatagcactgaaactctcttgaagg

SEQ ID NO: 30831 - DNA, 440 bp, Zea mays
  Clone ID: MRT4577_128128C.1
agcgcagtcctagctcctctaagagtcatgcaaaatcacttcactgtccgcccatccacaacgggcatactgggataaccttagagagacccaacttactcaccttgcaggacataacactgtcgacacgtggatcgatccctgatagggcctcactatccccttcccaacactgcacaaccttaatggcgtttgatacgcaccctgaactggagcattacgcgcgcaaaataacactgttacgcatactgagaccgttgacttagctaggaagatgcttcacgataactaccagttatatcgcacttacctttataaagcagaggacgatgctttccatggatatccataacataccggctccctttaacaggaacacctacgtggcgcacgagcggctggcagcccgattaactggattacaccgatgatctatgtct

SEQ ID NO: 30832 - DNA, 941 bp, Zea mays
  unsure (1)..(941): unsure at all n locations
  Clone ID: MRT4577_128129C.1
cattgggtacctcgaggccggccggggtggttttcacggagaagccgcggaaccgaatggcagcaggggcaagcgatcaacttgccaagcaacgcactgcagcactactgtactgcaccgcaacagcgcggcggcacagtagcgcaaccgaaggctccacaactccgccttcattccccaatccatcctcgccgcccggcgcccgcctttccccacctcgactcgacgcgacgtcggcccgacccgatcctcggcacggaatcttctattggataatgtggcgttattatcagaactccactcaccatcctctactttgactacatctgatccaattggactactggaccagctcttttcgtccaatgggaattgtcaagataggaagccgtgagcctgcagcgaggagtggttacagttgtggaggcggaggtggactgtgagcttgcatcgtcgagaggccagatgtgcaatatcccctatgggatttatgacctgcatggtggcttggccgaggttctttctttggagacatggaattcatgcctgacggaagatgatagactccgtctagcagcctacctcccggacatggagcaacaggactttgtcacaaccatgaaagagctgttcaggggatgctatgttctttgggagtccagttaaaagtttttttcatggatgagtgggctctattctcccagtttctcaggcaagggagttactgatgatgtttcaaagacgaaggcattatcactttctcaagtggtaccacgatgatatggttgctaagtttgcatccatgagcaatctgttgaggagttctgatacgagtgcaactcttggagagaagcttcccatctcgcgcaggcacgtatacgaaaagcgtttnccatgtgttagtcttagcagtaccattccaccagttactatcaaggatg

SEQ ID NO: 30833 - DNA, 1002 bp, Zea mays
  Clone ID: MRT4577_128130C.1
gccggccgggctcgggaccaaaaaccctcgtgctttcggctgcccgcccgcgtggttttcacggagaagccgcggaaccgaatggcagcaggggcaagcgatcaacttgccaagcaacgcactgcagcactactgtactgcaccgcaacagcgcggcggcacagtagcgcaaccgaaggctccacaactccgccttcattccccaatccatcctcgccgcccggcgcccgcctttccccacctcgactcgacgcgacgtcggcccgacccgatcctcggcacggaatcttctattggataatgtggcgttattatcagaactccactcaccatcctctactttgactacatctgatccaattggactactggaccagctcttttcgtccaatgggaattgtcaagataggaagccgtgagcctgcagcgaggagtggttacagttgtggaggtgaggaccttacacgagaggacagaatgcttctccagagctttcctgatccagaatctcttggctctgaccaggcggaggtggactgtgagcttgcatcgtcgagaggccagatgtgcaatatcccctatgggatttatgacctgcatggtggcttggccgaggttctttctttggagacatggaattcatgcctgacggaagatgatagactccgtctagcagcctacctcccggacatggagcaacaggactttgtcacaaccatgaaagagctgttcagtggggatgctatgttctttggaagtccagttaaaagtttttttcatggattgagtggtgggctctattctccacaagtttctcaggcaagggagttactgatgatgtttcaaagacgaaggcattatcactttctcaagtggtaccacgatgatatggttgctaagtttgcatccatgagcaatctgttgaggagttctgatacgagtgcaactcttggagagagcttcccatctcgcgctagcacgtatacgagaagcgttttccat

SEQ ID NO: 30834 - DNA, 531 bp, Zea mays
  unsure (1)..(531): unsure at all n locations
  Clone ID: MRT4577_128131C.1
cctaccccgaccgcggtgcatgggccacnncgcgnacgacccgctgcccctnaggcnnnctcctcccctncnncaaaacgctgnacnccnntctcccnnctctcccnnttctgcgccgccccgatcctctctctcatcttttcttcgtggnagccccccggcgcttggctgggggggggggcgcggctntangangcnncctganngccnntggaggnnttgagttcgtgagagccacagaggcggaggccggagggaggaaagcccgcggtacccggnnagcccgtagaaggcgcanngctcgccgccccgcgggggcctgggnannaggacgccgacnnatcttcgcttgttgtnncatgattgnngttcaagacaantacatggtggtgatgcccgggcccaggtattatatatctctacagtgagactttgaaagggtgcncccaatgtcatatgtatcccagatcccatatttaaaccaagggtgcctacctgggtgttcaacctttgnagaaaaaagggcttaca

SEQ ID NO: 30835 - DNA, 4347 bp, Zea mays
  Clone ID: MRT4577_128132C.1
tcaatcaaagttccgagaatcaagaatgtttagctcattcctaagtttcgtaaaggttttctcatctaatggcttgacaaagatatcggcgagttgttctttggtgctaacataagcaatctcgatatcccccttttgttggtgatctctcaaaaagtgataccgaatggctatgtgcttagtgcggctgtgttcaacgagattatccaccatgcagattgcactctcattatcacataagagagggactttgcttaatttgtagccatagtcccgaagggtttgcctcatccaaagtaattgcgcgcaataatggcctgcggcaatatactcggctttgacagtagaaagagctactgagttttgtttctttgaagcccaagacaccagggatcttcccaacaactgacaagtccctgatgtgctcttcctatcaattttacaccctgcccaatcaacatcggaatatcctattaaatcaaaggtggatcccttggggtaccaaagaccaaacttaggtgtatgaactaaatatctcaagattcttttcacggccctaaggtgaacttccttaggatcgacttgaaatcttgcacacatgcatacagaaagcataatatccggttgagatgcacataaatagagtaaagatcctatcatcgaccggtataccttttgatctatggatttacctcccgtgtcgaggtcgagatgcacattggttcccatgggtgtcttgatgggtttggcatccttcattccaaacttggtgagtatgtcttgaatatacttggtttggctgatgaaggtgccctcttggagttgctttacttgaaatcctaggaaatactttaactcccccatcatagacatctcgaatttttgaatcatgatcctactaaactcttcacatgtagatttgttagtagacccaaatatgatatcatcaacataaatttggcatacaaacaaatcatttgcaatggttttagtaaagagtgtaggatcagcttttccaactttgaaaccattagtgataagaaaatctcttaggcattcataccatgctcttggggcttgcttgagcccgtaaagcgccttagagagtttatacacgtggttagggtactcactatcttcaaagccgggaggttgctcaacatagacctcttccttgattggtccattgaggaaagcactcttcacgtccatttgataaagctcattcctcgtgaagttgttgagttcctcttgcattgccaatacccaatccgaatctcttaatgtgtcttccaccctgtatggctcaatagaagacacaaaagagtaatgttcacaaaaatgagcgacacgagatcgagtggttacccccttatgaatatcgccgaggatggagttcacggggtgatctcgttgtatcgcttggtggactcttgggtgacgcggtctttgaccctgtacttcttgtccatcttccttgtcttgatcatcattatctcccccttgatcattgtcctccttttgaggtggctcatcttcttgatcttcattttcatcatcttgagcttgatcctcatcttgggttggtggagatgcttgctctacttgagagccattagtctcatcaaacacaatgtcacaagaaacctcaactaatccagtggatttgttgaagactctatatgcccttgtgtttgagtcatagccaagtaaaaagccttctacagccttatgagcaaatttaaattttctacctcttttaacaagaataaaacatttgctaccaaagactcggtccggcgtcttgtactcatcaagcatggtcctcaccatgtcaagtagagttctattcttcgtctccactacaccattttgttgaggtgtgtagggagaagagaactcatgcttgatgccctcctcctcaagaaagccttctatttgagagttcttgaactccgtcccattgtcgcttcttatctttttgattctcaatccgaactcattttgagctcgtctcaagaatccctttaaagtctcttgggtttgtgatttttccaaaccttgatttccatccccgaatgtgatagctctttgggcatcttcgtttttctcgtaggaggagaacattcttttcgcccctgtcatatggtttgtgcacccgctatcaattatccaacttgagcccttggattcataaaccttgggtacccaaacacaagtcttgcagcccttgtgtttgtccccaacatatttggcaactattttgcctgatttgttagttaaaacataagaagcatcaaaagtcttaaatgaaatgttatgatcatttgatgcaacaagagatttctttttaggcattttaacatgggtagaatgcctagagctagaagcttcactcttatacataaaagcatgatgggaaatagagtgagtcttcttagcatgaattctcctaatcttgtgctcaggataaccagcaggatataaaatgttaccctcgttatcctgagccatgggatccttgcccttaacaaaattagacaatattttagggggattaagcttgacattgtctccctgttggaagccaatgccatcattaatgccagggcgtcttccattatagagcatgctcctagcaaatttaaatttttcattttctatttcatgctcattgattttactagttagttgtgttatgtgatcattttgttgtttaattaaagctaggtgatcatagatagcatcaacattaatgtctctacatctcatgcaaatggaaacatgatcgacagtggatgtagagggtttgcaagcatttaattcatcaatcttagcatgtaacatggcattctcatttctaagattggaaatagaaacattgcaaacatttaaatctttagccttagaaattagtttatcattctcaatcttaaggctagaaattgattcattcaatttgtcaatcttagcaatcaaactagcattatcatttttaaggttgacaagagaatcatcacaaacatttaatttctcaaccttagcaattaatttggcattttcaattctaaggttggagatagtgtcatggcaaatgctaagctcactaattaatttttcacatttctctaattcctgagcataagcattttttaccttaacaagctttttgttttccttaataaggaattcctcttggctatccaagagttcatccttctcatgaatagcacctatcaattcattcaatttttccttttgttgcatgtttaggttggcaaaaagagcaagtaaatcatcctcatcttcactagagctaccctcatcactagatgttgtatatttagtggaggctctagattttaccttcttctttttgccgtcctttgccatgaggcacttgtggccgacgttggggaagaggaggcctttggtgacggcgatgttggcggcgtcctcgttggatgaggagtcggtggtgctttcgtccgaatcccattcccgacacacgtgggcatcgccgcccttcttcttgtagtacttcttcttttccttcctccttaccttcttgtcatcgcccctgtcactggcactagaaataggacattttgctataaagtgaccggtcttaccacacttgtaacacaccttcttggaacggggtttgtagtctctccccttcctttgcttgaggatttggcaaaagctcttgatgatgagcgccatttcctcgttgtcgagcttggaggcatcgatggggagcctacttgaggtagactcttctttcttctcctctgtcactttaaatgcgacgggttgcacctcgggtgtggaggtgccgccttgctcgacaatttgtttggagcctttgatcatcaactcaaagctcacaaactttcctataacctcctcgggacacattagcttatatctaggatcaccacgaattaattgaacttgtgtaggattacaaaaaacaagtgatcttagaatagccttgaccatttcatggtcatcccatttggtgctcctgaggttgcgcacttggttgaccaaggtctttatccggttgtacatggcttgtggctcctctctaaacttcttgcgctcatggcgcttagaagtgacggacggagtgtcggagccggaggtagaaggcgacgaggaatcagtctcatagtagaccacctttttcatcttctttttcttatcgccgctccgatgtgacttggcatgtgaaggggatcccttcatcttgttgccggactcccccgatggagccttcctgtggcttgtagacttgtcaccgccggtcatgatctccttcttggcgtgttctcccgacat

SEQ ID NO: 30836 - DNA, 148 bp, Zea mays
  unsure (1)..(148): unsure at all n locations
  Clone ID: MRT4577_128133C.1
ncgaattcggctcgaggtcacacgttcgaactttatggcctgttacagctactacgcttcaggcatgtccacaagtgcccataggagactgcctctcataatcacacgctctgcatttatgattgcatttccgtattgcacctcacaa

SEQ ID NO: 30837 - DNA, 5097 bp, Zea mays
  Clone ID: MRT4577_128134C.1
ttagagtgtccggtgcgccagcatgggcgggtctgacttctgcgcgtgctggcgcgcatttaatgcgctgcaggtagccgttggcgccgaagtatccgttgtttcgatgtcacaccggacagtccggtgtacaccggacatgtccggtgaattatagcggactagccgttgcgaattcccgaagctggcgagttccagagccgctcttccttggagcaccggacactgtccggtgtacaccggacagtccggtgaattatagcggagcgcctctggattttcccgaaggtgacgagttcgacttggagtcctctggtgcaccggacactgtccggtggcacaccggacagtccggtgcgccataccagaggtgccttcggttgtccctttgctcttttgttgaacccaatacttggtctttttattggctaagtgtgaacctttgacacctccctcgtcgaggtcgagatgcccattggttcccatgggtgtcttgatgggtttggcatccttcattccaaacttgcttagaatatcttgagtgtactttgtttggcttaggaaggtgccttcttggtgttgcttcacttggaatcctaagaagtactttaactcccccatcatagacatctcgaatttttgtgtcatgatcctactaaattcttcacatgtagactcgttagtagacccaaatataatatcatcaacataaatttggcatacaaacaagtcattgtcaagagttttagtgaataaagtaggatcagcctttctgactttgaatccattagtgataaggaaatccctaaggcattcataccatgctcttggggcttgcttgagcccataaagcgccttagagagtttataaacatggttagggtactcactatcttcaaagccgggaggttgctcaacatagacctcttccttgattggtccattgaggaaggcacttttcacgtccattttataaagcttaaagccatggtaagtagcataggccaataatatacgaattgacttaagcctagctacgggtgcataggtttcaccgaaatccaaaccttcgacttgggaatatcctttggccacaagtcgagctttgttccttgtcaccacaccatgctcatctttcttgttgcggaagacccatttggttcctacaacattttgattaggacgtggaactaaatgccatacctcattcctagtgaagttgttgagctcctcttgcatcgccaccacccaatccgaatcttgtagtgcttcctctaccctgtgtggctcaatagaggaaacaaaagagtaatgctcacaaaaatgtgcaacacgagatctagtggttacccccttatgtatgtcaccgaggatggtgtcgacgggatgatctcgttggattgcttggtggactcttgggtgtggcggcctttgttcttcatcctccttgtcttgatcatttgcatctcccccttcatcctcattttgagtcggtggagatgcttgcgtggaggaggatggttgatcttgtgcatttggagactcttcggattcattaggacacacatccccaatggacatgttccttagcgcggtgcatggagcctcttcatcacctatctcatcaagatcaacttgctctacttgagagccgttagtctcatcaaacacaacgtcacaagaaacttcaacttgtccggaggacttgttaaagactctatatgttcttgtgtttgaatcatatcctagtaaaaagccttctacagtcttaggggcaaatttagattttctaccggttaggagttcataggatgtcttcttgaggattcggtgtagatataaccggttgatggcgtagcaggcggtgttgaccgcctcggcccaaaacattttgttgcggggtgtagggagaagagaactcatgcttgatgcctcctcctcaaggaagccttcaatttgtgagttcttgaactccgtcccgttgtcgcttctaattttcttgatccttaagtcgaactcattttgagctcgtctcaagaatccctttaaggtctcttgggtttgagatttttccctgtctttctcaaaatgaacattggttagtcctaaaatgtgctctccctttagaagcttatgaagattcttcatcccagcatgggctagtcggtggtgccagagccaacccatgttagtcttagcaattaagcaagtgtcgagttcagctctatcaaaatctaccaagtatagttgaccctccaacactcccttaaatgctattgaatcatcacttcttctaaagacagtgacacccaatcctttgaccacacattggtttccatccccgaatgtgatcgctcgttggggatcttgatttttctcgtaggaggagaacatttccttctccccagtcatgtggtttgtgcacccgctatcgatgatccaacttgagcccccggatgcataaacccaaacggttttgggtcctttggcattagaaacaagaactttgggtacccaaacacaagtcttggagcccttgtatttgcccccaacaaatttggcaactactttgccggatttgttagtcaaaacataggatgcatcaaaagttttaaatgaaatgtcatgatcatttgatgcactaggagttttccttttaggcaacttagcatgggttggttgcctagagctagatttctcacccttatacatgaaagcatggttagggccagagtgagacttcgtagagtgaatcctcctaattttgctctcgggataaccggaagggtacaaaatgtaaccctcgttatcctgaggtatgggagccttgccctttacaaaattagacaaccttttaggaggggcattaattttgacattgtctcccctttgtaagccaatgccatccttgatgccagggcgtctcccattataaagcatactacgagcaaatttaaacttttcattctctaagttatgctcggcaattttagcatctaattttgctatatgatcattttgttgtttaattaaagccatgtgatcatgaatagcattaacatcaacatctctacatctagtacaaatagcagtgtactcaacggtagatgtagagggtttgcaagattttaattctacaaccttagcatgtaatatatcattttcacttctaaggttagaaatagtaatattgcaaacattaaaatctttagccttagcaagcaatttctcattttcaatcctaaggctagcaagagaaacattcaactcatcaatcctagcaagtaaatcaacattatcatctctaggattggaagttgaagcattacaaacatgagaatcaaccttagcaattaatttgacattttcatttctaaggttgttaatagtttcatggcaagtgcttagctcactagatagtttttcacatttttctacttcaagagcataagcatttttaaccttaacatgcttcttattttctttaattaggaagtcctcttgggaatccaaaaggtcatccttctcatgaatgatactaattaattcatttaacttttccttttgttccatgttaaggttggcaaaaagggtacgcaaactatcttcctcatcactagaagattcatatttagtggaggattttgatttaaccttcttccttttgccgtcctttgccgtgaggcacttgtggccgacgttggggaagagaagtcccttggtgacagcgatgttggcggtgtcctcgtcggaggaggagtcggtggagctctcgtcggagtcccactcccggcaaacatgggcatcaccgcccttcttcttgtagtacctcttcttttctctcctcttgcccttcttgtcgtcgcccctgtcactgtcactagatattggacattttgcaataaaatgaccgggcttaccacatttgtagcacactttcttggagcggggcttgtaatctttccctctcctttgcttgaggatttgacggaagctcttgatgatgagcgccatctcctcgttgtcgagcttggaagcatcgatgggttgtctacttgatgtagactcctccttcttttcctccgtcgccttgaatgcgaccggttgtgcttcgggtgtgaaggaggtgccttgctcgatgattttctttgagcctttaatcattagctcaaagctcacaaattttcctataacttcctcgggagacattagcttatatctaggatcatctcgaattaattgaacttgtgtagggttaagaaatacgagggatctaagaataaccttgaccatctcatggtcatcccatttttcgctcccgaggttgcgcacttggttcaccaaggtcttcaagcggttgtacatagcttgtggatcctccccttggtgaagcatgaagcgaccgagctccccctcgatcgtttcccgcttggtgatctttgtcacctcgtctccttcgtgcgcggtcttgagtacgtcccaaatttccttcacactttttaacccttgcaccttattatactcctctcgacttagagaggcgaggagtatagtagtggcttgggagttaaagtggtgaatttgggccgcctcgtccgagtcgtggtcttcatcccctacggatggtacctgtacaccaaactcaacaacattccatatgcttgtgtggagtgaggttagatgatgcctcattttgtcactccacatattataatctccaccgtcaaaaactggtggtttgcctaatggaacggagagcaaaggagtacgttttgaaacatggggatagcgtagaggaatcttactatacttcttgcgctcttggcgcttagaagtaacggacggtgcatcggagtcggaggtcgatggtgatgaagagttggtctcgtagtagaccactttcctcatcctcttgtgtttgtcgcctctccgatccgacttgtgggaagaagatttcttctccttccccttccctttgttggaagagtttttcttctccttcctcttgttgcgggactcttccgatgaagtcgacccgtggcttgtagcgggcttgtcgccggtctccatctccctcttggcgagttctcccgacat

SEQ ID NO: 30838 - DNA, 4209 bp, Zea mays
  Clone ID: MRT4577_128135C.1
ttacaggttctctggaggaaatggttgctggcataacttggccgtccaccttgccaccgggttggactgtcgagtgggaccctgcctcggcttttgatccacggacttacctcccgtgtcgaggtcgagatgctcattagttcccatgggtgtcttgatgggcttggcatccttcatcccaaacttgtttagaatgtcttgagtatactttgtttggctaatgaaggtgccttcttggagttgcttcacttgaaatcccaagaagtacttcaactcccccatcatagacatctcgaaattttgtgtcatgatcctacatgctcttggagcttgcttgagcccataaagcgccttagagagtttatagacatggttagggtactcaccatcttcaaagccgggaggttgctcaacatagacctcttccttgattggtccattgaggaaggcacttttcacgtccatttgataaagcttaaagccatggtaagtagcataggccaataatatgcgaattgactcaagcctagctacgggtgcataggtttcaccgaaatccaaaccttcgacttgggagtatcccttggctacaagtcgagctttgttccttgtcaccacaccatgctcatcttgcttgttgcggaagacccatttggttcctacaacattttgattaggacgtggaactaaatgccatacctcattcctagtgaagttgttgagctcctcttgcatcgccaccacccaatccgaatcttggagtgcttcctctaccctgtgtggctcaatagaggaaacgaaggagtaatgctcacaaaaatgtgcaacacgagatctagtagttacccccttatgaatgtcgccgaggatggtgtcgacggggtgatctcgttggattgcttggtggactcttgggtgtggcggcctttgctcttcatcctccttttcttgattatttgcatctcccccttgatcattgccgtcatcttgaggtagctcatttgcttgatcttctacttcatcaacttgagcttcatcctcattttgagtcggtggagatgcttgcgtggaggaggacggttgatcttgtgcatttgaaggctcttcgggttccttaggacacacatccccaatggacatgttccttagagcgatgcacggagcctcttcaatacctatctcatcaagatcaacttgctctacttgagagccgttagtctcatcaaacacaacgtcacaagaaacttcaacttgtccagtggacttgttaaagactctatatgcccttgtgtttgaatcatatcctagtaaaaagccttctacagtcttaggagcaaatttagattttctacccttaaattctattgaatcatcacttctcctaaagatagtgacacctatatcagtgaatagacagttgtagcccattttgcataattgagatacagaaagcaaattgtaatctaatgaatcttgatttccatccccgaatgtgatagctcgttggggatccttgtttttctcgtaggaggagaacatcttcttctcccctgtcatatggtttgtgcacccgctatcgatgatccaacttgagcccccagatgcataaacccaaacggttttgggtcctttggcattagaaacaagaactttgggtacccaaacacaagtcttggagcccttgtgtttgcccccaacaaacttggcaactactttgccggatttgttagtcaaaacataagatgcatcaaaagttttaaaagaaagactatgttcatttgatgcactaggagttttcttcttaggcaacttagcacgggttggttgcctagagctagatgtctcacccttatacataaaagcatggttagggccagagtgagacttcctagagtgaattctcctaattttgtcctcgggataaccggcagggtataaaatgtaactctcgttatcctgaggcatgggagccttgcccttaacaaagttagacaatcttttaggaggggcattaagtttgacattgtctcccctttggaagccaatgccatccttgatgccagggcctctcccattatagagcatacttctagcaaatttaaaattttcattttctaagtaatgctcggcaatttttgcatctaattttgatctagtacaaatagatacatgctcaacgatagatgtagagggtttgcaagattttaattctacaaccttagcatgtaacatgtcattcttagttctaaggtcggaaatagtagcattgcaaacatcaaaatctttagccttagcaagcaatttttctttttcaatcctaaggctagcaagagagatgttcaattcttcaatcctagcaagtaaatcatcatcattatttctagaattggtaattgaaacattacaaacatgagaatcaaccttagctaacaaattagcattttcatttctaaggttgtatattgtcacatggcaagtgcttagctcactagataatttttcacatttctcaatttctagagcataagcatttttaaccttaacatgtttcttattttccttaattaggaagtcctcttgagaatccaaaaggtcatccttttcatgaatagcactaattaattcatttaatttttccttttgttccatgttaaggttggcaaaaagggtacgcaaattatcttcctcatcactagcattatcatcactagaggactcatatgtagtggaggatttagatttaaccttcttctttttgccgtcctttgccatgaggaacttgtggccgacgttggggaagaggagtcccttggtgacggcgatgttggcggcgtcctcgtcggaggaggagtcggtggagctctcgtcggagtcccattcgcggcacacgtgggcatcgccgcccctcttcttgtggtacctcttcttttctctcctcttgcccttcttgtcgttatccctgtcactgtcacttgataatggacatttggcaataaagtgaccgggcttaccacacttgtagcaaacctccttggagcgggacttgtagtctttccccctcctttgtttgaggatttggcggaagctcttgatgacgagcgccatttcctcattgtcgagcttggaggcgtcgattggttgtctacttggtgtagactcctccttcttttcctccgtcgccttgaatgcgacgggttgagcttcggatgtggagggatcatcaagcttgttgatcttcctcgagccttcgatcatgcactcaaaactcacaaaattcccgattacttcctcgggggtcattagtgtatatcttgggttgccacgaattaattgtacttgagtagggttaagaaaaataagagatcttagaataaccttaaccattttgtggtcatcccatttcttgctcccgaggttgcgcacttgattcaccaaggtcttgagccggttgtacatattttgtggctcctcccctttgcgaagccggaaccgaccgagctccccctcgatcgtctcccgcttggtgatctttgtaagctcatctccttcgtgtgcggttttgagcacatcccaaacctccttggcgctcttcaacccttgtactttgttatactcctctctacttagagaagcgaggagtattgttgttgcttgagagttgaagtgctcgatttgggcaacctcgtcctcatcataatcttcatcccctacggatggtacctgtgcaccaaactcaacaacatcccatatacttttgtggagtgaggttagatgaaatcgcattaaatcactccacctagcgtaatcttcaccatcaaatgttggtggtttgcctaatgggacggaaagtaaaggtgtatgtttggaaatgcgagggtagcgtaggggaatcttactatacttcttacgctcttggcgcttagaagtgacggacgtcgcgtcggagccggaggtggatgccgatgaagaatcggtctcgtagtaaaccaccttcctcatcctctttttcttgtcctcactccgatgcggcttgtgggaagaggacttctccttccctttggaggagtccttcttcttctccttccttttggaggagtccttcttcttctccttcctcttggtgcgggactcttccaatgaaacactcccgtggcttgtagtgggcttttcgccggtctccatctccttcttggcgtgatctcccgacat

SEQ ID NO: 30839 - DNA, 5358 bp, Zea mays
  Clone ID: MRT4577_128136C.1
tcatttctccccctttttggcatgaatcgccaaaaacggaatcattagagcccttgaagtaatttcttcccctttggtcataagaaaatgagttaagattataccaaagacgaggtccggtccttttgcttttgagcttttactctctccctcaaggatgaagtccttttccttgatgctcatttctcccccaaagaagagagagttgctcggagtgatggcgaagtatgagttacggagtggaagcctttttcttcgccgaagactccaattccctttcaatatacctatgacttggtttgaaatagacttttgatccacggacttacctcccgtgtcgaggtcgagatgcccatttgttcccatgggtgtcttgatgggtttggcatccttcatcccaaacttagcaagaatgtcttgagtgtacttcgtttgactaatgaaggtgccctcttggagttgcttgacttggaatcctagaaaatacttcaactcccccatcatcgacatctcaaatttctgtgtcatgatcctactaaactcttcacatgtagactcgttagtagacccaaatataatatcatcaacataaatttggcatacaaacaagtcattttcaagagttttagtaaagagtgtaggatcggccttgccaactttgaagccattagcaataaggaaatctcttaggcattcataccatgctcttggggcttgcttgagcccataaagcgccttagagagcctatagacatggttagggtactcactgtcttcaaagccgggaggttgctcaacatagacctcttccttgatcggtccgttgaggaaggcacttttcacgtccatttgataaagcttaaagccatggtaagtagcataggctaataatatgcggattgactcaagcctagctacgggtgcataggtttcaccgaaatccaaaccttcgacttgtgaataccctttggccacgagtcgagctttgttccttgtcaccacaccatgctcatcttgcttgttgcggaagacccatttggttcctacaacattttgattaggacgtggaactaaatgccatacctcgtttctagtgaagttgttgagctcctcttgcatcgccaccacccaatccgaatcttgaagagcttcctctaccctgtgtggctcaatagaggaaacaaaagagtaatgttcacaaaaatgagcaacacgagatctagtggttacccccttatgaatatcgccaaggatggtgtcgacggggtgatctcgttggattgcttggtggactcttgggtgtggcggtcttggttcttcctcatcctcctgttcttgatcatttgtatctcccccttgatcattgctatcatcttgaggtggcttgtcttcttgattttgctcttcatcattttgagcctcatcctcattttgagttggtggagatgcttgcatggaggaggatggttgatcttgtgtacttggaggctcttcggattccttaggacacacatccccgatggacatgttccttagcgcgatgcatggagcctgttcttcacctatctcatcaagatcaacttgctctacttgagagccgttagtttcatcaaacacaacgtcacaagagacttcaactagtccagtggacttgttaaagaccctatatgcccttgtgtttgagtcataaccaagtaaaaagccttctacagttttaggagcaaatttagattttctacctcttttaataagaatgaagcatttgctaccaaaaactctaaaatatgaaatgttgggctttttaccggttaggagttcatatgatgtcttcttgaggattcggtgaagatataaccggttgatggcgtagcaggcggtgtttaccgcttcggcccaaaaccggtccggtgtcttgtactcatcaagcatggttcttgccatgtccaatagagttcgattctttctctccactacaccattttgttgaggtgtgtatggagaagagaactcatgcttgatgccctcctcctcaaggaagctttcaatttgagagttcttgaactccgttccgttgtcgcttcttattttcttgatccttaaggcgaactcattttgagcctgtctcaagaatccctttaaggtctcttgggtttgagatttttcaagacaatacttactcccgccgatgcttatgtaggcaatcgggccgaatagatccatgtggagtagctcaagcggcctgtcggtcatcatgatgttcttgtgtggatgatggactccaacttgcttccccgcctggcatgcgctacaaatcctgtctttctcaaaatgaacatttgttaatcctaaaatgtgctctccctttagaagcttatgaagattcttcatcccaacatgggctagtcggcggtgccagagccaacccatattagtcttagcaattaagcaagtgtcgagttcagctctatcaaaatctaccaagtatagctgaccctctaacactcccttaaaagctattgaatcatcacttcttctaaagacagtgacaccttgatttccatccccgaatgtgatagctcgttggggatcttggtttttctcatatgaggagaacatccttttctcccctgtcatgtggtttgtgcacccgctgtcgagtatccaacttgagcccccggatgcataaacccaaactgttttgggtcctttggcattagatacaagaactttgggtacccaaacacaagtcttggagcccttgtgtttgttcccaacaaacttggcaacgaccttgccggatttgttagtaagcacataagaagcatcaaaagttttaaatgcaatgctatgttcatttgatgcattagaaattttctttctaggcaacttggcacgggttggttgcctagagctagatgtctcacccttatacataaaggcatgattggggccagagtgagacttcctagaatgaattttcctaattttgctctcgggataaccggcagggtacaaaatgtagccctcgttatcctgaggcatgggagctttgcccttaacaaagttagacaaatttttaggaggggcattaagtttgacattgtctcccctttggaagccaatgccatccttgatgccagggcgtctcccattataaagtatgctacgagcaaatttaaatttctcattttctaggttgtgctcggcaatttttgcatctaattttgctatatgatcattttgttgtttaattaaggccatatgatcaagaatagcattaacatcaatatctctacatttagtgcaaatagaaacatgctcaagattagatgtagagggtttgcaagatttaagttctacaaccttagcatgcaacatttcattcttagttctaaggtcggaaatagtagcattgcaaacatcaaaatttttagccttagcaattaaattttcattctctaatctaaggctagcaagagatgcattcaattcatcaatcttagcaagcaagtcaatgttatcatctctaagattgggaattgaaacattacaaacatgtgaatcaaccttagcatttaaaatagcattttcatttctaaggttgtcaatcatctcacggcaagtgcttagctcactagacaatttttcacatttttctacttctagtgcataagcctttttaaccttaacatgtttcttgttttctttaattagacaatcctcttgggagtccaaaaggtcatccttttcatgaatagcactaatcaattcatttagtttttctttttgctccatgttaagattggcaaagagaatacgcaaattatcctcctcatcactagcattatcatcactagacgattcatatttagtggaggagttggatttaaccttcttctttttgccgtcctttgccatgaggcacttgtggccgacgttggggaagaggagtcccttggtgacggcgatgttggcggcgtcctcatcgtcggaggagtcgcttgagctttcgtcggaatcccattcccgacaaacatgggcatcgccgcccttcttcttgtaataccttttcttctcctttcttcttcccttcttgtcgtcgcctcggtcactgtcactagatataggacatttagcaataaaatgaccgggcttaccacacttgtagcaaaccttcttggagcgggacttgtagtccttccccctcctttgcttgaggatttggcggaagctcttgatgacgagcgccatttcctcattgtcgagcttggaggcgtctattggttgtctacttggtgtagactcctccttcttctcctccgttgccttgaatgcaacgggttgggcttcggatgggtcgccaagctcgttgattttcctcgagccttctatcatgcactcaaaacttacaaaatgcccgataacttcctcgggggtcattttagtatatctaggattaccacgaatcaattgaacttgagtgggattaagaaaaatgagagatcttaaaataacatttaccacttcgtggtcatcccacttcttgctcccgaggttgcgcacttggttcaccaaagtcttgagccggttgtacatatgttgtggctcctcccctttgtgaagccggaaccgaccgagctccccctcgatcgtttcccgcttggtgatcttggtgagctcatctccctcgtgcgcggttttgagtacatcccaaatctcctttgcatttttcaacccttgcactttgttgtattcttccttgcttagagaggcaaggagtatggttgcggcttgagagttgaagtgctcgatttgggctacctcatcctcatcataattctcatcccctattgatggtacctgtacaccaaactcaacaacatcccatatacctttgtggagcgagattagatgaaattgcattaaatcgctccacctagcgtaatcttcaccatcaaaagttggtggtttgcctaatgggacggaaagtaaaggtgtatgtttggaaatgcgagggtagcgtagggggatcttactgtacttcttgcgctcttggcgcttagaagtgacggagggcgcatcggagtcggacgtagaagttgatgaagtgtcggtctcgtagtagaccactttcctcatccttttgtgcttgtcgcctttccgatgtggcttgtgggaagaagatttttccttcttctctttgtggtgagaagaagatttcttctccttccctttgttggaggagctcttcttcttctccctccttttggtgcgggactcttccgatgaagtgctcccgtagcttgtagtgggcttttcgccggtctccatctccttcttggcgtgatctcccgacat

SEQ ID NO: 30840 - DNA, 1588 bp, Zea mays
  Clone ID: MRT4577_128137C.1
ggggggggagtttatgaatttcattaaatgcaacataacatgacagactaaaaaattgtgtgataaacaatcaaatgagaatggcctcctaactggcaaaaggttgaaattaacaaagaatcgcaagctcaaaaaacaaaatacgagccagcagtatgcagaaacaaataccgaaaagaagaattaccgtatcacttaaggtttgccagtagccgcgataacatggaaccgaccgactatcacgaggtccaaaaaaaataaccaccacaaaagtaccagcccaccacaaataaagtttaagcggacacaccgcaccgaccgacgacgataactcgcggcagcgactgggccagccagcaactgcagcacgctcaagactgacaacaaaccgcttagtccacctcctcgatcttggggccagggccgccgctgccagcgggggcgtcctcgtccatgccgccagcgccgcccatgtcttcacccgcgccctggtacatcttggcgatgatggggttgcagaggctctccagctccttcatcttgtcctcgaactcgtccgcctcggcgagctggttggcgtccagccagctgatggccgcgtcgatggcgtcctcgatcttcttcttgtcatcggccggcagcttggacgcaatcttctcgtccttgatcgtgttgcgcaaggtggaggccaagaactcgctggagaactactcctacaacatgcgcaacacgatcaaggacgagaagattgcgtccaagctgccggccgatgacaagaagaagatcgaggacgccatcgacgcggccatcagctggctggacgccaaccagctcgccgaggcggacgagttcgaggacaagatgaaggagctggagagcctctgcaaccccatcatcgccaagatgtaccagggcgcgggtgaagacatgggcggcgctggcggcatggacgaggacgcccctgccggcagcggcggccctggccccaagatcgaggaggtggactaagcggtttgttgtcagtcttgagtgtgctgcagttgctggctggcccagttgctgccgagagttatcgtcagttggtgcggtgtgtccgcttaaactttatttgtggttggttggtacttttgtggtggttatttttttggacctcgtgatagtcggtcggttcaatgttatcgcggctactggcaaaccttaagtgatacggtattcttcttttcggtatttgtttctgcatactgctggctcgtattttgtttttgagcttgcgattctttgttaatttcaaccttttgccagttaggaggccattctcatttgattgtttaccacaatttttaggctgtcatgttatgtggcatttaatgaaattgataaacccccccccaaagtagctagcagcttttattgtggtaggtagtttggtcctggttttccttgtccccaaagagttttgggagtcaaacggtttctttaaattttttccccttatcccattatgtccttatgtctgaaatctttccccgctagtatctctactctgtgaaaagatttttcttaaattctttaaacctactccccccat

SEQ ID NO: 30841 - DNA, 5139 bp, Zea mays
  Clone ID: MRT4577_128138C.1
tcaatcaaaattccgagaatcaagaatatttagctcattcctaagtttgcaaaaggtcttctcatctaatggcttggtgaagatatcagctaattgatctttggtgttaatataggctatcttgatatcccccctttgttggtgatccctcaaaaagtgatactgaatgtcgatgtgtttagtgcggctgtgttcaacgggattctccgtcatgcggatagcactctcattgtcacataggagagggactttgctcaatttgtagccatagtccctgagggtttgcctcatccaaagcaattgcacacaataatggcctgcggcaatatactcggcttcggcggttgataaggctactgagttttgtttctttgaagcccaagaccccagggatctccccagaaactgacaaatccttgacgtgctcttcctatcaattttacatcctgcccaattggcatcggaatatcctcccgtgtcgaggtcgagatgtccatttgttcccatgggtgtcttgatgggcttggcatccttcattccaaacttcttaagaatgtcttgaatgtatttggtttggctgatgaaggtgccatcttggagttgcttgatttgaaatcctaagaaatatctcaactcccccatcattgacatctcaaatttctgtatcatgatcctactaaactcttcacaagtagatttgttagtagacccaaatataatatcatcaacataaatttggcatacaaacaaatcatttgcaacagttttagtaaagagcgtaggatcggcttttccgactttgaagccattagtgataaggaaatctcgcaagcattcataccatgctcttggggcttgcttgagcccataaagcgcctttgagagtttataaacatggttagggtactcactatcttcaaagccgggaggttgctcaacatagacctcttccttgattggtccattgaggaaggcactcttcacgtccatttgataaagcttgaagccatggtaagtagcataggctaataatatatgaattgactcaagcctagctacaggtgcataggtttcatcgaaatccaaaccttcgacttgggagtatcccttggccacaagtcgtgctttgttccttgtcaccacaccatgctcgtcttgcttgttgcgaaagacccatttggttcctacaacattttgattacgacgtggaactaaatgccatacctcattcctagtgaagttgttgagctcctcttgcatcgccaccacccaatccgaatcttgaagtgcttcctctatcctgtgtggctcaatagaggaaacaaaagagtaatgctcacaaaaatgtgcaacacgagatctagtggttacccccttatgaatgtcgccgaggatggtgtcgacggggtgatctcgttggattgcttggtggactcttgggtgtggcggcctttgctcttcatcctccttgtcttgctcatttacatctcccccttgattattgtcgtcatcttgaggtggcttatttgcttgatcttctccttcatcaacttgagcatcatcctcattttgtgttggtggagatgcttgcgtggaggaggatggttgatcttgtgcatttggaggctcttgggattccttaggacacacatccccaatggacatgttccttagcgcgatgcacggagcctcttcatcacctatctcatcaagatcaacttgctctacttgagagccgttagtctcatcaaacacaacgtcacaagaaacttcaacttgtccagtggacttgttaaagactctatatgcccttgtgtttgaatcatatcctagtaaaaagccttctacagtcttaggagcaaatttagattttctacctcttttaataagaataaagcatttgctaccaaagactctaaaatatgaaatgttgggctttttaccggttaggagttcatacaatgtcttcttgaggattcggtgtagatacaaccggttgatggcgtagcaggcggtgttgaccgcctcggcccaaaaccgatccgaagtcttgtactcatcaagcatggttcttgccatgtccaatagagttctattcttcctctccactacaccattttgttgtggcatgtagggagaagagaactcatgcttgatgccctcctcctcaaggaagccttcgatttgagagttcttgaactccgtcccattgtcgcttctaattttcttgatcctcaagccgaactcattttgagcccgtcttaagaatccctttaaggtctcttgggtgtgagatttttcatcagtgaatagacagttgtagcccatttgacataattgagatacggaaggcaaattgtaatctaaagaatcttgatttccatccccgaatgtgatagctcgctggggatcttggtttttctcgtaggaggagaacaacttcttctcccctgtcatgtggtttgtgcacccgctatcgataatccaacttgagcccccggatgcataaacccaaatggttttgggtcctttggcattagatataagaactttgggtacccaaacacaagtctttgaccccttttgcttgcccccaacatatttggcaactatcttgccggatttgttagttaaaatataagatgcatcaaaagttttaaatgaaaagttatgctcatttgatgcactaggagttttcttcttaggcaacttagcatgggtttgttgcctagaactagatgtctcacccttatacataaaagcatgattagggccagagtgagacttcctagagtgaattctcctaattttgctctcggaataaccggcagggtataaaatgtgaccctcgttatcctgaggcatgggagctttgcccttaacaaaattagacaacttcttaggaggggcattaattttgacattgcctccctgttggaagccaatgtcatccttaatgccagggcgtctcccactatagagcatacttctagcaaatttaaatttttcgttttctaaattatgctcagcaattttagcatctaattttgctatatgatcattttgttgtttaattaaagccatgtgatcatgtatagcatcaatgttaacatctctacatctagtacaaatggtagtatgttcaacggtagatgtagaggatttgcaagaattaagttcaacaatcttagaatgcaatatatcatttttgtctctaagatcggaaatagtagcattgcaaacatcaaaatctttagccttagcaatcaatttttcattttcatttctaaggctagcaagagaaatgtttagttcttcaatcatagcaagcaaatcatcattatcatttctaggattgggaattaaaacattacaagcatttgaatcaaccttagctaacaatttagtattttcatttctaaggttgtcaatagtttcatggcaagagcttagctcactagaaagtttttcacatttttctacttctagagcgtaagcatttttgaccttaacatgtttcttattttctttaataaggaagtcctcttgggtgtccaagagatcatccttttcatgaatggcactaatcaattcattaagtttctctttttgttgcatgttgaggttggcaaaaagagtgcgtaagttatcttcctcatcactagcattttcatcactagaagactcatatctagtggaggatttggatttaaccttcttctttttgccgtcctttgccatgaggcgcttgtggccgacattggggaagagaagtcccttggtgatggcgatgttggcggcgtcctcgtcgtcggaggagtcgctagagctttcgtcggagtcccactcccgacaaacatgggcatcgccgcccttcttcttgtagtacatcttcttctcctttcttctccccttcttgtcgtcacccctgtcactgtcactagaaataggacatttagctataaagtgaccgggcttaccacatttgtaacaaaccttcttggagcggggcttgtaatctttccccctcctttgtttgaggatttggcggaagctcttgatgacgagcgccatttcctcgttgtcgagcttggaggcgtcgatgggtgttctactcggtgtagactcctccttcttctcctccgtcgccttgaatgcgattggttgtgcctcggacgtggaggggccatcaagctcgttgatctttcgtgagccttggatcataaattcaaagctcacaaaattcctgataacttctttgggggtcattagtgtatatcttgggttgccacgaattaattgtacttgagtagggttaaggaaaataagtgatcttagaataaccttaaccacctcgtggtcatcccatttcttgctcccgaggttgcgcacttgattcaccaaggttttgagccggttgtacatatcttgtggctcctccccttgccgaagacggaagcgaccgagctccccctcgatcgtttcccgcttggtgatcttggtgagttcatcaccctcgtgcgcggtcttgagcacgtcccaaacttccttggcgctcttcaatccttgcaccttgttgtactcctccctacttagagaggcgaggagtattgttgtggcttgggagttgaagtgctcgatttgggccacttcatcctcatcataatcctcatcccctacggatggtacctgtgctccaaactcaacaacattccatatacttttgtggagtgaggttagatgaaatttcattaaatcactccacctagcataatcttcaccgtcaaaggttggcggtttccctaatggaacggaaagtaatggagtatgtctagaagtacgaggataatgcaaggggatcttactaaacttcttgcgctcatggcgcttagaagttatggagggtgcgtcggagccggaggtagatggtgatgaggtgtcggtctcatagtagaccaccttcctcatcttctttattttgtcaccactctgatgcgacttgtgagaagaagtcttcttctccttcttcttctccttcttcttctccttgttgtgggactctcccgatgaagccttcccgtggcttgtagcgggcttgtcgccggtctccatctccttcttggcgagttctcccgacat

SEQ ID NO: 30842 - DNA, 1699 bp, Zea mays
  Clone ID: MRT4577_128139C.1
ggccgcttttttttttttttttttacagaaacaaataccgaaccagaagaataccgtatcacttaaggtttgccagtagccgcgataacattgaaccgaccgactatcacgaggtccaaaaaaataaccaccacaaaagtaccaaccaaccacaaataaagtttaagcggacacaccgcaccgaccgacgacgataactcgcggcagcaactgggccagccagcaactgcagcacactcaagactgacaacaaaccgcttagtccacctcctcgatcttggggccagggccgccgctgccagcgggggcgtcctcgtccatgccgccagcgccgcccatgtcttcacccgcgccctggtacatcttggcgatgatggggttgcagaggctctccagctccttcatcttgtcctcgaactcgtccgcctcggcgagctggttggcgtccagccagctgatggccgcgtcgatggcgtcctcgatcttcttcttgtcatcggccggcagcttggacgcgatcttctcgtccttgatcgtgttgcgcatgttgtaggagtagttctccagcgagttcttggcctccaccttcttcttgtgctcctcatcctcagacttgtacttctcagcgtcctgcaccatcttctcgatctcctccttggagagacggcccttgtcgttggtgattgtgatcttgttcttctgccccgtcgtcttgtcctcggcagacacgttcaggatgccgttggcgtcgatgtcaaagcacacggtgatctgtggcacaccacggggtgcaggggggatgccggagagctcgaacttgcccagcaggttgttgtcgcgtgtccgggtcctctcaccctcgtagacctggatcaggacaccgggctggttgtccgagtaggtggagaatacctgctccttcttggtggggatggtggtgttcctcgggatcagcactgtcataactcctccagcagtctccagacccagggacagaggggtgacgtccagcagaagcaggtcctgtcatcatggcaaccctaccactgctctgtggctccgcctcttcaccttcatcctcaacctcctcctcttcttcatcatcttcgtcctcatcctcttcttcctcatcctcctccacgccatcttcctcctcgtcactacttggtacatcatgcacctccacaacagcatcctcgtcatcaacatcctcatcaatctcctcccccaaatcctcctcctcaaagtcatcgtcgtcgtcgtcatcttcctccacgtcctcatcctcctcgccacgggcttcgccagcagccgcgacacgaaacccgtttgcgccatggctgtgctcgacaccaccgttcgggatgacctcgtcagcgtcgctctcctcctcgtccacatcgatcaccccattcacctccaccgggtgcgagggcacgcccgcgcgcgcatgggcgacgccgccgttcgctacctcgccgctcccagggtcttcctcgtcttcttcatcttcgtcatcatcgtcgccatcgccctcgccatcgccctcgccgtcgtcatcgtcgtcatcggactcggggcgctcgttctcgtcggcatccatcttccccacctatttgagcgtccggatcatctcgaaaacaatggatctgtagtccttgacacgggtaacggggcactcgtagagcggacgggtgtt

SEQ ID NO: 30843 - DNA, 2202 bp, Zea mays
  Clone ID: MRT4577_12813C.1
ctatcccctgtgccaaaccctagccggctatggagcatcccgccgccacctcctcacctgatccgacgccgtagcacctctccctgtccctgtccccatctccctccgtctccctggccaagcactccacctggaagcaccctgccccgaactgcaccgcagtcgtcgacgctaagcgctggcccacgctctccaaggttgcaaggtgccagatggtacaaaagggagtcatgaaggaccatgacatttcattatcctcttgccatccccccccccccctctccccctcatgccttgatagtgcagggccaggcatggatcatctatgtttctacaagctcgcggtcacatttattaggccttttgctaagttcatggatatggctctttcaaaaagtcgtctcttcatctcagcaccaagaatacaatcatcaagaagtatgacgacatgcatggatcatctatgtttctacaagctcgcggtgatcaacttgctattgggaaagaaactgcacgtcgtttgggaatgggtactaatatgtacccttcctctgctttactcagacagaataaggatgagtcaattgcttccttgccaattgatgaattgatcgagaaggctgatggctttgctggtgtctttccagaacacaagtatgagatcgtgaaaggcttgcaagcaagaaaacatatatgtggcatgactggggatggtgtaaatgatgccccagctttgaagaaggctgatattggtattgcagtagcagactctactgatgcaactcgtagtgcttctgacattgtcctaactgaacctggccttagtgtgattattagtgctgtgctgacgagtcgggcaattttccaaaggatgaagaattacacgatctatgctgtatcgattaccatccgtattgtgcttggttttatgcttcttgcgctgatatggaagtttgacttcccaccatttatggtcctgatcattgccatcctcaatgacggtaccattatgactatctcgaaggacagagtaaaaccatctccacaaccagacagttggaagttagctgagatttttgcaactggagtagttcttggtggttatttggccatgatgactgtcattttcttctgggctgcatacaagactgacttcttcccgcggctgttccacgtcgaaagcctcgagaagaccgcccaggatgactttcagaagctcgcctctgccgtgtaccttcaagtcagcacgatcagtcaggcccttatcttcgtgacgcggtcgcgcagctggtcgtttgtggagcgtcctgggttcttgctggtctttgctttcttggtggctcagctgatcgccactctgatcgctgtatatgccaactgggcgttcgctgcgatcaagggcattggatggggctgggccggtgtcatctggctctacaacatcgtcttctacttcccgctggacatcatcaagttcctcatccgctatgcgctgagtgggagggcatggaacctcgtccttgagcagaggatcgcgttcacgagcaagaagaatttcggcacggaagaaagggagcgcaagtgggcgcatgcccagaggactctccacgggctccagccgccagaggcatccatcttcgagaacaagacgacattcaatgagctgaaccagctcgcggaagaggcccgcaggagagccgagatggcgaggttgcgagaagtgagcaccctgaaggggaggatggagtcagtggtgaagcagaagggtctggacatcgagaccatccagcagtcctacaccgtgtgactggctgaccgacgacgacggggtttatagaggtttcttcttcttatactatacaatctgtactaggtagcaataaggatcaaggaaggaacccctatatattggctgtggttcgcgggaaatgaatgatggtcatatttatgatgtcggtgtggtgcttctgtcgccaactctcgaccatactaccctcaactcaccccttgtatgctgtggcattaaccacccccggcaccaccggcaggcattgatattgagagatgaggtatagtagtctgtagcctctagtagatgatgatgaattgatgatatagtacatttttgcttgctttcttgcttaaaaaaaaaaaaaaaaaaaaaaaaaaaaaaaaaaaaaaaaaaaaaaaattgtatgctgt

SEQ ID NO: 30844 - DNA, 5058 bp, Zea mays
  Clone ID: MRT4577_128140C.1
tcaacaaaagaagttcctagaatcaagaatatttagctcatgcctaagtttgttaaaagtttgttcatcaagtggcttggtaaagatatcggctaattgatctttagtattaatgtaagaaatctcgatatctcccttttgttggtgatcccttaaaaagtgataccaaatggctatgtgtttagtgcggctatgctcaatgggattatccgccatgcggattgcactctcattatcacatagaagaggaactttggttaatttgtaaccgtagtccctaagggtttgcctcatccaaagtagttgcgcgcaacaatggcctgcagcaatgtactcggcttcggcggtagaaagagctacggaattttgcttctttgaagcccaagacaccaaggatcttcccaagaactggcaagtccccgatgtgctctttctattgattttacaccctccttcgtcgaggtcgagatgcccattggttcccatgggtgtcttgatgggtttggcatccttcattccaaacttgcttagaatatcttgagtatacttcatttggcttaggaaggtgccctcttggagttgcttcacttgaaatcctaagaaatacttcaactcccccatcatagacatctcgaatttttgtgtcatgatcctactaaattcttcacatgtagactcgttagtagacccaaatataatatcatcaacataaatttggcatacaaacaagtcattttcaagagttttagtgaagagtgtaggatcggcctttccaatgtcttcaaagccgggaggttgctcaacatagacctcttccttgattggtccattgaggaagacactcttcacgtccatttgataaagcttgaagccatggtaagtagcataggccaataatatacgaattgactcaagcctagctacgggtgcataggtttcaccgaaatccaaaccttcgacttgggagtatcccttggccacaagtcgagctttgttccttgtcaccacaccatgctcatcttgctcattcctagtgaagttgttgagctcctcttgcatcaccactacccaatccgaatcttgaagtgcttcctctaccctgtgtggctcaatagaggaaacaaaagagtaatgctcacaaaaatgtgcaacacgagatctagtggttacccccttatgaatgtcgccgagaatggtgtcgacggggtgatctcgttggattgcttggtggactcttgggtgtggcggcctttgttcttcatcctccttgtcttgatcatttgcatctcccccttgatcattgccgtcattttgaggtggctcatttgcttgatcttctacttcatcaacttgagcttcatcctcattttgagttggtggagatgcttgagttgaggaggatggttgatcttgtgcatttggaggctctatctcatcaagatcaacttgctctacttgagagccattagtctcatcaaacacaacgtcacaagaaacttcaacttgtccggaggacttgttaaagactctatatgcccttgtgtttgaatcatatcctagtaaaaagccttctactgtcttaggagcaaatttagattttctaccccttttaacaagaataaagcatttgctaccaaagactctaaaatatgaaatattgggctttttaccggttaggagttcataagatgtcttcttgaggattcggtgtagatataaccggttgatggcgtagcaggcggtgttgactgcctcggcccaaaaccgatctgaagtcttatactcatcaagcatggttcttgccatgtccaatagagttcgattcttcctctccactacaccattttgttgtggggtgtagggagaagagaactcatgcttgatgccctccttctcaaggaagccttcgatttgagagttcttgaactccgtcccgttgtcgcttctaattttcttgatccttaatctgaactcgttttgagcccgtctcaagaatccctttaaagtctcttgggtgtgagatttttcctgcaaaaagaacacccaagtgaagcgagaataatcatccacaattactagatagtacttactcccgccgatgcttatgtaagcaatcaggccgaataggtccatgtgtaggagctccagtggcctgtcagtcgtcatgatgttcttgtgtggatgatgagcaccaacttgctttcctgcttggcatgcgctacatatcttgtctttctcaaaatgaacatttgttaatcctaaaatgtgttctccctttagaagcttataaagattcttcatcccaacatgggctagtcggcggtgccagagccaacccatgttagttttagcaattaagcaagtgtcgagttcagctctatcaaaatctaccaagtatagctgaccctctaacactcccttaaatgctactgaatcatcacttcttctaaagacagtgacacctttgaccaaaccttggtttccatccccgaatgtgatagctcgttgggaatcttggtttttctcgtaggaggagaacatcttcttctcccctgtcatgtggtttgtgcacccgctatcgattacccagcttgagcccccggatgcataaaccccttgtgcttgccccccaacacatttggcaacaactttgccggatttgttagttaaaacataagatgcatcaaaagttttaaatgaaaagttatgttcatttgatgcactaggagttttcttcttaggcaacttagcacgggttggttgcctagaactagatgtctcacccttatacatgaaagcatggttagggccagagtgagacttcctagaatgaattctcctaattttgctctcagggtagccggcagggtacaaaatataaccctcgtcatcctgaggcattagagccttgcccttaacaaaattagataacttcttaggaggggcattaattttgacattgcctccctgttggaagccaatgccatccttaatgccagggcttctccctctatagagcatgcttctagcaaatttaaaattttcattttctaagtcatgctcggcaatcttagcatctagttttgctatatgatcattttgttgtttaattaaagccatgtgatcatgaatagcattaacatcaacatccctacatcttagcatgcaatatatcattttagttctaaggtcggaaatagtagcattgcaaacatcaaaatctttagccttagcaagcaatttttcattctcaatcctaaggctagcaagagatatgttcaattcttcaatcttagtaagcaaatcatcattatcattcttaagattgggaattgaaatatcacaaacatttgaatcaaccttagctagtaaattagcattttcatttctaaggttgtcaattgtctcatggcaagtgcttagctcactagataatttttcacatttttcaacttctagagcataagcatttttaactttaacatgctttttgttttccttgattaggaagtcctcttgggagtccaagagatcatccttctcatggatgtcactaattaattcatttaatttctccttttgttgcatgtttaagttggcaaaaagagtgcgcaagttatcttcctcatcactagcattttcatcactagaggattcatatctagtggaggatttagatttaaccttcttctttttgtcgtcctttgccatgaggcacctgtggccgacgttggggaagagaagtcccttggtgacggcgatgttggcggcgtcctcgtcggaggaggagtcgctagagctttcgtcggagtcccactcccgacaaacatgggcatcaccgcccttcttcttgtagtacctcttcttctcctttcttctcctcttcttgtcatcgcccctgtcactgtcacacacttgtagcaaaccttcttggagcggggcttgtaatctttccccctcctttgcttgaggattttggcgaaagcttttgatgacaagcgccatttcctcattgtcgagcttggaggcgtcgattggttgtctacttggtgtagattcctccttcttctcctccgtcgccttgaatgcaaccggttgagcttcggacgtggagggaccgtcaagctcgttgatcttccgtgagcccttgatcataaattcaaagctcacaaaattcccgagtacttcctcgggagtcattagtgtatatcttggattaccacgaattaattgtacttgagtagggttaaggaaaataagagatcttagaataaccttaaccacctcgtggtcatcccactttttgctcccgaggttgcgtacttgattcaccaaggtcttgagtcggttgtacatatcttgtggctcctccccttggcgaagacggaagcgaccgagctccccctcgatcgtttcccgcttggtgatcttggtgagttcatcaccttcatgcgccgttttgagcacgtcccaaacttccttggcgcgttttagtccttgcaccttgttgtactcctctctacttagagaggcgaggagtatggttgtggcttgggagttgaagtgctcgatttgggccacctcgtcctcatcataatcctcatcccctacggatggtacctgtgctccaaactcaacaacattccatatacttttgtggagtgaggttagatgaaagttcattaaatcactccacctagcataatcttcaccgtcaaaggttggcggtttgcctaatggaacggaaagtaatggagtatgtctagaagtacgaggataatgtaaggggatcttactaaacttcttgcgctcatggcgcttagaagttatggagggcacgtcgaagctggaggtagaaggtgatgaagtgtcagtctcgtagtagaccaccttcctcatcttctttattttgtcgccactccgatgcgatttgtgagaagaagtcttcttctccttcttcttatccttattgcgggactctcccgatagagctttctcgttgcttgtagtgggcttttcgccggtctccatctccttcttggcgagttctcccgacat

SEQ ID NO: 30845 - DNA, 706 bp, Zea mays
  unsure (1)..(706): unsure at all n locations
  Clone ID: MRT4577_128141C.1
ttttttttttttttttttaaaccgaaccagaataccgtattacttaaaacgcgtgccacgataatattgttcaccaacaaaaggttctaacgcggatacaccgcgacgacgacgataaatcgagcagcgactgggccagccagccactgcagcagacacacgagactgacacaaaccgcttagtccacctcctcgatcttggggccagggccaccgcttccagccggagcgtcctcgtccatgccgccggagcctcccatgtcggcacccgcgccctggtacatcttggcgatgatggggttgcaaaggctctccagctccttcatcttgtcatcgaactcgtccgcctcggcgagctggttggcgtccagccagctgatggccgcgtcgatggcgtcctcgatcttcttcttgtcgtcggcagccagcttggacgcgatcttctcgtccttgatcgtgttgcgcatgttgtaggcgtagttctccagcgagttcttggactccaccttcttcttgtgctcctcgtcctccgacttgtacttctccgcgtcctgcaccatcttctcgatctcctccttggacagacggcccttgtcgttggtgattgtgatcttgttcttctgccccgtcgtcttgtcctcggcagacacgttcaggatgccgttcgccccccaccgcccacagcagaccgtgtntgggggacacc

SEQ ID NO: 30846 - DNA, 5784 bp, Zea mays
  Clone ID: MRT4577_128142C.1
ctagcaaaagaaatttctagaatcaagaatattgagctcatgcctaagtctggtaaaagattgttcatcaagtggcttggtaaagatatcggctaattgatctttagtattaatgtaagaaatctcgatatcccccttttgttggtgatccctaagaaaatgataccgaatggctatgtgcttagtgcggctatgctcgacgggattgtcggccattttaattgcactctcattatcacatagcaaagggactttggttaatttgtaaccgtagtcccgcagggtttgcctcatccaaagcaattgcgcgcaacaatgtcctgcggcaatgtactcggcttcggcggtggaaagagcgaccgaattttgcttctttgaagcccaagacaccaaggatcttcccaagaactggcaagtccctgatgtgctcttcctattaattttgcaccccgcccaatcggcatccgaataaccaatcaaatcaaatgtggatccccgagggtaccaaagcccaaacttaggtgtataagccaaatatctcaaaattcgttttacggccgtaaggtgggattccttagggtcggattggaatcttgcacacatgcaaacagaaagcataatgtccggtcgagatgcacataaataaagcaatgagccaatcatcgaccggtataccttttgatccacggacttacctcccgtgtcgaggtcgagatgcccattagttcccatgggtgtcttgatgggtctggcatccttcatcccaaacttagcaagaatgtcttgagtgtacttcgtttggctaatgaaggtgccctcttggagctgcttgacttggaatcctagaaaatacttcaactcccccatcattgacatctcgaatttctgtgtcatgatcctactaaattcctcacaagtagattcgttagtagacccaaatatgatatcatcaacataaatttggcatacaaacaaatcattgtcaagagttttagtgaatagagtaggatcggccttgccaactttgaagccattagcaataaggaaatctcttaggcattcataccatgctcttggggcttgcttgagcccataaagcgccttagagagcctatagacatggttaggatactcactgtcttcaaagccgggaggttgctcaacatagacctcttccttgattggtccgttgaggaaggcacttttcacgtccatttgatagagcttaaacccatggtaagtagcataggccaataatatgcgaattgactcaagcctagctacgggtgcataggtttcaccaaaatccaaaccttcgacttgtgaataccctttggccacgagtcgagctttgttccttgtcaccacaccatgctcatcttgcttgttgcggaagacccatttggttcctacaacattttggttaggacgtggaactaaatgccagacctcattcctcgtgaaattgttgagctcctcttgcatcgccaccacccaatccgaatcttggagagcttcctctaccctgtgtggctcaatagaggaaacaaaagagtaatgttcacaaaaatgagcaacccgagatcgagtagttacccccttatgaatgtcgccgaggatggtgtcgacggggtgatctcgttggattgcttggtggactcttgggtgtggcggtcttggttcttcctcatcctccttttcttgatcatttgtatctcccccttgatcattgctatcatcttgaggtggctcgtcttcttgattttgctcttcatcattttgagcctcatcctcattttgagttggtggagatgcttgcatggaggaggatggttgatcttgtgtacttggaggctcttcggattccttaggacacacatccccgatggacatgttccttagcgcgatgcatggagcctgttcttcacctatctcatcaagatcaacttgctctacttgagagccgttagtttcatcaaacacaacgtcacaagagacttcaactagtccagtggacttgttaaagaccctatatgcccttgtgtttgagtcataaccaagtaaaaagccttctacagttttaggagcaaatttagattttctacctcttttaataagaatgaagcatttgctaccaaaaactctaaaatatgaaatgttgggctttttaccggttaggagttcatatgatgtcttcttgaggattcggtgaagatataaccggttgatggcgtagcaggcggtgttgaccgattcggcccaaaaccggtccggtgtcttgtactcatcaagcatggttcttgccatgtccaatagagttcgattcttcctctccactacaccattttgttgtggcgtgtagggagaggagaactcatgcttgatgccctcctcctcaaggaagccttcaatttgagagttcttgaactccgtcccgttgtcgcttcttattttcttgatccttaagccgaactcattttgagctcgtctcaagaatccctttaaggtctcttgggtttgagatttttcctgtaaaaagaatacccaagtgaagcgagaataatcatccacaataacaagacaatacttactcccgccgatgcttatgtaagcaatcgggccgaatagatccatgtggagtagctcaagcggcctgtcggtcgtcatgatgttcttgtgtgggtgatggactccaacttgcttccccgcctggcatgcgctacaaatcctgtctttctcaaaatgaacatttgttaatcctaaaatgtgctctccctttagaagcttgtgaagattcttcatcccaacatgggctagtcggcgatgccagagccaacccatgttagtcttagcaattaagcatgtgtcgagttcagctctattaaaatccactaagtatagctgaccctctaacacacccttaaatgctattgaatcatcacttcttctaaagacagtgacacctttgaccaacccttgatttccatccccgaatgtgatagctcgttggggatctttgtttttctcatatgaggagaacatccttttctccccggtcatgtggtttgtgcacccgctgtcgagtatccaacttgagcccccggatgcataaacccaaactgttttgggtcctttggcattagatacaagaactttgggtacccaaacacaagccttggagcccttgtgtttgcccccaacaaacttggcaacgaccttgccggatttgttagtcaaaacatatgatgcatcaaaagtcttaaatgaaatgctatgttcatttgatgcattaggaattttcttcttaggcaacttggcacgggttggttgcctagaactagatgtctcacccttatacatgaaagcatgattggggccagagtgagacttcctagagtgaattctcctaattttgctctcaggataactggcagggtacaaaatgtaaccctcgttatcctgaggcatgggagctttgcccttaacaaagttagacaaatttttaggaggggcattaagtttgacattgtctcccctttggaagccaatgccatccttgatgccagggcgtctcccattatagagcatacttctagcaaatttaaatttttcattttctaagttatgctcggcaattttagcatctagttttgctatatgatcattttgttgtttaattaaagccatatgatcatgaatagcatcaatatcaacatttctacatctagtacaaatagatacatgctcaacaatagatgtagatggtttgcaagaattaagttcaacaatcttagcatgaagaatatcatttttatctctaagattggcaatggtaactttgcaaacatcaaaatctttagccttagcaatcaaactttcattctctaatctaaggctagcaagggaaatgtttaattcttcaatcctagcaagcaaatcatcattattatctctaggattgggaattgaaacattacaaacatgagaatcaaccttagcatttaaactagtattttcatttctaaggttgtcaatcatctcacggcaagtgcttagctcactagataatttttcacatttttctacctctagagcataagcctttttaaccttaacatgtttcttgttttctttaattagacaatcctcttgggagtccaaaaggtcatccttttcatgaatagcactaactaattcatttaatttttctttttgagctatgttgaggttggcaaaaagggaacgcaaattatcttcctcatcactagcattgtcatcactagaggattcatatttagtggaggatttagatttaaccttcttctttttgccgtcctttgccatgaggcacttgtggccgacgttggggaagaggagtcccttggtgacggcgatgttggcggcgtcctcgtcgtcggaggagtcgcttgagctttcgtcggaatcccattcccgacaaacatgggcatcgccgcccttcttcttgtagtatcttttcttttcctttcttctccccttcttgtcgtcgcctcggtcactgtcactagatataggacatttagcaataaaatgaccgggcttaccacacttgtagcaaaccttcttggagcgggacttgtagtctttccccctcctttgtttgaggatttggcggaagctcttgatgacgagcgccatttcctcattgtcgagcttggaggcgtcgattggttgtcgacttggtgtagcctcctccttcttctcctccgttgccttgaatgcaacgggttgggcttcggatgagtcgccaagctcgttgattttcctcgagccttctatcatgcactcaaaacttacaaaatgcccgataacttcctcgggggtcattttagtatatctaggattaccacgaatcaattgaacttgagtgggattaagaaaaatgagagatcttaaaataacatttaccacttcgtgatcgtcccacttcttgctcccgaggttgcgcacttggttcaccaaagtcttgagccggttgtacatgtgttgtggctcctcccctttgtgaagccggaaccgaccgagctccccctcgatcgtttcccgcttggtgatcttggtgagctcatctccctcgtgcgcagttttgagcacatcccaaatctcctttgcatttttcaacccttgcactttgttgtattcttccttgcttagagaggcaaggagtatggttgtggcttgagagttgaagtgctcgatttgggccgcctcatcctcatcatagttttcatcccctacggatggtacctgcgcaccaaactcaacaacatcccatatgcttttgtggagcgagattagatgaaatcgcattaaatcgctccacctagcgtaatcttcaccatcaaaagttggtggtttgcctagtgggacggaaagtaaaggtgtatgtttggaaatgcgagggtagcgtagagggatcttactatacttcttgcgctcttggcgcttagaagtgacggagggcgcatcggagtcggaggtcgatgttgatgaagtgtcggtctcgtagtagaccaccttcctcatcctcttgtgcttgtcgcctttccgatgcggcttgtgggaagaagatttttccttcttctctttgtggtgagaagaagatttcttctccttccctttgttggaggagctcttcttcttctccctccttttggtgcgggactcttccgatgaagtgctcccgtagcttgtagtgggcttttcgccggtctccatctccttcttggcgtgatctcccgacat

SEQ ID NO: 30847 - DNA, 388 bp, Zea mays
  Clone ID: MRT4577_128143C.1
tttttctcctaatcccaccagcaaatccccaggtgcgcctatttcgagcgagcgtgtggctacctttcaaggtccttaagattctggtcaaaggcggtgccaatctttactccaaggtttttcgtgacaacatccatttcattactaatctctctatcacttttctttcttataggtgtttcttaaatctcatatcttttcatatctactaatttactattttttatcttttagattttttattatttctttattttttactatttttacatattcgaggttggtgtattttatatatttttttttaattttatatttttttttatatttattaaaaattttttttatatattttttaatttttttataatattctttatatttattt

SEQ ID NO: 30848 - DNA, 4233 bp, Zea mays
  Clone ID: MRT4577_128144C.1
ttacttgacttgaaatcctaggaaatacttcaactccctcatcatagacatctcaaatttttgtatcatgatcccactaaactcttcacaagtggatttgttagtagacccaaatatgatatcatcaacataaatttggcatacaaacaaatcttttgcaatagttttagtaaagagtgtaggatcggctttttcgactttgaagccattagtgataaggaaatctcgcaggcattcataccatggtcttggggcttgcttgagaccataaagcgtctttgagagtttatacacatggttagggtactcactatcttcaaagccgggaggttgctcaacatagacctcttccttgattgatccattgaggaagacacttttcacatccatttggtaaagcttaaagccatggaaagtagcataggcaagtaatatacgaattgactcaagcctagctacgggtgcataagtttcaccaaagtccaaaccttcgacttgtgaataacctttggccacaagtcgggctttgttccttgtcaccacaccatgctcatcttgctcgttgcagaatacccactcattcctcgtgaagttttgagttcctctttcattgtcagcaccaaatctgaatctcttagtgcattctccaccccccttatgaatgtcaccgaggatggagttgatggggtgatctcgttgaattgcttgatggactcttgggtgtcgcgatctttgaccctgaatttcttgatcatctttcttgtcttgatcaacttcatctcccccttgatccttgtcctcctcttgaggtggctcatcctcttgatgttcatcttcattgtcttgagcctgatcctcatcttccgttggagatgcttggttggaagatgacggttgatcttgtgcttgagtgggctcttcggattccttaggacacacatccccaatggacatgttccttagcgcgacgcacggaacctcttcatcatctagttcatcaagatcaacttgctccacttggtagccattagtctcatcaaacacaatgtcacaagaaacctcaactaatccagtggatttgttgaagactctatatgcccttgtgtttgagtcatatcctagtaaaaagccttctacagtcttagaagcaaatttagattttctacatcttttaacaagaataaaacatttgcttccaaagaatttaaaatatgaaacattaggctttttactggtaaggagttcgtatgatgtcttcttgaggatttggtgaagatatagccggttgatggagtagcaagcagtgttgattgcttccgcccaaaaccgatccggtgtcttgtactcatcaagcatggtccttgccatatccagtagatttcgattcttcctctcaactacaccattttgttgaggtgtgtagggagaagataactcatgcttcatgccctcatcctcaagaaatccttctatttgagaattattgaactccatcccattttcgcttcttattttcttgatccttaatccgaactcattttgagcccgtctcaagagtccctttaaagtctcttgggtttgagatttttcatccccgaatgtgatagctcgttggggatcttcgtttttctcataggaggagaacattctcttctcccctgtcatgtggtttgtgcatccgctatcaattatccaacttgagcctccggatgcataaaccttgccggatttgttagttaacacataagatgcatcaaaagttttaaatgaaatgctatgttcatttgatgcactaggagttttcttcttaggcaacttagcacgtgttggttgcctagaactagatgtctcacccttatatttaaaagcatggttagggccatagtgagacttcctagaatgaattctcctaattttgctctcggggtaaccgacagggtacaaaatgtaaccctcgttatcctgaggcatgggagccttgcccttaacaaagttggacaatttcttaggaggggcattgagtttgacattgcctccctgttggaagccaatgccatccttaatgccagggcgtctccctctatagagcatactacgagcaaacttaaatttttcattttctagttcatgctcggcaattttagcatctagtttagctatatgatcattttgttgtttaattaaagccatgtgatcatgaatagcattaatatcaacatctctacatctagtgcaaatagtgacatgctccgtggtagatgtagagggtttgcaagattttaattctacaaccttagcatgtaatatatcatttttacttctaaggtcgaaaatggaagcattgcaaacatcaagttctttagccttagcaagcaattttttattttcatttctaaggctagcaagagtaatgtttaattcttcaatcttagcaagcaaattatcattattatttctaagattgggaattgaaacatcacaaacatttgaatcaaccttagctaacaaattagcattctcatttctaaggttgtctatagtctcatggcaagtgcttagctcactagatagtttttcacattttctacttctagagcgtaagcattttttaactttaacatgcttcttattttctttaataaggaagtcctcttgggcgtccaagagatcatccttttcatggatagcactaatcaattcatttaatttctctttttgttgcatgtttaagttggcaaaaagagtacgcaaattatcttcctcatcactagcattatcatcgctagaggactcatatctagtggaggatttggatttaaccttcttctttttgccgtcctttgccatgaggcacttgtggccgacgtttgggaagagaaggcccttgttgatggcgatgttggcggcgtcctcgtcggaggaggagtcggaggagctctcgtctgagtcccactcgcggcatacatgggcgtcgccacccttcttcttgtagtatttcttcttctcctttcttctccccttcttgtcgtcgcccctgtcactgtcactagaaataggacattttgctataaagtgaccgggcttaccacacttgtagcaaaccttcttggagcggggcttgtaatctttccccctcctttgcttaagaatttggcggaagctcttgatgacgagtgccatttcctcattgtcgagctttgaggcgtcgattggttgtctacttgatgtagactcctccttcttctcctccgttgccttgaatgcaaccgtttgtgcttcggatgtggagggatcatctagctcattgattttctttgagcccttgatcatatactcaaagctcacaaaattcccaattacttccgcgagagtcattagtatatatctaggattaccacgaattaattgaacttgagtagggttaaggaaaataagtgatctaagaataaccttaaccatctcgtggtcatcccactttttgctcccgaggttgcgcacttggttcaccaaggttttgagccggttgtacatgtcttgtggctcttcccctttgtgaagccggaagcgaccgagctccccctcgatcgtctcccgcttggtgatcttggttagttcatctccctcgtgcgcggtcttgagcacgtcccaaacttccttggccctctttaatccttgcacgttgttatactcctctcgacttagagaggcgaggagtatagttgtggcttgggagttgaagtgctcgatttgggctacctcgtcctcatcataatcctcatcccctacggatggtacctgtgctccaaactcaacaacattccatatacttttgtggagtgaggttaggtgaaatttcatcaaatcactccacctagcgtaatcttcaccgtcaaaggttgacggtttgcctaatggaacagaaagtaatggagtatgtttagaaatgcgagggtagcgtaggggaatcttactaaacttcttgcgctcatggctcttagaagtaatggatggcgcgtcggagccggaggtggaaggtgatgaagtgtcggtctcgtagtagaccaccttcctcatcttctttttcttgtcgccactctgatgcgacttgtgggaagaggctttcttctccttccccttccccttgttgtgggactcttccgatgaagctttctcgtggcttgtagtgggcttgtcgccggtcttcatctccttcttggcgtgatctcccgacat

SEQ ID NO: 30849 - DNA, 266 bp, Zea mays
  Clone ID: MRT4577_128145C.1
gacgcgtacgcccacgcgtacgcggacgcatggaaacttttagactaactcaggtcctagcgtgtctgttctcttgaagtggcaggggagacttatcatctgcctaatgttttgatacccctttccgtactacttggctcgtaattaggtatgccatatacgcttgctattccatgtacatgtataaatcttacacattctactggcccaattaacatgagtatgcatattatctatatttgtgttcattatacgtattgctgata

SEQ ID NO: 30850 - DNA, 1023 bp, Zea mays
  Clone ID: MRT4577_128146C.1
ggtattgttacagcgcccgatagggcgcaaccttttctagttactataatggtagaccagatgtggtgtggcagcggactcccccgattttagtgtgctttataagtccgtatcacttaaggtttgccagtagccgcgataacattgaaccgaccgactatcacgaggtccaaaaaaataaccaccacaaaagtaccaaccaaccacaaataaagtttaagcggacacaccgcaccaactgacgataactctcggcagcaactgggccagccagcaactgcagcacactcaagactgacaacaaaccgcttagtccacctcctcgatcttggggccagggccgccgctgccggcaggggcgtcctcgtccatgccgccagcgccgcccatgtcttcacccgcgccctggtacatcttggcgatgatggggttgcagaggctctccagctccttcatcttgtcctcgaactcgtccgcctcggcgagctggttggcgtccagccagctgatggccgcgtcgatggcgtcctcgatcttcttcttgtcatcggccggcagcttggacgcaatcttctcgtccttgatcgtgttgcgcatgttgtaggagtagttctccagcgagttcttggcctccaccttcttcttgtgctcctcatcctcagacttgtacttctcagcgtcctgaaccatcttctcgatctcctccttggagagacggcccttgtcgttggtgattgtgatcttgttcttctgccccgttgtcttgtcctcggcagacacgttcaggatgccgttggcgtcgatgtcaaagcacacggtgatctgtggcacaccacggggtgcaggggggatgccggagagctcgaacttgcccagcaggttgttgtcgcgtgtccgcttaaactttatttgtggttggttggtacttttgtggtggttattttttggacctcgtgatagtcggtcggttcaatgttatcgcggctactggcaaaccttaagtgatacggtattcttcttttc

SEQ ID NO: 30851 - DNA, 3570 bp, Zea mays
  Clone ID: MRT4577_128147C.1
tcaatcaaaattcttagaatcaagaatatttagctcatgcctaagtttggtaaaagtttgctcatctaatggcttggtaaagatatcggctaattgttctttggtgttaacatatgcaatctcgatatcccccttttgttggtgatcccttaaaaagtgatatcgaatgactatgtgtttagtgcggctatgctcaacgggattatccgccatgcggattgcactctcattatcacatagaagaggaactttggttaatttgtaaccatagtccctaagggttttcctcatccaaaataattgcgcgcaacagtggcctgagacaatgtactcggcttcggtggtagaaagatcgacagaattttgcttctttgaagcccaagacaccagagatcttcccaagaactggcaagtccctgatgtgctctttctattaattttacaccctcccgtgtcgaggtcgagatgcccattagttcccatgggtgtcttgatgggcttggcatccttcatcccaaactttgtgagtatgtcttgaatgtactttgtttggctaatgaaggtgccctcttggagttgcttcaattgaaatcctaagaaatacttcaactcccccatcatagacatctcgaatttttgagtcatgatcctactaaactcttcacatatagattcgttagtagacccaaatatgatatcatcaacataaatttggcatacaaacaaatcatttgcaagtgttttagtaaagagagtaggatcgacttttccgactttgaagccattaacgataagaaaatctcttaggcattcataccatgctcttggggcttgcttgagcccataaagtgccttagagagtttataaacatggttagggtactcactatcttcaaagccgagaggttgctcaacatagacctcttccttgattggtccattgaggaaggcacttttcacgtccatttgataaagcttaaagccatggtaagtagcataggcaagtaatatacgaattgactcaagcctagatacgggtgcataggtttcaccgaaatccaaaccttcgacttgtgaatatcccttggccacaagtcgggctttgttacttgtcaccacaccatgctcatcttgcttgttgcggaagacccacttggttcctacaacattttggttaggacgtggaactaaatgccatacctcattcctcgtgaagttgttgagctcctcttgcattgccagcacccaatccgaatcttgaagtgcttcctctaccctgtgtggctcaatagaggaaacaaaagagtaatgttcacaaaaatgagcaacacgagaatgagtggttacccccttatgaatgtcgccgaggatggtgttcacggggtgatctcgttgaattgcttggtggacccttgggtgtggcggtcttggaccctcatcatcttccttgtcttgatcatggacatctcccccttgatcattgtcctcctcttgaggtggctcttcttgatcttcatcatcatcatcttgagcttgatcctcatcttgggttggtggagatgcttgcatggaggaagatggttgatcttgtgcttgtggaggctcttcggattccttaggacatacatccccaatgaacatgttccttagcgagacgcacggagcctcttcatcatctagttcatcaagatcaacttgctctacttgagagccgttagtctcatcaaacacaatgtcacaagaaacttcaactagtccagtggacttggtaaagactctatatggccttgtgtttgaatcatatcctagtaaaaagccttctacagccttaagagcaaatttagattttctacctcttttaacaagaataaagcatttgctaccaaagactctaaaatataaaacattgggctttttaccggtgaggagttcatacgatgtcttcttgaggattcggtgaagatataaccggttgatggcgtagcaagcggtgttgaccgcctcggcccaaaaccgatccgaagtcttgtactcgtcaagcatggtccttgccatatccaatagagttctattcttcttctccactacaccattttgttgtggcgtgtagggagaagagaactcatgcttgatgccctcctcctcaaggtagctttcgatttgtgagtttttgaactccgtctcgttgtcgcttctaatcttttttattcttaagtcgaactcattttgagcccgtctcaagaatccttttaatgtctcttgggtttgtgatttttccctgtctttctcaaaatgaacattggttagtcctaaaatgtgctctccctttagaagcttatgaagattcttcatcccaacatgggctagtcggtggtgccagagccaacacatgttagtcttagcaattaagcaagtgtcgagttcagctctatcaaaatctactaagtatagctgaccctctaacactcccttaaatgctactgaatcatcacttcttctaaagacagtaacacctttgaccaaaccttgatttccatcctcgaatgtgatagctctttggggatcatggtttttctcgtaggaggagaacatcttcttctccactgtcatgtggtttgtgcacccgctatcaattatccaacttgagcccccggatgcataaactcttatacataaaagcatgattagagctatgtgagacttcctagagtgaattctcctaattttgtgctcgggataaccggcagggtataaaatgtaaccctcgttatcctgaggcatgggagccttgcccttaacaaagttagataatcttttaggaggggcattgagtttgacattgcctccctgtttgaagccaatgccatccttaatgccagggcgtctcccactatagagcatactacgagcaaatttaaatttttcattttctaactcatgctcggcaattttagcatctaattttgctatatgatcattttgttgtttaatcatagcaatgtgatcatgaatagcatcaattttaatatctctacatctagtgcaaatagtaacatgctcaacggtagatgtagagagtttgcaagaatttagttcaacaatcttagcatggaaaatgtcattctcatctctaagattggaaatagaaacattgcaaacatctaattccttagccttagcaatcattttttcattctcatttctaaggctagcaagagaggcattcagtttttcaatcttagcaattgaactagcattatcatttctaagattgtcaactgaatcatcacaaacatttgatttctcaacctctagagcataagcatttttaaccctaacatgctttttgttttctttgattaggaagtcctcttggaagtccaagagttcatccttctcatgaatagcactaattaactcatttaatttctccttttgttgcatgtttaggttggcaaaaagcgtcaataaatcatcctcatcatcactagagctagcctcatcactagatgttgcatacttagtggaggatctagattttaccttcttcttcttgtcgtcctttgccat

SEQ ID NO: 30852 - DNA, 373 bp, Zea mays
  unsure (1)..(373): unsure at all n locations
  Clone ID: MRT4577_128148C.1
gcacggaacacggcncgagcagaatcaggccgcgaaggtcccttcatcggaacacgccggcggcagcgccgccgctccggtggccacgcaggcccacaccgaccccaaggaaccccacaaccacgaccaccgcgagctaccaaacacctaaccacggccgccgcgcacccgccagaggcagccgacgaaccaggcgcaccccacacccatgaccgacttcaccctcatcctactcacctacctcgcggacgtcaccggcctcgaccacgacgtcaccgatgagccccccggcaccggcagcgcccaggaccccggcaccggcgccgaccgcccagacgaccacctcccagggcgcgccaacggccagcacacc

SEQ ID NO: 30853 - DNA, 2487 bp, Zea mays
  Clone ID: MRT4577_128149C.1
ttagctcatgcctaagtttggtaaagttttctcatctactggtttggtaaagatatcgactaattgttctttggtgctaacataagcaatctcgatatcccccctttgttggtgatccctcagaaagtgataccgaatggctatgtgcttagtgcggctgtgctcaacgggattatccatcatgcggattgcactctcattatcacataggagagggactttggttaatttgtaaccatagtccctaagggtttgcttcatccaaagcaattgtgcgcaacaatggcctgcggcaatgtgctcggctttgacggtagaaagagctactgaattttgtttctttaaagcccaagacaccagggatcttcccaagaactgacaagtccctgatgtgctcttcctatcaattttacaccctgcccaatcagcatctgagtaacctattaaatcaaaagtggatcccttggggtaccaaagaccaaacttaggtgtatgaactaaatatctcaagattcttttcacggccctaaggtgaacttccttaggatcggcttggaatcttgcacacatgcataaggaaagcataatatctggtcgagatgcacataaatagagtaaagatcctatcatcgaccgatataccttttgatttacagatttacctcccatgtcgaggtcgagatgcccattggttcccatgggtgtcttgatgggcttggcatccttcattccaaacttggtgagtatgtcttgaatgtacttagtttggctgatgaaggtgccctcttggagttgcttcacttgaaatcctaagaaatacttcaactcccccatcatagacatctcgaatttttgaatcattatcctactaaactcttcacatgtagatttgttagtagacccaaatatgatatcatcaacataaatttggcatacaaacaaatcatttgcaatagttttagtaaagagtgtaggatcggctttgccgactttgaagccattagtgataaggaaatctcttaggcattcataccatgctcttggggcttgcttgagcccataaagcgccttagagagtttatacacatggttagggtactcactatcttcaaagtcgggaggttgctcaacatagacctcttccttgattggtccattgaggaaggcactcttcacgtccatttgataaagcttgaagccatggtaagtagcataggcaagtaatatacgaattgactcaagcctagctacgggtgcataggtttcaccgaaatccaaaccttcgacttgtgaatatcccttagccacaagtcgggctttgttccttgtcaccacaccatgctcatcttgcttgttgcggaagacccacttggttcctaaaacattttgattaggacgtggaacaagatgccatacctcattcctcatgaagttgttgagttcctcttgcattgctaacacccaatccgaatcccttaatgcgtcttccaccttgtatagctcaatagaagacacaaaggagtaatgttcacaaaaatgagcgacacgagatagagtggttaccccctcatgaatatcgccgaggatggagttcacggggtgatctctttgtatcgcttggtggactcttgggtgtggcggtcttggaccctcatcatcttctttgtattgatcattggcatcccccccttgatcattgtcctcctcttgaggtggctcctcttgatcttcattttcatcatcttgagcttgatcctcatcttgggttggtggagatgcttgcatggaagatgatggttgatcttgtgtttgtggaggttcaactagtccagtggacttgttaaagactctatatgcccttgtgtttgagtcataaccaagtaaaaagccttctacagccttaggagcaaatttagattttcttcctcttttaacaagaataaaacatttgctaccaaagactctaaaatatgaaacattgggctttttatcggtaaggagttcatatgatgtcttcttgaggattcggtgaaggtagagacagttgatggcgtagcaagcggtgttgattgcttccgcccaaaaccggtccgaagtcttgtactcatcaagcatggtcctcgccgtgtcaagtagagttctattcttcctctccactacaccattttgttgtggtgtgtagggagaagagaactcatgcttgatgttctggtcctcaagaaagccttctatttgagagttcttgaactccgtcccattgtcgcttctaatctttttgatccttaagccgaactcattttgagcttgtcttaagaatccctttaaggtctcttgggtttgagatttatcctgcaaaaagaacacccaagtgaagcgagaatagtcatccacaataacaagacaatacttactcccgccgatgcttatgtaagcgatcgggccgaatagatccatgtggagtagttcaagcgtcttgtcgatcgtcat

SEQ ID NO: 30854 - DNA, 393 bp, Zea mays
  Clone ID: MRT4577_12814C.1
agacaaagatattcctgtgcttatttatctagcgacagatacatagcaaagctatctacactaccatcggagtgcagtcaccaacaagcgcacgaatcagaagagatgaagctgatgcttctccagctggggttattccgacgacatcatggacctgcctcctgtacgaggatacctccatcgtgtctgtcctgcacatcatcgcgatgaagtttgcccatcaactgaaactcatcctctgcggcgaaaactgtgtcttgctaccatgctatacctcagtcatgcactgcctatggattgcgcaaatctacatgatgtgatatctggactactactatttgtatatttgtgttgggagaaacactacgacagcacgtcagtcgctctacccat

SEQ ID NO: 30855 - DNA, 652 bp, Zea mays
  unsure (1)..(652): unsure at all n locations
  Clone ID: MRT4577_128150C.1
ccggccgggatctcctatcagattctacctgattctctgctgaccaggcaacctggaacagacagcaaatccagccctaggcgtctgaaatccaaagcctagattttctgcatggatcaggcagaatggccaaggtcggtacaaaacaggcccaaagttcccatataatccattattttgaacgtcttcaagcctggtgcagtggtgagagctgtctcaccgagaccgcaggttcgaagcagcctcttcacgtttgcgggaaggcttgcctcaatgtatcccttcccaagaccacaaccccaatcatcattcaataaatactagatgctctacatgtaataccccagtgtaacacccatgatgaagagcaaggtgcccattgctttaattgacaaggggacaaccatccatgggacccaggtggaagacatgtgtatatgttccaagagtctggacggtgagagcaaaaagaaagaatatagagaaattaaagaaacagaacagacaggaaaggaaggtttcttcctcgtgtatctagatcatctagcctctgatttcatgtctttttttttttggctactcacatcgtcagattgatctncacagcaaccatgagtgtggcaggtgatatcagaggctagtcttctttgat

SEQ ID NO: 30856 - DNA, 468 bp, Zea mays
  Clone ID: MRT4577_128151C.1
tacctgcatcgctttgaccgcgggcaggttgatggcgacgacaaactcattgctcgcctgggggtaagacccaacgccctggatcaccagcagctgatgcttcacacggtccttggccggcacaggcacaggcgggacctgcaccacctggcccttgctcacggcgagcggaaacgccggtgccggcaccatactaaacgacgatgaccttggcagaccgaccttgccgtggggcaccagcgacgacaccatgcagtgcagtcatggcacgacctcgacggactccgcagtggacacatatccgaggccaggcgtgtccaggaccatggcaaacctgatgcgcaccgtccggagactatcgacgtcttctacgaagacgaagctagcgccgagccagtccgcatacgtgatgccatgtccggcgacacagcctgagctaccataagtgccacatgcggactacgacaa

SEQ ID NO: 30857 - DNA, 482 bp, Zea mays
  Clone ID: MRT4577_128152C.1
gggatctccttaacactgtgcttacttacgtaaatttggattgaccttaacatgagcaagataaagttgatttatttaccggccgtcaccccagcttttcacttacattcacgtggttttgcagtcagtatatcggatgaggagttgagggcaggtacgtatgtagttcgtaatacagattacagtgacttagttaatgtcgatgtaccggatcatgtgtcccttacttttgcaattgtgctcgatcattcccgatcaacttgtgcgtgcatctccaacgaaagacatgtgatctatttcctctgttcttttttgtttgttgtggtttagtttaaaaatgaactagcgagggtgcgacaaatattcgagaacggaggaattatttggcaagcatggaagtgttcatgcgtttttttggatgaaacacacaccgctaagccttgtccggttatttctatggcatatggattgaacacgattac

SEQ ID NO: 30858 - DNA, 3874 bp, Zea mays
  Clone ID: MRT4577_128153C.1
tcgcgatctagaactagtcccttctttctcaaattctctctccgcctccctgctccgatgccgcggtgacgcgtggtgcatgcgtgcgcgcgcgccttttcccctgcctggatcccccgtcctctctcgatcggttccagttaacactcgcagcctcgttctcgagtctcgactctcgacttgagtcgccagtggccacgcgcgccgggacacgggcgcgctttctcgctgccgcgccaaagcaggaaacagagcaacggccaggaaggactcacgcgcgaggcgaaaagcgaagcgggtgggagaagcgtgggcgcctgggctagtgctcccgcagcgagcgatctacggtagagttccggccgggcgcgcgggagaggaggaggtcggggggaggatccgatggccgggaacgagtggatcaatgggtacctggaggcgatcctcgacagccacacctcgtcgcggggtgccggcggcggcggcggcggcggggaccccaggtcgccgacgaaggcggcgagcccccgcggcgcgcacatgaacttcaacccctctcactacttcgtcgaggaggtggtcaagggcgtcgacgagagcgacctccaccggacgtggatcaaggtcgtcgccacccgcaacgcccgcgagcgcagcaccaggctcgagaacatgtgctggcggatctggcacctcgcgcgcaagaagaagcagctggagctggagggcatccagagaatctcggcaagaaggaaggaacaggagcaggtgcgtcgtgaggcgacggaggacctggccgaggatctgtcagaaggcgagaagggagacaccatcggcgagcttgcgccggttgagacgaccaagaagaagttccagaggaacttctctgaccttaccgtctggtctgacgacaataaggagaagaagctttacattgtgctcatcagcgtgcatggtcttgttcgtggagaaaacatggaactaggtcgtgattctgatacaggtggccaggtgaaatatgtggtcgaacttgcaagagcgatgtcaatgatgcctggagtgtacagggtggacctcttcactcgtcaagtgtcatctcctgacgtggactggagctacggtgagccaaccgagatgttatgcgccggttccaatgatggagaggggatgggtgagagtggcggagcctacattgtgcgcataccgtgtgggccgcgggataaatacctcaagaaggaagcgttgtggccttacctccaagagtttgtcgatggagcccttgcgcatatcctgaacatgtccaaggctctgggagagcaggttggaaatgggaggccagtactgccttacgtgatacatgggcactatgccgatgctggagatgttgctgctctcctttctggtgcgctgaatgtgccaatggtgctcactggccactcacttgggaggaacaagctggaacaactgctgaagcaagggcgcatgtccaaggaggagatcgattcgacatacaagatcatgaggcgtatcgagggtgaggagctggccctggatgcgtcagagcttgtaatcacgagcacaaggcaggagattgatgagcagtggggattgtacgatggatttgatgtcaagcttgagaaagtgctgagggcacgggcgaggcgcggggttagctgccatggtcgttacatgcctaggatggtggtgattcctccgggaatggatttcagcaatgttgtagttcatgaagacattgatggggatggtgacgtcaaagatgatatcgttggtttggagggtgcctcacccaagtcaatgcccccaatttgggccgaagtgatgcggttcctgaccaaccctcacaagccgatgatcctggcgttatcaagaccagacccgaagaagaacatcactaccctcgtcaaagcgtttggagagtgtcgtccactcagggaacttgcaaaccttactctgatcatgggtaacagagatgacatcgacgacatgtctgctggcaatgccagtgtcctcaccacagttctgaagctgattgacaagtatgatctgtacggaagcgtggcgttccctaagcatcacaatcaggctgacgtcccggagatctatcgcctcgcggccaaaatgaagggcgtcttcatcaaccctgctctcgttgagccgtttggtctcaccctgatcgaggctgcggcacacggactcccgatagtcgctaccaagaatggtggtccggtcgacattacaaatgcattaaacaacggactgctcgttgacccacacgaccagaacgccatcgctgatgcactgctgaagcttgtggcagacaagaacctgtggcaggaatgccggagaaacgggctgcgcaacatccacctctactcatggccggagcactgccgcacttacctcaccagggtggccgggtgccggttaaggaacccgaggtggctgaaggacacaccagcagatgccggagccgatgaggaggagttcctggaggattccatggacgctcaggacctgtcactccgtctgtccatcgacggtgagaagagctcgctgaacactaacgatccactgtggttcgacccccaggatcaagtgcagaagatcatgaacaacatcaagcagtcgtcagcgcttcctccgtccatgtcctcagtcgcagccgagggcacaggcagcaccatgaacaaatacccactcctgcgccggcgccggcgcttgttcgtcatagctgtggactgctaccaggacgatggccgtgctagcaagaagatgctgcaggtgatccaggaagttttcagagcagtccgatcggactcccagatgttcaagatctcagggttcacgctgtcgactgccatgccgttgtccgagacactccagcttctgcagctcggcaagatcccagcgaccgacttcgacgccctcatctgtggcagcggcagcgaggtgtactatcctggcacggcgaactgcatggacgctgaaggaaagctgcgcccagatcaggactatctgatgcacatcagccaccgctggtcccatgacggcgcgaggcagaccatagcgaagctcatgggcgctcaggacggttcaggcgacgctgtcgagcaggacgtggcgtccagtaatgcacactgtgtcgcgttcctcatcaaagacccccaaaaggtgaaaacggtcgatgagatgagggagcggctgaggatgcgtggtctccgctgccacatcatgtactgcaggaactcgacaaggcttcaggttgtccctctgctagcatcaaggtcacaggcactcaggtatctttccgtgcgctggggcgtatctgtggggaacatgtatctgatcaccggggaacatggcgacaccgatctagaggagatgctatccgggctacacaagaccgtgatcgtccgtggcgtcaccgagaagggttcggaagcactggtgaggagcccaggaagctacaagagggacgatgtcgtcccgtctgagacccccttggctgcgtacacgactggtgagctgaaggccgacgagatcatgcgggctctgaagcaagtctccaagacttccagcggcatgtgaatttgatgcttcttttacattttgtccttttcttcactgctatataaaataagttgtgaacagtaccgcgggtgtgtatatatatattgcagtgacaaataaaacaggacactgctaactatactggtgaatatacgactgtcaagattgtatgctaagtactccatttctcaatgtatcaatgtatatagaagttaacgtgcatgaggagataatgatgactcagaagttactaacgattaattcagttttagttccggtcccc

SEQ ID NO: 30859 - DNA, 1817 bp, Zea mays
  unsure (1)..(1817): unsure at all n locations
  Clone ID: MRT4577_128154C.1
ttggggtaccctcgggttcggccctagtccggtcgacattacgggcgccatgagcaacggactgctcgttgacccgcacgaccagaacgccatcgctcaagcactgctgaagctcgtagcagataagaacctgtggcaggaatgccggagaaacgggctgcgaaacatccacctctactcatggccggagcactgccgcacttacctcaccagggttgctgggtgccggttaaggaacccgaggtggctgaaggacacaccagcagatgccggagctgatgaggaggagttcctggaggattccatggacgctcaggacctgtcactccgtctgtccatcgacggtgagaagagctcgctgaacaccaacgacccattgtcgtcggacccgcaggatcaggtgcagaagatcatgaacaagatcaatcagtcgtcagcacttccgccgtccatgtcctcagtcgcagacggtgccaagaacgcaaccgaggccacgggcagcaccttgaacaagtacccactcctgcgccggcgccggcgcctgttcgtcatcgccgtggactgctaccaagacgacggccgtgctagcaagaagatgctgcaggtgatccaggaagttttcagagcagtccgatcggactcccagatgtccaagatctcagggttcgcgctgtccactgcgatgccgttgtccgaaacactccagcttctgcagctcggcaagatcccagcgaccgacttcgacaccctcatctgtggcagtggcagcgaggtctactatcctggcacagtgaactgcgtcgacgctgaaggaaagctgcgcccagaccaggactatctgatgcacatcagccaccgctggtcccatgacggcgcgaagcagaccatagcgaagctcatggccactcaggacggttcaggcgacactgtcgagctggacccggcgtctagtaatgcacactgcttcacgttccttatcaaagatcccaaaaaggtgaaaacggtcgatgagatgagggagaggctgaggatgcgtggtctccggtgccacatcatgtactgcaggaactcgacaaggctttcagttgtccctctgctagcatcaaggtcacaggcactcaggtatctttttgtgcgctggggcctatatgtggggaacatgtatctgatcactggggaacatggcgacaccgatcatgaggagatgctatctgggttacacaagactgtgattgtccggggtgtcaccgagaaaggttcggaagggctgctgaggagcccaggaagctacaagaaggacgacgtcgtgccgtctgagacccccttggctgcgtacacgactggtgagctgaaggccgatgagatcatgagggctctgaaacaagtctcaaagacttccagcggcatgtgaatttgctgctgggaaaggtcgatctctaatatattcttcttgttcataactcaaacggcagacacattttctccttttcttcactagtactacataaataacttgtgaacagtaccgagggtgtatatattgcagtgccaaataactaggaccctgctaattctactgctggctcccccctgtcttggtgaaatgtacccctacaaaattgttaactgtgtatttccctagtcgcagctaggcatactttgttttaaaaaaaagaacttcagtttcctgccnnnnnnnnnnnnnnnnnnnnnnnnnnnnnnnnnnnnnnnnnnnnnnnnnnnnnnnnnnnnnnnnnnnnnnnnnnnnnnnnnnnnnnnnnnnnnnnnnnnnnnnnnnnnnnnnnnnnnnnnnnnnn

SEQ ID NO: 30860 - DNA, 264 bp, Zea mays
  Clone ID: MRT4577_128155C.1
gctaacaataacataaaattaagagacaaaaaaaggagcagcgtcctctcgtgactctgctagaacgagaagcaagacaaacattttgatagatttgtggccatcaagacagtcaatggcgtgagctcatttgagctccttttgtcttgattcaaaatgctcttgttgcatgcaacattagaatttgttgtggtgggattttgcacatctagccagaatttggtaacctcatgtttcttttatcccaactgcataatagatgca

SEQ ID NO: 30861 - DNA, 254 bp, Zea mays
  Clone ID: MRT4577_128156C.1
tcggatccagctaaagcacggtgtattcccactgctcccattttccagtggctggttcaaaacaatggaggggcctatcaatgtccactattaccactgaatttccaagtcatacttgcttcaagctcttaaagcgccatctgaatcattcatggcggatccgtcctatctaactttagcggataacatcttatacacaaagtgcgcttcatcctttgctcatgcaaaaagattacttgtcaaagctgaatttg

SEQ ID NO: 30862 - DNA, 599 bp, Zea mays
  Clone ID: MRT4577_128157C.1
gcattgcaagaaggtacactttctcattgcatcagtatctgaacatgggtaaaaaaaaagaatcagcaaagatcaccaccgccgaggggtaaaaaatgaagtggagggaggaacgattggatgacgccatgacggccgtccaagtccaatcattgcatgcaccgcgaccgcttgaaccttagccgtcggttcttgagatcgaactcccacaggtgctcctgctgcaggatgttgccgatgacggacaccccgggccagtcgccctcctgcaggccgatgcacttcacgccgggcgccgcgtcaatcacgtagctcttgggcggcggctgtagccgcgcggaccccgcgaagtgcacggccagcgccggcacagccacggcgaggtcctcgcccgtcagcggcgacgtccagttgtagcagtagtcgaacgggtccatggccaccctgggcagcccgaccagcttcttgcccagcgccgccaccacggcgcggtacgccgggctcacgagcaccgtcaggctcgtcccggaatcgaggatggcgccgccgcccttctggacgtcccagacgaggcgcgggatcctgaggagctccccgtc

SEQ ID NO: 30863 - DNA, 303 bp, Zea mays
  Clone ID: MRT4577_128158C.1
gccaaaatacatgtgaatttgtcagcttatcttttctggcccctacacaaactacgggggaggttttttcagcatctagcggactcacagcatatcaccttccatgacctctattccctctactaccttaatcgtcatattatcctgactattctatacctcttctgataccttcgcttactactatcttccctactacatcatacactgacgattttactaccaaacctgatacgcacggctatttaaccatgtcacctcatacattcttatccctaatttgacgcttgattacaaatactt

SEQ ID NO: 30864 - DNA, 559 bp, Zea mays
  unsure (1)..(559): unsure at all n locations
  Clone ID: MRT4577_128159C.1
gcgccagggaccccaaccggctgcagcagctggacgtcgtcacgccngatgccttcgacaacgtctactacaagaacctcaacgccagccggggcgtcttcacgtccgacatggcgctcatcagggaccctacaacggcgccgatcgtcaggtgcttcgcggggagcaaggacgccttcttcgcccagttcgccacctccatggtcaagctcagcaaggtgcccaggaagccccccgggaacgtcggcgagatccgccgccgcagctgcttcaggaccaataacgccaagatgagcatccttgacgtcgacgatgccgtgggcagcttggcggcggcgtctgcccgttgaccaacaccaactattatattacctgctggctgtggctgctgtacgcctgtactgtactaggcgtcgtcggcgccttacgtgtatgtcctgtacgactgttatcttgctttggttggtggctgcatgtctgcatgctaagtttaagtacccacgcacgccacgatggcttcttgcttgttcaatcttatctatatatatatgttatgacc

SEQ ID NO: 30865 - DNA, 252 bp, Zea mays
  Clone ID: MRT4577_12815C.1
gtgactttgagtctggtcctgcatgattgggaacagccagggggaggagaattaagagttcttgatatagagtaagccagagaggggggcgggaggaggggctcagtgagtggagctggggtgaactggggaagataagcagagcatgtagttgaacacttagactcaaacacacaggccaccttgctgaatcagggacctttctcctgaacttggaacctgctggagactgtgcatggtccaaatgaataa

SEQ ID NO: 30866 - DNA, 283 bp, Zea mays
  Clone ID: MRT4577_128160C.1
aaaaaaaaaaaaaaaaaaaaaaaaaaaaataaaaaaaaaaaaaaaaaaaaaaagaaaaaaagaaaaaaaaaaaaagaaaaaaaaaaaaaaaaaaaaaaaaaaaaaaaaaaaaaaaaaaggaaacatcatatataaatctatactttagttactctacattgaaacctaatatttattctttggctgtacttaaatcactttatgtgtcctaaattcttaaacatatgtattggaaaacctttgctttatcccaagttaatcctattgtacataatacctattt

SEQ ID NO: 30867 - DNA, 169 bp, Zea mays
  Clone ID: MRT4577_128161C.1
tgttgtcttctatttttgggtcccagaaacagtgtgaatattaatgacgccctgccaataccaaattaagggaggtcctcaaaaaatcaacgagttgcctggcatcataaataaatgtagcggtgaatgctaaaatagaataaaaggcgaccccagtgaggggaacctg

SEQ ID NO: 30868 - DNA, 2045 bp, Zea mays
  unsure (1)..(2045): unsure at all n locations
  Clone ID: MRT4577_128162C.1
gcccaccacggccagttttagtccatctcgggcggcaacaacccgggggggggcgaccatcgcggcacgcagcgcctctacatccggctcaacaccctccactacctgctcagccacatccaggcgctcgacaaatccctctccttcttctcgcacggcgggtgcgcgtcgccggcgtcggtctcgaaccgccagctggcgccgtccggccgtttcgaccgtgcgcgcgccgcggcgcagtcggccatcgtccacgtcgccgaggtcgccgcgtaccgcctcgtcttcctggactcgcaccactccttctacggngggctctacgtgcggggcgtttttttttttttttttttttttttttttttttttttttttttttttttttttttttttttttttttttttggggggagggggagatcccctgtctaacaaaagggttgaattttgagcgattctggtcctgcaaatgctgggacaatccaaaaaggagagggggtttataacacccccaaatacaaattgcatattgacaaaagaataatattgaaatactgcatctattgacaagtgccacaaaaaatgtcatactaaaatactgatctggtgaccatgtaatgttttacaacatacgaaagaaatgtaaactggttttcactcttgcgttctcccctcctagcgggaggagaggtgtgttcactgttcagtagcaatccaccatttcatcctgcaaaaccctgcccaaatctggttctggtcctcataaaccctccccttgtcaccggatcggcctccttggcgctgcagttccagtaagcgcccaccgtccccaggatcggcatgtcatccgggctcgggctcggggacctcgacctcctcggagttgagctggccgacgatatcttgatgtcctccacggtgagggccccaacggtcgggcggtcctcccggctgatcggcgagtaggaccggacggagttgctctcgggcgtccccgaggaaccgagccacgtggagaggctggcgtccacggaggcctcctgcttgctcggcgtgctgggggtgtagcctgagaccgccggcctctcctccttcgtcttggccgatggtagctcggcgaggaggtcgtccatccggttctcttgccccacagtgacgttctacttgtccgagggcttgagcgcggcggcagcccggggcttgggttccttccaccgggcgaggttgaggttctctacggagccgagcaccgcgggggcctccgccgctgggggcacgacgggcgccactacctggccgaaggaatttttggatgtcttgccaaacggaagcaggaagagcgactcgcacgcatcctcctcgctgcgtccgatgccgaggaggccgtgctccacttcgtcctcgtcgccgtcgatcgcgcactcatcaagcccgtctgcgtcttcctcctcgtcgtcctcgtcgccttcgaactcgtcctcctcggcgtcctcgtagtcgctgtcggtgtcgctgccggcgcagttgctgtacctgtggttcaaggggaaggcctcggacttggcacactccggcaccagcatccaccccttctccctgctagccccaccaccatcctccggatcggctccctcgccgtcgtcctccgggatcggggccgcctcgaaggtggtgacgttggggtcgaacgtcaccttcttcttcacgacggctaggcacatgccgtccgtggagtccctcaactcgaggagcgtcgctagaagcggcgcggcggcggaggccgcggcctccccatccacatcaaccttcttcggtgtaacccgcggcacagcccgggcgcggccgttgggggactgtgaaggcgaccgcttgcggcggcggcggcgctccttggcccccccgaagcagccaaggaagcagcccatcggggaccgcgagcgacggcgagaggcagcacaaagcgagtgggaggggagcgcggggcagtggtgattagtgatgaggaggcggcatctgggtctggtgagcgggaaggggaggaaaac

SEQ ID NO: 30869 - DNA, 882 bp, Zea mays
  unsure (1)..(882): unsure at all n locations
  Clone ID: MRT4577_128164C.1
gggaccctcgaggccggccgggaaaaaggatgctttccgcttcctatttcggattgggatcatcagcggctgtagcgtggacccgacgggggtgcccggaccacatccctatttcatcttggtaccccgtccgtctccgatttcagaagcacggcgggctccccggcagcctcaaccgagcagaaagctgagttctaccccagaaccgaggcatggaggacgaagaaaacatcgagggagaactgttgctcgtggagtcacaactccacgacatccaagaggagttgtatgaacgccaggcacagttgaaggctttgctcgaagcatctaaattgaccagaaatacaacaattaacacatcttcagttgctccggaagattggtctgggagcttcccatgggatctggaggctgacgataccaggttcaatatatttggcatttcctcctaccgatcaaatcaacgagaaataattaatgcagtcatgagtggaagagatgttctggtcataatggcagctggtggagggaagagtctatgttaccagctcccagctgtacttcgtgatggaattgcactggttgtcagtcctttactttcccttattcaggaccaggtcatgggactgtcagctttaggtataccagcatacatgctaacttcaactaccaacaaggaagttgagaagttcatctataagacacttgantaaggagaaggagaactaaagatattatatgtgacacctganaagatctcaaaaagtaaaaggttcatgtctaagctcgagaaatgccatcatgccggtcgtctttctctgattgcaatagatgaggctcactgctgtagccaatggngtccatgattttcgtcctgactac

SEQ ID NO: 30870 - DNA, 366 bp, Zea mays
  Clone ID: MRT4577_128165C.1
cagattgtgaaagtgagatgtcggtgcaaactgatattcctatgcatgtgcacacattactgaacacatgactgttatacaacaatttgtattcctaattgattctgtggttggtacttatccatacttagaattttactgaaaatttattaaaggttaattgaggatccataaatatcattctaattatgttcatatgcttgatcttggaagtaatttcttttttgacactttaatacattttgttcccaatccgtagaaagcaaccaactcttttatgaacctaatagcaaagttttctcacaggaagagatgttattaagctaatgcaactttattataatataaaaaaatgaaatcaaaagc

SEQ ID NO: 30871 - DNA, 2808 bp, Zea mays
  Clone ID: MRT4577_128166C.1
ccgggccgaaccaacgcgtccggggatgggaaacataagcggttgtagcgtttacccgacgggggtgcccggaccacatccctggttcatcttggtaccccgtccgtctccgatttcagaagcacggcgggctccccggcagcctcaaccgagcagaaagctgagttctaccccaggtatgggaataaatttcggcggatggggaggaaatttgtgcgtctccgctggctggcttgctggcattgggaagggccctattactcgaaccgaggcatggaggacgaagaaaacatcgagggagaactgttgctcgtggagtcacaactccacgacatccaaggacaaattaaaacattactcgatcgccaagaggagttgtatgaacgccaggcacagttgaaggctttgctcgaagcatctaaattgaccagaaatacaacaattaacacatcttcagttgctccggaagattggtctgggagcttcccatgggatctggaggctgacgataccaggttcaatatatttggcatttcctcctaccgatcaaatcaacgagaaataattaatgcagtcatgagtggaagagatgttctggtcataatggcagctggtggagggaagagtctatgttaccagctcccagctgtacttcgtgatggaattgcactggttgtcagtcctttactttcccttattcaggaccaggtcatgggactgtcagctttaggtataccagcatacatgctaacttcaactaccaacaaggaagttgagaagttcatctataagacacttgataaaggagaaggagaactaaagatattatatgtgacacctgaaaagatctcaaaaagtaaaaggttcatgtctaagctcgagaaatgccatcatgccggtcgtctttctctgattgcaatagatgaggctcactgctgtagccaatggggtcatgattttcgtcctgactacaagaatcttggcattttgaaaattcaatttcccagtgttccaatgatagctttaactgcaactgcaacaagtaaggtccaaatggatttaatggagatgctccacatcccgagatgcatcaagtttgtcagcacagttaacaggcccaaccttttttataaggtgtctgagaaatcgccagttggaaaggttgtcattgatgagatcacaaagtttataagtgaatcatacccaaataatgagtctggaattatatactgcttttcaaggaaggaatgtgaacaggttgcaaaagaactgcgcgaaaggggtatttcagcagattattatcatgcagacatggatatcgttaatcgtgagaaaattcatatgcgttggagcaaaggtaaatcacaggtcatcgttggaacagtggcatttggaatgggaatcaacaaaccagatgttcgatttgttattcatcacagccttagcaagtctatggagacatactaccaggagagtggtcgggccggacgggatggattaccttcagaatgtattttgtattatcggcctggtgatgttccacggcagagttcaatggtgttctatgaaaactgtggcctgcaaaatctttatgacatcgtgcggtattgtcagtctaagaggagttgtcgtcatggtgcattctttcgccattttggagaggtccctcaggactgcaacggaatgtgcgacaattgtgcttccactattgagcagaaggatattgatgtcacctgtatgatttattttgcgtcagtttaaaaattacaacaaatgaccaacatttattcactttatttcagggggaaaatgttttttatttcatgatattctcacagtaattttttctacttcctgtttagaccatacaaaaattatagtttcacttcttcacgatatgcaacttaatgatcaaagagctacactactacagctggtggataagttcaagtcaaagtggaaaggtttaggtagtttcaatgaagctgttgatcttagaaaagaagaagttgagcagttgatagttaaccttatactcgacaatgttttgaaagaagaatttcagcacacagcatattcaaccaacgcttatgttaccttaggagcattgtggaagccagcactacaaggaaacagagtagtcaagcttgagattgctattgcttctaaagatagagatgttagatccaagggcgcaaaacgaggtcgcatgagtgatttggaagccaaactagatgaactgcgtagggatctgtcatccacgggtagcgatgccatatttccccatgcagttcttactgcgcaacaaatttcactactgagcagccagaagccaaccactccagctgagctagaaaaggttatagggaaggtgaagacaaggaagtacggcagcaagatcattgagctgatgaggtcacatgacaattcaggaagtggccgaggcaaggaggctggcgatgaacacagagctaagaagatcaaaacgaaggatgaggatgttgtttgtgttgagagtagcgaggaagaatagaatatgcccttcacatacttggctttttagtctatcatctcatggttaattattttgccaatcatttcctccgacgtcatctttctgtaatttagactttcacggattaatgcacagtcatatttcttacagagaaagcctcgagcatccttttgaccggttcatagtcttttgcttcggtagctttgtatcttgttgatgatcggattaatgtgcgaatacttgggattaatgtgcgaatactttgtgtcaaaaaaaaaaaaaaaccccacccc

SEQ ID NO: 30872 - DNA, 592 bp, Zea mays
  Clone ID: MRT4577_128167C.1
gtaaattcgtgatgaaattctggaccaccagtacatttttcaggatctgaaactaacagaggcagaagaaaaggagttgagatacaagatgaagatatatgaccttgtcaaggaacatgttgagactcctgatgatgttggtgcgtacaaaatgcctgaagcttatgacatgggcgaaaatgtcaatcaagagaagagattcgctgtggccatgcaacggtacaaagatcctaaggccaatgataaaatgaacccttttgctgaacaggaagcatgggaagaacaccaaataggaaaatcgaaactgcaatttggatccaaagataagaagccgtcttcagatgagtatcagtatgtatttgaagatacgattgattttgttaaatcatcagtcatagaaggaacccagcctgaagatgattcagataaagaagacttttaagcaaaagatattttgaaaagggagctccaaaatgagcgaaagacactttcaattttcacaattagggatgaactgcttaaggctgttgaagaagttcagagccagtgatgagattaatgtccccagccaccatccaaggaccatcacatg

SEQ ID NO: 30873 - DNA, 291 bp, Zea mays
  Clone ID: MRT4577_128168C.1
aaaaatgattcttaaacttaaaaattcaacccccaatacctcttcaatctttatttaaaactttacaatttggttgacccatatttttcacatccaggctcacaaaatcaattttaaaacccattcccttattcacacttttttttttttaaaacccccattgccccacttatttaacatcccaaaaacaaatcactcacacccccattcccatttgctaacaaaaactattttgaatgcaatgcactctacttacaacctaggtaacccccccctccttttttttcccat

SEQ ID NO: 30874 - DNA, 212 bp, Zea mays
  unsure (1)..(212): unsure at all n locations
  Clone ID: MRT4577_128169C.1
gcgatggtacctcgagncgggcgggctggacgtctgtcgatgtgatagaaatagccggccgacaagcccatcgtactccacgtctcctgaagctcctgcaggacactaaggacgcgggcgaggcgaatcagctccagtcggcgacgctactggacgaccccgacaaacttgccatagcctctgcggccgctggccgccgatgacgtgaggcc

SEQ ID NO: 30875 - DNA, 469 bp, Zea mays
  unsure (1)..(469): unsure at all n locations
  Clone ID: MRT4577_12816C.1
gggaaggacaaacatggggggatgttttaggggtagataaacggggggtgacagaacaaagttccaaaccatacccctaaataaagggttagggggtcccttaaaaatgggccaaggggccagggcattaaaaggtccttaaaaagaactttttcccttttggttagaactacccaggggggggaggaaaaagggggttcccaggtggtggttttaggggggggtaggaacgcttcctccgggctggggaagaatggggttaattttgtngccgttcttcattttcaggttattagggggttttttgccggaaaacctgggggcataaaacaggaatggaaagggatttatgttcaaaaagtggggggggaaaaaggggttaataaagttttttaaatgggggggaacttgggggggacccttggggggacgcttggggggaccccttggcgggcccctgggccgcccc

SEQ ID NO: 30876 - DNA, 287 bp, Zea mays
  unsure (1)..(287): unsure at all n locations
  Clone ID: MRT4577_128170C.1
gcagccgcgacgaagcgggaccacaaagggacgccgcgggggggggggggaaacacangagagggggngaacacaagccggggggagaaaaaaggggaagggacagcaaanacagacaaaaggaacgaggaaccaattttttttttttctcctgccggttggccacgaccatgttggaacgacctgataacagcgagcccagggggggttatacacctcccaccaacctacaactgctgcaccaggaagagaagcgaaggggccagaccgatgctgatgagcctggg

SEQ ID NO: 30877 - DNA, 398 bp, Zea mays
  Clone ID: MRT4577_128171C.1
tcgtttagatcgcgagcgggcggccttttttttttttttttttttttttttttttggttttttttttttttttttttttttttttttttttttttaaaaaattaaacgggggggatttttttattaaaaccattatttgaaatgggactttataaggattttttggtacaaggggtgaaaaaaaacttggttttaaaaaggttggcgttctaaaaattatttttgattaagggcaaattttttccaggggaaaaaaaactattttgcctgtttaatgagtttcttttattaaaaaggttaaggacaaatttttcgttacgattaaaaaaagatttgggaacttaaattttgaatgtgttatacaatatcaattttacaaaatttattttagggggaac

SEQ ID NO: 30878 - DNA, 4642 bp, Zea mays
  Clone ID: MRT4577_128172C.1
ctaagggtttgcctcatccaaagtagttgtgcgcaacaatgacctgcggcaatatactcggcttcggcggtagaaagagctacggaattttgcttctttgaagcccaagacaccaaggatcttcccaagaactggcaagtccccgatgtgctctttcttttgatcgacagatttacctcccgtgtcgaggtcgagatgcccattggttcccatgggtgtcttgatgggcttggcatccttcatcccaaacttgtttagaatgtcttgaatatacttcgtttggctaatgaaggtgccctcttggagttgctttacttgaaatcccaagaagtacttcaactcccccatcatagacatctcgaatttttgtgtcatgatcctactaaattcctcacatgtagattcgttagtagacccaaatatgatatcatcaacataaatttggcatacaaacaaatcattgtcaagagttttagtaaataaagtaggatcgacctttccgactttgaagccattagtgataagaaaatctcttaggcattcataccatgctcttggggcttgcttgagcccataaagtgccttagagagtttgtaaacatggttagggtactcactatcttcaaagccgggaggttgctcaacatagacctcttctttgattggtccattgaggaaggcactcttcacatcgatttgataaagcttaaagccatggtaagtagcataggcaagtaatatacgaattgactcaagcctagctacgggtgcataggtttcaccgaaatccaaaccttcgacttgtgagtatcccttggccacaagtcgggctttgttccttgtcaccacaccatgctcgtcttgcttgttgcggaagacccacttggttcctacaacattttgattaggacgtggaaccaaatgccatacctcattcctagtgaagttgttgagctcctcttgcatcgccactacccaatccgaatcttgtagtgcttcctctatcccccttatgaatgtcgccgaggatggtgtcaacggggtgatctcgttagattgcttggtggactcttgggtgtggcggtcttggaacttgttcatcttcctcatcttgatcgtgggcatctcccccttgatcattgcactcctcttgaggtggctcaacatcttgatcttctccttcatcattttgagccttatcctcatcttgagttggtggagatgcttgcatggaggaagatggttgatcctgtgcttgtggaggctcttcgggttccttaggacacacatccccaatggtcatgttccttagcgcgacgcacggggccttctcatcatctagctcatcaagatcaacttgctctacttgagagccgttagtctcatcaaacacaatgtcacaagaaacttcaactagtccagaggacttgttaaagactctatatgcccttgtgtttgaatcatatcctagtaaaaagccttctacagccttaggagcaaatttggattttcttcctcttttaacaagaataaagcatttgctaccaaagactctaaaatatgaaacattgggctttttaccggttaggagttcgtatgatgtcttcttgaggattcggtgtagatacaaccggttgatggcgtagcacacggtgttgaccgcctccgcccaaaaccgatccgaagtcttgtactcatcaagcatggtccttgccatgtctagtagagttcgattcttcctctccactacaccattttgttgtggcgtgtagggagaagagaactcatgcttgatgccctccttctcaaggaagccttcgatttgtgagttcttgaacttcgtcccgtttcgcttcttattcccgctgatgcttatgtaagctatcgggccgaataggtccatgtgtaggagctcgagtggcctgtcagtcgtcatgatgttcttgtgtggatgattaacaccaacctgctttcctgcctgacatgcactacaaattctgtctttctcaaaatgaacatttgttagtcccaaaatgtgttctccctttagaagcttgtgaagattcttcattccaacatgtgctagtcggcgatgccagagccagcccatgttagtcttagcaattaagcaagtgtcgagttcaactctaccaaaatctactaagtatagctgaccctctaacactcccttaaatgctactgaatcatcacttcttctaaagacagtaacaccttgattcccatccccgaatgtgatagctcgttggggatcttgatttttctcataggaggagaacatcttcttctcccctgtcatgtggtttgtgcacccgctatcgatgatccaacttgagcccctggatgcataaacttggcaactacccttatacataaaagcatgattagggccagagtgagacttcctagagtgaattctcctaatcttgtgctcgggataaccggcagggtacaaaatgtaaccctcgttatcctgaggcatgggagccttgcccttaacaaagttagataattttttaggaggggcattaagtttgacattgtctcccttttggaagccaatgccatccttgatgccagggcgtctcccactatagagcatgcttctagcaaatttaaaattttcattttctaagtcatgctcattaattttggcattaagttgagctatgtgatcatttcgtttcttaattaaagctagttgatcatgaatagcattaacattaatgtctctacatctagtacaaatgaaaacatgctcaacggtagatgtagagggtttgcaagattttagttcaacaatcttagcatgcaaaatgtcattttcacttctaagattggaaatggtaacattgcaaacatctaagtccttagccttagcaattaatttttcattctcatttctaaggctagcaagagagacattcaattcttcaatcttagcaagtaaactaacattatcatctctaagattgggaattaaaacatcacaaacatttgaatcaaccttaacatgcttcttgttttctttaattaggaagtcctcttgagagtccaagagttcatccttctcatgaatagcactaattaattcatttaatttttccttttgttgcatgtttaggttggcaaaaagagtgcgcaaattatcctcctcatcactagaattgtcttcatcactagaggatgcatatttagtggaggatcttgattttaccttcttccttttgccggtctttgccatgaggcacttgtggccgacgttggggaagaggagtcctttggtgacggtgatgttggcggcgtcctcgtcggaggaggagtcggtggagctctcgtcgaagtcccactcgcgacacacatgggcatcgtcgcccctcttcttgtggtacttcttcttttctctcctcttgcccttcttgtcgttatccctgtcactgtcacttgataatggacattttgcaataaagtgaccgggcttaccacacttgtagcacactttcttggagcgggacttgtagtccttccctctcctttgcttgaggatttggcggaagctcttgatgatgagcgccatttcctcgttgtcgagcttggaggcgtcgatggggagtctacttgatgtagactcttccttcttctcctccatcgccttgaatgcgaccggttgtgcttcgggcgtggaggggccatcttgctcgatgattttctttgagcctttgatcatcaattcaaagctcacaaatttttctattacttccttgggagacattagtgtgtatctaggatcaccacgtattaattgtacttgcatagggttaagaaaaacgagtgatctaagaataaccttgaccatttcatggtcatcccattttttgctcccgaggttgcgcacttggttcaccaaggtcttgagccggttgtacatctcttgtggctcctccccttggcgaagccggaagcgaccgagctccccctcgatcgtctcccacttggtgatcttggtcacctcgtctccttcgtgcgcggtcttcagtacgtcccaaatatccttggcactcttcaatccttgcaccttgttatactcctctcgacttagagaggtgaggagtatagtggtggcttgggagttgaagtgcacgatttgggccacctcgtcctcatcataatcttcatcccctacggatggtacctgtacaccaaactcaacaacatcccatatgcttttgtggagtgaggttaggtgatatctcatcatatcactccttctagaataatcttcaccgtcaaatgtcggtggtttgcctaatgggacggaaagtaatggagtatccttaggaatgcgaggatagcgtaggggggtcttactatacttcttgcgctcttggcgcttagaagtgacggacgcggcgtcggatccggatgtagagggcgaggaagaatcagtctcgtagtagaccactttcttcattttcttcttcttctcgccactcttgtgcgatcgaatgcgtgaaggggatccatccttcttgttgttggcggactcccttgatggagccttcccgtggcttgtagcggacttctcaccgccgatcaccatcttcttggcgtcatctcccgacat

SEQ ID NO: 30879 - DNA, 1848 bp, Zea mays
  Clone ID: MRT4577_128173C.1
gaacgtgaggagaccaactttgatttccccacaatatttttcacatttaatttcgcaacatcgtagagtgtggagtgctcctttctgtatacaccgctttcaatggaatactgtcaaaaccaattcaacggggctctttaaattccaaatcaccaaataatactacagttgctaaattacattaatataagggcagaagtaagaatggtaatctcaggatagctgcttgctttcctaaaaaaatgaaagtagaattgcccacacgaataactgacggactcttggcgaacgcatccaacatgcccaatcatgtgctcgtcttttgttgtcatatacttttctgctagaataaatggctcagactcatcctcaagcctcgcctctcttaactcatcagagttagcaacctccccctcaagctcttgatttcttagtgttaacagctcgtcaacatcgccaatatgtttgagcctcttgtagagcagatgagtagcttacgatacacatgttgcttgtcgtggtgacttctttttaaatttcttcctcaatttgtccattcccatgaatttcatcttccctccacaatgaaatctgccaaatttgtcttcgtcatcaccaacttcttgatcaccctcccctacctgttggtcgtcctcaaagtcctcctcaaccggcgcaactgatagtcgcctagagggggggtgaatagggcgaaaccccttatgtatgtcgccgaggatggtgtcgatggggtgatctcgttggattgcttggtggactcttggatgtggcggtctttgttcctcatcctccttgtcttcctcaattgcatctcccccttgatcattgccgtcatcttgaggtggctcattcgcttgatcttctacttcatcaacttgagcttcatcctcattttgagttggtggagatgcttgcgtggaggaggatggttgatcttgtgttcttggaggctcttcggattccttaggacacacatccccaatggacatgttccttagcgctatgcatggagcctcttcatcacctatctcatcaagatcaacttgctctacttgagagccgttagtttcatcaaacacaacgtcacatgagacttcaactagtccagtggacttgttaaagaccctatatgcccttgtgtttgagtcataaccaagtaaaaagccttctacagttttaggagcaaatttagattttctacctcttttaacaagaataaagcatttgctaccaaaaactctaaaatatgaaatgttgggctttttaccggttaggagttcatatgatgtcttcttgaggattcggtgaagatataaccggttgatggcgtagcaagcggtgttgaccgcttcggcccaaaaccgatccgaagtcttgtactcatcaagcatggttcttgccatgtccaatagagttcgattcttcctttccactacaccattttgttgtggtgtgtagggagaagagaactcatgcttgatgccctcctcctcaaggaagccttcaatttgagaattcttgaactccgtcccgttgtcgcttctaattttcttgatccttaagccgaactcattttgagcccgtctcaagaatccctttaaggtctcttgggtttgagatttttcctgcaaaaagaatacccaagtgaagcgagaataatcatccacaataactagacagtacttactcccgccgatgcttatgtaagcaatcgggccgaataggtccatgtgtaggagctcgagtggcctgtcggttgtcatgacgttcttgtgtggatgatgggctccaacttgctttcctgcctggcatgcgctacaaatcctg

SEQ ID NO: 30880 - DNA, 313 bp, Zea mays
  Clone ID: MRT4577_128174C.1
gctcggaattcggctcgagggcgaatgtcaccccccgtttctgttggcccccacagcggaaccaaaacggagggttcattagcgccagagggggggatctaagcaggcgaacaacttgcgaccccgacggaagcccgacaagacaaccggaggcgtgacgagacagcatcggctcaacgcgcgcgcgccacatgaggggcgccgaaccgcacagaggccatcgctgaccatctaggcccgatgacagagaaccccgtgcaccctagagaaccctcgacaccagatcgggccggggcaacaccgacgaagaaac

SEQ ID NO: 30881 - DNA, 371 bp, Zea mays
  Clone ID: MRT4577_128175C.1
attcaaaggaaacggggggggccagattaaaaaccctttttgggttacaaggcctgatcctggggaacaggcagttttggggatgttgcatttttggggccccaggtccggttactggggggggggaaaactaaggccttttcaaattgtttttccttttccgggaaaaggttttccttgttggggggggcccaaaagccacccccatttataagcttgggggaaacagccccaccttgtttgcaaaaaaaaaaatttgatagcgagatcctgagaggatctgggggtttacccatgtcccaaatttcatttttcacgttttttatgcaaagctaaaagtcccctccctaaatccatttgggggggccctt

SEQ ID NO: 30882 - DNA, 4728 bp, Zea mays
  Clone ID: MRT4577_128176C.1
ctaagatggagagtggcttggagcgacggtaaaggatgagttacggagtggaagcctttgtcttcgccgaagactccaatttcctttcaatacacctatgacttggtttgaaataaccttttgatcgacggatttacctccttcgtcgagatcgagatgcccattggttcccatgggtgtcttgataggtttggcatccttcattccaaacttgcttagaatatcttgagtatacttcgtttggcttagaaaagtgccctcttgaagttgcttcacttgaaatcctaagaaatatttcaactcccccatcatagacatctcgaatttttgtgtcatgatcctactaaattcttcacatgtagactcgttagtagatccaaatataataccatcaacataaatttggcatacaaacaagtcattttcaagagttttagtgaagagtgtaggatcggcttttccgactttgaatccattagtgataagaaaatccctaaggcattcataccatgctcgtggggcttgcttaagcccataaagcgccttagagactttatacacatggttagggtactcactatcttcaaagtcggaaggttgctcaacatagacctcttccttgattggtccattgaggaaggcactcttcacgtccatttggtaaagcttgaagccatggtaagtagcataggctaataatattcgaattgactcaagcctagctacgggtgcataggtttcaccgaaatccaaaccttcgacttgggagtatcccttggccacaagtcgggctttgttccttgtcaccacaccatgctcgtcttgcttgttgcggaagacccatttggttcctacaacattttgattaggatgtggaactaaatgccatacctcattccttgtgaagttgttgagctcctcttgcatcgccaccacccaatccgaatcttgtagtgcttcctctaccctgtgtggctcaatagaggaaacaaaagagtaatgctcacaaaaatgtgcaacacgagatctagtggttacccccttatgaatgtcgccgaggatggtgtcgacggggtgatctcgttggattgcttggtggactcttgggtgtggcggtctttgttcttcatcctctttgtcttggtcatttgcatctcccccttgatcattgccgtcatcttgaggtggctcatttgcttgatcttctatttcatcaacttgagcttcatcctcgttttgagtcggtggagatgcttgcgtggagaaggatggttgatcttgtgcatttggaggctcttcggattccttaggacacacatccccaatggacatgttccttagcgcgatgcacagagcctcttcaatacctatctcatcaagatcaacttgctctacttgagagccgttagtctcatcaaacacaacgtcataagaaacttcaacttgtccagtggacttgttaaagactctatatgcccttgtgtttgagtcatatcctagtaaaaagccttctacagtcttaggagcaaatttagattttctacctcttttaacaagaataaagcatttgctaccaaagactctaaaatatgaaatgttgggctttttaccggttaggagttcataagatgtcttcttgaggattcggtgtagatataaccggttgatggcgtagcaagcggtgttgaccgcctcggcccaaaaccgatccaaagtcttgtactcatcaagcatggttcttgccatgtccaatagagttctattcttcctctccactacaccattttgttgtggtgtgtagggagaagagaactcatgcttgatgccctcctcctcaaggaagccttcaatttgagagttcttgaactccgtcctgttgtcacttctaattttcttgatccttaagccgaactcattttgagcccgtctcaagaatccctttaaggttttcccgccgatgcttatgtaagctatcgggccgaatagatccatgtgtaggagctctagtggcctgtcggtcgtcatgatgttcttatgtggatgatgaactccaacttgcttccctgcctgacatgcgctacaaatcctgtctttctcaaaatgaacatttgttagtcccaaaatgtgttctccctttagaagtttgtgaagattcttcattccaacatgtgctagtcggcgatgccagagccaacccatgttagtcttagcaattaagcaagtgtcgagttcagctctatcaaaatctactaagtatagctgaccctctaacactcccttaaatgctattgaatcatcactccttctaaagacagtaacacctacatcttgatttccatccccgaatgtgatagctctttggggatcctggtttttcttgtaggaggagaacatctccttctcccctgacatgtggtttgtgcacccgctatcgatgatccaacttgagcccccggatgcataaaccttgccggatttgttagttaaaacataagaggcatcaaaggtcttaaatgaaatgttagaatcatttgatgccttaggagttttcttcttaggcaattttgcatgggttgattgcctagaactagatgtctcacccttatatataaaagcatggttagggccagagtgagacttcctagaatgaattctcctaattttgctctcgggataaccggcagggtacaaaatgtaaccctcgttatcctgaggcatgggagccttgccctttacaaaattagacaatcttttaggaggggcattaagtttgacattgtctcccttttggaagccaatgccatcctttatgccagggcgtctcccactatagagcatgcttctagcaaatttaaatttttcatcttccaagtcatgctcactaattttagcattaagttgagctatgtgataattttgtttcttaattaaagctaggtgatcatggatagcatcaacattaatgtctttacatctagcacaaatggaagtatgttcaacggtagatgtagagggtttgcaagattttaattctacaaccttagcatgcaatatatcatttttacttctaaggtcggaaatagaagcattgcaaacatctaattctttagccttagcaagcaatttttcattttcaatcctaaggctagcaagagaaatgttcaattcttcaatcttagcaagcaaatcaacattatcatttctaagattgggagttgaaacatcacaatcatttgaatcaaccttagcaattaaatttgcattctcatttctaaggttggcaattaaatcatggcatgtgcttagctcactagttaatttttcacatttctcaacttctagagcataggcatttttaacgttaacatgttttttgttttccttgattaggaagtcctcttgggtatccaagagttcatccttttcatggatggcactaattagctcatttagtttttctttttgttgcatgttgaggtttgcaaaaagggtacgcaaattatcctcctcatcactagcattatcatcactagaggactcatatttagtggaggatttggatttaaccttcttctttttgccgtcttttgccatgaggcacttgtggccgacgttggggaagaggagtcccttgttgatggcaatgttggcggcgtcttcgtcggaggaggagtcggtggtgctctcgtcgaagtcccactcccggcaaacatgggcatcgccgcccttcttcttgtagtacctcttcttctcctttcttctccccttcttgtcgtcgcccctgtcactgtcactagaaataggacattttgctataaagtgaccgggcttaccacacttgtagcaaactttcttggagcgggatttgtagtccttccccctcctttgcttgaggatttggcggaagctcttgatgacgagcgccatctcctcattgtcgagctttgaggcgtcgattggttgtctacttgatgtagactcctccttcttttcctccgtcgccctgaatgcaaccggttgtgcttcggacgtggaggggccatcaagctcgttgatcttctttgagcctttgatcaataattcaaagctcacaaaattccctattaccttgaccatttcatggttatcccatttcttgctcccgaggttgcgcacttggttcaccaaggttttgagccggttgtacatgtcttgtggctcctccccttggcgaagtcggaagcgaccgagctccccctcgatcgtttcccacttggtgattttggtcacctcgtctccttcgtgtgcggtctgtacaccaaactcaacaacatcccatatacttttgtggagtgaggttagatgaaatcgcatcaaatcactccacctagcataatcctcaccatcaaaagttggtggtttgcctaatgggacggaaagtaaaggcgtatgtttaggaatgcgaggatagcgtaaggggatcttactaaacttcttgcgctcatggcgcttagaagtgacggacggcgtgtcggagccggaggtggatggtgatgaggtgtcggtctcgtagtagaccaccttcctcatcttcttcttcttatcaccgctccgacgcgagttgtgtgaaggggattccttttccttccccttccctttgttgtaggactctcccgatagagccttcccgtggcttgtagcgggcttctcgccggtcaccatttccttcttggcgtgatctcccgacat

SEQ ID NO: 30883 - DNA, 353 bp, Zea mays
  Clone ID: MRT4577_128177C.1
gggaaacagggccaaaaaacatccaacagttttgtggggtattaagggttgaacagtaacattggtcccctttaaacaaaaaactttttttgggccgggggaagacatttaacaggttgcaactgcgattttgtcctgagtttccatgatacacccggggctcctaattagttcgcagttgtttttcaaggggggcctaaagccttgctcgcaatgttgttggaaagccagtccaggcccttttacaaacccttcccagttggggcacaagtgctttggttttaccaatgtcctttgcccagggggggtaatccaagcttggcagtatttttagcagctttcttggctttggg

SEQ ID NO: 30884 - DNA, 921 bp, Zea mays
  Clone ID: MRT4577_128178C.1
atgtcgggggaactcgccaagaaggagatggagaccggcgacaagcccactacaagccatgggaaggcttcatcggaagagtcccgcaacaaggagaagaggaaggagaagaagaaggaaaagaagacttcttctcacaagccgcatcggagtggcgacgaaataaagaagatgaggaaagtggtctactacgagaccgacacttcatcaccttctacctccggctccgatgcaccctccataacttcgaagcgccatgagcgggatgaagactacgactcggacgaggtggcccaaattcaccactttaactcccaagccactattatactcctcgcctctctaagtcgagaggagtataataaggtgcaagggttaaaaagtgcaaaggaaatttgggacgtactcaagaccgcgcacgagggagacgaggtgacaaagatcaccaagcgggaaacgatcgagggggagctcggtcgcttcatgcttcaccaaggggaggatccacaagctatgtacaaccgcttgaagaccttggtgaaccaagtgcgcaacctcgggagcgaaaaatgggatgaccatgagatggtcaaggttattcttagatccctcgtattccttaaccctacacaagttcaattaattcgaggctcaaagaaaatcatcgagcaaggcacctcctccacacccgaagcacaaccggtcacattcaaggcgacggaggagaagaaggaagagtctacatcaagtagacaaccaatcgacgcctccaagctcgacaatgaggaaatggcgctcgtcatcaagagcttccgccaaatcctcaaacaaaggaggggggaggactacaaacctcgctccaagaaagtgtgttacaaatgtggtaagctgagagcacctagagggggggtgaataggtga

SEQ ID NO: 30885 - DNA, 841 bp, Zea mays
  unsure (1)..(841): unsure at all n locations
  Clone ID: MRT4577_128179C.1
gttccgaagcaagaaagaggagaaacgtagcaagaaaccaactacgaacccaacaaccagagctcaaaatccaatttttttttttaaaaaaaaaactcccagcagaagaacaaccaagaagccaaggacctgtgccgcgacccgcgacgcgagccatggactctggtccggtgcccacgcgcccaacaggtggttccgcagcggtggcttcgtcgtcttcatcactcatctttctgggcaccggctgctccggcgcgctccccgacgcgcgatgcctcatccagccgtcggagcctccgtgcaccgtctgctccacggccctctccctgccgccggaccggaaccccaactacaggtgcaacacctccctcctggtagattactgccacgacgatggaagtcacaggtatatcctgatcgatgtcggcaagaccttcagagagcaagtcctccggtggttcgtgcaccacgaagtcccgtccattgactcggttattctcacgcacgagcacgcagatgctgtcttaggcctcgatgatctctgggtggcactaccgagctgtcagagaaacggtagtgccaaagttccggtttttctcacccaattcacaatggacagtgtggccgcaagattccccaacttggttgaacagaagctgcagggaggtgatgacttcgccagacctgctcagctcgattggacgataattcgagggtgatgttgacaagccatttgtagcatcggagcttcagttttggccgttgcccgtcatgcatggagaanactatgtctgtttaggcttcttgttcggnaggaaagcgagagttgcatacttgtctg

SEQ ID NO: 30886 - DNA, 403 bp, Zea mays
  Clone ID: MRT4577_12817C.1
aaaacaaaaaaccaaaatttcaaaagggaacattcctggggaacgggcaagaattggccgggaataggggtttaggacgggaaaacctagggggcccaaaggaaaaagggaaaatcaggggggccaaaaaaaatggggcccatggaggggcttttttaattacccccccaaacgggtacaagggggtaaccggggggagttaacccacaaatgtagccctggggcccccccttgccaaaatagtgggggaggggtttgaacttgggggggacatcaaaaacaaccccggggacttttcccttggggacccgggggtccccccggaaattccgggccggccccggggggggcaccaattttccctaagggggggcgtaaaaaagctgggggaaaaaaagggaaa

SEQ ID NO: 30887 - DNA, 927 bp, Zea mays
  Clone ID: MRT4577_128180C.1
atgtctctcgagaaggttataggaaaatttgtgagctttgaattgatgatcaaaggctccaagaaaatcatcgagcaaggcgcctcctccacacccaaaatgcaacccgtcgcattcaaggcgacggaggagaagaaagaagagtctacatcaagtagactccccatcgacgcctccaagctcgacaacgaggagatggcgctcatcatcaagagctttcgccaaatcctcaagcaaaggagggggaaggacttcaagccccgctccaagaaagtttgctacaagtgtggtaagcccggtcattttatcgctaaatgccctttatctagtgatagtggcagggataacgacaagagggggaagaagaaggagaagaagagatactacaagaagaagggtggcgatgcccatgtttgccaggagtgggactccaatgagagctccactgactcctcctccgatgaggatgccgcaaacatcaccatcaacaagggtcttctattccccaacgtcggccacaagtgcctcatggcaaaggacgacaaagggaagaaggtaaaatccagagcttccactaaatatgagtcttctagcgatgataatgctagtgatgaggaagataatttgcgtactctttttgccaacttaaacatgcaacaaaaagagaaattaaatgaattgattagtgatatccatgagaaggatgatctcttggacacccaagaggacttccttattaaagaaaataagaagcatgttaaagttaaaaatgcttatgctctagaagtagaaaagtgcgaaaaattatctagtgagctaagcacttgccatgagactatagacaaccttagaagtgaaaatgctaatttgttagctaaggttgatttcaaatgtttgcaatgtttcaattcccaatctcggaaatga

SEQ ID NO: 30888 - DNA, 4752 bp, Zea mays
  Clone ID: MRT4577_128181C.1
ctaatggtttggtaagatatcggctaagtgttctttggtgttaacataagcaatctcgatatcccccttttgttggtgatccctcaaaaagtgataccgaatggctatgtgcttagtgcggctgtgttcaacgggattatccgccatgcggattgcactctcattatcacataggagaggaacttttctcaatttgtagccatagtccctgagggtttgcctcatccaaagcaattgcgtgcaacaatgacctgcggcaatatactcggcttcggcgatagaaagagctactgagttttgtttctttgaagcccaagacaccatggatctccccagaaactgacaggtccctgatatgctcttcctatcaattttacaccctcccgtgtcgaggtcgagatgcccattagttcccaatggtgtcttgatgggcttagcatccttcatcccaaacttggtgagtatgtcttgaatatacttggtttggctgatgaaggtgccctcctggagttgctttacttgaaatcctaggaaatacttcaactcccccatcattgacatctcgaatttttgaatcataatcctactaaactcttcacaagtagatttgttagtagacccaaatatgatatcatcaaaataaatttggcatacaaacaaatcatttgcaatggttttagtaaagagtgtaggatcagctttgccgactttgaagccattagtgataaggaaatctcttaggcattcataccatgctcttggggcttgcttgagcccataaagcgccttagagagtttatacacatgattagggtactcactatcttcaaagccgggaggttgctcaacatagacctctttcttgattggtccattgaggaaggcacttttcatgtccatttgataaagcttaaagccatggtaagtagcataggcaagtaatatgcgaattgactcaagcctagctacgggtgcatgggtttcaccgaaattcaaaccttcgacttgtgaatagcccttggctacaagtcgggctttgttccttgtcaccacaccatgctcatcttgcttgttgcggaatacccacttggttcctacaatattttggttaggacgtggaacaagatgccatacctcattcctcgtgaagttgttgagttcctcttgcattgccaatacccaatctgaatctcttaatgcatcttccaccctgtatggctcaatagaagacacaaaagagtaatgttcacaaaagtgagcgacacgagatcgagtggttacccccttatgaatatcgccgaggatggatttcacggggtgatctcgttgtatcgcttggtggactcttgggtgaggcggtctttgaccctgtacttcttgtccatcttccttgtcttgatcatcattatctcccccttgatcattgtcatcatcttgaggtggctcatcctcttgatcttcatcttcatcaccttgagcttgatcctcatcttgggttggtgaagatgcttgcatggaagatgatggttgatcttgtgcttgtgtgggctcttcggattccttaggacacacatccccaatggacatgttccttagcgcgacgcatggagcctcttcatcatctaactcatcaagatcaacttgctctacttgagagccgttagtctcatcaaacataatgtcacaagaaacttcaactagtccagtggacttgttaaagactctatatgcccttgtgtttgaatcataaccaagtaaaaagccttctacagccttaggagcaaatttagattttctacctcttttaacaagaataaagcatttgctaccaaagactcggtccgaagtcttgtactcatcaatcatggtcctcgccatgtccaatagagttctattcttcctctccactacaccattttgttgtggtgtgtagggagaagagaactcatgcttgatgccctcctcctcaagaaagccttcaatttgggagttcttgaactccgttccattatcgcttcttatcttcttgatccttaatccgaactcattttgagcccgtctcaagaatccctttaatgtttcttgggtttgagatttttccctgtctttctcaaaatgaacattggttagtcccaaaatgtgttctccctttagaagcttatgaagattcttcatcccaacatgggttagtcggcggtgccagagccatcccgtgttagtcttagcaattaagcaagtgtcgagtttagctctattaaaatctactaagtatagctgaccctctaacactctcttaaatgctactaaatcatcacttcttctaaagacagtaacaccttgatttccatccccgaatgtgatggctcgttggggatcttggtttttctcataggaggagaacatccttttctcccctgtcatgtggtttgtgcacccgttatcaatgatccaacttgagcccccggatgcataaaccttgggtacccaaacacaagtctttgaccccttgtgtttgcccccaacatatttggcaactactttgcctgatttgttagtgagcacataggaagcatcaagagttttgaatgaaatgttatgatcatttgatgcaataggagttttctttttaggcaatttagcatgagtggattgactagaactagatacctcactcttatacataaaatcatgatgagagccagagtgagactttctagagtgaattctcctaattttgtgttcggcataaccgacagggtatacaatgtaaccctcattatcctgaaccatgggagccttgctcttaacaaagtttgacaatcttttaggaggggcattaagcttgacattgcctccctgttggaagccaatgccatccttaatgctagggcgtctcccactatagagcatactatgagcaaatttaaatttttcattttctaactcatgctcggcaattttagcatctaattttgctatatgatcattttgttgtttaatcatagcaatgtgatcatgaatagcatcaatgttaacatctctacatgtagtgcaaatagtaacatgctcaacggtagatgtagagggtttgcaagaatttagttcaacaatcttagcatgtaaaatgtcattctcatctctaagattggaaatagaaactttgcaaacatctaattccttagcctctagagcataagcatttttaaccttaacatgctttttgttttctttaattaggaagtcctcttggctatccaagagttcatccttctcatgaatagaactaatcaattcatttaatttttctttttgttgcatgtttaagttggcaaaaagggtgagcaaatcatccccatcgtcactagagctagcctcatcactagaagttgcatatttagtggaagctctagattttaccttcttctttttgccgtcctttgccatgaggcacttgaggccgacgttggggaagaggaggcctttggtgacggcgatgttggcggcgtcctcatcgaaggaggagtcggttgagctctcgtcggagtcccactcccggcaaacatgggcatcgccgcccttcttcttgtaatatctcttcttttccttcttcttccccctcttgtcgttatccctgtcactatcactagacaaatgacatttagcgataaaatgatcgggcttaccacacttgtagcaaaccttcttggagcgggacttgtagtctttccccctcctttgcttgaggatttggtggaagctcttgaggatgagcgtcatctcctcattgtcgagcttggaggcgtcgatggggaccctactaggtgtagagtcttctttcttctccttcgttgccttgaatgcaatgggttgtacatcgggtgtggaggaggtgccttgctcgatgattttcttggagcctttgatcatcaactcaaagctcacaaattttcctatcactttctctggagacattagtttatatcttggatcaccacgaattaattgaacttgagtagggttaagaaaaacgagtgatctaagaataatcttgaccatttcatggtcatcccacttggagctcccgaggttgcgcacttggttcaccaaggtttttagccggttgtacatggcttgcgggtcttctccttggttgagcataaagcgaccgagctccccctcgatcgtttcccgcttggtgattttggtcacctcatctccttcgtgcgcggtcttgagtacatcccaaatctctttggcgctcttcaacccttgcaccttattatactcctctcgacttagagaggtgaggagtatagtagttgcctgtactccaaactcaacaacatcccatatgcttttgtggagtgaggttaggtgatatctcatcatatcactccacctagaataatcttcaccgtccgtcggtggtttgcctaatgggaccgaaagtaatggagtatgtttaggaatgtgagggtagtgtagggggatcttattatacttcttgcgctcttggcgcttagaagtgatggacgcggcgtcggatcctgatgtagagggcgatgaagagttggtctcgtagtagaccactttcttcattttcttcttcttcttgccactcttgtgcgtcctaatgcgtgaaggggatccctccttctttttgttgtcgggctcccttgatggagccttcccgtggcttgtggcgagcttctcgccggtcaccatctcctttttggcgtgatctcccgacat

SEQ ID NO: 30889 - DNA, 611 bp, Zea mays
  Clone ID: MRT4577_128182C.1
aaaaaaaaaaaattaggaaaggcttgcttgtcctcccatctcttcctctctctctctctttccttgtgtgtggtttctgggagaagaaagagggacagagagagaggaataaaaaggtgggcaaggacatggagatggccatgatttcacctcaggcccttcctctctccccaaacacttcccgatagattccatcccctctctatcatcctgggtttcctcccaccttttctcatcttaattgcaaaggtttctgcgggataacatttgttttggggagactctagctagctctggtgaaggagaatcaacaagagtttggagaggggaaaagggatggaaggcgagagcttctcggggatgggcaatggaggcggcggcggcggaggggggcaccaccaggtggtggacgggaagctgatccagacgttccacaagagcttcgtgcaggtgcagagcatcctggaccagaaccggatgctcatctccgagatcaaccagaaccacgagtcccgggcgccggacagcctcacccgcaacgtcggactcattcgggagctcaacaacaacatccgccgcgtcgtcggcctctacgccgacctctccgcctc

SEQ ID NO: 30890 - DNA, 1926 bp, Zea mays
  Clone ID: MRT4577_128183C.1
atgtcgggagatcacaccaagaaggaggtcatgaccggcgagaagcccgctacaagccacgagaagactccatcaagggagtctggctccaaagtaaagggagaatcaccctcccacaacaagtcgcatcggagtggcgacaaggaaaagaagatgaagaaggtggtctactacgagaccgattcttcgtcgccatccacctccgactctgacacgtcttctgtcacttctaagcgccatgagtgcaagaagtttagtcagatccccttacgctaccctcgcttttctaaacatactcctttactttccgtcccactaggcaaaccacccgtttttagggtgaaggtaccatcgctgggggatgaagattatgattcagacgaggttgaccaaatccggcacttcaactcccaagccactactatactcctcgcctctctaagtcgagaggagtataataaggtgcaagggttgaagagtgccaaagagatttgggatgttctaaaaaccgcgcacgaaggagacgaggtgaccaagatcaccaagatggaaacggtcgaggggaagcttggtcgatttatgctcaaccaaggggaggagccacaagccatgtacaaccggctcaagaccttggtgaaccaagtgcgcaacctcgggagcacaaaatgggatgaccatgaaatggtcaaggaagttataggaaaatttgtgagctttgaattgatgatcaaaggctccaagaaaatcatcgagcaaggcgcctcctccacacccgagatgcaactcgtcgcattcaaggcgacggaggagaagaaagaagagtctacatcaagtagacctcccatcgacgcctcaaagctcgacaacgaggaaatggcactcatcatcaagagcttccgccaaaccctcaagcaaaggagggggaaggattacaagccccactccaagaaagtttgctacaagtgtggtaagcccagtcactttatagcaaaatgtcctatttctagtgacattgacaggggcgacgacaagaagggaaagaggagggaaaagaagaggtactacaagaagaagggcggcgatgcccatttatgccgtgagtgggactccgacgagagctccaccaactcctccgacgaggacgccgccaacatcgtcgtcaacaagggactcgtcttccccaacgtcggccacaagtgcctcatggcaaaggacggcaagaagaagaaggtaaaatctagatcctccactaagtatgcaacttctagtgatgaggataactctagtgatgatgaggataatttgcttactctttttgctaatcttaacatgcaacaaaaagaaaaattaaatgaattgattagtgctattcatgagaaggatgaactcttggatagccaagaggacttccttattaaagaaaacaataagcatgttaaggttaaaaatgcttatgctcaggaggttgagagatttgatgattgtgataattcaattgttagtcttagaaatgataatgccaatttaattgctaagattgacaagttgaatgaatctctttctagccttaagattgagaatgataaattaattgctaaggctaaggaattagatgtttgcaatgtttctattttctatcttagaaatgagaatgctattttacatgctaagattgatgatttaaatgcatgcaaaccctctacttctagtgttgatcatgtttctatttgtactagatgtagagatattaatgttgatgctattcatgatcaccttgctatgattaaacaacaaaatgatcatatagctaaactagatgctaaaattgccgagcatgaactagaaaatgagaagtttaaatttgctcgtagcatgctttatagtgggagacgccctggcattaaggatggcattggcttccaatag

SEQ ID NO: 30891 - DNA, 4863 bp, Zea mays
  Clone ID: MRT4577_128184C.1
ctaagggtttgcctcatccaaagcaattgcgcgcaacaatggcctgcggcaatatactcggctttggcggtagagagagctacggaattttgcttctttgaagcccaagacaccagagaccttcccaagaactggcaagtccctgatgtgctctttcttttgatcgacggatttacctcccgtgtcgaggtcgagatgcccattggttcccatgtgtgtcttgatgggtttggcatccttcatcccaaatttgtttagaatatcttgaatatacttcgtttggctaatgaaggtgccctcttggagttgctttacttgaaatcccaagaagtacttcaactcccccatcatcgacatctcgaatttcggtgtcatgatactactaaattcctcacatgtagattcgttagtagacccaaatataatatcatcaacataaatttggcatacaaacaaatcattgtcaagagttttagtaaataaagtaggatcgacctttctgactttgaagccattagtgatgagaaaatctcttaggaattcataccatgctcttggagcttgcttgagcccataaagcgccttagagagtttgtaaacatagttagggtactcactatcttcaaagccgggaggttgctcaacatagacctcttccttgattggtccattgaggaaggcacttttcacgtccatttgataaagctcattcctagtgaagttgttgagctcctcttgcatcgccaccacccaatccgaatcttgtagtgcttcctctaccctgtgtggctcaatagaggaaacaaaagagtaatgttcacaaaaatgagcaacacgagattgagttgttacccccttttgaatatcgccaaggatggtgttcacggggtgctcttgttggattgcttggtggactcttgggtgtggcagtcttggttctttatcctccttgtcttgatcatttgcatctcccccttgatcattgccgtcatcttgaggtggctcatcttcttgatcttctccttcatcatcttgagcctcatcctcattttgagttggtggagatgcttgcgtggaggaggatggttgatcttgtgcatttggaggctctttggattccttaggacacacatccccaatggacatgttccttagcgtgacgcacggagcctcttcatcacctatctcatcaagatcaacttgctctacttgagagccgttagtctcatcaaacacaatgtcacaagaaacttcaactagcccagaggacttgttaaagactctatatgcccttgtgtttgaatcatatcctagtaaaaagccttctacagccttaggagcaaatttggattttctacctcttttaacaagaatgaagcatttgctaccaaagactctaaaatatgaaacattgggctttttaccggttaggagttcgtatgatgtcttcttgaggattcggtgtagatacaaccggttgatggcgtagcaggcggtgttgaccgcctcgacccaaaaccgatccgaagtcttgtactcatcaagcatggttcttgccatgtccaatagagttcgattcttcctctccactacaccattttgttgtggcgtgtagggagaagagaactcatgcttgatgccctcctcctcaaggaagccttcaatttgagaattcttgaattccgtcccgttgtcgcttcttattttcttgatccttaagccgaactcgttttgagcccgtctcaagaatccctttaaggtctcttgggtatgagatttttcctgcaaaaataacacccaagtgaagcgagaatagtcatccacaataactagacagtacttactcccgccgatgcttatgtatgctatctggccgaataggtccatatgtaggagctcgagtggcctgtcagtcgtcatgatgttcttgtgtggatgatgaataccaacttgcttccctgcctgacatgcgctacaaatcctgtctttctcaaaatgaacatttgttagtcccaaaatgtgttccccctttagaagtttgtgaagattcttcattccaacatgtgctagtcggcaatgccagagccagcccatgttagtcttagcaattaggcaagtgtcgagttcagctctatcaaagtctactaagtatagctgaccctctaacactcccttaaatgttattgaatcatcacttcttctaaagacagtaacaccttgatttccatccccgaatgtgatagctcgttggggatcttggtttttctcgtaggaggagaacattttcttctcccctgtcatgtgatttgtgcacccgctgtcgatgatccaacttgagcccccggatgcataaacccaaacggttttgggtcctttggcattagatgcaagaactttgggtacccaaacacaagtcttggtgcccttgtgtttgtccccaacatacttggcaactattttgccggatttgttagttaaaacataagatgcatcaaaagttttaaatgaaaagttatgatcatttgatgtagtaggagttttccttttaggcaatctagcatgggttgattgcctagaactagatgtctcacccttatacataaaagcatgattagggccagagtgagacttcctagaatgaattctcctaattttgctctcgggataaccggtaggatacaaaatgtaaccctcgttatcctgagtcatgggagccttgcctttgacaaagttagacaatcttttaggaggggcattaagtttgacattgtcccccttttggaagccaatgccatccttgatgtcagggcgtctcccattatagagcatgcttctagcaaatttaaaattatcattttctaagtcatgctcggcaattttagcatctaattttgctatatgatcattttgttgtttaattaaagccatatgatcatgaatagcatcaatgttaatatctctacatctagtacaaatagtaacatgatctaattctttagccttaacaattaatttttcgttttcaatcttaaggctagcaagagaaacatttaattcttcaatcttagcaagtaatttaacattatcatctctaagattgggaattgaagcatcacaaacatttgaatcaaccttagcaattaaactagcattctcatttctaaggttggtaataacatcatggcaagagcttagctcaatagataatttttcacatttttctacttctagagcataagcattcttaaccttaacatgctttttattttccttaattaggaaatcctcttgggagtccaagagttcatccttctcatgaatagcactaattaattcatttaatttttccttttgttgcatgtttaggttggcaaaaagtgtgcgcaaattatcctcctcatcacaagagttatcctcatcactagaggtttcatatttagtggaggattttgattttaccttcttctttttgccgtcctttgccatgaggcacttgtggccaacattggggaagaggagtcccttgatgaaggcgatgttggcggcgtcctcgtcggaggaggagtcgctggagctctcgtcggagtcccattcgcggcacacatgggcatcgccgcctctcttcttgtggtacctcttcttctcctttcttctccccttcttgtcgtcgcctcggtcactgtcactagacataggacatttagcaataaaatgatcgggcttaccacatttgtagcaaaccttcttggagtgggacttgtagtctttccccctcctttgtttgaggatttggcggaagctcttgatgacgagcgccatctcctcattgtcaagcttggaggcgtctattggttgtcgacttggtgtagactcctccttcttttcttccgtcgccttgaatgcgaccggttgtgcttcgggcgtggaggggccatctagctcgatgattttctttgagcctttgatcatcaactcaaagctcacaaagtttcctattacttcctcgggagacattagtgtatatctaggattaccacaaattaattgaacttgtttgggattaagaaaaacgagggatcttagaataaccttgaccatctcatggtcatcccatttggtgctcccgaggttgcgcacttggttcaccaaggtcttcaagcagttgtacatgtcttgtggctcctccccttggcgaagccggaagcgatcgagctccccctcgatcgtctcccgcttggtgattttggtcacctcatctccttcgtgcgcggttttgagcacgtcccaaatctccttagcgctttttaacccttgcaccttgttatactcctctcgacttagagaggcgaggagtatggtggtggcttgggagttgaagtgccggatttgggcgacctcgtccgagtcatagtcttcatcccccggtgatggtacctgtactccaatctcaacaacatcccaaatgctagtgtggagtgaggttagatgatgcctcattttatcactccacatattataatcttcaccatcaaacatgggtggtttgcctaatgggacgaaaagtaatggagtacgttttggaatgcgagggtagtgtaggggaatcttactaaacttcttgcgctcatggcgcttagaagttacggacggcgtgtcagagccggaggtggatggcgacgaagagtcggtctcgtagtagaccaccttcctcatcttctttttcttgtcgccgctccaatgcgacttggcatgtgaaggggttcccttcatcttgttgtcggactcccctgatggatccttcccgtggcttctagacttgtcaccgtcggtcacgatctctttcttggtgtgttctcctgacat

SEQ ID NO: 30892 - DNA, 254 bp, Zea mays
  Clone ID: MRT4577_128185C.1
tcttgggagaagaggtcgagtttcacagcagcaatggtgtacgtcaaggctcagaaatcaaaagcctacttcaagagatatcaagtcaagttcaagagaagaagaggggaaaaaccgattaccgtgccaggattcggttgattaatcaggacaagaacaaatataacactccgaaataccgatttgttgttcgctttagcaacaaggacattgttgcacaaataatatctgctagcattgctggcgatattgtt

SEQ ID NO: 30893 - DNA, 484 bp, Zea mays
  Clone ID: MRT4577_128186C.1
tgcaaaactagatactaaaattgctatatgatcattttgttgtttaattaaagtcatgtgatcatgaatagcattaacatcaatatctctacatctagtgcaaatagaagtgtgctcaatggtagatgtagaggatttgcaagattttaattctacaaccttagcatgtaatatatcatttttagttctaaggtcggaaatagtagcattgcaaatatcaaaatctttagccttagcaattaatttttcattttcattcttaaggctaacaagagataagttcaattcttcaatcttagcaagcaaatcatcattatcatttctaagattgggaattgaaacattacaagcaatagaatcaaccttagctaataaattagcattttcatttctaagggtggcaatagtgtcatggcatgtgcttagctcactagatagtttttgacatttctctattttagagcataagcatttttaaccttac

SEQ ID NO: 30894 - DNA, 3983 bp, Zea mays
  Clone ID: MRT4577_128187C.1
tcaatcaaaattcctagaatcaagaatatttagttcattcctaagcttggtaaaggttttctcatctagtggtttggtatagatatcggctagttgttctttggtgttgatataggctatctcgatatcccccctttgttggtgatctctcaaaaagtgataccgaatggctatgtgcttagtgcggctgtgttcaacgggattatccgccatgcggattacactctcattatcacataggagagagactttgctaaatttgtagccatagtccctaagggtttgcctcatccaaagtaattgcgcgcaacaatggcctgcggcaatgtactcggcttcggcggtagaaagagctactgagttttgtttctttgaagcccaagacaccagggatctccccagaaactgacaagtccctgatgtgctcttcctatcaaatttacaccctcccgtgtcgaggtcgagatgcccattggttcccatgggtgtcttgatgggcttggcatccttcattacaaacttggtgagtatgtcttgaatgtacttagtttggctgatgaaggtgccctcttggagttgcttgacttgaaatcctagaaaatacttcaactcccccatcatagacatctcgaattttgtaccatgatcaaacaaatcttttgcaatagttttagtaaagagagtaggatcggccttgccgactttgaagccattagtgataagaaaatctcttaggcattcataccatgctcttggggcttgcttgagcccataaagcgccttagagagtttatagacatggttagggtactcactatcttcaaagccgagaggttgctcaagatagacctcttccttgattggtccattgaggaatgcactgttcacgtccatttgataaagcttgaagccatggtaagtagcataggcaagtaatatacgaattgactcaagcctagctacgggtgcataagtttcaccaaaatccaaaccttcgacttgtgaatagtccttggccgcaagtcgtgctttgttccttatcaccacaccatgctcatcttgcttgttgcggaagacccatttggttcccaatccgaatcccttaatgcgtcttccaccctgtatggctcaatagaagacacaaaagagtaatgctcacaaaaatgtgcgacatgagatcgagtggttacccccttatgaatatagccgaggatggagttcacggggtgatctctttgtatcgcttggtggactcttgggtgtggcggcctcggttcctcatcttcttccttgtcttgatcattggcatctcccccttgatcattatcctcctcttgaggtgactcttcttgatcttcattttcattaccttgagcatggtcctcatcttgagttggtggagatgcttgatttgaagatgatggttgatcttgtgtatgtggaggctcttcggattccttaggacacacatccccaatggacatgttccttagcgcgacgcacggggcctcttcatcatctagctcatcaagatcaacttgctctacttgagagccgttagtctcatcaaacacaatgtcacaagaaacttcaactagtctagtggacatgttaaagactctatatgcccttgtgtttgaatcataaccaagtaaaaagccttctacagccttaggagcaaatttagattttctaccgatgaggagttcataggatgtcttcttgaggattcggtgaaggtagagacggttgatggcgtagcaagcggtgttgattgcttccgcccaaaaccggtccgaagtcttgtactcattaagcatggtcctcgccatgtcaagtagagttctattcttcctctccactacaccattttgttgtggtgtgtagggagaagagaactcatgcttgatgccctcatcctcaagaaagccttctatttgtgagttcttgaactccgtcccgttgtcccttctaatctttttgatccttaagctgaactcattttgagcccgtctcaaaaatccctttaaggtcctgtctttctcaaaatgaacatttgttagtcctaaaatgtgttctccctttagaagcttgtgaagattcttcatcccaacgtgggctagtcggcgatgccagagccaacccatgttagtcttagcaattaagcaagtgtcgagttcagctctattaaagtcaactaagtatagctgaccctctaacactcctttaaatgctaccgaatcatcacttcttctaaagacagtaacacctatatcttgatttccatccccgaatgtgatagctcgttggggatcatggtttttctcgtaggagaacatcattttctccccagtcatgtggtttgtgcacccgctatcaataatccaacttgagcccccggatgcataaaccatgggagccttgcccttaacaaagctagacaatttcttaggggcattaagcttgacattgtctcccttttggaagccaatgccatccttaatgctagggcgtctcccactatagagcatgcttctagcaaatttaaaattttcattttctaagtcatgctcattaattttagcactaagttgagctatgtgatcattttgttgtttaattaaggctaggtgatcatgaatagcatcaacattaatgtttctacatctagtacaaatagtaacatgattaacgctagatgtagagggtttgcatgcatttaattcatcaatcttagcatgtaaaatagcattctcatttctaagattggaaatagaaatattgcaaatatttaaatctttagccttagcaattaatttttcattctcaattttaaggctagagagagatgcattcaacttgtcaatcttagtaatcaaactatcattatcatttctaagactaacaattgaatcatcacaaacatctaacttctcaaccttagcaattaattttgtattttcatttctaaggtttgaggtaatatcatggcaagtgctaagttcactagttaatttttcacatttttctaactcctgagcataagcatttttcaccttaacatgcttcttattttccttaataaggaagtcctcttggctatccaagatttcatccttctcatgaataacactaatcaattcatttaattcctccttttgttgcatgttaaggttggcaaaaagtgtaagcaaatcatcctcatcatcactagagctagcctcatcactagatgttgcatatttagtagaagctctagattttaccttcttcttcttgtcgtcctttgccatgaggcatttgtggccgacgttggggaagaggaggcctttagtgacggcgatgttggcggcgtcctcgtcggagtaggagtcggtggagctctcgtcggagtcacatttgtagaaaactttcttggagcggggcttgtaatccttccccctcctttgcttgaggatttggcggaagctcttgatgatgagcgtcatctcctcgttgtcgagcttggaggcgtcgatgggaagcctacttgacgtagactcttccttcttttccttcgtcgctttgaaggcgacgggttgcacctcgggtgtggaggtggcgcctcgctcgatgatttgtttggagcctttgacaattaactcaaagctcacaaactttcctatcacttcctcgggagacattagtttatatctaggatcaccacgaattaattgaacttgtgtagggttaagaaaaacgagtgatcttagaataaccttgaccatttcatggtcatcccgtttggtgctcccgaggttgtgcacttggttcaccaaggtcttgagccggttgtacatggcttgtggctcctccccttggtgaagcatgaagcgaccgagctccccctcgatcgtttctcgcttggtgatcttggtcacctcacctccttcgggcgcggttttgagcacgtcccaaatctctttggcactcaccttggccat

SEQ ID NO: 30895 - DNA, 879 bp, Zea mays
  Clone ID: MRT4577_128188C.1
gctagacggagacgggggaactggctgcaccttcacagccagtcaaacctcaaacggacacgcgacgggcgcggccgtgatcgtcatcgcgcaggcggcactttcggagccaccaagggaaggaaagagacgatccgctgatcgccggacgactctcatccgttctccaacaaagcgggctgattggcactcctgctcccaagttccccactcccttccccgaattccggaccgagtcgatggcggcgacggcggagagcccctcgaccggcggcttcgtgctgtggctgcacggctccggcgggtcgggcgacgagagccgcgcgcaggtcgcgccctacttctccgacccgggcgtcgcctcctccgtccggctgtccttccccaccgcgcccacgtccttcatcccttgctacggtgatgtggtgatcacggcttggttcggcatctcggaggttcctattaccgcgaaaactgttagagatgagaaagaagtccttaaagctgttgagtatgtgcatgaattgatagacaaagaagtagctgcgggaacgagcccgtcaaacatattcgtttgtgggatgagccaaggaggtgctctagctatagcgagtgctctactctacccaaaaactctgggtggctgtgctgtcttcagtggctcagttccgccgaataaatcattcgccgataaggtgtcacctgaagctagaaagacaccggtgttatggtttcatgggatggcagatggggtggtcctatttgaagcaggacatgctgggtgtgcatttttagaggagcttggcatgtcctgtgaattcaagcttatcctacccttggacattccatggttgacgaagagcttcaatactttcagca

SEQ ID NO: 30896 - DNA, 345 bp, Zea mays
  Clone ID: MRT4577_128189C.1
atcctctgctgcagactgctgtcttgtgggtcgtgtacaacaactgcgtctgcgacaccgtccacacaccatcggctgccgcgcgcacatgcggcatgacccgctggcacagtgacccagcccagcgcacactctcagtcagcagccgctgcggcaggacaggaacgggtggggccggggtacatgtctacatctacatgccattgccactgtgcagttgcagtgctctgagtcaatgtcagtagcagacttgcagtaataatcggtggtgatgtaatgagtgacatgttccccacagttttactgaagaactgggttcctcattggatgctgctgcagagaaca

SEQ ID NO: 30897 - DNA, 425 bp, Zea mays
  Clone ID: MRT4577_12818C.1
tgtgttcagaacacttacggttggacaaaaatcatctaacacaaagtgttgaatatctgatgtaatttgttgagtatggtattgaaagtgaaaaccagaacagttgtgtaggtatggaatggttgtaagtgtattagttgtttgttgtcactatcaggtggctgggagctgaggctcccttgctgtccagcatgacgagagaacattgtaccacatttcactagcccaagaaaaaataaaaattctagctagatatggtttccactgaaggtgtctcgctttcacaccattataatgtcaaaaactcaggttgaaccattgttaagtcggagactgtctaaatttattatgtagatgtttattaccaggtaagttttagttaaatctcactcttatccagctgtttcccttattagaaaaataat

SEQ ID NO: 30898 - DNA, 336 bp, Zea mays
  Clone ID: MRT4577_128190C.1
tctgttaatctgtggcagcatctttaccacacgaacagagtgactgcttaaggtacacgctatccgtggcggcgctattccatagcctaacgctgctgcacatgactcgcgcgcttccgctcatggcgactcatacaatcctacagaacgcacacaccctatctatgctcctactgccatggaaccgatgcccgccccgatggctctgccgctggagacagccaggaccattaccacaggcttggatgccagcaacgccacgaggacaccgcttatatccggccgctagctgcctaggagcctcagccggcttgaaatggactagaaacatctgac

SEQ ID NO: 30899 - DNA, 1602 bp, Zea mays
  Clone ID: MRT4577_128191C.1
ggcgcgttcgaatccatgggtgccgggctcgccatggcgcctggcgacatcgccttcaagtcgaacttcgctacactggatgagaacactggagttatcatcagcaggagggcagatcggcactttgaagaggaaggccctatactctgtgctgcgttggatgggatgaaacttcggtcgtttcctgagtatgaagtcagagtaagatatgctaccgagcatagatgtggtgtggttgtcaaaggaccaaagctgagtgggaacatttctggaactgatcccttgaaggacaaccgcttgcatctgaaggctgaaccgttggatggctcagaagaagctaaaaacactgcagctgtggtcaatgagctttctatggagattacgcgcatactggtttctcaccccatcaacgcaaagcgtgcagctgaggggaagaacatcgcaaatgttgtgttgctgcgaggttgtggtattcggattgaggtgcctgcctttgaaaccaaacatggacttgcaccttgcatggttgctcctaccaagatcatagctggcctgggactgtcactggggattgatatccttgaagcacctggagcaactggagattatcgtactctcttaacttctaaagctaaagccatagccaaggcactctctgcccctatggatacaccacctcgtgtttttgtgcctggagaggatggatacaaggctggaaaagaaaatggatatgactttgggttcctgcacataaaggccattgatgatgctggtcatgacaaggctgtcaagttgaaagtacggggtctagaagctgttgatcgagctattggtcagcttgcgaggcttctttgggaagctgaaaaggccggacactatcagtactttctttgcgtcactggagaccattctactcctgttgaatatggtgatcatagcttcgaacccgtcccgtttgcaatatgcagactgagagattatgcaggagccattggggaggataatattatgaatacacagctcgacgattttcccctcccttcggtaaaatccggagaagatttgctcgacagtatagaatcactggagcacaagcctggtcaacttaaagctttcagtggcgacagtgtgtgtgagttcaacgagatcgccgctgcgaggggctgccttggacgattcccaggaagcgagatgatgggcatcattaagaagtttatcaaggccaagaatgattaatgctggttgaaatgctaacctttagcgtaatatattggccataaggtttattatcaatgtaataaactaataatgacagaatggagcaatatggaagaaccgtcttgattggagatgaataagagataccttggtgaaaaaatgagatctgcttatgtacattgtacccagtgttgggtcactttccggccacatgaatgagaaattttgatggaagttggcgcctgtttggacaaacactaaccatccctaggtcgccttcgtagtgagtccggatcttgaggatgatccctaggtttcgtccacagatggtcttgtcattggtagcgagttaataaatattatgtttgacaaataacattaccg

SEQ ID NO: 30900 - DNA, 336 bp, Zea mays
  Clone ID: MRT4577_128192C.1
tgggggacccacgcgtccgggacgaaagaagtgatctaattctttggaccgaattatgcgccttttttcgtcttacgctccgtctttatttgttatgggaagcgggcaggaacatttcagtggatcatggacggatcggtaaagccctcgaaagtccggttggcgaggtgcattaaccttgcctaccgagacgcacgaggcatccgatctcgtgtgtcgaactacaacttggcaagaacaaacttaatacgagcgtgaagaagagatatgtgaaccccatctgggacgaggagcttactcggtccgtcatatatcctagcctagctttgaagctgg

SEQ ID NO: 30901 - DNA, 544 bp, Zea mays
  unsure (1)..(544): unsure at all n locations
  Clone ID: MRT4577_128193C.1
gggacgcacagnagggaccagggccggaactcccggggcgaccgacagagcccgcgccgcccgnagggaagggagcnccgaggcggcccgccgcggcgcgagggccgggcagggcagagccaaaggcacaggccctaggggcgcgaacgccccaacgagggccgcggcaggcggcgagcagaaaaaaggcctggtagcgggggggcagacncagaggcgaacagccagaagccagcacaccccagacggcgggcgagaggcgacccaaccaagcgcgaggaccaagagagagaaccaacggagcccccacgacgagggggaacgaccagcgcggcgcggccaccagcaggggaaaacgaacccggcacacgacggaggaaacccagcggacgggcccgacgggggagggaacaaagcaacaccaggggaagccggccgacaaggacaggaagagccgacaccaaaggaccaaaaagcaacggcagcaaaaacgcgaggcggacacaagccagcgaagccggggggaccaggagcgaacgcccag

SEQ ID NO: 30902 - DNA, 1338 bp, Zea mays
  Clone ID: MRT4577_128194C.1
ttccaaagctccaactacgacgagaaccgccactcctcgaaatctccaaggattttctgcggcgaaccccttcgtgacgtgacccaatgggagaggcctcgccgtcgatcgccaaggacgtcaccgaggtgaccgatgggtgcgtcggccgcgtcgccgccaagctcgagtccatggagccctgctccagcgtcaaggataggattggctacagcatgatcacggacgcagaggagaaagggctgattactccaggcgtgagtgttctgattgaaccaactagcggcaacacaggcattggactggcctttatggctgctgccaagggctacaaacttacactcacaatgcctgcctccatgagcatggagaggaggatcatattgaaggcttttggtgctgaacttgtccttactgacccactcctgggaatgaaaggagctgtcaagaaagcggaagagatacaagcaaagacacccaactcgtacatccttcaacaatttgaaaatccagctaacccaaagattcactatgagactactgggcctgaaatctggaaagctacagcaggaaaaattgctggccttgtatctggtatcgggacaggaggtaccatcaccggtactgggcgatacctcagagagcaaaatcctaatgtcaagctctatggtgtggagccagtggagagtgctgttttgaatggtggaaaacctggaccacacaagattcaaggaattggagctggttttatccctggagtcttggatgttgatctccttgatgagactctacaggtttcaagtgatgaagctattgagactgccaaggctcttgctctgaaagaagggttgttggttggaatctcttctggtgcagctgcagctgcggcagttaggcttgctaagaggccagaaaacgccggaaagctatttgttgtcgtgttcccgagcttcggcgagcgctacctctcatcggtgctgttccagtccatcaagaaggaagcggaaagcatggtggtcgagccctagagcacacagttctgggcttctggcaaactatttcctgagacgttcatcatttccatcacagaaaaataaagctcgggtgccttctgttgatttcgacgtacatttccctgccgatggtgtccagcccactgttgtcgctggagaacacgtcgtttttagacttgtgatgttttactactgttttgacactcgttgtatttctgtatatcgcgtcagactgtgaaataaaagcagtacagtgtgtttcttgcatggatgctttgctgtgggggttaaaaatgtatatatatgccgtcagagaattgcattg

SEQ ID NO: 30903 - DNA, 1803 bp, Zea mays
  Clone ID: MRT4577_128195C.1
atcatctccagcggcttcttccaaagctccaactacgacgagaaccgccactcctcgaaatctccaaggattttctgcggcgaacccgtacgtttcctatcgctgttctcgcttgttcgcgggggaatcaaaccaaatcatccccttccccccatccgccccttggatttgcagcttcgtgacgtgacccaatgggagaggcctcgccgtcgatcgccaaggacgtcaccgagttgatcgggaacacgccgctggtgtacctcaacaaggtgaccgatgggtgcgtcggccgcgtcgccgccaagctcgagtccatggagccctgctccagcgtcaaggataggattggctacagcatgatcacggacgcagaggagaaagggctgattactccaggcgtgagtgttctgattgaaccaactagcggcaacacaggcattggactggcctttatggctgctgccaagggctacaaacttacactcacaatgcctgcctccatgagcatggagaggaggatcatattgaaggcttttggtgctgaacttgtccttactgacccactcctgggaatgaaaggagctgtcaagaaagcggaagagatacaagcaaagacacccaactcgtacatccttcaacaatttgaaaatccagctaacccaaagattcactatgagactactgggcctgaaatctggaaagctacagcaggaaaaattgctggccttgtatctggtatcgggacaggaggtaccatcaccggtactgggcgatacctcagagagcaaaatcctaatgtcaagctctatggtgtggagccagtggagagtgctgttttgaatggtggaaaacctggaccacacaagattcaaggaattggagctggttttatccctggagtcttggatgttgatctccttgatgagactctacaggtttcaagtgatgaagctattgagactgccaaggctcttgctctgaaagaagggttgttggttggaatctcttctggtgcagctgcagctgcggcagttaggcttgctaagaggccagaaaacgccggaaagctatttgttgtcgtgttcccgagcttcggcgagcgctacctctcatcggtgctgttccagtccatcaagaaggaagcggaaagcatggtggtcgagccctagagcacacagttctgggcttctggcaaactatttcctgagacgttcatcatttccatcacagaaaaataaagctcgggtgccttctgttgatttcgacgtacatttccctgccgatggtgtccagcccactgttgtcgctggagaacacgtcgtttttagacttgtgatgttttactactgttttgacactcgttgtatttctgtatatcgcgtcagactgtgaaataaaagcagtacagtgtgtttcttgcaaaaaaaaaaaaaaaaaaaaaaaaaaaaaaaaaaaaaaaaaaaaaaaaaaaaaaaaaaaaaaaaaaaaaaaaaaaaaaaaaaaaaaaaaaaaaaaaaaaaaaaaaaaaaaaaaaaaaaaagggggggcgcctttttaagagggaaccaaattttaacttcccgggtgttgcaaactttataattttttttttggtggccccctaaatttaatttaatgggcccggggttttaaaaccggtgggaccgggagaaacccttgggttccccaaattaaatggttttgaaaaaaatccctttttccccagttgggttataacgaaaaggcccccacccataccccctttccaaaaattgccccaccttaattggaaaagggaacccc

SEQ ID NO: 30904 - DNA, 861 bp, Zea mays
  Clone ID: MRT4577_128196C.1
gctgtcaagaaagcggaagagatacaagcaaagacacccaactcgtacattcttcaacaatttgaaaatccagctaacccaaagattcactatgagactactgggcctgaaatctggaaagctacagcaggaaaaattgatggccttgtatctggtatcgggacaggaggtaccatcaccggtactgggcgatacctcagagagcaaaatcctaatgtcaagctctatggtgtggagccagtggagagtgctgttttgaatggtggaaaacctggaccacacaagattcaaggaattggagctggttttatccctggagtcttggatgttgatctccttgatgaaactctacaggtttcaagtgatgaagctatcgagactgccaaggctcttgctctgaaagaagggttgttggttggaatctcttctggtgcagctgcagctgcggcagttaggcttgctaagaggccagaaaacgccggaaagctatttgttgtcgtgttcccgagcttcggcgagcgctacctctcctcggtgctgttccagtccatcaagaaggaagcggaaagcatggtggtcgagccctagagcacacagttctgggcttctggcaaactatttcctgagacgttcaccatttccatcacagaaaaataaagctcgggtgccttctgttgatttcgacgtacatttccctgccgatggtgtccagcccactgttgtcgctggagaacacgtcgtttttagacttgtgatgttttactagtgttttgacactcgttgtatttctgtatatcgcgtcagactgaaataaaagcagtacagtgtgtttcttgtaaaaaaaaaaaaaaaaaagcggcc

SEQ ID NO: 30905 - DNA, 1507 bp, Zea mays
  Clone ID: MRT4577_128197C.1
cattgggtacttcgaggccggccgggacatctccagcggcttcttccaaagctccaactccgacgagaaccgccacacctcgaaatctcgaaggattttctgcggcgaacccgtacctttcctatcgctgttctcgcttgttcgctggggaatcaaaccaaatcaactgttggtgtttctatcttggatataagttctcatccccttccccccatccgccccttggatttgcagcttcgtgacgtgacccaatgggagaggcctcgccgtcgatcgccaaggacgtcaccgagttgatcgggaacacgccgctggtgtacctcaacaaggtgaccgatgggtgcgtcggccgcgtcgccgccaagctcgagtccatggagccctgctccagcgtcaaggataggattggctacagcatgatcacggacgcagaggagaaagggctgattactccaggcgtgagtgttctgattgaaccaactagcggcaacacaggcattggactggcctttatggctgctgccaagggctacaaacttacactcacaatgcctgcctccatgagcatggagaggaggatcatattgaaggcttttggtgctgaacttgtccttactgacccactcttgggaatgaaaggagctgtcaagaaagcggaagagatacaagcaaagacacccaactcttacatccttcaacaatttgaaaatccagctaacccaaagattcactatgagactactgggcctgaaatctggaaagctacagcaggaaaaattgatggccttgtatctggtatcgggacaggaggtaccatcactggtactgggcgatacctcagagagcaaaatcctaatgtcaagctctatggtgtggagccagtggagagtgctgttttgaatggtggaaaacctggaccacacaagattcaaggaattggagctggttttatccctggagtcttggatgttgatctccttgatgaaactctacaagtttcaagtgatgaagctatcgagactgccaaggctcttgctctgaaagaagggttgttggttggaatctcttctggtgcagctgcagctgcggcagttaggcttgctaagaggccagaaaacgccggaaagctatttgttgtcgtgttcccgagcttcggcgagcgctacctctcatcggtgctgttccagtccatcaagaaggaagcggagagcatggtggtcgagccctagagcacacagttctgggcttctgacaaactatttcctgagacgttcaccatttccatctcagaaaaataaagcccgggtgccttctgttgatttcgacgtacatttccctgccgattgtgttcagtccagcccactgttgtcgctggagaacacgtcgtttttagacttgtgatgttttactactgttttgacactcgttgtatttctgtatatcgcgtcagactgcgaaataaaaacagtacagtgtgtttcttaaaaaaaaaaaaaaaaaagcggcc

SEQ ID NO: 30906 - DNA, 440 bp, Zea mays
  Clone ID: MRT4577_128198C.1
ggaacaaaaagaggggggttttaacattgaacatcggccccgggggggtcaacttattacctgtgttatttacaaacccgggcaacttcacttttgggggggggggaaccccccttacaaaattccatgggatccccttttttttaaaagggccaagcgcgggggaaaaacccaaactcagcggtcgggggttaacccccaccccttgcagaaaacagggatgacccgttggttgcgggccaacctcaaaagaacagttttttttccccagattttcagggggagcctcctggggggccgcgcttgggagcccccagttccaaaaccccctaaatgcggttttggctcgaaactgggcccgggttttaaagcttttttcccacaatttactggccattttaagggccggggcgttgggttaaaccctctgggggggggtt

SEQ ID NO: 30907 - DNA, 1032 bp, Zea mays
  Clone ID: MRT4577_128199C.1
acacagcctgacccgatttacaaaaatacaacgggggtcaaaacagtagtaaaatatcacaagtttaaaaacgacgtgttctccagcgacaacagggggctggacaccatcgggagggaaatgtccgtcaaaatcaacaaaaggcccccgagctttatttttttgggatggaaatggggaacgtctcaagaaatagtttgccaaaagcccaaaattttgggctttagggctcgaccaccatgctctccgcttccttcttgatggactggaacagcaccgatgagaggtagcggagagcatggtggtcgagccctaaagcacaaaattttgggcttctggcaaactatttcctgagacgttcaccatttccatcacaaaaaaataaagctcgggtgccttctgttgatttcgacgtacatttccctgccgatggtgtccagcccactgttgtcgctggagaacacgtcgtttttagacttgtgatattttactactgttttgacactcgttgtatttctgtatatcgcgtcagactgtgaaataaaagcagtacagtgtgtttcttgcaaaaaaaaaaaaaaaaaaaaaaaaaaaaaaaaaaaaaaaaaaaaaaaaaaaaaaaaaaaaaaaaaaaaaaaaaaaaaaaaaaaaaaaaaaaaaaaaaaaaaaaaaaaaaaaaataaagaggagggaaaaaaaaaaaaaaaaaaaaaaaaaaaaaaaaaaggggggggcctttttttaaaaaaaaaaaatttaagccccgggggcttgcaaaaattaaattttttttttttgggcccccaaaaaaaaaaaaaaggggcccgttttaaaaaaagggggaggggaaaaaacccgggggaccccaaattaaaaccgtttaaaaaaaaccccttttttcgaggttgggtaaaaaaaaaaaaggcccccacaaaccccctttcaaaaaatttgccaacctttaattgaaaagtgaccccccccttttaccggctattaacggcgggggtttgggtggttcccccccggggg

SEQ ID NO: 30908 - DNA, 403 bp, Zea mays
  Clone ID: MRT4577_12819C.1
tttttgtgtttttttttttattatgtgctcggaaagaaccaattcttaatatgggaatgggcgctgaaaaaacccaccccaaccagggcctatttaattcctgaccaagaaacaccactctttttttcgttttaacaaccctttgggcttttaatgactcacgacggccccagcaaaggcaaccagcttgtgctgctcttatttgagagatgggtcagggaaaaaatggtgataaaacacgcttggtcggtgccagacccatacacacaaaagggtggcatggcacgaatgctactaaaaccacggactttaaccaatctgaacaggggggacaggttcccgtaatagttggtttttacactgggaggtctatcatgactcaatccttaaaagggtggtgagg

SEQ ID NO: 30909 - DNA, 1134 bp, Zea mays
  Clone ID: MRT4577_1281C.1
aagagacgaacgagggccaagcgctccaaaaccagcgacgtggaagcgcctgcgccgcgagcatccttcctgagcgcgggaccaagcagaggtatttatcatcgcagccgatccccagcctcatctcactccgctaccccctcatcctgccatccaccagcagcagtgcaagcagcatatggcgcgccgtgccagcctgctcctcgccgcggcgctgctcgtcgccgtcgctgccgcggcggtgccgccgacgtgcgagcgcatcgagtgcccggcgtacgaggtggtggacagcgccaacgggttcgagatccggcggtacacggacgccatgtggatcaccacggcgcccatcgaggacatctccttcgtcgccgccacgcgcaccggcttcctccagctgttcgactacatccagggcaagaacgcgtacaacgagacgatcgagatgacggcgccggtgctgacgcgggtgtcgcccagcgacgggcccttctgcgcctccgccttcgccgtgagcttctacgtgccggccaagaaccaggcggacccgccgccggccgagggcctgcgcgtggaccgctgggccggggccaggtacgcggccgtgcgccgcttcggggcttcgtggcggacgtcgacgtcggggagcaggcggcgcgcctcgaggccagcctccagggcacccggtgggccgccgccgtcaacgacgcgcgcagggccgacccggcctcgccctacaccgtcgcgcagtacaactcgcccttcgagttcaccggcagggtcaacgagatctggatgctcttcgacgccgacgacgacgccagtacttcgtgatgcgattccaagcgtgctctgggggcacccactgaggcgtctacgaaaggacgcgcatgcaaccgtgcttgccatgaagtatttcgtagtactcttctgcgctagcttcgtttactttcgagtaaagaataaggtgtcccttgtttcaataatgattctgcatgtaattacattccatggcacggccattccggcaacaggctcagtaaaaatatcttttttagtgccaacaaaaactcattgcttgccatcaaaaaaaaaaaaaaaaaaaaaaaaaagggggggcggtctatataa

SEQ ID NO: 30910 - DNA, 445 bp, Zea mays
  Clone ID: MRT4577_128200C.1
cattattttttatttgtttatccatttagctgttgttggcaccaagaaatatttattatggtctgaaacaggtacaaacatggacagacatgtgaacatgattacagcctgaacgcactgaacaacaaaactacataaggtgtgagccaaccaccgggaagccttgcttactgagtatggagaacttatgctcaatatcgaacttggtgacctatattttccgttaaacgaaatacgccgtaatacctttatgctgtgcttgcatatcccagaagggttgaggcttgtcgacatttcaagaatcatggcgcatagtctgtattgctgtagtagaatattattattcagatgacaacctcacaaagcttaccagccccaaccataaaatgatacttctggagatgcctaatgatagaggtaactgaattaattgttttgtgcttac

SEQ ID NO: 30911 - DNA, 1574 bp, Zea mays
  Clone ID: MRT4577_128201C.1
atccagattcaacgaacgccgtcggcctccgctccgtgccacgtcccgtgcaccagccatccccgtgaggccctcacctgcagtgacacggtccaccttggaccaggcgccccgagctgttcctctgcgacagcaaccttgcgtgcataaagccagccaccagccaggcagccgccatcatctccagcggcttcttccaaagctccaactccgacgagaaccgccactcctcgaaatctcgaaggattttctgcggcgaaccccttcgtgacgtgacccaatgggagaggcctcgccgtcgatcgccaaggacgtcaccgagttgatcgggaacacgccgctggtgtacctcaacaaggtgaccgatgggtgcgtcggccgcgtcgccgccaagctcgagtccatggagccctgctccagcgtcaaggataggattggctacagcatgatcacggacgcagaggagaaagggctgattactccaggcgtgagtgttctgattgaaccaactagcggcaacacaggcattggactggcctttatggctgctgccaagggctacaaacttacactcacaatgcctgcctccatgagcatggagaggaggatcatattgaaggcttttggtgctgaacttgtccttactgacccactcctgggaatgaaaggagctgtcaagaaagcggaagagatacaagcaaagacacccaactcgtacatccttcaacaatttgaaaatccagctaacccaaagattcactatgagactactgggcctgaaatctggaaagctacagcaggaaaaattgatggccttgtatctggtatcgggacaggaggtaccatcaccggtactgggcgatacctcagagagcaaaatcctaatgtcaagctctatggtgtggagccagtggagagtgctgttttgaatggtggaaaacctggaccacacaagattcaaggaattggagctggttttatccctggagtcttggatgttgatctccttgatgaaactctacaggtttcaagtgatgaagctatcgagactgccaaggctcttgctctgaaagaagggttgttggttggaatctcttctggtgcagctgcagctgcggcagttaggcttgctaagaggccagaaaacgccggaaagctatttgttgtcgtgttcccgagcttcggcgagcgctacctctcatcggtgctgttccagtccatcaagaaggaagcggagagcatggtggtcgagccctagagcacacagttctgggcttctggcaaactatttcctgagacgttcatcatttccatcacagaaaaataaagctcgggtgccttctgttgatttcgacgtacatttccctgccgattgtgtccagtccagcccactgttgtcgctggagaacacgtcgtttttagacttgtgatgttttactactgttttgacactcgttgtatttctgtatatcgcgtcagactgtgaaataaaagcagtacagtgtgtttcttggcatggatgctttgctgtgggggttaaaaatgtatatatatgccgtcagagaattgcattg

SEQ ID NO: 30912 - DNA, 231 bp, Zea mays
  Clone ID: MRT4577_128202C.1
actaatggactttcgcgggaacgattcgctaacctcgtatccgtaacctgtatacggacgacctttgaacatgacaaccaaagaacagccattggtagaaccagtaatagctgttatctagtaacattattgtccaactgctacattatccaacactagacgagaaaaactggtgagaggtcataaacttgagaacagaaaccagatcctgctcccatgatgtgtgcccaa

SEQ ID NO: 30913 - DNA, 314 bp, Zea mays
  unsure (1)..(314): unsure at all n locations
  Clone ID: MRT4577_128203C.1
anaacagnacacgatcacgcgggggggggcggcttaacaaggaggagatgggggaagatggtgcaggaggctgagaagtacaaggcagaggacgaggaggtcatagaagaaggtggatgccaagaacgcgctcgagaattatgcctacatcattattgaacaccatcaaggggggcttgatggggggcaanctccccgctgaggacatgaagaagatcgaagatgccgttgacggctccatcagctggctggacagcaaccatctggctgaggtggaggagtttgatgacactattaatgatcttgtggggatc

SEQ ID NO: 30914 - DNA, 291 bp, Zea mays
  unsure (1)..(291): unsure at all n locations
  Clone ID: MRT4577_128204C.1
acgcgtccgcggacgctgggcgtgacgcgtgggtctcagtctcagcaagacggcgacagccgggctgccgccgccggcttcgacgacttctccttccacacggccaccaccaacgccgtgctacgcgcacacgacgacgacgtccttaccttccttcgaggagcagcagcagcaagtcgaaaaatccgccgtcccgtcgagcaacagggcgagcgncggactgaacggcaacactaagctggaggacgggtaaacgtgcgaagtacgggcaggacaggtgaaggggagcga

SEQ ID NO: 30915 - DNA, 1914 bp, Zea mays
  Clone ID: MRT4577_128205C.1
atgtcgggagatcacgccaagaagatggtgatcggcggtgagaagtccgctacaagccacgggaaggctccatcaagggagtccaccaacaagaagaaggatggatccccttcacgcattcgatcacacaagagtggtgagaagaagaagaaaatgaagaaggtggtctactacgagaccgattcttcctcaccctctacatccggatccgacgccgcgtccgtcacttctaagcgccaagagcgcaagaagtacagtaagatccccctacgctatcctcgcattcctaagcatactccattactttccgtcccattaggcaaaccaccgacatttgacggtgaagattattctaggtggagtgatatgatgagatatcacctaacctcactccacaaaagtatatgggatgttgttgagtttggtgtacaggtaccatccgtaggggatgaagattatgatgaggacgaggtggcccaaatcgtgcacttcaactcccaagccaccactatactcctcacctctctaagtcgagaggagtataacaaggtgcaaggattgaagagcgccaaggagatttgggacgtgctcaaaaccgcgcatgaaggagacgaggtgaccaaaatcaccaagcgggaaacgatcgagggggagctcggtcgcttcaggcttttccaaggggaggagccacaagagatgtacaaccggctcaagaccttggtgaaccaagtatgcaacctcgggagtaaaaaatgggatgaccatgaaatggtcaaggttattcttagatcactcgtctttcttaaccctacgcaagttcaattaatacgtggtgatcctagatatacactaatgtctcccgaggaagtaataggaaaatttgtgagctttgagttgatgatcaaaggctcaaagaaaatcatcgagcaagatggcccctccacgcccgaagcacaaccggtcgcattcaaggcgacggaggagaagaaggaagagtctacatcaagtagactccccattgacgcctccaagctcgacaatgaggagatggcactcatcatcaatagcttccgtcaaatcctcaagcaaaggaggggaaaggactacaaatcccgctctaagaaaggtgacgacaagaagggcaagaggagagaaaagaagagatactacaagaagaagggcggcgatgccaatgtgtgccgcgagtgggactccgacgagagctccactgactcctcttccgacgaggacgccgccaatatcgccgtcaccaaggggcttctcttccccaacgtcgggcacaagtgcctcatggcaaaggacgacaaaaggaagaaggtaaaatcaagatcctccactaaatatgcatcctctagtgatgaagacaattctagtgatgaggaggataacttgcacaccctttttgccaacctaaacatgcaacaaaaagaaaagttgaatgaattaattagtgctattcatgagaaggatgaactcttggacacccaagaggacttcctaattaaggaaaataagaagcatgttaagattaagaatgcttatgctctagaggtagaaaaatgtgaaaaattatctagtgagctaagcatgtgccatgatattattgccaaccttagaaatgagaatgctagactaaatgctaaggctgattcaaatgtttgtgatgattcaatttccaatcttagagatgataatggtaatttacttgctaagattgaagaattgaatgtctctcttgctagccttagaaatgaaaatgaaaatttgattgctaaggctaaagacttagatgtttgcaatacttccatttccaatcttagaagtgaaaatgacattttacatgctaagattgttgaactaaaatcttgcaaaccctcttgtcggggaccataa

SEQ ID NO: 30916 - DNA, 5679 bp, Zea mays
  Clone ID: MRT4577_128206C.1
ctagcaaaagaaatttctagaatcaagaatattgagctcatgcctaagtctggtaaaagattgttcatcaagtggcttggtaaagatatcggctaattgatctttagtgttaatgtaagaaatctcgatatctcccttttgttggtgatccctaagaaaatgataccgaatggctatgtgcttagtgcggctatgctcgacgggattgtcggccattttgattgcactctcattatcacatagcaaagggactttggttaatttgtaaccgtagtcccgcagggtttgcctcatccaaagcaattgcgcgcaacaatgtcctgcggcaatgtactcggcttcggcggtggaaagagcgaccgaattttgcttctttgaagcccaagacaccaaggatcttcccaagaactggcaagtccccgatgtgctcttcctattaattttgcaccccgcccaatcggcatccgaataaccaatcaaatcaaatgtggatccccgagggtaccaaagcccaaacttaggtgtgtaagccaaatatctcaagattcgttttacggccgtaaggtgggattccttagggtcggattggaatcttgcacacaagcaaacggaaagcataatgtccggtcgagatgcacataaataaagcaatgaaccaatcatcgaccggtataccttttgatccacggacttacctcccgtgtcgaggtcgagatgcccattggttcccatgggagtcttgatgggcttggcatccttcattccaaacttggttagaatgtcttgagtgtacttcgtttggcaaatgaaggtgccctcttggagttgcttgacttggaatcctagaaaatacttcaactcccccatcatcgacatctcgaatttctgtgtcatgatcctactaaactcttcacatgtagactcgttagtagacccaaatataatatcatcaacataaatttggcatacaaacaagtcattttcaagagttttagtaaagagtgtaggatcggccttgccgactttgaagccattagcaataaggaaatctcttaggcattcataccatgctcttggggcttgcttgagcccataaagcgccttagagagcctataaacatggttaggatactcactgtcttcaaagccgggaggttgctcaacatagacctcttccttgatcggtccattgaggaaggcacttttcacgtccatttgataaagcttaaagccatggtaagtagcataggctaataatatgcgaattgactcaagcctagctacgggtgcataggtttcaccgaaatccaaaccttcgacttgtgaataccctttggccacgagtcgagctttgttccttgtcaccacaccatgctcatcttgcttgttgcggaagacccatttggttcctacaacattttggttaggacgtggaactaaatgccatacctcattcctcgtgaaattgttgagctcctcttgcattgccaccacccaatccgaatcttgaagtgcttcctccaccctgtgtggctcaatagaggaaacgaaagagtaatgctcacagaaatgtgcaacccgagatcgagtagttacccccttatgaatgtcgccgaggatggtgtcgacggggtgatctcgttggattgcttggtggactcttgggtgtggcggccttggttcttcctcatcctccttttcttgatcaattgcatctccccctggatcattgccatcatcttgaggtggctcatcttcttgattttgcccttcatcaacttgagcttcatcctcattttgagttggtggagatgcttgcttggaggaggacggttgatcttgtgcatttggaggctcttcggattccctaggacacacatccccaatggacatgttccttagcgctatgcatggagcctgttcttcacctatctcatcaagatcaacttgctctacttgagagccgttagtttcatcaaacacaacgtcacatgagacttcaactagtccagtggacttgttaaagaccctatatgcccttgtgtttgagtcataaccaagtaaaaagccttctacagttttaggagcaaatttagattttctacctcttttaacaagaataaagcatttgctaccaaaaactctaaagtatgaaatgttgggctttttaccggttaggagttcatatgatgtcttcttgaggattcggtgaagatataaccggttgatggcgtagcaggcggtgttgaccgcttcggcccaaaaccggtccggtgtcttgtactcatcaagcatggttcttgccatgtccaatagagttcgattcttcctctccactacaccattttgttgaggtgtgtagggagaagagaactcatgcttgatgccctcctcctcaaggaagctttcaatttgagagttcttgaactccgtcccgttgtcgcttcttattttcttgatccttaaggcgaactcattttgagcccgtctcaagaatccctttaaggtctcttgggtttgagatttttcctgtaaaaagaatacccaagtgaagcgagaataatcatccactattacaagacaatacttactcccgtcgatgcttatgtaagcaatcgggccgaatagatccatgtggagtagctcaagcggcctgtcggtcgtcatgatgttcttgtgtggatgatggactccaacttgcttccctgcctggcatgcgctacaaatcctgtctttctcaaaatgaacatttgttaatcctaaaatatgttctccctttagaagcttgtgaagattcttcatcccaacatgggctagtcggcggtgccagagccaacccatgttagtcttagcaattaagcaagtgtcgagttcagctctatcaaaatctaccaagtatagctgaccctctaacactcctttaaaagctattgaatcatcacttcttctaaagacagtgacaccttgatttccatccccgaatgtgatagctcgttggggatctttgtttttctcatatgaggagaacatccttttctccccggtcatgtggtttgtgcacccgctgtcgagtatccaacttgagcccccggatgcataaacccaaactgttttgggtcctttggcattagatacaagaactttgggtacccaaacacaagtcttggaacccttgtgtttgcccccaacaaacttggcaacgaccttgccagttttgttagtcaaaacatatgatgcatcaaaagttttaaatgaaatgctatgttcatttgatgcattagaaattttctttctaggcaacttggcacgggttggttgcctagagctagatgtctcacccttatacataaaagcatgattagggccagagtgagacttcctagaatgaattttcctaattttgctctcgggataaccggcagggtacaaaatgtaaccctcgttatcctgaggcatgggagccttgcccttaacaaagttagacaaatttttaggaggggcattaagtttgacattgtctcccctttggaagccaatgccatccttgatgccagggcgtctcccattatagagcatacttctagcaaatttaaatttttcattttctaagttatgctcggcaattttagcatctagttttgctatatgatcattttgttgtttaattaaagccatatgatcatgaatagcatcaatatcaacatttctacatctagtacaaatagatacatgctcaacaatagatgtagatggtttgcaagaattaagttcaacaatcttagcatgaagaatatcatttttatctctaagattggcaatggtaactttgcaaacatcaaaatctttagccttagcaatcaaactttcattctctaatctaaggctagcaagggaaatgtttaattcttcaatcctagcaagcaaatcatcattattatctctaggattgggaattgaaacattacaaacatgagaatcaaccttagcatttaaactagcattttcatttctaaggttgtcaatcatctcacggcaagtgcttagctcactagataatttttcacatttttctacctctagagcataagcctttttaaccttaacatgtttcttgttttctttaattagacaatcctcttgggaatccaaaaggtcatccttttcatgaatagcactaaccaattcattcaatttttccttttgagctacgttaaggttggcaaaaagggaacgcaaattatcctcctcatcactagcattatcatcactagaagattcatatttagtggaggagttggatttaaccttcttctttttgtcgtcctttgccatgaggcacttgtggccgacgttggggaagaggagtcccttggtgacggcgatgttggcggcgtcctcgtcgtcggaggagtcgcttgagctttcgtcggaatcccattcccgacaaacatgggcatcgccgcccttcttcttgtagtaccttttcttctcctttcttctccccttcttgtcgtcgcctcggtcactgtcactagatataggacatttagcaataaaatgaccgggcttaccacacttgtagcaaaccttcttggagcgggacttgtagtccttccccctcctttgcttgaggatttggcagaagctcttgatgacgagcgccatttcctcattgtcgagcttggaggcgtctattggttgtctacttggtgtagactcctccttcttctcctccgttgccttgaatgcaacgggttgggcttcggatgggtcgccaagctcgttgattttcctcgagccttctatcatgcactcaaaacttacaaaatgcccgataacttcctcgggggtcattttagtatatctaggattaccacgaatcaattgaacttgagtgggattaagaaaaatgagagatcttaaaataacatttaccacttcgtggtcatcccacttcttgctcccgaggttgcgcacttggttcaccaaagtcttgagccggttgtacatatgttgtggctcctcccctttgcgaagccggaaccgaccgagctccccctcgatcgtttcccgcttggtgatcttggtgagctcatctccttcgtgcgcggttttgagcacatcccaaatctccttagcactctcatcctcatcatagttctcatcccctaccgacggtacctgtgcaccaaactcaacaacatcccatatacttttgtggagcgaggttagatgaaatcgcattaaatcgctccacctagcgtaatcttcaccatcaaaagttggtggtttgcctaatgggacggaaagtaaaggtgtatgtttggaaatgcgagggtagcgtagggggatcttactatacttcttgcgctcttggcgcttagaagtgacggagggcgcatcggagtcggaggtcgatgttgatgaagtgtcggtctcgtagtagaccactttcctcatcctcttgtgcttgtcgcctttccgatgcggcttgtgggaagaagatttttccttcttctctttgtggtgagaagaagatttcttctccttccctttgatggaggagctcttcttcttctccctccttttggtgcgggactcttccgatgaagtgctcccgtggcttgtagtgggcttttcgccggtctccatctccttcttggcgtgatctcccgacat

SEQ ID NO: 30917 - DNA, 989 bp, Zea mays
  Clone ID: MRT4577_128207C.1
cccacgcgtccgcgcccctgtccatccgctcggccgagcgctccccgagcacggcagctcgcccaacctccctgctctctgctccaacttcctggttgccgcgccctgtgtcgcgtgctccctgccagccgtcagccgagtccttccccatccccatggcgcccagcttggtctgcgtgacgctactctcacacatggtggtcaccgtcgagtcttcccttggctcgctcctccataacttgctcctgcgcgctctgctcgtcctatggcgctcggcatccagttttctgcgcgccgactccttgttcccatcctgtgtgcactacaagtttctttctccaatcatcgcgcagctccctcgagctctgtccatgccgtccctcgagctctgtccatgccgcgtcgtcgttcgtcgtcacgtcgttcgccatcaagcctcactgtcattcctgttgtgcctcgcttcggatgtgttcgattaaatgtcggatcaagaatccaagatgtcgctcctcctcgctgtgaaatcctcacgctcaccattctctattcgatctcgtcgtcaagctgaaggccgtcgtcgttcaggcaactaccaaatcaagttgtgatgtggtacgttaattaatcgcgcgatgcggaagacaagccaagtcgaccccaagcgcggactactccgcatgatgatgctgatggacaaacctgaagatgttcgccaagtggacgtcgtctaacaacactaacctagtgttactcagatctctgcgcagaaggtcaacttgggcatcaataagaatctggtcccgtcaaactgactgtgattccattatcttctgtttgaaaatgttaccgacaaactaccctgttttctttgtcaatttggcatggaagcagaagttgtgtgcttccattctcaagttgttgtctttgtattatgaaattatgaaatattccattattcattatggagcactcgtttgcctttacta

SEQ ID NO: 30918 - DNA, 423 bp, Zea mays
  Clone ID: MRT4577_128208C.1
gggaatggttggagacaaaacatagtgggagaataagggagtttagtgtagtaaaatatattaaaaaaatacagataaggggagatgtataggggaaatggttggagatggcatgagttcttattatcaattgggtctaaatttaatgtgtggtctttttgtttgatatttttttgttatttgtggccgaaagttcaaaagataaaaaggggaaaggggttgtgtaggctgtgacgttttttagtgaggttgttgtccttttatttatgttgcacgttgaagttgcttatctatgaatttgccctgtatgatgcacgatgctgtgctgtctcctgtaatgcaaggttgaaagatgtgaaattgtgtttcatggtttttttattaccccctaccctacaacacgtatatcttgttatctgattt

SEQ ID NO: 30919 - DNA, 2952 bp, Zea mays
  Clone ID: MRT4577_128209C.1
ttagtcatagcacatgaaagagagatgatcaaaggtatataaatgagctatgtgtgcaaggtagcaatcaaagttcctagaatcaagaatgtttagctcatgcctaagtttggtaaaagttttctcatctaatggcttggtaaagatatcggctaattgttctttggtgctaacatatgcaatctcgatatccccactttgttggtgatccctcaaaaagtgataccgaatggctatgtgcttagtgcggctgtgatgaacgggattatccgccatgcgaattgcactctcattatcacataggagagggactttggtcaatttgtaaccatagtccctaagggtttgcctcatccaaagcaattgcgcgcaacaatggcctgcggcaatgtactcggcttcggcggtagaaagggctactgagttttgtttctttgaagcccaagacaccagggattttcccaagaactgacaagtccctgatgtgctctttctatcaattttacaccctctcgtgtcgaggtcgagatgcccattggttcccatgggtgtcttgatgggcttggcgtccttcatcccaaacttggtgagtatgtcttgaatgtacttcgtttggctgatgaaggtgccctcttggagttgcttgacttgaaatcctagaaaatacttcaactcccccatcatagacatctcgaatttttgaatcatgatcctactaaactcttcgtcttgtgaatatcccttggctacaggtcgggctttgttccttgtcaccacaccatgctcatcatgcttgttgcggaagacccacttggttcctacaacattttgattagaatgtggaacaagatgccatacctcattccttgtgaagttgttgagttcctcttgcattgccaacacccaatccgaatcccttaatgcgtcttccaccctatatggctcaatagaagacacaaagaagtaatgttcacaaaaatgagcaacacgagatcgagcggttacctccttatgaatatcaccgaggatggtgttcacggggtgatctcgttgtattgcttggtggactcttgggtgtggcggtcttggaccctcatcatcttccttgttttgaccattggcatctcccccttgatcattgtcctcctcttgaggtggctcatcttcttgatcttcattttcatcctcttgagctagatcatctccaatggacatgttccttagcgcgacgcatggagcctcttcatcatctagctcatcaagatcaacttgctctacttgagagccgttagtctcatcaaacacaatgtcacaagaaacttcaactagtctagtggacttgttaaagactctatatgcccttgtgtttgaatcataaccaagtaaaaagccttctacaaccttaggagcaaatttagattttctacctcttttaacaagaataaaacatttgctaccaaagactctaaaatatgaaacattgggctttttaccgattaggagttcataagatgttttcttgaggatttggtgaaggtagagccagttgatggcgtagcaagcggtgttgattgcttctgcccaaaactgatccgaagtattgtactcatcaagcatggtcctcgccatgtcaagtagagttctattcttcctctccactacactattttgttgtggcgtgtagggagaagagaactcatgcttgatgccctcatcctcaagaaagccttctatttgtgagttcttgaactccgtcccattgtcgcttctaatctttttgattctcaatccgaactcattttgagcccgtctcaagaatccctttaatgtctcttgagtttgtgatttttccaagtcctttgaccaaactttgatttccatccccgaatgtgatagctctgtgggatcatggtttttctcatagcaggagaacatccttttctcccctgtcatgtggtttgtgcacccgctatcaatgatccaacttgagcccccagatgcataaaccatgggagccttgcccttaacaaagttagacaatttcttgggggcattaagtttaacattgtctccctgttggaagccaatgccatccttaatgccagggcgtctcccactatagagcatacttctagcaaatttaaatttttcattttctaagtcatgctcattaattttagcactaagttgagctatgtgatcattttgttgtttaattaaagttaggtgatcatggatagcatcaacattaatgtctctacatctagtacaaatagtaacatgattaacattagatgtaaagggtttgcaagcatttaattcatcaatcttagcatgtaaggtggcattctcatttctaagattggaaatagaaacattgcaaccatttaaatctttagccttagatattaatttatcattctcaatcctaaggctagaaaatgattgattcaacttgtcaattttagcaatcaaactagcattatcatttttcagtttgacaagagaatcatcacaaacatttaatttctcaaccttagcaattaatttaacattctcatttctaaggttggagatagtatcatggcaaatgctaagctcactagtcaatttttcacatttttctatctcctgagcataagcatttttaaccttaacatgcttcttgtttttcttaataaggaagtcctcttggctatccaagagttcatccttctcatgaatagcactaattaattcattcaatttttctttttgttgcatgttgaggttggcaaaaagtgtgagcaaatcatcctcatcatcactagagctagtgttgtgggcctttggcttccgaaggtccttcggacttggacccttcggacttgagtcaaaatcacagtgtgaagaagcacaagggaaacgaaggatggaacagagccgaagctgtgcgcaagggagcttcggcat

SEQ ID NO: 30920 - DNA, 1521 bp, Zea mays
  Clone ID: MRT4577_12820C.1
gggtccctcgaggccggccgggatcagagctcgatcgatcacctccctacgtaccgatggcgtccgcggcgaggagcaatggcggacgcagccagaggcctcgggtctcggtctcgcccggtggctaacgggacggcgctggcggcgtggagggtcaaaacataatatttcagaacaagtccgaacgaactgaaggagaggaggaggaggaggaatggcggacgcagccagaggcctcgggtcttcgtctctcccggtggctaacgtgcaggcgcttgcggagtcttgcaacgacaacggagccgatgcgccggtgcccgggaggtacctcatcaaggatcctagcgccgaggaggtcgtagccgccggcgacagcgcctgcgcgattccggtcatcgatttccgcaagctgctcgatccggggtcgtccgaggaggagtgcgccaggctgggagccgcgtgccaccactggggattcttccagctcatcaaccatggcgttccggccgaggtgactgggaacctgatgaaggacgtagctgggttcttcaggcagccgctggaagccaagaaggagtgcgcgcagcaggccggcagcatcgaaggctacggccaggccttcgtcgtgtcggaggaccagaagctggactgggcggacatgctcttcctcatcgtgcggccgagggaggccagggacatgcgcttctggccgacgcgccctgagtccttcagggattccgtggacgcgtactccttggaagcttcgaagctagcgtaccgcctgctggagttcatggcaaggggcgtgggtgccgacccggcgtcgctgcagagcatgttccaagggcaggtgcagggcatgcgggtgaactactacccgccgtgccagcaggcggcggaccaggtgctgggcctgtcgccgcacagcgaccccaacgggctcaccctgctcctgcagatgagccacgacgtgcacgggcttcaggtcagcaaggacggcaggtggttccccgtgcaggctctccccggcgccttcgttgtctcaacgtcggtgacgcgctcgagatcgttagcaacggagcgttcaggagtgtcgagcacagggccgtgatacacccgaccaaggagcggatttcggcggcgctgttccacttcccggaccaggatcggatgcttggtcctctgccggagctggtgaaggaaggcgacacagtgcggtacgcaacgacgacttaccaagagttcatgaagcgattcttcgctgcaaagctcgatggaaagaagctcatagagagattcaagctacagtagtagctacgacctctcagctcgaacaaaaaataaattcacttgtaactattaataatggccagttattgaacggtttgcttgtctaaaatgttaacgcgcgcaacctcgggtatgcattactgtgttacatccgtttgcttcctacctactgtcgcatgagttatccaaatgataaattttggtagatgcataaggcttagcccctatttt

SEQ ID NO: 30921 - DNA, 434 bp, Zea mays
  Clone ID: MRT4577_128210C.1
tctgaggacggcggcctcgtcgtacgcccgcgccgcctcctctgccgtctcgaaggtgcccagccacaccctcctcttactgcatattcgattcaagcatgcatgcccaccacgccgccatcgtcagaacgcatggcgaaagagaaagaccgaggcatctactactactactagagagcagcgtggctagctagtagagctgagggaagaagatctagcatggggggccaccagtttcttacagcagcgggtgcctgatctcggagacccaggagccccagtggcgctgcctgacgccgcggaacttcttctttgattgcaccatgatgcctgcagatccccgcgctctgcagggcagggacgggccggccggcaagcactgcagattctctgccaggggaaggaaggaaggagtgagcagcagtccagtcagt

SEQ ID NO: 30922 - DNA, 4914 bp, Zea mays
  Clone ID: MRT4577_128211C.1
tcaatcaaaattcctagaatcaagaatatttagctcatgcctaagtttggtaaatgtttgctcatctaatggcttggtaaagatatcggctaattgttctttggtgttaatataagaaatctcgatatcccccttttgttggtgatccctcaaaaagtgataccgaatggctatgtgtttagtgcggctatgttcaacaggattatccgccatgcggattgcactctcattatcacatagaagatgaactttggttaatttataaccatagtccctaagggtttgcctcatccaaagcaattgcgcgcaacaatggcctgcggcaatatactcggcttcggcggtagaaagagcgacagaattttgcttctttgaagcccaagacaccagagatcttcccaagaattggaaagtccctaatgtgctctttctattaattttacaccctcccgtgtcaaggtcgagatgcccattagttcccatgggtgtcttgatgggcttggcatccttcatcccaaactttgtgagtatgtcttgaatgtacttcgtttggctaatgaaggtgccctcttggagttgcttcacttgaaatcctaagaaatacttcaactcccccatcatagacatcttgaatttttgagtcatgatcctactaaactcttcacatgtagattcgttagtagacccaaatatgatatcatcaacataaatttggcatataaacaaatcatttgcaagtgttttagtaaagagagtaggatcggcttttccgactttaaatccattagtgataagaaaatctcttaggcattcataccatgctcttggggcttgcttgagcccataaagcgccttagagagtttatatacatggttaggatactcactatcttcaaagccgggaggttgttcaacatagacctcttccttgattggtccattaaggaaggcactttttacgtccatttggtaaagcttaaagccatggtaaatagcataggcaagtaaaatgcgaattgactcaagtctagctacgggtgcataggtttcaccgaaatccaaacctttgacttgtgaatatcccttggccacaagtcgggctttgttccttgtcaccacaccatgctcatcttgtttgttgcggaagacccacttggttcctacaacattttggttaggacgtggaactaaatgccatacctcattcctcgtgaagttgttgagctcccttgcgtcgccaacacccaatccgaatcttgaagtgcttcctcccttatgaatgtcgccgaggatggtgttcacggggtggtctcgttgtattgcttgatggactcttgggtgtggcggtcttggaccctcatcatcttccttgtcttgatcattatcatttcccccttgatcattgtcctcctcttgaggtggctcctcttgatcttcatcatcatcatcttgagcttgatcctcatcttgagttggtggagatgcttgcattgaggaagatggttgatcttgtgcatgtggaggctcttcggattccttaggacacacatccccaatggacatgttccttagcgcgacgcatggagcctcttcatcatctagctcatcaagatcaacttgctctacttgagagccgttagtctcatcaaacacaatgtcacaagaaacttcaattagtccagaggacttgttaaagactctatatgtccttgtgtttgaatcataacctagtaaaaagccttctatagccttaggagcaaatttagattttctacctcttttaacaagaataaagcatttgctaccaaagactctaaaatatgaaacattaggctttttaccggttaagagttcataagatgtcttcttgaggattcggtgaagatataaccggttgatggcgtagcaagcggtgttgaccgcctcggcccaaaaccgattcgaagtcttgtactcatcaagcatggtccttgccatgtccaatagagttctattcttcctctccactacaccattttgttgtggcatgtagggagaagagaactcatgcttgatgccctcctcctcaagaaagctttcgatttgtgagttcttgaactcggtcccgttgttgcttctaatctttttgatccttaagccgaactcattttgagcccatctcaagaatcccttcaatgtctcttgggtttgtgatttttccttgatttccatccccgaatgtgatagctctttggggatcatggttttttcgtaggaggagaaaatcttcttctcccttgtcatgtggtttgtgcacccgctatcgatgatccaacttgagcccccggatgcataaaccttgggtacccaaatacaagtctttgagcccttgtgtttggccccaacatatttggcaactactttgcctgatttgttagttaaaacatatgatgcatcaaaagtcttaaatgaaatgttatgttcatttgatgcaatatgagttttcttcttaggcaatttagcacgggttgattgcctagaactagatgcctcactcttatacataaaagcatgattagagccagagtgagacttcctagaatgaattctcctaattttgtgctcgggataaccggtaggatacaaaatgtaaccctcattatcctgaggcatgggagccttgcccttaacaaagttagataatcttttaggaggggcattgagtttgacatttcctcccttttggaagccaatgtcatccttaatgccagggcgtctcccactataaagtatgctacgagcaaatttaaatttctcattttctagttcatgctcggcaattttagcatctaattttgctatatgatcatttttttgtttaatcatagcaatgtgatcatgaatagcatcaatgttaacatctctacatctagtgcaaatagtaacatgctcaacggtagatgtagagggtctgcaagaatttagttcaacaatcttagcatgtaaaatgtcattctcatctctaagattgaaaatagaaacattgcaaacatctaattccttagccttagcaattaatttttcattctcatttctaaggctagcaagagaggcatttaatttttcaatcttagcaattgaactagcattatcatttctaagattgtcaattgaatcatcacaaatatttgatttctcaaccttagcaattaatttggcattttcatttctaaggttggaaataacatcatggcaagtgcttagctcactagataatttttcacatttttctacctctagagcataagcatttttaaccttaacatgctttttattttctttaactaggaagtcctcttggctatccaagaattcatccttctcatgaatagcactaatcaattcatttaatttttctttttgttgcatgttcaagttggcaaaaagggtgagcaaatcatcctcatcatcactagagctagcctcatcactagaagttgcatatttagtggaagctctagattttaccttcttccttttgtcgtcctttgccatgaggcacttgtggccgacgttggggaagaggagtcctttggtgacggcgatgtttgcggcatcatcgtcggaggaggagtcagtggagctctcgtcggagtcccactcccggcaaacatgagcatcgccgccctttttcttgtagtacctcttcttttctctcctctttcccttcttgtcgttatccctgtcactatcactagacaaagggcatttagcgataaaatgaccgggcttaccatatttgtagcaaaccttcttggagcgggacttgtagtctttccccctcctttgcttgaggatttggcggatgctcttgatgatgagcgccatttcctcattgtcgagcttggaggcatcgatggggaccctactaggtgtagagtcttctttcttctcctccgttgctttgaatgcaacgggttgcacatcgggtgtggaggaggcgccttgctcgatgattttcttggagcctttgatcatcaactcaaagctcacaaattttcctatcacttcctcgggagacattagtttgtatcttggatcgccacgaattaattgaacttgggtggggttaagaaaaacgagtgatctaagaataacattgaccatttcatggtcatcccacttggagctcccaaggttgcgcacttggttcaccaaggtttttagccggttgtacatggcttgcgggtcttctccttggttgagcataaagcgaccgagctccccctcgatcgtttcccgcttggtgattttggtcacttcatcttcttcgtgcgcggtcttgagtacgtcccaaatctctttgacgctcttcaacccttgcaccttaatatactcctctcgacttagagaggtgaggagtatagtagttgcttgagagttgaagtgctcgatttgggccacctcgtcctcatcataatcttcatcccctacggatggtacctgtactccaaactcaacaacatcccatatgcttttgtggagtgaggttaggtgatatctcaccatatcactccacctagaataatcttcaccgtcaaatgtcggtggtttgtctaatgggacagaaagtattggagtatgtttaggaatgcgaggatagcgtagggggatcttactatacttcttgggctcttggcgcttagaagtgatggacgcggcgtcggatcccgatgtagagggcgatgaagagtcggtctcgtagtagaccactttcttcattttcttcttcttctcgccactcttgtgcgtcctattgcgtgaaggggatccctccttctttttgttgccggactcccttgatggagccttcccgtggcttgtggcgggcttctcgccggtcaccatctccttcttggcgtgatcttccgacat

SEQ ID NO: 30923 - DNA, 256 bp, Zea mays
  Clone ID: MRT4577_128212C.1
gtcttaaatctttccgatacaggcaaagaaaagcttctctactgaagactggcacattgatttgtctcttttaaaatgcgactctccacttcgatggtccatggggtccaacgggaaataccaccctttgctcataggaggtacacagatcgagtcaacagtacaagtgaacccacatgttaggcaacagcagggagactctttaagaaacagaagaagcttttgctggcccccccacgggagagagtcaaaaatg

SEQ ID NO: 30924 - DNA, 558 bp, Zea mays
  Clone ID: MRT4577_128213C.1
tacgaattttctctatcttgtcctcggataaccggtgggacaaaatgaaccctcgttatcctgggcatgtagccttgcccttaacaaagttggacaatttcttaggaggggcattaagtttgacattgcctccctgttggaagccaatgccatccttaatgccagggcgtctcccattataaagcatactacgaacaaacttaaatttttcattttctagttcatgctcggcaattttagcatctaaattagctatatgatcattttgttgtttaatcatggaaaggtgatcatgtatagcattaacatcaacatctctacatctagtgcaaatagtgacatgctcagtggtagatgtagagggtttgcaagaattaagttcaacaatcttagcacgcaatatatcatttttatctctaagatcggaaattgaaacattgcaaacatctagttctttagccttagcaattaatttctcattctcattcctaaggctagcaagagaaatgttcaattcttctatcttagcaagcaaatcaatattatcatctctaagat

SEQ ID NO: 30925 - DNA, 530 bp, Zea mays
  Clone ID: MRT4577_128214C.1
cttgattttaccttcttctttttgccctccttggccatgaggcacttgtggccgacgttggggaagagaagacccttggtgacggcgatgttggcggcgtcctcgttggaggaggagtcgatggagctctcgtcggagtcccactcgcggcacacgtgggcatcaccgcccttcttcttgtagtgtctcttcttctcctttcttctccccttcttgtcgtcgcccctgtcactatcactagataatggacatttagcaataaaatgaccgggcttaccacacttgtagcatactttcttggagcggggcttgtagtctttccctctcctttgcttgaggatttgacggaagctcttgatgatgagcgccatctcctcgttgtcgagcttggaggcgtcgatgggtgttcgacttggtgtagactcctcctccttctcctccgtcgccttgaatgcgaccggttgtgcctcgggtgtggaggaagcgcctcgctcgatgattttctttgagcctttaatcattagctcaaa

SEQ ID NO: 30926 - DNA, 4230 bp, Zea mays
  Clone ID: MRT4577_128215C.1
tcaatcaaagttccgagaatcaagaatgtttagctcattcctaagtttggtaaaggttttctcatctaatggtttggtaaagatatcggctaattgttctttggtgctaacataagcaatctcgatatccccccttttttggtgatccctcaaaaagtgataccgaatggctatgtgcttagtgccgctgtgttcaacgggattatccgccatgcggattgcactctcattgtcacatagaagagggactttgctcaatttgtagccatagtccctaagggtttgcctcatccaaagcaatcgcgcattaatgtccttttgatctatggacttacctcccgtgtcgaggtcgagatgcccattggttcccatgggtgtcttgatgggcttagcatccttcattccaaacatggtaagtatgtcttgaatgtactttgtttggctgatgaaggtgccttctcgaagttgcttgacttgaaatccgactttgaagccattagtgataagaaaatctcttaggcattcataccatgctcttggggcttgcttgagcccataaagctcctttgagagtttataaacatggttagggtactcactatcttcaaagccgggaggttgctcaacatagacctcttccttgatttgtccattgaggaaggcacttttcacgtccatttgataaagctcattcctcgtgaagttgttgagctcctcttgcattgccaacacccaatccgaatctcttaattcatcttccaccctgtatggcctgtacttcttgatcatcttccttatcttgatcattatcatctcccccttgatcattgtccttctcttgaagtggctcatcttcttaatcttcttcttcattgtcttgagcctgatcctcatatccccaatggacatgttccttagcgcgacgcatggaacctcttcatcatctagttcatcaagatcaacttgctctacttgagagccattagtctcatcaaacacaatgtcacaagaaacctcaactaatccaatggatttgttgaagactctatatgcccttgtgtttgagtcataaccaagtaaaaagccttctacaaccttaggagcaaatttagattttctacttcttttaacaagaataaagcatttgctaccaaagactctaaaatatgaaacattgggctttttaccagtgaggagttcatatgatgtcttattgaggattcggtgaagatataaccggttgatggagtagcaagcagtgttgattgcttccgcccaaaaccgatctggtgtcttgtactcatcaagcatggtcctcgccatgtccaatagagttctattcttcctctctactacaccatttttctgaggtgtgtaaggagaagagaactcatgcttgatgccctcttcctcaagaaagccttcaatttgagagttcttgaactccatcccattgtcgcttcttatcttcttgatctttaatccgaactcgttttgagcctgtctcaagaatccctttaaagtttcttgggtttgagatttttccctgtctttctcaaaatgaacattggttagtcccaaaatgtgttctccctttagaagcttgtgaagattcttcatcccaacatgggctagtcggtgatgccagagccaacccatattagtcttagcaattaagcaagtatcgagtttagctctattaaaatcaactaagtatagctgaccctctaatactccattaaatgctactgaatcatcatttcttctaaagacagtaacacctatatccgtaaaaagatagttgtaacccattttgcataattgagaaactgaaagcaagttataatctaaagaatcttgatttccatccttgaatgtgatagctctttggggatcatcgtttttctcgtaggatgagaacatccttttctcccctgtcatgtggttagtgcatccgctatcaatgatccaacttgagcccccggatgcataaacccaaacggtcttgggtcctttcacattagaaacaagcaccttgggtacccaaacacaagtcttggagcccttgtgtttgcccccaacatatttggcaactattttgcctgatttgttagttaaaacacaagaagcatcaaaagtcttaaatgaaacattaggctcatttgatgcaacatgagatttctttttaggcattttaacatgggtggaatgcctaaaactagatgtctcattattatacataaaagcatgatgagaaccagaatgagaattcctagaatgaattctcctaattttatgctcaggataaccagcatgatataaaatgtaaccctcgttatcctgtgccatgggagccttgcccttaacaaaattagacaatctcttaggggcattaagcttgacattgtctccctgttggaagccaatgccatccttaataccagggtgtctcccattatagagcatgctcctagcaaatttaaattttcctattttatgatcaacagtggatgtaaagggtttgcaagattttgaatcatcaatcttagcatgtaaaatatcattctcatatctaagattggaaatagaaacattgcaaacatttgaatctttagcctttgaaattaaactagcattttcaattttaaggctagaaattgattcattcaatttatcaatcttagtaatcaaactagcattatcatatttaagattgacaattgaatcatgacaaacatttgatttttcatccttagcaagtaaattagcattctcatttctaaggttggaaatagtgtcatggcaagtgctaagctcactagttaatttttcacatttctctatttcctgagcataagcatttttcactttaacatgctttttgttttccttaataaggaattcctcttgggtatccaagagttcatccttctcatgaatgacacctatcaattcattcaattgttctttttgttgcatgtttaagttggcaaaaagagcaagcaaatcatcttcatcatcgctagagctaccgtcatcactagatgtatatttagtggaggctctagattttaccttcttctttttgtcgtcctttgccatgaggcacttgtggccgacgttggggaagaggaggcctttggtgacggcgatgttggcggcgtcgtgggcatcgccgcccttcttcttgtagtacttcttcttttccttcctccttcccttcttgtcgtcacccctgtcactatcactagataatggacatttagcaataaaataaccgggcttaccatatttgtagcacactttcttggagcggggtttgtaatcctttcccctcctttgcttgaggatttggcggaagctctttatgatgagcgtcatttcttcgttgttgagcttggaggcgtcgatggggagcctacttgatgtagactcttctttcttctcctctgttgctttgaatgcgacgggttgcacctcgggtgtggaggtggcgccttgctcgacgatttgtttggagcctttgatcatcaattcaaagctcacaaattttcctatcacttcctcgggagtcattagcttatatctaggatcaccatgtattaattgaacttgagtaggattacgaaatacgagtgatctaagaataactttgaccatttcatggtcatcccatttggtgctcccgaggttgcgcacttggttgaccaaggtcttgagccggttgtacatggcttgtggctcctctccttggttgaggatgaatcgaccgagctcccctttgatcgtctcccatttggtgatcttggtcacctcatccccttcatgtgcggtctttaggacgtcccaaatctccttggcactcttcaacccttgcaccttactatactcaataatcttcaccgtaaaaaacggtggtttgcctaatgggacggaaagtaaaggagtgcgtttagaaatgcgaggataatgtagggggatcttactaaacttcttgcgctcatggcgcttagaagtgacgaacggagcgtcggagccggaggtagatggcgacgaagagtcggtctcgtagtagaccactttcttcatcttcttcttcttgtcgccactccgatgtgacttgacgcggggaggtgattcctcccttcctttggcgtcgtactcctttgatggagccttcccgtggcttatggtcgtttccatctccctcttggcggatcctcccgacat

SEQ ID NO: 30927 - DNA, 491 bp, Zea mays
  unsure (1)..(491): unsure at all n locations
  Clone ID: MRT4577_128216C.1
ttgctgtcggggggattatggtatagggtaaagaaatttgctgacaggatagaatattccttttagagtagaaatttagagttgtatgagtgcggatagccttagtagctggccggccttgtgtcggagggctatacaggtagatgtagaactgctctgcctctgcacaatgccgacaaagggacgacgaattgcagactatatatatagtgacatgaatgtttctgagaagcacaccgatcatcttttcagtcccagatgactccagtagataagatagcaaagagaggatatattgtttactaggacagtctatgtgataataaataatagacagaagagtaaacttagggcatagcaaagaggggatatatngtttagtaatcagtagtactaggactgtctgngactttgngtgataaataatcagatagaagtgtaaacttagngcctgttngaataagatagagctacttactaattagcgacgc

SEQ ID NO: 30928 - DNA, 324 bp, Zea mays
  Clone ID: MRT4577_128217C.1
tgaagacacggacaagccagagggacgaggggggaggttagaataaaggggcaggaaacccaacaagaaacacaacgttgaattgaggaaggacgaaagacgatacatgaggaggtagcaaaccaaatcgagaaggaaaaggatgcagctataaatacaagccaagctgaaagtggaacaagaaaaaaagaaccggcaggagctaggaaaaaaacttgaagcacaaccaaagaaagcttaagaggcgttgattaaagaagcgacggaacagtaacagacagagctggagccacaacccgacgtcggagaggtcacagaaagaaa

SEQ ID NO: 30929 - DNA, 531 bp, Zea mays
  unsure (1)..(531): unsure at all n locations
  Clone ID: MRT4577_128218C.1
cgactggttggtgcatagcattcgccagtgactccagcacgccagngatctcaacagtctacagtcgcgactgcatgacagtgttgatacaagcgtactcacgatagcttcggtggatttctcgaagaacactctatatgtaagacgaacgatgtggcaatacaccgacgaacacctgttgtgcgctgagagtccgaatcctgaagagtggggaggagccattgagttctctattatatctgaatactaccggcgctaaatagcaggctatgacattcacaccacccggtgtggtctgtatggctaggacaagaatctcagtgaaagggccgtgctcatttatgatggtaacgcattatgatgctctcgatatgcctccgacctgaaggatgcactctgaagaatatgaccagacaatcttccccgttaatgatgaccgagaataggtccacataaggcatgcctcaactagagagggaggcgcataggaagaggagctacactgacactgcanacttaactctgagctga

SEQ ID NO: 30930 - DNA, 925 bp, Zea mays
  Clone ID: MRT4577_128219C.1
cattgggtacctcgaggccggccgggacggacaccacgctgcgttcactcgcaaccgtggcccgtgggtttcgcctgtggtcacggcgaggccgcatccagtcgaccatgccgccttccgcatcgatgccggcgacgcacacggccgtgtacgtggcggcggtgcccctgcgggcgcccaagggccccgcccagctgctgatgtcggcgggctactcgctgggcatgtgggacctgcagcacttcatggtgctcctccggcccgacccggcgctggcccaggcgctggtcttcgatttccagccgcgggacccagaggacgtcctcgccgcgctcgcggtgctgtcgcggagagagatccctggcgtggttcgcagaagaacgctgcggagggtcccggaccggcggtgctggctcgtggggcactgctgcgacgccgtcggtgccgccacaaggttcagcgagcggtggacgaccggcctggtggtcggggagcacgactgccgggactacaccgacgggctggtcgaggtcctgacaggtgaaaaacgtgtcctggagtcgctcagattgcgcggcaacggcagcagcaccagcaccagtggggcggcgccgccgtgatggatgatctaaactgtacggactacggtcatttatcggattctataaactggagacccaacacgcaaggcagaaatttcatggaaacgaggagacgttttgaaaggaaaaaaaaatgaggagagaaaacaaagaagctactactcaaggcaaggcgatggtgtaacgaagaaatgaggccgcttgactgtgaaagaaactagaggtgctacgtgaagcaaaaaattagacacgctatgtggagaagcaccgatgacaaatttggtggtataaactcattcatcgtattattaataattactagc

SEQ ID NO: 30931 - DNA, 559 bp, Zea mays
  Clone ID: MRT4577_12821C.1
acccccgaggtcggccgaggctgtgttggagccagagaaagcggatgagttcaaaaagggtgtcgagggtgcaaccaagtttctccttagcaagctgaaggaccttcaattttttgttggtgagagcatgaaggatgatgcgtccgtggtattcgcctattacaaggatggtgccactaatccgacattcctctatttctctcatggtcttaaggagatcaagtgctaggcttgcggcgagattagttacccatgttgggtactatctatgtactattgttatatccacaactatagttgtcctggttgaattgaactcaaaagggtttgtttgagaaaaaactgtccaagattggattgcttgttaaagctctattgttattgaagtgttattgcttagttgtgatcgctgacttgtttatgacgtaagtagacgtgagtttattattagtatttctatttggactaaagaattggatgagttaattgttaatagataattattatctgtagagatccaaacgaggacttgccaaagttcatactaatatgcaagtgg

SEQ ID NO: 30932 - DNA, 755 bp, Zea mays
  Clone ID: MRT4577_128220C.1
gatccctggcgtggttcgcagaagaacgctgcggagggtcccggacgggcggtgctggctcgtggggcactgctgcgacgccgtcggtgccgccacaaggttcagcgagcggtggacgaccggcctggtggtcggggagcacgactgccgggactacaccaacggtaatctgtcagcactctcatagtcgtcgccattgcaaaatcgttgtgtagtgcgatccgtctcatatatcctctctttgtttggtggatcgctaagggctggtcgaggtcctgacaggtgaaaaacgtgtcctggagtcgctcagattgcgcggcaacggcagcagcaccagcaccagtggggcggcgccgccgtgatggatgatctaaactgtacggactacggtcatatatcggattctataaactggagacccaacacgcaatgcagaaatttcatggaaacgaggagacgttttgaaagggaaaaaaaatgaggagagaaaacaaagaagctactactcaagacaaggcgatggtgtaacgaagaaatgaggccacttgactagttgactgtgaaagatactagaggtgctacgtgaagcaagaaattagacacgctatgtggagaagcaccgttgactaagtaaacttaggaggtgtttggtttgaagaaatcaatctattctaaatgaggtggtatatcatgagtctattatacaaattttgtggaataaacttattctttatattattactaattattagccc

SEQ ID NO: 30933 - DNA, 5670 bp, Zea mays
  Clone ID: MRT4577_128221C.1
atgtcgggagatcacgccaagaaggagatggagaccggcgaaaagcccactacaagccacgggagcacttcatcggaagagtcccgcaccaaaaggagggagaagaagaagagctcctccaacaaagggaaggagaagaaatcttcttctcatcacaaagagaagaaggaaaaatcttcttcccacaagccgcatcggaaaggcgacaagcacaagaggatgaggaaggtggtctactacgagaccgacacttcatcaacatcgacctccgactccgatgcgccctccgtcacttctaagcgccaagagcgcaagaagtatagtaagatccccctacgctaccctcgcatttccaaacatacacctttactttccgtcccactaggcaaaccaccaacttttgatggtgaagattacgctaggtggagcgatttaatgcgatttcatctaatctcgctccacaaaagcatatgggatgttgttgagtttggtgcgcaggtaccatccgtaggggatgagaactatgatgaggatgagttagcccaaatcgagcacttcaactcacaagccacaacaattctcctcgcctcactaagtaaagaggaatataacaaagtacaagggttgaagaacgccaaggaggtttgggatgtactcaaaaccgcgcacgagggagatgagctcaccaagatcaccaagcgggaaacgatcgagggggagctcggtcggttccggcttaacaaaggggaggagccacaacacatgtacaaccggctcaagactttggtaaaccaagtgcgcaacctcgggagcaagaagtgggacgaccacgaagtggtaaatgttattttaagatctctcatttttctaaatctcactcaagttcaattgattcgtggtaatcctagatatactaaaatgacccccgaggaagttatcgggcattttgtaagttttgagtgcatgatagaaggctcgaggaaaatcaacgagcttggcgacccatccgaagctcaacccgttgcattcaaggcgacggaagaaaagaaggaggagtctacaccaattcgacaaccaatagacgcctccaagcttgacaatgaggagatggcgctcgtcatcaagagcttccgccaaatcctcaaacaaaggagggggaaagactacaagtcccgctccaagaaggtttgctacaaatgtggtaagcccggtcattttattgctaaatgtcctatgtctagtgacagtgaccgaggcgacgacaagaaggggagaagaaaggagaagaagaggtactacaggaagaagggcggcgatgcccatgtttgtcgcgagtgggactccaacgagagctcaagcgactcctccgacgacgaggacgccgccaacatcgccgtcaccaagggacttctcttccccaacgtcggccacaagtgcctcatggcaaaggacggcaaaaagaagaaggttaaatccaactcctccactaaatatgaatcgtctagtgatgataatgccagtgatgaggaggataatttgcgtattctctttgccaatcttaacatggagcaaaaagaaaaactaaatgaattgattagtgctattcatgaaaaggatgaccttttggactcccaagaggattgtctaattaaagaaaacaagaaacatgttaaggttaaaaaggcttatgctctagaagtagaaaaatgtgaaaaattgtctagtgagctaagcacttgccgtgagatgattgacaaccttagaaatgaaaatgctattttaaatgctaaggttgattcacatgtttgtaatgtttcaattcccaatcttagagatgataacattgacttgcttgctaagattgatgaattgaatgcatctcttgctaggcttagattagagaatgaaaatttaattgctaaggctaaagattttgatgtttgcaatgctactatttccgaccttagaactaagaatgaaatgttgcatgctaaggttgtagaacttaaatcttgcaaaccctctacatctaatgttgagcatgtttctatttgcactagatgtagagatattgatgttaatgctattcttgatcatatggctttaattaaacaacaaaatgatcatatagcaaaattagatgctaaaattgccgagcacaacctagaaaatgagaaatttaaatttgctcgtagcatgctttataatgggagacgccctggcattaaggatggcattggcttccaaaggggagacaatgtcaaacttaatgctcctccaaagaacttatctaactttgttaagggcaaggctcccatgcctcaggataacgagggttacattttgtaccctgccggctatcctgagagcaaaattagaaagattcattctaggaagtctcactctggccctaatcatgcttatatgtataagggtgagacatctagctctaggcaaccaacccatgctaagttgcctaagaagaaaattcctaatgcatcaaatgatcatgccatttcatttaaaacttttgatgcatcttatgtgcttactagcaaatccggcaaggtttatgcatccgggggctcaagttggatactcgacagcgggtgcacaaaccatatgactggggagaaaagaatgttctcctcatatgagaaaaaccaagatccccaacgagctatcacattcggggatggaaatcaaggtgtcactgtctttagaagaagtgatgattcaatagcatttaagggagtgttagagggtcagctatacttggtagattttgatagagctgaactcgacacttgcttaattgctaagactaacatgggttggttctggcatcgccgactagcccatgttgggatgaagaatcttcataagcttctaaagggagagcacattttaggattaacaaatgttcattttgagaaagacaggatttgtagcgcatgccaggcggggaagcaagttggagtccatcatccacacaagaacatcatgacgaccgacaggccgcttgagctactccacatggatctattcggcccgattgcctacataagcatcggcgagagtaagtattgtcttgtaatagtggatgattattctcgcttcacttgggtattctttttacaggaaaaatctcaaacccaagagactttaaagggattcttgagacgagctcaaaatgagttcggcttaaggatcaagaaaataagaagcgacaatgggacgaagttcaagaactctcaaattgaaggcttccttgaggaagagggcatcaagcatgagttctcttctccctacacacctcaacaaaatggtgtagtggagaggaagaatcgaactctattggacatggcaagaaccatgcttgatgagtacaagacaccggaccggttttgggtcgaagcagtcaacaccgcctgctacgccatcaaccggttatatcttcaccgaatcctcaagaagacatcctacgaactcctaaccggtaaaaagcccaacatttcatattttagagttttcggtagcaaatgctttattcttgttaaaagaggtagaaaatctaaatttgctcctaaaactgtagaaggttttttacttggttatgactcaaacacaagggcatatagggtctttaacaagtccactggactagttgaagtctcatgtgacgttgtgtttgatgaaactaacggctctcaagtagagcaagttgatcttgatgagataggtaatgaagaggctccatgcatcgcgctaaggaacatgtccattggggatgtgtgtcctaaggaatccgaagagcctccaaatgcacaagatcagccatcctcctccatgcaagcatctccaccaactcaaaatgaggaagaggctcaagttgatgaagggcaaaatcaggaagatgagccacctcaagatgatagcaatgatcaagggggagatgcaattgatcaagaaaaggaagatgaggacgaaccaaggccgccacacccaagagtccaccaagcaatccaacgagatcaccccgtcgacaccatcctcggcgatattcataagggggtaactactcgatctcgggttgctcatttttgtgaacattactcttttgtttcctctattgagccacacagggtagaggaagctctccaagattcggattgggtggtggcgatgcaagaggagctcaacaacttcactagaaatgaggtatggcatttagttccacgtcctaatcaaaatgttgtaggaaccaaatgggtcttccgcaacaagcaagatgagcatggtgtggtgacaaggaacaaagctcgacttgtggccaagggatactcccaagttgaaggtttggatttcggtgaaacctatgcacccgtagctaggcttgagtcaattcgcatattattagcctatgctacttaccatggctttaagctttatcaaatggacgtgaaaagtgccttcctaaatggaccgatcaaggaagaggtctatgttgagcaacctcccggctttgaagacagtaagtaccctaaccatgtttataggctctctaaggcgctttatgggctcaagcaagccccaagagcatggtatgaatgcctaagagatttccttattgctaatgacttcaaagtcggcaaggccgatcctacactctttactaaaactcttgaaaatgacttgtttgtatgccaaatttatgttgatgatattatatttgggtctactaacgagtctacatgtgaagagtttagtaggatcatgacacagaaattcgagatgtcgatgatgggggagttgaagtattttctaggattccaagtcaagcaactccaagagggcaccttcattagccaaacgaagtacactcaagacattctaaccaagtttgggatgaaggatgccaaacccatcaagacacccatgggaaccaatgggcatctcgacctcgacacgggaggtaagtccgtggatcaaaaggtataccggtcgatgattggttcattgctttatttatgtgcatctcgaccggacattatgctttccgtttgcatgtgtgcaagattccaatccgaccctaaggaatcccaccttacgaccgtaaaacgaatcttgagatatttggcttacacacctaagtttgggctttggtaccctcggggatccacatttgatttgattggttattcggatgccgattgggcggggtgcaaaattaataggaagagcacatcggggacttgccagttcttgggaagatccttggtgtcttgggcttcaaagaagcaaaattcggtcgctctttccaccgccgaagccgagtacattgccgcaggtcattgttgcgcgcaattgctatggatgaggcaaaccctgcgggactatggttacaaattaaccaaagtccctttgctatgtgataatgagagtgcaatcaaaatggccgacaatcccgtcgaacatagccgcactaagcacatagccattcggtatcattttcttagggatcaccaacaaaagggggatatcgagatttcttacattaatactaaagatcaattagccgatatttttaccaagccacttgatgaacaatcttttaccagacttaggcatgagctcaatattcttgattctagaaatttcttttgctag

SEQ ID NO: 30934 - DNA, 381 bp, Zea mays
  Clone ID: MRT4577_128222C.1
cgcaaaacgcagtatccctgcctgcacacggaatacggagttccggactcccctgcgcttgtagggcagaccggcgccggttagcctcctcctcgcacgcaaaaagagcaaccaggcgcttagcgataggggacgcagagaggggaaaggagaggaaacacccgtccacggaagataaagtccgtctgcgctgccaacggggtcacattggacggcgcctgatacaagagcctatccgagcgaaggcgagggactggagcaagcacgtgcatgcgggcggcggccgtcgacgccgcccccctggggggctgcgacgacgtgggagcgggctgcgcgaacacaagagaagcctcacgataggaccccaccacctgagaggca

SEQ ID NO: 30935 - DNA, 323 bp, Zea mays
  Clone ID: MRT4577_128223C.1
ggaaaatgggggttccaccataaaaggccacaaaaattactggcggggatccaaaatacttaattttaatgaccgaagacacgatacctacccaagtggaattctctggttaattttggacactacagtggttttgtcttatcaaagcgaaggccccatccaaaaacccacaacaatgctaccgaggggtatggtttttcccaggtaccagggtgatgactcttgaagcatgatccccttgatcgaaacaggtgtgatggtctgcaggagaactgatgaccgggagcctatggcaattctcgaatagaccacagccacaacaa

SEQ ID NO: 30936 - DNA, 2007 bp, Zea mays
  Clone ID: MRT4577_128224C.1
atgtcgggagatcacgccaagaaggagatggagaccggcgacaagcccactacaagccacgggaaagcttcatcggaagagtcccgcaacaaagggaaggggaaggagaataaatcctcttcccacaagacgcatcggagtggcgacaagaaaaagaagatgaggaaggtggtctactacgagaccgatacttcatcaccttccacctccggctccgatgcgccgtccatcacttctaagcgccatgagcgcaagaagtttagtaagatccccctacgctaccctcgcatttctaaacatactccattactttccgttccattaggcaaaccgtcaacctttgacggtgaagattacgctaggtggagtgatttgatgaaatttcacctaacctcactccacaaaagtatatggaatgttgttgagtttggagcacaggtaccatccgtaggggatgaggattatgatgaggacgaggtagcccaaatcgagcacttcaacgcccaagccacaactatactcctcgcctctctaagtcgagaggagtataacaaggtgcaaggattaaagagcgccaaggaagtttgggacgtgctcaagaccgcacacgagggagatgaactaaccaagatcaccaagcgggagacgatcgagggggagctcggtcgcttccggcttcgcaaaggggaagagccacaagacatgtacaaccggctcaaaaccttggtgaaccaagtacgcaaccttgggagcaaaaagtgggatgaccacgaaatggctaaggttattcttagatcacttattttccttaaccctactcaagttcaattaattcgtggtaatcctagatatacactaatgactcccgaggaagtaatcgggaattttgtgagctttgagtatatgatcaagggctcaaagaaaatcaatgagctagatgatccctccacattcgaagcacaaccggttgcattcaaggcaacagaagagaaggaggagtctacatcaagcagacaaccaatcgatgcctcaaagctcgacaatgaggaaatgacgctcgtcatcaagagcttccaccaaatcctcaagcaaaggaggggaaagattacaagccccgctccaagaaggtttgctacaagtgtgtggcgacgacaagaaggggagaataaagagaagaagaaatactacaagaagaagggtggcgacgctcatgtatgccgcgagtgggactcggacgagagctcctccgactcctcctccgacgaggacgccaccaacatcaccatcaacaagggccttctctttcccaacgtcggccacaagtgcctcatggcaaaggacggcaaaaagaagaaggttaaatccaaatcctccactaaatatgagtcctctagtgatgataatgctagtgatgaggaggataatttgcgtaccctttttgccaacttaaacatgcaacaaaaggagaagttaaatgaattgattagtgctatccatgagaaggatgatctcttggacacccaagaggacttccttattaaagaaaataagaagcatgttaaggttaaaaatgcttacgctctagaagtagaaaaatgtgaaaaactatctagtgagctaagcacttgccatgaaactattgacaaccttagaaatgaaaatgctagtttaattgctaaggttgaatcaaatgcttgtaatgtttcaattcccaatcttagaaatgataatgttgatttgcttgctaagattgaagaattgaacaattctcttgctagccttaggaatgaaaatgaaaaattgcttactaaggctaaagaattagatctttgcaatgttacaatttccgatcttagagataaaaatgatatattgcatgctaagattgttgaacttaattcttgcaaaccctctacatctaccacagagcatgtcactatttgcactagatgtagagatgtggatattaatgctgaaagggaattaggcttacacctattttcctaa

SEQ ID NO: 30937 - DNA, 1106 bp, Zea mays
  Clone ID: MRT4577_128225C.1
acttacctggacggggtcgactggggatcaggaagccctgtggcctaggtcagtggcccgcactgcacatggcgggtgcgctggcttaccatctccccaagtgggagagtggacgtcataatttgtggtagagggggtacgcgttcgcgcggcccctgctactacacacaaacacacaatggcaccagaaacgatgctcctcggcgtctgtgccgtgctgatggtggtcggcgtcacgaacgcggcggagggccaggtggcgtcggtcgtcgtgggcctggcgaggtgcgccgacagcacgaggaagaacatgaaggctgaggccggtttcaagggtcttcaggtggcgatcaagtgcaagaacagcaacggcgagtacgagacaaaggccgtgagtgagatccaaagctccggagccttcagcgtcccactcgccgccgacctccacggcgccgactgccacgcgcagctccacagcgccgccaataacgcgccttgccctgggcaggagccgtccaggatcgcgcccatgtcaggcggcaccttcgtcgccgtgcctggcaagatgcactacccgtccgcggagtgcgcgtccgcgtttctctgctccccgatcaagaagcacttgttagatcacttccacaaggcacccctgccggtgccggagtaccacccggtgcctgaccacagcaagccgccggtgccggagtaccccccggtgcctgagcacagcaagccggcgccggagtaccccccccccactccagtgtacgggcagccaaagccaactccgatctaccatcctcccgctgagccctgagttcgatcaccaacgaacgccagagctagaagaacggcaggcttttgttagttattaattcagtactgcccgtgttactagtgcgcctcatgcatggagaataaaatggtgtgaaatatagctgggagcttgtactttattagttatcgattgttgtttatctttaacttgcttaccgaaatcgtgttgtgcatcttgtctttttgtcaatgtaagcagagcctgttctcaaaaaaaaaaaaaaaaaaaaaaaaaaaaaagctcctctccgcctgttaccactgct

SEQ ID NO: 30938 - DNA, 3738 bp, Zea mays
  Clone ID: MRT4577_128226C.1
atgtacaaccggctcaagaccttggtgaaccaagtgcgcaacctcgggagcaccaaatgggatgaccatgaaatggtcaaggttattctaagatcacttgtatttcttaatcctacacaagttcaattaattcgtggtgatcctagatacaagctaatgtctctcgagaaggttataggaaaatttgtgagctttgaattgatgatcaaaggctccaagaaaatcatcgagcaaggcgcctcctccacacccaaaatgcaacccgtcgcattcaaggcgacggaggagaagaaagaagagtctacatcaagtagactccccatcgacgcctccaagctcgacaacgaggagatggcgctcatcatcaagagctttcgccaaatcctcaagcaaaggagggggaaggacttcaagccccgctccaagaaagtttgctacaagtgtggtaagcccggtcattttatcgctaaatgccctttatctagtgatagtggcagggataacgacaagagggggaagaagaaggagaagaagagatactacaagaagaagggtggcgatgcccatgtttgccaggagtgggactccaatgagagctccactgactcctcctccgatgaggatgccgcaaacatcaccatcaacaagggtcttctattccccaacgtcggccacaagtgcctcatggcaaaggacgacaaaaggaagaaggatgatttgctcaccctttttgccaacttaaacatgcaacaaaaagaaaaattgaatgaattgattagtgctattcatgagaaggatgaactcttggatagccaagaggacttccttattaaagaaaataagaatcatgttaaagttaaaaatgcttatgctcaggagatagaaaaatgtgaaaaattaactagtgagctaagcacttgccatgacactatttccaaccttagatttgaaaatgataaattgattgctaaggttgagaaagtaaatgttggtgatgattatcttgtcaaccttagaaatgataatgctaatttgattgctaagattgacaaattgaatgcatctctctctatccttaaaattgagaatgaaaaattaattgctaaggcaaaagatttaaatgtttgcaatgtttctatttccaatcttagagatgagaacgctattttacatgctaagattgttgaattaagtacttgcaaaccctctacatctgccgttgagcatgttactatttgcactagatgtagagacattaatgttgatgctattcatgatcacctagccctaattaaacaacaaaatgatcacatagctcaacttagtgccaaaattagtgagcatgacttggaaaatgaaaaatttaaatttgctagaagcatgctctatagtgggagacgcccaggcattaaggatggtattagcttccaaaagggagacaatgtcaagcttaatgcccccaagaaattatctaactttgttaagggcaaggctcccatggctcaggataacgagggttacattttataccctgccggttatctcgagcacaaaattaggagaattcattctaggaagtctcactctggctctcatcatgcttttatgtataagagtgaggcatctagctctaggcaatcaacccatgttaaattgcctaaaaagaagtctcctattgcatcaaatgaacctaatatttcatttaagacttttgatgcatcttatgtgctcactaacaaatcaggcaaagtagttgccaaatatgttgggggcaaacacaaggggtcaaagacttgtgtttgggtacccaaggtttatgcatccgggggctcaagttggatcattgatagcgggtgcacaaaccacatgacaggggagaaaaggatgttatcctcttacgagaaaaaccatgatccccaaagagctatcacattcggggatggaaatcaagattctttagattacaacttgctttctgtttctcaattatgcaaaatgggttacaactgtctttttacggatataggtgttactatctttagaagaagtgatgattcagtagcatttaaggaaaaatcacaaacccaagagaccttagagggattcttgagacgagctcaaaatgagttcggcttaaggatcaaaaagattagaagcgataatgggatggagttcaagaactcacaaatagaaggcttccttgaggatgagggcatcaagcatgagttctcttctccctacacaccacaacaaaatggtgtagtggagaggaagaatagaactctacttaacatggcgaggaccatgcttgatgaatacaagactttggaccggttttgggcggaagcaatcaacaccgcttgctacgccatcaactgtctctaccttcaccgaatcctcaagaagacatcatatgaactcctaaccggtaaaaatcctaatgtttcatattttagagtctttggtagcaaatgctttattcttgttaaaagaggtagaaaatctaaatttgctcctaaggctgtagaaggctttttacttggatatgattcaaacacaagggcatatagagtctttaacaagtccactggactagctgaagtttcttgtgacattgtgtttgatgagactaacggctctcaagtagagcaagttgatcttgatgagctagatgatgaagaggctccatgcgtcgcgctaaggaacatgtccattggggatgtgtgccctaaggaatccgaagagcctccacaagcacaagatcaaccatcttcctcaatgcaagcatctccaccaactcaagatgaggatcaagctcaagaggatgaaaatgaagatcaagaagatgagccacctcaagaaggggacaatgatcaagggagagatgcccatgatcaagacaaggaagatgatgacggtccaaggccgccacacccaagagtccaccgagcaatacaaagagatcaccccgtgaactccatccttggcgatattcataagggggtaactactcgatctcgtgttgctcatttttgtgaacattactcctttgtgtcttctattgagccatacagggtagaagatgcattaagggattcggattgggtgttggcaatacaagaggagctcaacaacttcacgaggaatgagctttatcaaatggacatgaagagtgccttcctcaatggaccaatcaaggaggaggtctatgttgagcaacctcccggctttgaggatagtgagtaccctaatcacgtctataaactctctaaggcactttatgggctcaagcaagccccaagagcatggtatgaatgcctaagagattttcttatagctaatggcttcaaagtcggaaaagccgatcctactctctttactaaaacaattgcaaatgatttgtttgtatgccaaatttatgttgatgatatcatatttggatctactaacaaatctacttgtgaagagtttagtaggattatggttcaaaaattcgagatgtctatgatgggggagttgaagtatttcttaggatttcaagtcaagcaactccaagagggcaccttcatcagccaaacgaagtacattcaagacatactcaccaagtttgggatgaaggatgccaagcccatcaagacacccatgggaaccaatgggcatctcgacctcgacacgggaggtaaatccgtagatcaaaaggtttgtgttggcatcaatcaccaaaaagggggagattga

SEQ ID NO: 30939 - DNA, 1341 bp, Zea mays
  Clone ID: MRT4577_128227C.1
cacaatggcaccagaaaggatgctcctcggcgtctgtgccgagctgatggtggtcggcgtcacgaacgcggcggagggccaggtggcttcggtcgtcgtgggcctggcgaggtgcgccgacagcacgaggaagaacatgaaggctgaggccggtttcaagggtcttcaggtggcgatcaagtgcaagaacagcaacggcgagtacgagacaaaggccgtgagtgagatccaaagctccggagccttcagcgtcccactcgccgccgacctccacggtgccgactgccacgcgcagctgcacagcgcaaaaaataactcgcattacccaactggtgggctcgcgggcgggggcggcactacacacaaacacacaatggcaccagaaacgatgctcctcggcgtctgtgccgtgctgatggtggtcggcgtcacgaacgcggcggagggccaggtggcgtcggtcgtcgtgggcctggcgaggtgcgccgacagcacgaggaagaacatgaaggctgaggccggtttcaagggtcttcaggtggcgatcaagtgcaagaacagcaacggcgagtacgagacaaaggccgtgagtgagatccaaagctccggagccttcagcgtcccactcgccgccgacctccacggcgccgactgccacgcgcagctccacagcgccgccaataacgcgccttgccctgggcaggagccgtccaggatcgcgcccatgtcaggcggcaccttcgtcgccgtgcctggcaagatgcactacccgtccgcggagtgcgcgtccgcgtttctctgctccccgatcaagaagcacttgttagatcacttccacaaggcacccctgccggtgccggagtaccacccggtgcctgaccacagcaagccgccggtgccggagtaccacccggtgcctgagcacagcaagccggcgccggagtaccaccctcccacgccggaataccaccctcccactccagtgtacgggcagccaaagccaactccgatctaccatcctcccgctgagcactgagttcgatcaacaacgaacgccagagctagaagaacggcaggcttctgttagttattaattcagtactgcacgtgttattactagtgcgcctcatgcatggagaataaaatggtgtgaaatatagctgggagcttgtactttattagttatcgattgttgtttatctttaacttgcttaccgaaatcgtgttgtgcatcttgtctttttgtcaatgtaagcagagcctgttctcagtcctaaaaaaaaaaaaaaaaaaaacgtcgctgaggccgtttttttcaagaaaaaaaaaaaaaaagccagt

SEQ ID NO: 30940 - DNA, 1034 bp, Zea mays
  Clone ID: MRT4577_128228C.1
aaaaaaaaaaaaaaaaaaaaaaaaaaaaaaaaaaaaaaaaaaaaaaaaaaaaaaaaaaaaaaaaaatcctccagtacactgtacacacacaagctatagctagctatagcttgcagcaccatggcagcaggaaggatgctcctcggcgtctgtgccgtcctgatggtggtcaccgtcacaaacacggcggagggccaggtggcgtcggtcgtcgtgggcctggcgaggtgcgccgacagcacgaggaagaacatgaaggctgaggccggtttcaagggtcttcaggtggcgatcaagtgcaagaacagcaacggcgagtacgagacaaaggccgtgagtgagatccaaagctccggagccttcagcgtcccactcgccgccgacctccacggcgccgactgccacgcgcagctccacagcgccgccaataacgcgccttgccctgggcaggagccgtccaagatcgcgcccatgtcaggcggcaccttcgtcgccgtccctggcaagatgcactacccgtccgcggagtgcgcgtccgcgtttctctgctccccgatcaagaagcacttgttagaccacttccacaaggcacccctgccggtgccggagtaccacccggtgcctgagcacagcaagccggtgccggagtaccacccggtgcctgagcatagcaagccggcgccggagtaccaccctcccacgccggaataccaccctcccactccggtgtacgggcagccaaagccaactccgatctaccatcctcccgctgagcactgagttcaacaacgaacgccagagctagaagaacggcaggcttctgttagttattaattcagtactgcacgtgttactagtgcgcctcatgtatggagaataaaatggtgtgaaatatagctgggagcttgtactttattagttatcgattgttgtttatctttaacttgcttaccgaaatcgtgttgtgcaaaaaaaaaaaaaaaaaagcccctaagagcctgttctctgaaaaaaaaaaaaaaaaagcggccctc

SEQ ID NO: 30941 - DNA, 225 bp, Zea mays
  unsure (1)..(225): unsure at all n locations
  Clone ID: MRT4577_128229C.1
cgccccgggccccggnccgggattcgcgccacgcgccccgacgagggggtctctgaggttggccttactgccactcgacggagctgacctgctgtgcggtcaatactatatttttggcagacaatgaccaacgctgctggtggcgacatgtcgcttcactggccggagcttaaaggatttccggtatttgttatgggacgacacccagcgggccatgccactggg

SEQ ID NO: 30942 - DNA, 386 bp, Zea mays
  unsure (1)..(386): unsure at all n locations
  Clone ID: MRT4577_12822C.1
aacgggggagctttaacaagcaatccaattttaaacagttttttttcaaacaaacccttttgggttcaattcaaccaggacaacttttgttggggatataacaatagtacatagataggccccagcatgggtaactaatttcgccgcaagcctagcacttgatctccttaagaccatgagagaaatagaggaatgtcggattaggggcaccatccttgtaataggggaataccacggacgcatcatccttcatgctctcaccaacaaaaaattgaagggccttcaacttgctaaggaaaagcttggttgcaccctcgacaccctttttgaactcatccgctttctttggctccacacagcagngagattcttgatgtattttttta

SEQ ID NO: 30943 - DNA, 737 bp, Zea mays
  Clone ID: MRT4577_128230C.1
ttttttttttttttttttactttttttttgaaagggaagtttctttttttttttttttttttactttttttttgaccttgggaatatgaattcatgcatcattataggaatacaaggaatctcataggaagcaatcattttttccaaaagggcatacattttcctacaggattgtagtcatccaaaatacttatggttttctaataaatccgggtgaatgcctttgatctaaaaaattcatatggttttccatttgttctgaagagagcctaagcatctgcaatttagcacatcaatttgtgcaccgcttgttcagataagcactagatcaagaagacacaatttgcaagctaaattgccatagcttcttggccaactcagcatctgaagcttgtgagctcgggttggctacatcacaattggtgaagtactttccacttatccccctcacttgaggatgcattgcaacatagcatgtcgttgcagcaccctgctcaactgttctacatatgattcttccaatggagttcagtaaagcagagacaatagtcctgttcctaaaaaggttagtcatgatgacaccaggatgaactgcattggctgaaatattcactccatcctccttgagtattcgagacagttcattagaatgaagaatattggcaagcttggattgcccataagcaacaaagtcgttcaaactagatggatcatgaattttgtcaaaacatatccct

SEQ ID NO: 30944 - DNA, 328 bp, Zea mays
  Clone ID: MRT4577_128231C.1
ggggagcacacataaggggcgatttccattgctgacaacaaagagggtggcatggtgtgagacattgttgatcaatgcaccactccttgcaaacgacccgaccattagtacaaacttgcgagaagagcctgccccacgggccacggtctatccggccggccgtctaagctccctccccaaggatgcggcgggcaagctggatttccttgggcatgatagaaacccgcctggcgtggatggcacaaaggttggtttcctcaaacaggccggccaggtatgcctcggcggccttctgcagcgcggtgacgggggatgaatggaaacgggg

SEQ ID NO: 30945 - DNA, 532 bp, Zea mays
  unsure (1)..(532): unsure at all n locations
  Clone ID: MRT4577_128232C.1
ggggttcccaaggacccattatggtatcacccctaacgagcaaaggaccaccacccagggaataatcttaagggaaacgggggggggcaaaactggtccgtccccagcttggcccctatgaatcaccgcgaggctgcccgcgggactgcccccccccccccttcctatcctttaaaactggcgttcgactggattccccactggatccggagcatcgaggccagcccgccaaagccaaccgtgggcccatggagcccatagccgcgctgccctccatgggatataccccggccggggccaccccaagggccaattccgccgaaatccctcacactggcgggcgctcgaacccgccttcccagggccccattccccccataggggggcgggttacaatggcctggcccggcgggggccccggggggccgggggaaaccccgggggggccccgcctaatggggccgggggggcaccgcccctctcgnccgcggcgggntcgcggggaggcccccgcgccgccctcccccccccc

SEQ ID NO: 30946 - DNA, 285 bp, Zea mays
  Clone ID: MRT4577_128233C.1
gtttagagaataccgcgcataatgggaaccggactagcgagtaaagagtcataagcaacctatagggtcccgagaaaaaataagaacttgcgcagaaatgtagagactggcagggaaaggtttctttttctccttaatataaccatactatggaagactgcattaggccaactactgcattaaagaactccagctataggggaggggaatcatactcccgtgagccctccgcttataacaaacgctcgccagctttatgactcttagaaaccctgtttatttcat

SEQ ID NO: 30947 - DNA, 310 bp, Zea mays
  Clone ID: MRT4577_128234C.1
ttctcagctaagttcaaacataggaacagtctttcgaataaagagaactttcttaggagttttatacagagtgagaacatgcgttgtttacatatgacgggaagacaatcaacacgatccaccgttagttccagccctttgagagggacttgcttgcttttgacagtaatatacttgtggcgtttgatgattcaatctaaagaatgaaacaaggggtccaatataggtctcattaagagcattctttgctgtgtatcttctggtactgagggtgctatttgatcctggacatcctatgaggtctgtgaaa

SEQ ID NO: 30948 - DNA, 634 bp, Zea mays
  Clone ID: MRT4577_128235C.1
ggccgcttttttttttttttttttccaacacaatagtggatctaaaatatcgataaagtagtctctaatggaataatacaaaatataaagcaacacaatatctaatctgacatagacagtttctaatagtataattaatagtaactagctgctaatgtagcaaatatgctaatatattctagtaatagctactctcccatctttcaaatcatcatcgaactcttctgagatattgggtgcctcccattcttcactatcattgatagcaccaggttcatctccacaatctatgatttttgcattatcatgtggatcattttcatctttctcttcaacctctaccacattttgtgcagcaatagaatttcttcttgaaaacacattgtggccttctcttggaaagtttcggccacaaaatgcttctgatgctccaatgacattatccacgaggtcctatgtaaggtcacacctacgcccaacttcagtgccagggaggacctgacgccgtgcagggaggggcatgcagggaactgccgcgcacacaaggaggaggaggagccacacgcataggagccgcgcgcgcacagggagcagctgccgcgcgtacagttagagcagctgccgtcccggccgg

SEQ ID NO: 30949 - DNA, 261 bp, Zea mays
  Clone ID: MRT4577_128236C.1
agtcacaagcctcatttcaaccctgcatgaccaattagtttcgcttcactccggcagtccatgcatatccatccatcagaattctcattctccacagcaacaaggcgcacgaccagcaccatcagcccgcaacaaaagacacaacaacgatggccttcctgcccgtgttccttcaagtcgggaccccgaacaacccctgcccgttcaaagtggtccggccgacgcttgggttccgcgccttcatggttgccggtgtcatct

SEQ ID NO: 30950 - DNA, 320 bp, Zea mays
  Clone ID: MRT4577_128237C.1
tgcacagccggcattcaatatgtacctgccgctcggcgccggccggtacgaatggacccgggtagccagcggttggtgacgacgtacatgcgcgggcgcgccggccggaaagctagcagcagtggcgcataagaatgacgagctaggaggaaggaaggagacgcgccactgggcaagtacatatacaaagtgaccgacgagcgtacagtggtatccgtgaatcatgtactagcatagacatagcatttgaacagcatgaggtgtacatacccccctagttcgttcagaagaatgctggtgactgtaactcctgtttctgc

SEQ ID NO: 30951 - DNA, 409 bp, Zea mays
  unsure (1)..(409): unsure at all n locations
  Clone ID: MRT4577_128238C.1
tccggcttcccggtcgaccccgcgtccggnctagttctagatcgcccgccgtcctctcctctcctccccggccccttcactccaccaacgaaccccatgcaggcagcagtgacgcgcatgccgtggggcatggcacaaacgctatgggtcggaatgggggtcgaagtaggcgctggatacggaggccctaactacagactgacgggggggggggggggggctagtccctctacttggtcaaacagaatggacttgcacgtgtctggcntgcagatttcgagttctgttaaccttcctccnnggaaaattttcagttcttctgctggtgatccctccgttggttccatttctaggtcttctcgttcgttccgggcggtcgctcttggggttcctcgctttcgttcgcgtg

SEQ ID NO: 30952 - DNA, 184 bp, Zea mays
  Clone ID: MRT4577_128239C.1
gaaagttttgcaagaaatcaggagattagttctaataagcaaaagaagagaataaggaatgtgaaagggctcaagggagaatgtcacaccaaatcaacttatgtatgtgcaacaacttgttaattctctttttgatgcttctggtatattaatttccttacaagggcttagacatcttaactct

SEQ ID NO: 30953 - DNA, 715 bp, Zea mays
  Clone ID: MRT4577_12823C.1
ccttgctcgctgcggcgtcgactacgacattgtcccttcgtgcccacgaacaaccgataatccgccggacgttgagatgttggattatcacggatctcctatctgcagacgagctcctgtcgcattcattcacctacaaagagctcgagaacggcgtcctgtgggaggtccagggaaatggacccacccaaggtcctgttgatgtggaaattgccgccaatccatccgacgagggtgatgaggaccaaagagttgatgacacagctgtgaaagtggctgatattgatgacacattccgtctacaggaggaacctccttttgacaagaaatcatttgcgtcttacatcaaaaaatacatcaagaatctcactgctgcgttgaattcagagaaagcggatgagttcagaaagggtgtcaaggcagcaaccaagtttctccttaccaagctgaaggacctccgatttttgttggagagtccatgaaggatgatgcgtttgcggtatacgcctattacaaggatggcgtcactaatccgacattcctctatttctctcatgggcttaaggagatcaagtgctaggggtgcggagaaattagttacccatgctgtgcactatctatgtactattattatatccaaaactatagttgtcctggatgaattgaactcaatagggtttgtttgagaaaaattgtcccaagattgaattggttg

SEQ ID NO: 30954 - DNA, 231 bp, Zea mays
  unsure (1)..(231): unsure at all n locations
  Clone ID: MRT4577_128240C.1
cccgggttttttttttccttgtgttcgccggactngnngncgggcgggggggggcgggtggacctaaatggtcntgacgatgcactctcttgttgtaacgtgcctgtggttatccgtggtgcgcatcggccttgtgccgctgttgttgcgcactcgggcccactcaatgttgcatctatctagtttttgctgattcatttcctaatgggggggggggggaaaaaattgtct

SEQ ID NO: 30955 - DNA, 218 bp, Zea mays
  Clone ID: MRT4577_128241C.1
agcagtcaccactcccaagccagtaccgagtcctacgagcagtcgcacgcaagtgtcaagagacgaaacggtcgacatggctcgcacgcaatctgccgtagcggtcgccgtggtggccgaggcgctgctggtggcagcggcggaaacctcctatgcggccgtcatcacctgcgggctggtgagatccgacatcgagcggtgtctctactacgcccgcc

SEQ ID NO: 30956 - DNA, 321 bp, Zea mays
  Clone ID: MRT4577_128242C.1
acgactacgcgtccgaaaaattgatacctgtttaacctaacatattttacatttactcgccggattattgggctcgtgaacttacatttggagctacagaatataccactgccattgatatctagactgttggatctgtaaaggctgaccttcttattagacaacctttagatcctgtgaaaagaggtgtttaacaaatggctgaaatcataaaaatttttggttcttccacacgaaaaggaaactagggcgtgaatccaaaacattttttattcaaagttccttacataaaaacccattcattgcacaaacttttttgta

SEQ ID NO: 30957 - DNA, 341 bp, Zea mays
  Clone ID: MRT4577_128243C.1
actcccagaccggtcggaggatactggacgcgcactaaacctaggcttctacgcctctacaattgactcccacccgggtgagcggaagggtgcactgtctacgacgggaacgtaagttgcactgtcggtgccaaccacagctgtctcccgtaaaggcgagaagtgtacagtagtggtagctaagtactacttgtggacgaggaggacgcgcgccttgctttctaggacaagggaagaaggtccctaccggggtcgtacaagagactgcacgttgcggaaactaaggtccacgaccagggtcgactcctccagagagactgcgagttccaccaggacgaacc

SEQ ID NO: 30958 - DNA, 783 bp, Zea mays
  unsure (1)..(783): unsure at all n locations
  Clone ID: MRT4577_128244C.1
cataaagctaagttctattatgcaaaacattattacaacacagaaacatgcagattcttttgcgctgcattgggagcagtgcaaccagtgagttacgaataaattcagctagtactagcagcaagcatgtgctactgattccaatacacatgaatcaattagcacccaactgaaataaagtacatccaaagttattgagttcaatgttattagatgcatgtgcataaggctcagactcgtcgttcttcacagcctgctagtagtgtcagtactggaggttctcaagggagctctattgatccagtcagtcagtcaggagatgttgatgctcctttgtcgcaacgctacctattcactgctaggtgctgctagttatgtgactccatctttgactctgccatgttctgatgttgttctcagtcttctactaagggaccaccttacacatccacttcaactcttcaaatattcatgcatagattcttgattctgatacttcctttcatatccctcactgcactgattttcttccatgtgtcattcttgttcccttactggtcgtacacatgatggatcctctctgttgataggcagggcgctctttcgtccaactcttttcatattcttaatgtttcctatgttccaaacctaactgtgcagcacaggagattcgattcgaaagcaattcaagcccggatgggttgcatgggtctcgggaggcccgggaagnacgaccccgtccttggacgggtgatgagatgagtcaggttggctcgattcgaa

SEQ ID NO: 30959 - DNA, 3087 bp, Zea mays
  Clone ID: MRT4577_128245C.1
ttaagttggtggagattcttgcatggaggaagatggttgatcttgtgcatttggaggttcttcggattccttaggacatacatccccaatggacatgttccttagcgcgacgcacaaagcctcttcatcacctatctcatcaacatcaacttgctctacttgagagccgttagtctcatcaaacacaatgtcacaagaaacttcaactagtctagaggacttgttaaagactctatatgcccttgtgtttgaatcatatcctagtaaaaagtcttctacagccttaggagcaaatttggattttctacctcttttaacaagaataaagcatttgctaccaaagactctaaaatatgagacattgggctttttaccggttaggagttcatatgatgtcttcttgaggattcggtgtagatacaaccggttgatggcgtagcaagcggtgttgaccgcctctgcccaaaaccgatctgaagtcttgtactcatcaagcatggtccttgccatgtccaatagagttctattcttcctctccactacaccattttgttgtggcgtgtagggagaagagaactcatgcttgatgccctcctcctcaagaaagccttcgatttgagagttcttgaactccgtcccgttgtcgcttctaattttcttgatccttaagccgaactcattttgagctcgtctcaagaatccctttaaggtctcttgggtatgagatttttccttggcggatttgttagtcaaaacataggatgcatcaaaagttttaaatgaaatgttagaatcatttgatgcaataggagttttcttcttaggcaattttgcacgggttgattgcctagagctagatgtctcacccttatacataaaagcatgactagggccagagtgagactttctagaatgaattctcctaatgttgtgctcgggataaccgacagggtacaaaatgtaaccctcgttatcctgaggcatgggagccttgcccttaacaaagttagataatcttttaggagggacattaagtttgacattgtctcctttttggaagccaatgtcatcgttgatgccagggcatctcccactatagagcatgcttctagcaaatttgaatttttcattttctaagtcatgctcatttattttggcattaaattgagctatgtgatcattttgtttcttaattaaatctaggtgatcatggatagcatcaacattaatgtctctacatctagtgcaaatagaaacatgctcaacggtagatgtagagggtttgcaagattttagttcaacaatcttaacatgtaaaatgtcattttcacttctaagattggaaattgtaacattgcaaacatctaggtctttagccttagcaatcaaattttcattttcatttctaagcctaataagagaatcattcaatttttcaatcctagcaagcaaattagcattatcatctctaaaattggaaattgaatcatcacatacatttgaatcaaccttagctattaaactagcattctcatttctaaggttggtaataatatcatggcacttgcttagctcactagatattttttcacatttttgtacttctagagcataagcatccttaaccttaacatgcttcttattttccttaattaggaagtcctcttgggagtccaagagttcatccttctcatgaatagcactaattaattcatttaatttttctttttgttgcatgttaaggttggcaaaaagaatacacaaattatcttcctcatcactaaaatgatattcatcactagaggatgcatatttagtggaggatcttgattttaccttctttcttttgccgtcctttgccatgaggcacttgtggtcgacgttggggaagaggagtcccttggtgacagcgatgtgggcggcgtcctcgtcggaggaggagtcgaaggagctctcttcggagtcccactcgcggcacacatgggcatcaccgcccttcttcttgtagtacctcttcttttctctcctcttgcctttcttgtcgtcgcccctgtcactgtcactagatagtggacattttgcaataaaatgaccgggcttaccacacttgtagcaaactttcttggagcggggcttgtaatccttccccctcctttgcttgaggatttggcagaagctcttgatgatgagcgtcatttcctcgttgtcgagcttggaggcgtcgatgggtagtctacttgaggtagactcctccttcttctcctctgttgccttgaatgcgacgggttgcacctcgagtgtggaggcgccaccttgctccaagttgatgatttgtttgaagcctttgatcatcaattcaaagctcacaaactttcctataacctcctcgggagacattagcttgtatctaggatcaccacgtattaattgaacttgagtaggattacgaaatacgagtgatctaagaataaccttgaccatttcatggtcatcccacttggtgctcctgaggttgcgcacttggttcaccaaggtcttgagccggttgtacattgcttgtggcttctctccttcgttgaggatgaatcgaccgagctccccctcgatcgtctcccgcttggtgatcttggtcacctcgtctccttcgtgcgcggtcttgagcacgtcccaaatctccttggcgctcttcaacccttgcactttgttatactcctgcgctccaaattcaacaatgtcccatatacttgcgtggagtgacgttaggtgatgtctcattttgtcactccacatacaataatcctcaccatcaaagaatggtggtttgctatacttattgcgctcatggcgcttagaagtgacggacgacgcgtcggagccagatgtagaaggtgatgatgaatcggtctcgtagtagaccaccttcctcatcttctttttcttgtcgccactccgatgtgatttgtgggaagaggctttcttctccttccccttttcctttttgcgggactcctccgatgaagctttcccgtggcttgtagcgggcttgtcgccggtctccatctccttcttggcgtgatctcccgacat

SEQ ID NO: 30960 - DNA, 4977 bp, Zea mays
  Clone ID: MRT4577_128246C.1
atgtcgggagatcacgccaagaaggagatggagaccggcgaaaagcccactacaagccacgggagcacttcatcggaagagtcccgcaccaagaggaaggaaaagaaagactcctccaaagggaaggagaagaagaaggactcctccaaagggaaggagaagaaatcttcttctcacaaagagaagaaggagaagtcctcctcccacaagccgcaacggagtggggacaagaaaaagaggatgaggaaggtggtctactacgagaccgattcttcatcggcatccacctccggctccgacgcggcgtccgtcacttctaagcgccaagagcgtaagaagtatagtaagattcccctacgataccctcgcatttctaaacatacacctttacttttcgtaccattaggcaaaccaccaacttttgacggtgaagattatgctaggtggagtgatttaatgcgatttcatctaacctcactccacaaaagtatatgggatgttgttgagtttggtgcacaggtaccatccgtaggggatgaagactatgatgaggatgaggtggcccaaatcgagcacttcaactctcaagcaacaacaatactcctcgcctctctaagtagagaagagtataacaaagtgcaagggttgaagagtgccaaggaggtttgggatgtgctcaaaaccgcacacgaaggagatgagctcacaaagatcaccaagcgggagacgatcgagggggagctcggtcggttccggcttcgcaaaggggaggagccacaaaacatgtacaaccggctcaagaccttggtgaatcaagtgcgcaacctcgggagcaaaaaatgggatgaccacgaaatggttaaggttattttaagatcacttatctttcttaaccctactcaagttcaattaattcgtggcaaccctagatatacactaatgactcccgaggaagtaatcgggaattttgtaagttttgagtgcatgatcgaaggctcgaggaagatcaacgagcttgatgatccctccacgtccgaagctcaacccgtcgcattcaaggcgacggaggagaagaaggaggagtctacatcaagtagaacacccatcgacgcctccaagctcgacaacgaggaaatggcgcttgtcatcaaaagctttcgccaaatcctcaagcaaaggagggggaaagactataagtctcgctccaagaagggcgacgacaagaaggggagaagaaaggataagaagaggtactacaagaagaagggcggcgatgctcatgtttgtcgggagtgggactccgacgaaagctctagcaactcctccgacgacgaggacgccgccaacatcgccgtcaccaaaggactcctcttccccaacatcggccacaagtgcttcatggcaaaggacggcacaaggaagaaggttaaatctaaatcctccactagatatgagtcctctagtgatgataatgctagtgatgaggaagataatttgcgtaccctttttgccaaccttaacatggaacaaaaggaaaaattaaatgaattaattagtgctattcatgaaaaggatgaccttttggattctcaagaggacttcctaattaaggaaaataagaaacatgttaaggttaaaaatgcttatgctctagaaattgagaaatgtgaaaaattatctagtgagctaagcacttgccatgagacaatagacaaccttagaaatgaaaatgctaatttgttagctaaggttgattctcatgtttgtaatgtttcaattaccaattctagaaataatgatgatgatttacttgctagaattgaagaattgaacatttctcttgctagccttaggattgaaaatgaaaaattgcttgctaaggctaaaaattttgatgtttgcaatgctactatttccgaccttagaactaagaatgacatgttacaagctaaggttgtagaattaaaatcttgcaaaccctctacatctattgttgagcatgtatctatttgtactagatgtagagatgttgatattaatgctattcatgatcacatggctttaattaaacaacaaaatgatcatatagcaaaattagatgctaaaatttccgagcataacttagaaaatgaaaaatttaaatttgctagaagtatgctctatagtgggagatgccctggcatcaaggatggtattggattccaaaggggagacaatgtcaaacttaatgcccctcctaaaagattgtctaactttgttaagggcaaggctcccatgcctcaggataacgagggctacactttataccctgccggttatcccgaggacaaaattaggagaattcattctaggaagtctcactctggccctaaccatgcttttatgtataagggtgagacatctagctctaggcaaccaacccgtgctaagttgcctaagaagaaaactcctagtgcatcaaatgaacatagtctttcatttaaaactttcgatgcatcttatgtgttgactaacaaatccggcaaagtagttgccaaatatgttgggggcaagcacaaggggtcaaaaacttgtgtttgggtacccaaagttcttgtgtctaatgccaaaggacccaaaaccatttgggtttatgcatccgagggctcaagttggatactcgacagcgggtgcacaaaccatatgacaagggagaaaaggatgttctcctcctacgagaaaaaccaagatccccaacgagctattacattcggggatggaaatcaaggtttggtcaaaggtcttggtaaaatagctatatctcctaaccattctatttcaaatgtttttcttgtagactcattagattacaatttgctttctgtatctcaattatgcaaaatgggctacaactgtcttttcactgatataggtgtcactgtctttaggagaagtgatgattcaatagcatttaagggagtgttggagggtcagctatacttagtagattttgatagagctgaactcgacacttgcttaattgctaagactaacatgggttggctctggcaccgccgactagctcatgttgggatgaagaatcttcataagcttctaaagggagagcacattttaggactaacaaatgttcattttgagaaagacaggatttgtagcgcatgccaagcaggaaagcaagttggtactcatcatccacacaagaacatcatgacgaccgacaggccgcttgagctactccacatggatctattcggcccgattgcctacataagcatcggcgggagtaagtattgtcttgtaatagtggatgattattctcgcttcacttgggtattctttttgcaggaaaaatctcaaacccaagagaccttaaaaggattcttgagacgagctcaaaatgagttcggcttaaggatcaagaaaattagaagcgacaacgggacggagttcaagaactctcaaatcgaaggcttccttgaggaggtgggcatcaagcatgagttctcttctccctacactccacaacaaaatggtgtagtggagaggaagaatagaactctattggacatggcaagaaccatgcttgatgagtacaagacttcggatcggctttgggccgaggcggtcaacaccgcttgctacgccatcaaccgaaaatccaaatttgctcctaagactgtagaaggctttttactaggatatgattcaaacacaagggcatatagagtctttaacaagtcctctggacaagttgaagtttcttgtgacgttgtgtttgatgagactaacggctctcaagtagagcaagttgatcttgatgaaataggaaatgaagaggctccatgcatcgcgctaaggaacatgtccattggggatgtgtgtcctaaggaatccgaagagccaccaaatgcacaagatcaaccatcctcctccacgcaagcatctccaccgactcaaaatgaggcggaagctcaagttgatgaagtagaagatcaagcaaatgagccacctcaagatgagggcaatgatcaagggggagatataaatgatcaagacaaggaggatgaagagcaaaggccgccacaccaaagagtccaccaagcaatccaacgagatcaccccatcgacaccatcctcggcgacattcataagggggtaactactagatctcgtgttgcacatttttgtgagcattactcttttgtttcctctattgagccacacagggtagaggaagcactccaagattcgaattgggtagtggcgatgcaagaggagctcaacaacttcactaggaatgagctttatcaaatggacgtgaaaagtgccttcctcaatggaccaatcaaggaagaggtctatgttgagcaacctcccggctttgaagatatgaagcaactccaagagggcaccttcattagccaaacgaagtatactcaagacattctaaacaagtttgggatgaaggatgccaagcccatcaagacacccatgggaactaatgggcatctcgacctcgacacgggagggtgtaaaatcaatagaaagagcacatcggggacttgccagttcttgggaagatccttggtgtcttgggcttcaaagaagcaaaattcggtcgctctttccaccgccgaagccgagtacattgccgcaggccattgttgcgcgcaattgctttggatgaggcaaaccctgcgggactacggttacaaattaaccaaagtccctttgctatgtgataatgagagtgcaatcaagatggcggataatcccgtcgaacatagccgcactaaacacatagtcattcggtatcattttcttagggatcaccaacaaaagggagatatcgagatttcttacatcaacactaaagatcaattagccgatatctttaccaagcctcttgatgaacaaacttttaacaaacttaggcatgagctcaatattcttgattcgcgcaatttcttttgctaa

SEQ ID NO: 30961 - DNA, 2523 bp, Zea mays
  Clone ID: MRT4577_128247C.1
atgtcgggagatcacgccaagaaggagatggagaccgacgacaagcccgctacaagccacgggaaagcttcatcggaggagtcccgcaaaaaggaaaaggggaaggagaagaaagcctcttcccacaagtcgcatcggagtggcgacaagaaaaagaagatgaggaaggtggtctactacgagaccgatacttcatcaccttccacctccggctccgacgcgccctccgtaacttctaagcgccatgagcgcaagaagtttagcaaaccgccaacctttgacggtgaagattatgctaggtggagtgatttgatgaaatttcacctaacctcactccacaaaagtatatggaatgttgttgagtttggagcacaggtaccatacgtaggggatgaggattatgatgaggacgaggtggcccaaatcgagcacttcaactcccaagccacaaccatactcctcgcctctctaagtagagaggagtacaacaaggtgcaaggattaaaaagcgccaaggaagtttgggacgtgctcaagaccgcgcacgagggtgatgaactaaccaagatcaccaagtgggaaacgatcgagggggagctcggtcgcttccggcttcgcaaaggggaagagccacaagacatgtacaaccggctcaaaaccttggtgaaccaagtgcgcaacctcgggagcaaaaagtgggatgaccacgaaatggttaaggttattcttagatcacttattttccttaaccctactcaagttcaattaattcgtggtaatcctagatatacactaatgacttccgaggaagtaatcgggaattttgtgagctttgagtatatgatcaagggctcaaagaaaatcaatgagctagatgatccctccacatccgaagcacaaccggttgcattcaaagcaacggatgagaagaaggaggagtctacatcaagtagacaaccaatcgacgcctcaaagctcaacaatgaggaaatgacgctcgtcatcaagagcttccgccaaatcctcaaacaaaggaggggaaaggactacaaatcccgctccaagaaagggcgacgacaagaaggggagaaggagaagaagagatactacaagaagaagggcggtgatgcccatgtttgccgggagtgggactccgacgagagctccaccgactcctcctccgacgaggacgccgcaaacatcgccatcaccaagggacttctcttccccaacgtcggccacaagtgcctcatggcaaaggacggcaaaaagaagaaggttaaatccaaatcctccactagatatgagtcttctagcgatgataatgctagtgatgaggaagataatttgcgtactctttttgccaacttaaacatgcaacaaaaagagaaattaaatgaattgattagtgatatccatgagaaggatgatctcttggacacccaagaggacttccttattaaagaaaataagaagcatgttaaagttaaaaatgcttatgctctagaagtagaaaagtgcgaaaaattatctagtgagctaagcacttgccatgagactatagacaaccttagaagtgaaaatgctaatttgttagctaagattgaagaattaaacatttctcttgctagccttagggttgagaatgaaaaattaattgctaaggctaaagaattagatgtttgtaatgttacaatttccgatcttagagataaaaatgatatattgcgtgctaagattgttgaacttaattcttgcaaaccctctacatctatcattgaacatactactatttgcactagatgtagagatgttaatattgatgttattcatgatcacatggctttaattaaacaacaaaatgatcatatagaaaaattagatgctaaaattgacgagcatgacttagagaacgaaaattttaaatttgctagaagcatgctctatagagggagacactctggcattaaagatggcattggcttccaacagggaggcaatgtcaaacttaatgcccctcctaagaaattgtctaactttgttaagggcaaggctcccatgcctcaggataacgagggttacattttgtaccctgccagttatcccgaggacaaaattaggagaattcactctaggaagtctcactctggccctaaccatgcttttatgtataagggtgagacatctagttctaggcaaccaacccctgctaagttgcctaagaagaaaactcctagtgcatcaaatgaacatagcatttcatttaaaacttttgatgcatcatatgttttaactaacaaatccggcaagatagttgctaagtatgttgggggcaagcacaaggggtcaaagacttgtgtttgggtacccaaagttcttgtgtctaatgccaaaggacccaaaaccatttgggtttatgcatctgggggctccagttggattatcgacagcgggtgcacaaaccacatgacaggggagaagaagatgttctcctcctatgagaaaaaccaagatccccaatga

SEQ ID NO: 30962 - DNA, 2007 bp, Zea mays
  Clone ID: MRT4577_128248C.1
gataaatcccaaacccaagagactttaaagggattcttgagacaggctcaaaatgagttcggattgagaataaaaaagataagaagcgacaacgggacggagttcaagaactctcaaattgaaggctttcttgatgacgagggcatcaagcatgagttctcttctccctacactccacaacaaaatggtgtagtggagaggaagaatagaactctacttgacatggcaaggaccatgcttgatgagtacaagacttcgaaccggttttgggcggaagcaatcaacaccgcctgctacgccatcaaccgtctctaccttcaccgaatcctcaagaagacatcgtatgaactcctcaccggtaaaaagcccaatgtttcatattttagagtctttggtagcaaatgttttattcttgttaaaagaggaagaaaatctaaatttgctcctaaggctgtagaaggctttttacttggttatgactcaaacacaagggcatatagagtctttaacaagtccactgggctagttgaagtttcttgtgacattgtgtttgatgagactaactgctcccaagtggagcaagttgatcttgatgagctagatgatgaagaggccccatgcgtcgcgctaaggaacatgtccattggggatgtctgtcctaaggaatccgaggagcctccacatgcacaagatcatccatcatcttccattcaaacatctccaccaacccaagatgaggatcaagatcaagaggatgaaaatgaagatcaagaaaatgagccacctcaagaggaggacaatgatcaagggggagatgccaatgatcaaaacaaggaagatgatgagggaaccaagtgggtcttccgcaacaagcaagatgagcatggtgtggtgacaaggaacaaagcccgacttgtggccaatggatattcacaagtcaaaggtttggatttcggtgaaacctatgcacccgtagctaggcttgagtcaattcgtatattacttgcctatgctacttaccatggctttaagctttatcaaatggacgtgaaaagtgccttcctcaatggaccaatcaaggaggaggtctatgttgagcaacctcccggctttgaagaaagtaagtaccctaaccatgtgtataaactctctaaggcgctttatgggctcaagaaagccccaagagcatggtatgaatgcctaagagatttccttatcactaatggcttcaaagtcgaaaaagccgatcctactctctttactaaaacaattgcaaatgatttgtttgtatgccaaatttatgttgatgatatcatatttgggtctactaacaaatctacttgtgaagagtttagtaggattatgattcaaaaattcgagatgtctatgatgggggagttgaagtattttctaggatttcaagtcaagcaactccaagagggcaccttcatcagccaaacaaagtacattcaagacatactcaccaagtttgggatgaaggatgccaagcccatcaagacacccatgggaactaatggacatctcgacctcgacacgggagggtgtaaaattgatagaaagaacacatcagggacttgtcagttcttgggaagatccctggtgtcttgggcttcaaagaaacaaaattcagtagctctttctaccgccgaagccgagtacattgccacaggccattgttgtgtgcaattgctttggatgaggcaaacccttagggactatggttacaaattaaccaaagtccctctcctatgtgataatgagagtgcaatccgcatggcggataatcccgttgagcacagccgcactaagcacatagccattcgatatcactttttgagagatcaccaacaaaggggggatatcgagattgcttatgttagtaccaaagaacaattagccgatatatttaccaagccattagatgagaaaacttttaccaaacttaggcatgagctaaacattcttgattttaggaattttgattga

SEQ ID NO: 30963 - DNA, 511 bp, Zea mays
  Clone ID: MRT4577_128249C.1
gtattcttccaggattcatgtaagccgagaaggagcccgagaaagctctctcgtcatcttgatagagttaagctgaagtagtctcccatcacggaaggtagagttcctgcgcttcagctctccacggtgagtcgtgaattcctcgagtatttcggaagcatatccaggctgagcatctccgctgcgaacagactcgtcctcacacactgatggatcaggtgtaaaacctttcagttcttcgtactcggctgcatctaattccctcaggtggctcggatcaaaatatttcgggatgaagtgctgcctgatgataatgaggaagaagaagagcagtgggaagaggattcctgctactggtatccatgtcatcccaaagacgatcaacagatagattagctggaagagtgtgaaggtgcatattgtgttgaaaggcactgactccatgaaggatgcatgtgctccttcaagaaccttgtagcgtctttgaggcgtgatgaaaagaagttgtatc

SEQ ID NO: 30964 - DNA, 357 bp, Zea mays
  unsure (1)..(357): unsure at all n locations
  Clone ID: MRT4577_12824C.1
cccacgcgnccgcccacgcagacggacccacgcgnccgcggacgcgagggcaagcacaggggcaggcnancaanggcggcggagggngnccccccaagcgacaccgagccaccaaaggcacaagccgacanaaggcggcacagccacaccaaccacacgccccagncacngaggagcgccgnggagcnaggcaaccccacggcgaacaaccgccaaggcggggcngccncagccgcagagccggacacggcgcngncncnccccnccacgaaacagccgagccaccgccggcagcngcggcaacaagccgcggcgggcgggggcaccgncgacaagcagagcacggaggaagagcgg

SEQ ID NO: 30965 - DNA, 491 bp, Zea mays
  unsure (1)..(491): unsure at all n locations
  Clone ID: MRT4577_128250C.1
tatctataatagctggcagtgacgctgataggaattactaggggttttcgtaacttatattggctcaaggctaaaaataacaattctactcatcatactcacctctcactctcattcctagacttgatttcttcaagttcgacacccgctcctttgcctctggcactctcgaaatcatcgttagcctgcccatccgtggctcctctctcgctgtccccgaccgcatcctcgtctccagtatcggtgttaccaacagtggcaccatcttctcccgtgttgtcgacagcactttccacagctctggtatcttcttttgctctcttacttcttccagtcttccgggtcccagttttgccagcggcntctccactattggttccccctctggtctgttctttggctttacctttggtttctttggcttctcttttcatagtggtcttccccaaatgacaccccagtcccacaggggtctggctgcngcccccccg

SEQ ID NO: 30966 - DNA, 3685 bp, Zea mays
  Clone ID: MRT4577_128251C.1
ctaagggtttgcctcatccaaagcaattgcgtgcaacaatggcctgtggcaatataatcggcctcggtggtagaaagagctacggaattttgcttctttgaatcccaagacaccagagaccttcccaagaactggcaagtccccgatgtgctctttcttttgatctacggatttacctcccgtgtcgaggtcgagatgcccattggttcccatgggtgtcttgatgggcttggcatccttcatcccaaacttgtttagaatgtcttgaatatacttcgtttggctaatgaaggtgcccgcttggagttgcttcacttgaaatcccaagaagtacttcaactcccccatcatagacatctcgaatttttgtgtcatgatcctactaaattcctcacatgtagattcgttagtagacccaaatataatatcatcaacataaatttggcatacaaacaaatcattttcaagagttttagtaaataaagtaggatccgccttttcgactttgaagccattagtgataagaaaatctcttaggcattcataccatgctgcttggggcttgcttgagcccataaagcgccttagagagtttgtaaacatggttaggatactcactatcttcaaagccgggaggttgctcaacatagacctcttccttgattggtccattgaggaaggcactcttcacgtccatttggtaaagcttgaagccatggtaagtagcataggcaagtaaaatgcgaattgattctagcctagctacgggtgcataggtttcaccaaaatccaaaccttcgacttgtgaatatcccttggccacaagtcgggctttgttccttgtcaccacaccatgctcatcctgtttgttgcggaagacccacttggttcctacaacattttggttaggacgtggaactaaatgccatacctcgttcctagtgcagttgttgaggtcctcttgcatcgccaccacccaatccgaatcttgtagtgcttcctctaccctgtgtggctcaatagaggaaacaaaagagtaatgttcacaaaaatgagcaacacgagatcgagtagttacccccttttgaatatcgccgaggatggtgttcacggggtgatctcgttggattgcttggtgaactcttgggtgtggcggtcttggaacttgttcatcttccttaacttgatcatgggcatctcccccttgatcattgctctcctcttgaggtggctcaacttcttgatcttctcctttatctttttgagcctcatcctcatcttgagttggtggagatgcttgtgtgtaggaagatggttgatcttgtgcttgtggaggctcttcggattccttaggacatacatccccaatggacatgttccttagcgcgacgcacggagcctcttcatcatctaactcatcaagatcaacttgctctacttgagagctgttagtctcatcaaacacaatgtcacaagaaacttcaactagtccagtggacttgttaaagactctatatgcccttgtgtttgaatcatatcctagtaaaaagccttctacagccttaggagcaaatttggattttctacctcttttaacaagaataaagcatttgctaccaaagactcgcctccgcccaaaaccgatctgaagtcttgtatcatcaagcatggtccttgccatgtccaatagagttcgattcttcctctccactacaccattttgttgtggcgtgtagggagaagagaactcatgcttgatgccctcctcctcaaggaagccttcgatttgtgagttcttgaactccattccgttgtcgcttcttattttcttgatccttaagccaaactcgttttgagcccgtctcaagaatccctttaaggtttcttgggtgtgagatttttccaaaccttgatttccatccccgaatgtgatagctcgttggggatcttggtttttctcgtaggaggagaacatcttcttctcccatgtcatgtggtttgtgcatccgctgtcgatgatccaacttgagaccccggatgcataaaccttgccggatttgttagttaaaacataagatgcatcaaaagttttaaatgaaatgttagaatcatttgatgcaatagaagttttctttctaggcaatttggcacgggttgattgcctagagctagatgtctcacccttatacataaaagcatgattagggccagagtgagacttcctagagtgaattctcctaattttgtgctcgggataaccggcagggtacaaaatgtagccctcgttatcctgaggcatgggagccttgcccttaacaaaattagacaatcttttaggagaggcattaagtttgacattgtctcccttttggaagccaatgccatccttgatgccagggcgtctcccactatagagcatgcttctagcaaatttaaatttttcattttctaagtcatgctcatttattttggcattaagttgagctatgtgatcattttgtttcttaattaaagctaggtgatcatgaatagcatcaacattaatggaaacatgctcgacagtagatgtagagggtttgcaagatttaagttcaacaatcttagcatgtaaaatgtcattttcacttctaagattggaaattgtaacattgcaaacatctaagtctttagccttagcaattaatttttcattatcatttctaaggctagcaagagaatcattcaatttttcaatcttagcaagcaaattagcattatcatctctaagattggaaattgaatcatcacatagatttgaatcaaccttagctattaaactagtattctcatttctaaggttggtaataatatcatggcacttgcttagctcactagataatttttcacatttttctacttctagagcataagcatccttaaccttaacatgcttcttattctccttaattaggaagtcctcttgggagtccaagagttcatccttctcatgaatagcactaattaactcatttaatttttctttttgttgcatgttaaggttggcaaaaagagtgcgcaaattatcctcctcatcactagaattatcttcatcactagaggatgcatatttagtggaggaccttgattttaccttcttccttttgtcgtcctttgccatgaggcacttgtggccgacgttggggaagaggagtcctttggtgacgacgatgttggcggcgtcctcgtcggaggaggagtcggaggagctctcgtccgagtcccactcgcggcatacatgggcatcgccgcccttcttcttgtagtatctcttcttttctctcctctttcctttcttgtcgttgcccctgtcactatcacttgataatggacattttgcaataaaatgaccgggcttaccacacttgtagcacactttcttggtgcgggacttgtagtccttccctctcctttgcttgaggatttggcggaagctcttgatgatgagcgccatttcctcgttgtcgagcttggaggcgttgatggggagtctacttgatgtagattctttcttcttctcctctgtcgccttgaatgcgaccggttgtgcttcgggcgtggagggaccatcttgctcgatgattttatttgagcctttgatcatcaattcaaagctcacaaattttcctattacttcctcgggagacat

SEQ ID NO: 30967 - DNA, 877 bp, Zea mays
  Clone ID: MRT4577_128252C.1
ccaccgctttaaaatccccgcagccaccgaacggatacaagagctccgtcacgtccgcccacctcgccccccccatccagctccgaccctagggtttccatccggctcttccggaagcttccgaaaatggccaccgacgagctcgcccacgccgtcgcccccgccccggccgggggcgaccactccccggccttctcgttcagcatctggccgccgacgcagcgcacgcgggacgcggtggtgcggcgcctcgtggagacgctcgcgggggacaccatcctctgcaagcgctacggcgcggtgccggccgccagacgccgagcccgcggcgcgcgccatcgaggccgaggccttcgacgccgcggcctccacgggaggcgccgctgccgcctccgtggaggaggggatcgaggcgctgcagttctactccaaggaggtgagccgccgcctcctcgacttcgtcaagtcccgctccgcggacgccaaggccggtgacacgccgtcggaggaggcccgggctcctggcgcgcccgaggccgaggccgcccagcccgcggcgtgagcgccggacagccattcgttccgtttttgtatttcctgcagcctgtgtgtggcttgggtctgagtttgtatgacttgaaaacgttagctgtttgcacatctatgcaattcttgttcttccatgaatagccccgttctagtgcgtgttccttccatgaatagccccgttctagtgcgtgttcctgtttttctgggaatccctgcccgatcctgaggttgtcaaaccatcgcagcattgacctctgtctgtgtgcagcttcgagtgatggtcgaattgttccggagaccgaattgacaagcaattaagattcctccc

SEQ ID NO: 30968 - DNA, 274 bp, Zea mays
  Clone ID: MRT4577_128253C.1
cagacgcgtagcttctagcgccatcacccgaggaataagaccacaccatgctgcgttacgcgggcaggatgctttcggcttccgtcttctgacggcgcactcaggcagccgctaagggacctcttgacggagatcgcgccccttatcgggacgacgattgtgctttacaccgtaaaccaacactgcttttcatactctacatccagtatgcaactgccaggaggtcctctttaactgagacacttgtcccaggaaaccaagaagctgggctatc

SEQ ID NO: 30969 - DNA, 5112 bp, Zea mays
  Clone ID: MRT4577_128254C.1
ttataccaaagacgaagttccttttgcgtttgagcttttactctctcccccaaggatgaagtccttttccttgatgctcatttctcccccaaagacgagagagttgctcggagtgatggcgaagtatgagttacggagtggaagcctttgtcttcgccgaagactccaattccctttcaatatacctatgacttggtttgaaataaacttttgatccacggacttacctcccgtgtcgaggtcgagatgcccattagttcccatgggtgtcttgatgggtttggcatccttcatcccaaacttagcaagaatgtctcgagtgtacttcgtttggctaatgaaggtgccctcttggagttgcttgacttggaatcctagaaaatacttcaactcccccatcatcgacatctcgaacttctgtgtcatgatcctactaaactcttcacatgtagactcgttagtagacccaaatataatatcatcaacataaatttggcatacaaacaagtcattttcaagagttttagtaaagagtgtaggatcggccttgccgactttgaagccattagcaataaggaaatctctaaggcattcataccatgctcttggggcttgcttgagcccataaagcgccttagagagcctatagacatgattaggatactcactgtcttcaaagccgggaggttgctcaacatagacctcttccttgattggtccgttgaggaaggcacttttcacgtccatttgatagagcttaaagccatgataagtagcataggccaataatatgcgaattgactcaagcctagctacgggtgcataggtttcaccgaagtccaaaccttcgacttgtgaataccctttggctacgagtcgagctttgttccttgtcaccacaccatgctcatcttgcttgttgcggaagacccatttggttcctacaacattttggttaggacgtggaactaaatgccagacctcattcctcgtgaaattgttgagctcctcttgcatcgccaccacccaatccgaatcttggagagcttcctctaccctgtgtggctcaatagaggaaacaaaagagtaatgttcacaaaaatgagcaacccgagatcgagtagttacccccttatgaatgtcgccgaggatggtgtcgacggggtgatctcgttggattgcttggtggactcttgggtgtggcggtcttggttcttcctcatcctccttttcttgatcatttgtatctcccccttgatcattgctatcatcttgaggtggctcgtcttcttgattttgctcttcatcattttgagcctcatcctcattttgagttggtggagatgcttgcatggaggaggatggttgatcttgtgtacttggaggctcttcggattccttaggacacacatccccgatggacatgttccttagcgcgatgcatggagcctgttcttcacctatctcatcaagatcaacttgctctacttgagagccgttagtttcatcaaacacaacgtcacaagagacttcaactagtccagtggacttgttaaagaccctatatgcccttgtgtttgagtcataaccaagtaaaaagccttcggttaggagttcatatgatgtcttcttgaggattcggtgaagatataaccggttaatggcgtagcaggcggtgttgactgcttcggcccaaaaccggtccggtgtcttgtactcatcaagcatggttcttgccatgtccaatagagtccgattcttcctctccactacaccattttgttgtggcgtgtagggagaagagaactcatgcttgatgccctcctcctcaaggaaactttcaatttgagagttcttgaactccgtcccattgtcgcttcttattttcttgatccttaagccaaactcattttgagctcgtctcaagaatccttttaaagtttcttgggtttgagatttttcctgtaaaaagaatacccaagtgaagcgagaataatcatccacaataactagacagtacttactcccgccgatgcttatgtaagcgatcgggccgaatagatccatgtgtaggagctccagtggcctgtcagtcgtcattatgttcttgtgtggatgatgagtgccaacttgcttccctgcttggcatgcgctacaaatcctgtctttctcaaaatgaacattggttagtcctaaaatgtgctctccctttagaagtttatgaagattcttcatcccaacatgggctagtcgacggtgccagagccaacccatgttagtcttagcaattaaacatgtgtcgagctcagctctatcaaaatctactaagtatagctgaccctctaacacacccttaaatgctattgaatcatcacttcttctaaagacagtgacacctttgaccaacccttgatttccatccccaaatgtgatagctcgttggggatctttgtttttctcatatgaggagaacatccttttctccccggtcatgtggtttgtgcacccgctgtcgagtatccaacttgagcccccggatgcataaaccttgccggatttgctagtaagcacataagatgcatcaaaagttttaaatgaaatggcatgatcatttgatgcattagtggttttctttctaggcaacttggcatgggttggttgcctagatctagatgtctcacccttatacatgaaagcatgattagggccagagtgagacttcctagaatgaatctttctaattttgctctcaggatagctggcagggtataaaatgtaaccctcgttatcctgaggcatgagagctttgcccttaacaaagttagacaagttcttaggaggggcattaagtttgacattgtctcccctttggaagccaatgccatccttgatgccagggcgtctcccattataaagcatgctacgagcaaatttaaatttctcattttctaagttgtgctcggcaattttagcatctagtttagctatatgatcattttgttgcttaattaaaaccatgtgatcatgaatagcattaatatcaacatctctacatctagtacaaatggaaacatgctcaatggtagatgtagagggtttgcaagattttaattctacaaccttagcatgcaagatatcattcttagttctaaggtcggaaatggtagtattgcaaacatcaaaatccttagccttagcaagcaatttttcattctcaattctaagactagtaagagaaatgttcaattcttcaatcctagtaatcaaatcatcattattatctctaggggtgaaaattgaaacatcacaagcatgagaatcaaccttagcatttaaaatagcattttcattcctaaggttgtcaattatttcacggcaagtgcttagctcactagataatttttcacatttttctacttctagagcataagcctttttaaccttaacatgttttttgttttctttaattagacaatcctcttgggaatccaaaaggtcgtccttttcatgaatagcactaaccaattcattcaatttttctttttgagctatgttaaggttggcaaaaagggaacgcaaattatcttcctcatcactagcattgtcatcactagaggattcatatttagtggaggatttagatttaaccttctttttgccgtcctttgccatgaggcacttgtggccgacgttggggaagaggagtcccttggtgacggcgatgttggcggcgtcctcgtcgtcggaggagtcgcttgagctctcgtcggagtcccattcccgacaaacatgggcatcgccgcccttcttcttgtagtatcttttcttctcctttcttctccccttcttgtcgtcgcctcggtcactgtcactagaaataggacatttagcaatataatgaccgggcttaccacacctgtagcaaaccttcttggagcgggatttgtagtctttccccctcctttgtttgaggatttgtcggaagctcttgatgacgagcgccatttcctcattgtcgagcttggaggcgtcgattggttgtcgacttggtgtagcctcctccttcttctcctccgttgccttgaatgcaacgggttgggcttcggatgggtccccaagctcgttgattttcctcgagccttctatcatgcactcaaaacttacaaaatgcccgataacttcctcgggggtcattttagtatatctaggattaccacgaatcaattgaacttgagtgggattaagaaaaatgagagatcttaaaataacatttaccacttcgtggtcatcccacttcttgctcccgaggttgcgcacttggttcaccaaagtcttgagccggttgtacatgtgttgtggctcctcccctttttgaagccggaaccgaccgagctccccctcgatcgtttcccgcttggtgatcttggtgagctcatctccctcgtgcgcagttttgagcacatcccaaatctcctttgcatttttcaacccttgcactttgttgtattcttccttgcttagagaggcaaggagtatggttgtggcttgagagttgaagtgctcgatttgggccacctcatcctcatcatagttttcatcccctacggatggtacctgcgcaccaaactcaacaacatcccatatgcttttgtggagcgagattagatgaaatcgcattaaatcgctccacctagcgtaatcttcaccatcaaaagttggtggtttgcctaatgggacggaaagtaaaggtgtatgtttggaaatgcgagggtagcgtagggggatcttactatacttcttgcgctcttggcgcttagaagtgacggagggcgcatcggagtcggaggtagaggttgatgaagtgtcggtctcgtagtagaccacctttctcatcctcttgtgcttatcgcctttccgatgcggcttgtgggaagaagatttttccttcttttctttgtggtgagaagaagatttcttctccttccctttgttggaggagctcttcttcttctccctccttttggtgcgggactcttccgatgaagtgctcccgtagcttgtagtgggcttttcgccggtctccatctccttcttggcgtgatctcccgacat

SEQ ID NO: 30970 - DNA, 1918 bp, Zea mays
  unsure (1)..(1918): unsure at all n locations
  Clone ID: MRT4577_128255C.1
tgnattgtagtagcatgacttcgctgggtctgtcaagcaacagcctctctggccctatcccggctgacatctccgggagacttccatttgttacaaaccgggatctgtcatttaatagcttctcgggagagataccagaagcactagccaattgttcttatctcaacattgtcaatttacaaaatagcaaattgactggaacaatcccagttcagcttgctgcactcagtcgcctagcccagtttaatgttgctgacaatcaattgtcagggcagattccttcatctttgaacaagtttccagcctctgattttgcaaatcaagacctttgtgggaggcctctaagcaatgattgcactgccaattcaagcagtcgaacggggataattgttggttctgctgttggtggtgcagttataactttaataatagctgctgttattttattcattgtcttgcggaaaatgcctaagaagaagaagttaaaggatgtagaagaaaataagtgggcaaagactattaagggagcaaaaggagcaaaggtatcattgtttgagaaatcagtttcaaagatgaacttgaatgatcttatgaaagcaacagatgattttacaaaggacaatattattggaactggtcgatcaggaactatgtacagagcaacacttccagatggttcattccttgctatcaagaggttgcaggacactcagcattcagaggaccaatttacatctgagatgtcaactctgggaagtgtaaggcaacgtaacttagtgccacttttgggatactgcattgtcaagaatgagaggctcttggtgtataagtacatgccaaagggttcactttatgataatttacaccagcaaaacagtgacaaaaaggcattggaatggccattgaggctaaaaattgccattgggagtgctagaggtttggcgtggcttcatcacagttgcaaccctcgcattcttcataggaacattagttccaagtgcatattgcttgatgatgactatgagcctaagatttccgattttggcttggcaaggcttatgaatcccatcgacacccacctgagcacatttgtgaatggtgagtttggtgacttagggtatgtagctccggagtatacacacactcttgtggccactccaaaaggggatgcgtatagctttggagttgtcttacttgaacttgttactcgtgaagagcccacacatgtgtcgaatgcgccagagaacttcaaagggagtttggtggattggataacgtacctgtcaaacaactctatacttcaggatgcagttgacaagtctttgattggaaaggacaacgatgctgagctgcttcagtgcatgaaggttgcatgctcttgtgtgctttcttctccgaaggaaaggcctacaatgtttgaagtttaccagcttctgagagctgttggagagaaatatcatttcagtgcaaatgacgatgaattgacgatgctacctcaaaatgccaatcctgaagatgagcttattgtagcgaactagtttagcctatgtgatgagtgggtgcttgtcggataccaaatgttgcaggagttgcttcaacttggaataatcagaattatttctctatcttctctatttttctggcgctgcatgtcaggcaagcactaggatttgtcgttcgattcgaaggtctatcaatgtgtgctgtactgctgtttacgtttgtacatccttgccttgtgtatcctcaggattgttttcttctggtgttgtaagatgggtcaactgtatcattatcgagattttagctgtagtggtagcaatgtgaaacactgttggccgatcattcatctgcagtttttgtgttttttttttcgtttaacatttctatttattatttccatgctcctttctaattc

SEQ ID NO: 30971 - DNA, 2991 bp, Zea mays
  Clone ID: MRT4577_128256C.1
ctaattgttctttggtgttaatataagcaatctcgatatccccttttgttggtgatccctcaaaaagtgatactgaatggctatgtgtttagtgcggctgtgctcaacgggattatccgccatgcggattgcactctcattatcacatagaagaggaactttggtcaatttgtaaccatagtccctaagggtttgccccatccaaagcaattgcgcgcaacaatgtcctgcggcaatgtactcggcttcggcggtagaaagagctacagaattttgcttctttgaagcccaagacaccagagatcttcctaagaactggcaagtccctgatgtgctctttctatcaatcttacaccctgccttttgatctacggatttacctcccgtgtcgaggtcaagatgcccattggttcccatgggtgtcttgatgggcttggcatccttcatcccaaacttggtgagtatgtcttgaatgtacttcatttggctaatgaaggtgccctcttggagttgctttacttgaaatcctaagaaatacttcaactcccccatcatagacatctcgaatttttgaatcatgatcctactaaattcttcacaagtagatttgttagtagacccaaatataatatcatcaacataattttggcatacaaacaaatcttttgcaatagttttagtgaatagagtaggatcggtttttcgacatgctcttggggcttgcttgagcccataaagcgccttagagagtttgtaaacatggttagggtactcactatcttcaaagccgggaggtttctcaacatagacctcctcccccttttgaatatcgccgaggatggtgttcacggggtgatctcgttgtattgcttggtggactcttgggtgtggcggtcttggaccgtcatcatattccttgtcttgattattggcatctcccccttgatcattgtcctcctcttgaggtggctcatcctcttgatcttcattttcatcatcttgaccttgatccttatcttgggttggtggagatgcttgtgtggaagatgaaggttgatcttgtgcatgtggaggctcttcggattccttaggacacacatccccaatggacatgttccttagcgcgacgcacggagcctcttcatcatctagctcatcaagatcaacttgctctacttgagagccgttggtctcatcaaatacaatgtcacaagaaacttcaactagcccaatggacttgttaaagactctatatgcccttgtgtttgaatgatatcctagtaaaaagccttctacagccttgggagcaaatttagattttctacctcttttaacaagaataaaacatttgctaccaaagactctaaaatatgaaacattgggctttttaccggttaggagttcatacgatgtcttcttgaggattcggtgaaggtagaggcggttgatggcgtagcaagcgatgttgattgcttccgcccaaaactggtccgaagtcttgtattcatcaagcatggtcctcgccatgtcaagtagagttctattcttcctctccactacaccattttgttgaggtgtgtagggagaagagaactcatgcttgatgcccttgtcctcaagaaagccttcaatttgagagttcttgaactccgtcccattgtcgcttctaatctttttgatccttaagccgaactcattctgagcccatctcaagaatccctttaaggtctcttgggtttgagatttatcttgatttccatcctcgaatgtgatagctctttgaggatcattgtttttctcataggaggagaacatccttttctccttagtcatgtggtttgtgcacccgctatcaatgatccaacttgagcccccagatgcataaaccttgggtacccaaacacaagtctttgagcccttgtgtttggccccaacatatttggcaactactttgcctgatttgttagttaaaacatatgaagcatcaaaagtcttaaatgaaacaataggctcatttgatgcagtaggagttttctttttaggcaatttaacatgagtggattgcctagaactagatgcctcactcttatacataaaagcatgatgagagccagagtgagacttcctagaatgaattctcctaatcttatgttcgggataaccagcaggatataaaatatagccctcgttatcctgaaccatgggagctttgcccttaacaaaattagacaatttcttaggggcattaagcttgacattgtctccctgttggaagccaatgccatccttaatgccagggcgtctcccactatagagcatacttctagcaaatttaaacttttcattctctaggtcatgctcattaattttagcactaagttgacctatgtgatcattttgttgtttaattaaagctaggtgatcatggatagcatcaacattaatgtctctacatctagtacaaatagtaacatgatcaacactagatgtagagggtttgcaagcatttaattcatcaatcttagcatgtaacatggcattctcatttctaagattggaaatagaaacattgcaaacatttaaatccttagccttagcaattaatttatcattctcaatcttaaggctagaaagtgattcattcaacttttcaattttagaaatcaaactagcattatcatttttgaggttgacaagagaatcatcacaaacatttaacttctcaaccttagcaattaatttagcattctcatttctaaggttggaaatagtgtcatggcaaatgctaagctcattagttaatttttcacatttttctacttcctgagcataagcatttttcacattctcatttctaaggccgtcacttggattcggataaaggagaaggaccacgatcagaaagaaaaggggaatgccgaactggatactctgcttaaaggaataagcctcccttggatagatcgaagaaagaagcactccttccgccat

SEQ ID NO: 30972 - DNA, 197 bp, Zea mays
  Clone ID: MRT4577_128257C.1
atttctgggaagttctgaatttattttgaaaccttttttccttcaagcattttgcagtgagcttcttttatatatagcaaacaatttgaaagaatacaaaaatatgtgaagtatatttaaaaaaataactacagtatagcgctggtacagtacactaaaagactttgataaaaagaaacaataataaaaagcctcca

SEQ ID NO: 30973 - DNA, 4236 bp, Zea mays
  Clone ID: MRT4577_128258C.1
atgtcgggagaacacgccaagaaggagatggagaccggcaaaaagcccactacaagccacgggaaggcttcatcggaagagtcccgcaaaaaggggaaagggaaggagaagaaagcctcttcccacaagtcgcatcagagtggcgacaagaaaaagaagatgaggaaggtggtctactacgagaccgatacttcatcaccttccacctccgactccgacgcgccctccgtaacttctaagcgccatgagcgcaagaagtttagtaagattcccttacactaccctcgcacctctagacatactccattactttccattccattaggcaaaccgccaacctttgacggtgaagattatgctaggtggagtgatttaatgaaatttcatctaacctcactccacaaaagtatatggaatgttgttgagtttggagcacaggtaccatccgtaaaggatgaggattatgatgaagacgaggtggcccaaatcgagcacttcaactcccaagccacaaccatactcctcgcttctctaagtagggaggagtacaacaaggtgcaaggattaaagagcgccaaggaagtttgggacgtgctcaagaccgcgcacgagggtgatgaactaaccaagatcaccaagcaggaaacgatcaagggggagctcggtcgcttccgtcttcgccaaggggaggagccacaagacatgtacaaccggctcaaaaccttagtgaatcaagtgcgcaacctcgggagcaagaaatgggatgaccacgagatggttaaggttattctaagatcacttattttccttaaccctactcaagtacaattaattcgcggtaatcctagatatacactaatgactcccgaggaagtaatcgggaattttgtgagctttgagtttatgatcaagggctcacggaagatcaacgagcttgacggtccctccacgtccgaagcacaaccagtcgcattcaaggcgacggaggagaagaaggaggagtctacaccaagtagaacacccatcgacgcctccaagctcgacaacgaggaaatggcgcttgtcatcaaaagcttccgccaaatcctcaagcaaaggagggggaaagattacaagccccgcttcaagaaagtgtgctacaaatgtggtaagcccggtcattttatcgcaaaatgtccattatctagtgatagtgacaggggcgacgacaagaaggggagaagaaaggaaaagaagaaatactacaagaagaagggtggcgacgcccatatatgccgcgagtgggactcggacgagagctcctacgactcctctgacgaggacgccgccaacatcgccatcaacaagggccttctatttcccaacgtcggccacaagtgcctcatggcaaaggacggcaaaaggaagaaggttaaatctaaatcctccattagatatgagtcctctagtgatgataatgctagtgatgaggaagataatttgcgtactctttttgccaacctaaacatgcaacaaaaagaaaagttaaatgaattaattagtgccatccatgagaaggatgacctcttggacacccaagaggactttctaatcaaggaaaacgaaaagcatgttaaggttaaaaatgcttatgctctagaagttgaaaaatgtgaaaaattatctagtgagctaagcacctgccatgagactatagacaaccttagaattgaaaatgctaatttgttagctaaggttgactcaaatgtttgtaatgtttcaattcccaatcttagaaatgataatgatgatttgcttgctaagattgaagaattgaacatatctcttgctagccttggagttgagaatgaaaaattgcttgctaaggctaaagatttttatgtttgcaatgttaccatttccgaccttagaagtaaaaatgatatattgcatgctaaggttgtagaattaaaatcttgcaaaccatctacatctaccgtcgagcacacttctatttgtactagatgtagagatgttgatgttaatgctattcatgatcacatggctttaattaaacaacaaaattatcatatagcaaaattagatgctaaaattgccgagcatgaacttgaaaatgaaaaatttaaatttgctcgtagtatgctttatagtgggagacgccctggcatcaaggatggcattggcttccaaaagggggacaatgtcaaaattaatgcccctcctaagaaattatctaactttgttaagggcaaggctaccatgcctcaagataacgagggttacattttgtaccctgtcggttatcctgagagcaaaattaggagaattcattctaggaaatctcactctggccctaaccatgcttttatgtataagggtgagacatctagttctagccaaccaactcgtgctaagttgcctaataagaaaactcctagtgcatcaaatgatcatggcatttcatttaagacctttgatgcatcatatgtgttaactaacaaatccggcaaggtttatgcatccgggggctcaagttggatcatcgacagcgggtgcacaaaccacacgactggggagaagaaaatgttctcctcctatgagaaaaaccaagatccccaacgagctatcacattcggggatggaaatcaaggtttggtcaaaggattagattcattagattacaatttgctttccgtttcacaattatgtcaaatgggctacaactgtctttttactgaggaaaaatctcatacccaagaaaccttaaagggattcttgagacgggctcaaaacgagttcggcttaaggatcaagaaaattagaagcgacaacgggacggagttcaagaactctcaaattgaaggcttccttgaggaggagggcatcaagcatgaattatcttctccctacacgccacaacaaaatggtgtagtggagaggaagaatagaactctattagacatggcaagaaccatgcttgatgagtacaagacttcggatcgattttgggccgaggcggtcaacactgcctgctatgccatcaaccggttgtatctacaccaaatcctcaagaagtcatcatacgaactcctaaccgagcaagttgatcttgatgagataggtgatgaagaggctccgtgcatcgtgctaaggaacatgtccattggggatgtatgtcctaaggaatccgaagagcctccaaatgcacaagatcaaccatcctcctccacgcaagcatctccaccaactcaaaatgaggatgaggctcaagttgatgaagaagaagatcaaacaaatgagccacctcaagatgacgacaatgatcaagggggagatgcaaatgatcaagaaaaggaggatgaagaaccaaggccgccacacccaagaccacacaaggtagaagaagcacttcaagattcggattgggtggtggtgatgcaagaggagctcaacaacttcactaggaacgaggtatggcatttagttccacgtcctaatcaaaatgttgtaggaaccaaatgggttttccacaacaagcaagacgagcatggtgtggtgacaaggaacaaagctcgacttgtggccaaaggatactcccaagtcgaaggtttggatttcggtgaaacctatgcacccgtagctaggcttgagtcaattcacatattattagcctatgctacttaccatggcttcaagctttaccaaatggacgtgaagagtgccttcctcaatggaccgatcaaggaagaggtctatgttgagcaacctcccggctttgaagatagtgagtaccctaaccatgtttataaactctctaaggcgctttatgggctcaagcaagccccaagagcatggtatgaatgccttagagatttccttatagataatggcttcaaagtcggaaaggccgatcctacgctcttcactaaaacacttgaaaatgatttgtttgtatgccaaatttatgttgatgagattatatttggatctactaacgaatctacatgtgaagagtttagtaggatcatgacacaaaaattcgagatgtctatgatgggggagttgaagtacttcttaggatttcaagtgaagcaactccatgagggcaccttcattagccaaacgaagtatactcaagacattttaaacaagtttgggatgaaggatgccaaacccatcaagacacccatgggaaccaatgggcatctcgacctcgacacggaagggagaaagtag

SEQ ID NO: 30974 - DNA, 357 bp, Zea mays
  unsure (1)..(357): unsure at all n locations
  Clone ID: MRT4577_128259C.1
gccgaggccagcacaagagaggccaagacccacgaaacgcccgngcggcggaggcgaaaccggcgaagcccggcggaccaaagcacagcaagaagaaaggaagcaggggaaagccccccgagaaaggacagcaacccgggcagcgccaccagacgaccaaccacaaggagcaccgccaacacgcccaagcacaacaaaaagacccccgaccaccccggcgacgcaagacgcacaacagacgccgacgacgaagggcacacaaaagaacagacgaaacaggggcccaggcgcaagcgcacgcaccacacaacccagcagcaccacagcagggcaacccccaccgacggacggggcaac

SEQ ID NO: 30975 - DNA, 326 bp, Zea mays
  Clone ID: MRT4577_12825C.1
agggggctaaaacaactttacatattaattgaattggggaaccaagcaaaatttaaaagcgtgggccaacaagataaacgactaataaatactttttttcccattcctttggctggctggtaccttctggtggtttctacaagggggaaaagatgagcaaaaggtgaaagacccggacaaggagtgcttggggcctgctccaaaaattcaaagggggggtccctgcaaaattgcttatgaggggaaacggagtctttttgcaccctggagtgctctgggcccaacaaagtacacccctgtcgttttggccttataacttttccttg

SEQ ID NO: 30976 - DNA, 4383 bp, Zea mays
  Clone ID: MRT4577_128260C.1
tcacaagaaatacttcaactcccccatcatagacatctcgaatttctgtgtcatgatcctactaaactcttcacatgtagattcgttagtagacccaaatatgatatcatcaacataaacttggcatacaaacaaatcattttcaagagttttggtaaagagtgtaggatcggcttttccgactttgaatccattagtgataagaaaatctctaaggcattcataccatgctcttggggcttgcttgagcccataaagcgcctttaaaagtttatagacatggttagggtactcactatcttcaaagccgggaggttgctcaacatagacatcttccttgattggtccgttgaggaaggcactcttcacgtccatttggtaaagcttgaagccatggtaagtaccataggctaataatatacgaattgactcaagcctagctacgggtgcatagatttcaccgaaatccaaacctttgacttgggagtatcccttggccacaagtcgggctttgttccttgtcaccacaccatgctcgtcttgctcgttcctagtgaagttgttgagctcctcttgcatcgccaccacccaatctgaatcttggagtgcttcctctaccctgtgtggctcaatagaggaaacaaaagagtaatgttcacaaaaatgtgcaacacgagatctagtggttacccccttatgaatgtcgccgaggatggtgtcgacagggtgatctcgttggattgcttggtggactcttgggtgtggcggccttcgttcctcatcctccttgtcttgatcatttgcatctcccccttgatcattgtcgtcatcttgaggtagctcacttgcttgatcttctccttcatcaacttgagcctcatcctcattttgagttcgtggagatgcttgcgtggaggaggatggttgatcttgtgcatttggaggctcttcagattccttaggacacacatccccaatggacatgttccttagcgcgatgcatggagcctcttcatcacatatctcatcaagatcaacttgctctacttgagagccgttagtctcatcaaacacaacgtcacaagaaacttcaacttgtccggaggacttgttaaagactctatatgcccttgtgtttgaatcatatcctagtaaaaagccttctacagtcttaggagcaaatttagattttctacctcgatccgatgtcttgtactcatcaagcatggttcttgccatgtccaatagagttcgattcttcctctccactacaccattttgttgtggggtgtagggagaagagaactcatgcttgatgccctcctcctcaagcaatccttctatttgtgagttcttgtactctgtcccgttgtcgcttcttattttcttgatccttaagccgaactcattttgagcccgtctcaagaatccctttaaggtttcttgggtatgagatttttcctgcaaaaagaacacccaagtgaagcaagaataatcatccacaataactagacaatacttactcccgccgatgcttatgtaagcgatcgggccgaatagatccatgtgtaggagctccagtggcctgtcggtcgtcatgatgttcttgtgtggatggtgagcaccaacttgcttccccgcttggcatgcgctacaaatcctgtctttctcaaaatgaacattggttaatcctaagatgtgctctccctttagaagcttgtgaagattcttcatcccaacatgggctagtcggcggtgccatagccaacccatgttagtcttagcaattaagcaagtgtcgagttcagctctatcaaaatctaccaagtatagctgaccctctaacactcccttaaatgttattgaatcatcacttcttctaaagacagtgacaccttgatttccatccccgaatgtgatagctcgttggggatcttggtttttctcataggaggagaacatcttcttctcccctgtcatgtggtttgtgcacccactgtcgatgatccaacttgagcccccggatgcataaaccttgccggatttgttagttaaaacataggatgcatcaaaagttttaaatgaaatgttatgatcatttgatgcactaggagttttctttttaggcaacttagcacgggttggttgcctagaactagatgtctcacccttatacataaaagcatgattagggccagagtgagacttcctagagtgaattctcctaattttgctctcgggataaccggcaggatacaaaatgtaaccctcgttatcctgaggcatgggagccttccccttaacaaaattagataatttcttaggaggggcattaagtttgacattgcctccctgttggaagccaatgccatccttaatgccaggacgtctcccactataaagcatactacgagcaaatttaaatttttcattttcaatttcatgctcggcaatttttgcatctagtttagctatatgatcattttgttgtttaattaaagccatatgatcatgtatagcattaatatcaacatctctacatctagtgcaaatagtagtgtgctcaacggtagatgtagatggtttgcaagattttaattctacaaccttagcatgcaatatatcatttttacttctaaggttggaaatggtagcattgcaaacatcaaaatctttagccttagcaagcaatttttcatcttcatctctaaggctagcaagagatatgttcaattcttcaatcctagcaagcaaatcatcattatcatttctaagattgggaattgaaacattacaagcaatagaatcaaccttagctaacaaattagcattctcatttctaaggttgtctatagtctcatggcaagtacttagctcactagatattttttcacatttttcaacctctagagcataagcatttttaactttaacatgctttttgttttccttgattaggaagtcctcttgggagtccaagagatcatccttctcatggatggcactaattaattcatttaatttctctttttgttgcatgtttaagttggcaaaaagagtacgcaaattatcttcctcatcactagcattatcatcgctagaagactcatatctagtggaggatttggatttaacattcttctttttgccatcctttgccatgaggcacttgtggccgacgttggggaagagaagtcccttggtgacggcgatgttggcgacgtcctcgtcgtcggaggagtcgctagagctttcgtcggagtcccactcgcgacaaacatgggcatcaccgcccttcttcttgtagtacctcttcttctcctttcttctccccttcttgtcgtcacccctgtcactgtcactagaaatagaacatttagctataaagtgaccgggcttaccacatttgtagcaaaccttcttgaagcggggcttgtaatcttttcccctcctttgtttgaggatttggcggaagctcttgatgacgagcgtcatttcctcgttgtcgagcttggaggcgtcgatgggtgttctactcgatgtagactcttccttcttctcctccgtcgccttaaatgtgaccggttgtgcttcggacgtggaggggccgtcaagctcgttgatcttccgtgagcccttgatcataaattcaaagctcacaaaactcccgattacttcctcgggagtcattagtgtatatcttgggttaccacgaattaattgtacttgagtagggttaagaaaaataagtgatcttagaataaccttaaccaccttgtggtcatcccatttcttgctcccgaggttgcgcacttgattcaccaaggttttgagtcggttgtacatgtcttgaggctcctcctcttggcgaagacggaagcgaccgagctccccctcgattgtttcccgcttggtgatcttggttagttcatcaccctcgtgcgcgtcttgagcacgtcccaaactttcttggcgctctttaatccttgcaccttgttgtactcctccctgtgctccaaactcaacaacattccatatacttttgtggagtgaggttagatgaaatttcattaaatcactacacctagcataatcttcaccgtcaaaggttggtggtttgctaaacttcttgcgctcatggcgcttagaagttatggagggcgcgtcggagccggatgtagatggtgatgaggtgtcggtttcgtagtagaccactttcctcatcatcttcttcttgtccccactccgatgcgacttgtgggaagagggtttcttctccttccctttccctttgttgcgggactctcccgatgaagctttcccgtggcttgtagcgggcttgtcgccggtctccatctccttcttggcgtgttctcccgacat

SEQ ID NO: 30977 - DNA, 401 bp, Zea mays
  Clone ID: MRT4577_128261C.1
gcacaacagatgcgttagctcaccgcccccacctgcgtttctccaatttcagtattgggcatctccctgccgattaatttcctttcagaaaaccctaattccacactctctctttttttttacattacatcaaaagcagagaaaagcaaagtggaggaggaaagatgttagcaatagcaaggcaaaggatgttggggcaatcatttaagaagattctgcctgcagtgtcagtcttgagaagttactcatctgctgcaaaacaggttggagaatatcaaggtgcatacaagataaccaagggacttttggagaagtatggacctgaaagggttcttgatactccaattactgaggctggttttactgggattggggttggtgctgcttactatggtctgaag

SEQ ID NO: 30978 - DNA, 595 bp, Zea mays
  Clone ID: MRT4577_128262C.1
gccgggacagaatttaaagcaccaatgaaagcttcatgtatgagtacgcatgactgcattagaagaaggacgcggagaggacattagtgccatgcccctttgctgcacgggcttcacacgaacgggcccataacgtgccgtcttggttcggctttggggaggacggcgagaccatgtgcaagaaaggtggcgaaggacatgcacactggtgtggagcgcgcgatgcggttgcaccggccccgatgcggtgctgtacctgggacccactggctcggtgagccactagcagctatctgacggttgagtctccggacgactacggatgagacaccgtgggagctgtgactcggatccagcagaccctggccaagaatgaggagctggaggtgatccactcccggtgtggagtgctgggagcgctgggctgcgtgttgcaggagttgatcgaggggatcggcgctaagttcgtccaggacgtgctagctcatgcacggctgctagatcttgctcgaggaccctcgtggactatcctcgtgaaccggatcatcatccacgcgcagagaatacttgctatatgtggctgtgatggacggct

SEQ ID NO: 30979 - DNA, 531 bp, Zea mays
  Clone ID: MRT4577_128263C.1
ggccggccgggaaaaaataaaaaagatcccaccttacatttttcccaacacactccctagattcccgaaattgaggcaagacaacatcaccccggggtggcgtgatccaggaaggaatcaaatctccatggattttccatggatttgagtgggccatgtacctcattgtcgatgcgccatggacgccaagatgcttctacaggaagcccaagattatccagcacatattgtgttgaaatgaacgaacacacggcatccatatcaccactgccacacaatgacatagtttaagtcatgttcttatgatgtaacccaccgagttaggtattttggcacacataaatctgaacatatttacctgtacagccatattcttgtgccacttgaaatgagtttctttattgatggtagcattgtcactggtgaatctttccaattatcaaatacacgctgactgcttgaaggaaaaaaaaaaaaaaaaaaaaaaaaaaaaaaaaaaaaaaaaggaaaaaaaaaaaaaaaaaagcggcc

SEQ ID NO: 30980 - DNA, 423 bp, Zea mays
  Clone ID: MRT4577_128264C.1
acccgagcttatgatgcagggggtctcgggcttctatgcgacgatcatgctcaaatgtctgcctgcgggcatggcgggcccgatcactgctcttccggacctcccgaccatccacacgacgatcgacaagaccaagcgcgcccattggcacacggcacatacggacgcctgacgcacgcactgtgcacacgagatcggactttgagcgagacctacataggccactgtatgacaatcctgccatggcgtaagcagatgcgtagctgtaatctgtataagaagacactatgtatgagctcctgcggaaccctagaaagtgcatagctgtgaccaaactggactctcacgggctgaagaagccggcggaccgtgctgatgatacaaggttactgacggatgcatgcgactagatcattgacatgc

SEQ ID NO: 30981 - DNA, 300 bp, Zea mays
  unsure (1)..(300): unsure at all n locations
  Clone ID: MRT4577_128265C.1
cacacaatcttcatctgatgtcatcttgttagcagggcatgagccgattttttttgagtgtctgcaanaatcattcacttcctgaagcgttggcttagggcatgtatcgctatgctcttaatccaaggggaatgagtactattgtataggcgtaatcccaaataagttaaaatcttccataatttctgttcacaatagaaaaagacgtaactaaactaataagatggacaccgatggtcgaattgaagcgaatcgccagcaaagctgggatcggagcgcggatcgacagcaaaaaaagaa

SEQ ID NO: 30982 - DNA, 262 bp, Zea mays
  Clone ID: MRT4577_128266C.1
aagctcaaaacgatacatactattattaggaagaaaccatacaataacactcccagtcgtagcattatacggtgtatctaaaacctgaggcaattcagcccaggaacgcaacatggtggcagtacagaaggatgctatatgctgtgagaatcggaagcggttatgatcgcgccccaagcacaagcgcatgtggggtcgggaaagacctgggccccaggggggtatgtcaccttgccctcttttacaacggctcgagccaaat

SEQ ID NO: 30983 - DNA, 244 bp, Zea mays
  Clone ID: MRT4577_128267C.1
aaataacacatattgataaaggtatgtgttttttttaaaataacatcccccaaggtaaacgaatatggacagatgtactgtttaaaaataaaaagctagagcttttggttacttccgttttattacaaaatgagagtgtaccatgtcctttgatgttcgctatgcgtataaatgcctactttaccaaaacaaaatcattagaaaactactcttctgttttcttgattttgaagcgatttgtctt

SEQ ID NO: 30984 - DNA, 400 bp, Zea mays
  Clone ID: MRT4577_128268C.1
cccagcgtccgcggccgcgtggggttgtacgttgtatacgtgatgcaccttggtaataagaagttgtggaatcaggtggtggtaaaacaatgttcttatgtggttgaatagtttgatattattttacttgctgagatgtgtcatctcattcttgcattactcaatgcaggtacttgatacatgttgggaatgaggggagtagcagcacgtccacttacactctcacaataacgctgcccaggcgcagccatgatttaattagaaacttattgtcaaaggaagtttgttttttatatagtcgtgcacactggttaattcagttcaggtcgtacgtttatctttccttgctagccgattaataatacttagtatgtttttgtcatgatatatgtttataccc

SEQ ID NO: 30985 - DNA, 573 bp, Zea mays
  Clone ID: MRT4577_128269C.1
ggcccggggccctcccctttctcttggacgcccccccctctccatcttcttcctcctcaaacatttgcagccctcaccacccaaaaccctagctgcccccccatttcttcccctcctcccaaggtgcagccctcccgtgtggttctccgtcgtgtggctgcgatctcaattggagtttggagggaggaagaaggaaggagtaagggaagaacctaaggtggtggacttccggatcgtacttagggatttgcccgaacttccggtaaaggtacttgatacatgttgggaatgaggggagtagcagcacgtccacttacactctcacaataacgctgcccaggcgcagccatgatttaattagaaacttattgtcaaaggaagtttgttttttatatagtcgtgcacactgattaattcagttcaggtcgtacgtttatcttcccttgctagccgattaataatacttagtatgtttttggtcatgatatatgattatacactgttgccccctcatttatgcaaacttgcaaaggggatgctgccgaaattttatatatggacgtcacaagtgtt

SEQ ID NO: 30986 - DNA, 415 bp, Zea mays
  Clone ID: MRT4577_12826C.1
cccccgtggagaccgcccggaatctcgggacgccacgcctcttttttcctggggggtcccatgggtcacaagacgctctttatagccctcaattcacttgccagctctgcgctctgatgaactccgagctcatagggccttgttgcaagatacaccatccaaacacgcgcactttctggttgctgcactgcaccaatagcctgcctcaaggggcatgcccctactgcaactcccatctaggtgggtacccatctgaccagcggctacatcgatacgacccgacacgaggacaccactgctccggctgcagagacctacgtcgtctttcctcatgagccggatccggtggaggccgagactgagactgagacctaggaggccgaggccgttgctgagcctaccgaggcagagccca

SEQ ID NO: 30987 - DNA, 2411 bp, Zea mays
  Clone ID: MRT4577_128270C.1
agaatcctgaatcagaatccttgccgtgttcgcggataacgcgtcagatttagaacggaacgttaattaatcgcgcgatgcggaagacaagccaagtcgaccccaagcgcggactgattcgcgaggtgatgcggatgatgaacctgaagatggataatttgaacgagtaccaagacaaaggatgatcgtcaagtgatcgtcgtctaacaaacactaacgtagtgtttattccaggtggtggacttccggatcgtacttagggatttgcccgaacttccggtaaaggcaagtaaatacagtggtggttgctaccgtttgggttgcatcctattccctgacattgagtatgcataagttttaattatgttaatcattgaattctatgatgaagtttatttgtttggaagtattaattctcaattgtctaatattgtggatgatcataatttggtaatgatatatgtggttgattaccatcttggatgaagttgaagtatttttttttgaatcacgttatatgaagtgttgtaggcatgacatgctcatcgcatcatccatcttgcattttgaagttatgtcgtgatcttatggtccgaccgtaccggtacatttttagcatcgtacgttgcccgaggaggggtacgatgcggcttcatatccttagaggtatgaaggcagaagtcatccttgcatttgcagacatttgcactcatgaggtatatatgaattgtgacattactatgttactattgtggtttctacctgcgaggtgtggtgactaggtgtgttgtacgttgtatacgtgctgcacctttgtaataagaaggttgtggaatcaagtggtggtaaaacaatgttcttatgtggttaaacagtttgatattattttacttgctgagatgtgtcatctcactcttgcattactcaatgcaggtacttgatacatgttgggaatgaggggagtagcagcacgtccacttccactctcacaataacgctgtccaggcgcagccatgatttaattagaaacttattgtcaaaggaagtttgtttttttaactagtcgtgcgcactagttaattcacttcatgtcgtatgtttaacttctctttgctagccgattaataatacttagtatgtttttgtcatgatatatgtttatacactgttgccccctcatttatgcaattttgcaagggggatgctgccgaaattttatatatagatgtcagaagtgttgtttagtagcattccggggtgttggtggaccccggggtgttacagttggtatcagaggataggctttagattctatgcaatttgaagataaatttgacacacttgcacatataggaagggtatgggttcgtatctctttcatattagtattttattgtatagatgactagaacttccttactccaaatccctttatggtttgatggggtatgtcgttaatgacgtaatgcttgatatgatatgttacttctatttagtattggtttcttgatgtggttgttattgaagatattatgcaagtgaagctactaatgtacttgttttatatacatatcgtcatgatgttgttgggtctatgcttcgtcgccgaaggtcttatagaaagaagtgatcctcggatgaagctgttcgcacaagatagccgaaggtgccttttcgcagagcttcggcattacaaaccgacttaaagatagaatgaccttttagtccataaaggtctgagtcaacgttgtaagttcttataaggggcatacttgtaattcctcacaggctgcgtcctgtgcctataaatagtgaatagtattacgttactgttctgatggaaagagctctgtcagaagccagtccctcgcgtccgggaagacatccggctctggctgggcctacactggtcatgagtacaccagcaagaaagccagtggtgatctgaagaagaaagacaagatggaaccttacgcgtactggccgctggaccgtaagcttctcaaccgcaggtcggaccgcaaggcgtctgcgcgcaagggtatgtccagtgtcatgaagatcaccaagaagctcgaagggaagagtgcaagcgccgcgctttctgctaaacggtcgggaaaaacgaagcacaaaaagaacaaataagtgggtagtggcgaagcttcctactttataggagccgaccagatgatttttttggagaaatttgctaccattttttttggtgggtaggggtggatttcggtctgtacagttcgggaattcagaacaccgtagttcttgtcttttcggataagttttgtattagaaccttgacactttggtgtttgtattagactggatcgtgattcgttctgattgtttggtgactagtaaatcttgtgttttgttgtgcacttgtgctgact

SEQ ID NO: 30988 - DNA, 487 bp, Zea mays
  Clone ID: MRT4577_128271C.1
gggtgcgtccgccaacacgtacgagatgctgagtctggtgcaatgtcttttgcgatgtataatccggagaagaacaccaaatcacttgctagactatttggaggagtgaggggaggggttatggcagaccttatctcagaggtaaggtttaaagcgggggttgagtagcttgttaattgcatttacattagtagctacctagctggctaggatgacttgaatgactactcttctgtctacgctgcgttttcggctgagtattcgaacaaagctaggagcgtaaaccggattgataccctcatgaatgtgctcgtgaggactgccgaagtgactggagagaacgatgaatcctaagtagaatcttcagcactaacttcagatgtagctgaagaacatgctcaagcagatgccgaagacgatgacgatgacgacgacctttatggtgaggttactggagatgagaacaaagcttgtaaaaagggtgctg

SEQ ID NO: 30989 - DNA, 573 bp, Zea mays
  Clone ID: MRT4577_128272C.1
ccggccgggttttccctcttcttctcgatctctagtgagagcaccatgcgacctctcgctggcatacgcactcccctctaggtgaatgtgcttccatcaaggggccccgtggcggtgttgtggaatcttgtggcagtgtcctggtcgtcagagatggccctcttctctatccttatcgtcgatgatgaacaagtcttagaatggagtgggcacttggatgttggtctgacgacgactttacttgaaacaaatactttcgttccatgaccaatcgttctggcctgtcgtggttatatataattgagtttgccggtgtacctaccaaatccattgtttactactcggcaacgagtaccttatggcaagataagcatcagtacgtatattatggttgagttgtacctaatttgcattcctcattaacaagtcaaaaactgttgaggttgactttgtactggtgaacaaacaagggtgagtcagacgcaacaacatatggcccggacaaaaccacctctatatgagtggtagcaggataaatttttgctcatcaaaaaaaaaaaaaaaggggcggcc

SEQ ID NO: 30990 - DNA, 243 bp, Zea mays
  unsure (1)..(243): unsure at all n locations
  Clone ID: MRT4577_128273C.1
cccacncntacgngnacccacaagcctcccccctacagcaaccaacccnaccgagacgcacgttccatttatcagttctccggacacnccaccnaaaancaacacaccggccccctttttacaacatccagaccctcaaaaccctgacctcacccaacttaatcacctcccaacacatccacccctccccagatgccacaatacccaaaacccccacacccatcgcaccccccaacaccaccc

SEQ ID NO: 30991 - DNA, 1333 bp, Zea mays
  unsure (1)..(1333): unsure at all n locations
  Clone ID: MRT4577_128274C.1
gggtacacctccnacttcgccgggttagcctaacatttccagggagcatacctgttcagtttggtaactcagaactcatgtcgctaaatctttcatcaaacaaattcagcggcgaaattcctgaaactttaggacatatcgaacaattaacggtcattcaaatggaccaaaacaatcttactggaaacatccgtccacattgaggaatctatacagcttgagcttgctcaccccataacaatttatccggcctaatgccaacttttctaagtggtctaaatctcagtaaactagatctatcctacaatagtttccaaggagtaatacctacaaccggtctattcgataactctacagttgtttcgctagatgggaatccgagattatgtggaggagccatggatttgcatatgcctccatgccatgttgcttcaagaagagcacgcagagcaagcttattgattgaaatattgatcccaatatttgggttcatgtcactcgtattgctggtgcacattttactcctagagaagaggcagtcaagaagactatggatcgaagcaatcatttggtgagcattttgagaaagttacttataatgacttagctcaatcaacatgtaacttctcagaaccggccttaattgctagagtaccgtggacgtacttcaggcggagctgaggttcaattagttcgatcggtattaagggcacaattggctatatccctccagaatacggaggtggtggccatgtttcgacgtccggtgatgtttatagttttggtatagtgttgttggagatttttaccggtaaaaggccgacagatcctatgttcaccgggggactagacatcatcagcttcgtggagaacagttttccggatcaaatatttcaagttattgatccgcatcttgtggaagaccgccagaagataaatcagccaaatgaagtagcaaacaatgaaatgtaccaatgcctggtggctctgctgcaagtagcactttcttgcacgcgctcattaccatctgaacggtccaatatgaagcaggtagcaagcaaactgcaagcaatcaaggcggcacgacttggaggcaaatccaagtgagattagatgtactccctcgacgagcagcgtaaaccggaatacgagatgactagaaatgtactctagtctagcatacaaataagtgttgtttaccttgtatatgcatctatggttcaatatggttataccgtcaagcaactacaacatgatatgtaatatctagtatttacacattgaaagcatcgaactatgtatgttttgaaataaaaaaccaaaaaacaaagcg

SEQ ID NO: 30992 - DNA, 290 bp, Zea mays
  Clone ID: MRT4577_128275C.1
aagacaccctaggtaagttgacctctgtgtaaggacaccaaagcttcggcactcacccgtcaagactcagagagcttgacaatccaagcgaccacactcctcgacgtcacgtgcgcacgacaacggtataagcgtttagtgaaacacgagattacgctcaacactaccgcagatctgctacagctgctcgagactggaatcgggctcccatgaaggagcttcaaaccagatcctggcatgccgctataactcaactgcattagggcagtgcaacaactgcagactatcgt

SEQ ID NO: 30993 - DNA, 468 bp, Zea mays
  unsure (1)..(468): unsure at all n locations
  Clone ID: MRT4577_128276C.1
cattgggtacctcgaggccggccggggtccccctcccctccctcttcttatcttgctgtttgagaggtttttctctggcaagatggatcggttggtgcatcttgctgggttgatgcttttggctcggccaattgctgttgctgcagctgctgttgctgccaatgggtcttcttcgctttcgtttgctcagccgacgggttatagcacttctagctacaacgcttctgctcaacctacgccttttacccgaaccgactactcgcacaatgcacttgnnncgggcgctctgggatcaagtaggacctgttgtcacgggtacggttacaacgactgttgaaccgacgcccgagccttctgtgtatccacagccagacccggcgttactaccatgccctnggtcggtactggggtacccccgagactcaggggtctgaagttgcccgccaacttttgntccntggggggggg

SEQ ID NO: 30994 - DNA, 269 bp, Zea mays
  Clone ID: MRT4577_128277C.1
actcggcgtcggacgaggcggagattgcgcctgagggtcggtcatctttgcctatcgtattagatgtcccatcgggggaatggaaggcgtcgtgcgcgtactgtagcggaggcgtaatcatgctgttgcggctggatatgactgatgtcttgtttagccactgttgctcctgccgccgcgacgtggggtaggtatgcgcattaaaagcgagtgtcccccacctgtttttgggtgcttttgtcttatctgcctgggattagcttgggcga

SEQ ID NO: 30995 - DNA, 466 bp, Zea mays
  Clone ID: MRT4577_128278C.1
cggccgggaaaaaccatgcaaacaaacactcctataaaccccctaataatatattagagttgttttatggtgaagctaaagaaaaccgaagctgcaattcttaaaccctccaaataaagtctaaatctctttctagttaaacttaaataggaagtgatttaatcccccaatctctgtgggaaaaaaagagagaaggatggctcaacttgtccattatgctgcttgataaggagcacagacactcatcttttatcattcttctcattttgaatgctgtgagcagaatgaaaagaccacattatcctattgaaatccgtgtgctgaagtatgttcggcttgccgcagaaagcaagttcctggcatggcaagcggcaacaggggtcacttctgttctgaacctggaacaccaataacatcttatgtcaggaaaacatcgtccgcaagcttgagagtcggggatggaggc

SEQ ID NO: 30996 - DNA, 5007 bp, Zea mays
  Clone ID: MRT4577_128279C.1
ttacagaggtctcagacggtccacgcttatcctccggacggtccatagtgcagactcggatttttgcattggttctgtccgagggtcatccttgtgtcgcggacgatccgctgcaagggcccggacggtccgcgcttggcctgtttttccaaaaagcttctcctgtccggaataatctatggtattccggacagtcgatttagtatagttgtagatgaacctttgacacttttgcaaattcttttgtaaatccttttcaaaggtcttttgcaaaatagtcaaaggtaaatgaataagattttgcgaagcatctcccgtgtcgaggtcgagatgcccatttgttcccatgggtgtcttgatgggcttggcatccttcatcccaaacttggttagaatgtcttgagtgtacttcgtttggctaatgaaggtgccctcttggagttgcttgacttggaatcctagaaaatacttcaactcccccatcatagacatcacgaatttttgtgtcatgatcctactaaattcttcacatgtagattcgttagtagacccaaatataatatcatcaacataaatttggcatacaaacaaatcattgtcaagagttttagtgaataaagtaggatcggccttgccgactttgaagccattagcaataaggaaatctctaaggcattcataccatgctcttggggcttgctttagcccataaagcgccttagagagcctatagacatggttagggtactcactatcttcaaagccgggaggttgctcaacatagacctcttccttgattggtccgttgaggaaggcacttttcacgtccatttgatacagctcattcctagtaacgttgttgagctcctcttgcatcgccaccacccaatccgaatcttgaagtgcttcctctaccctgtgtggctcaatagaggaaacaaaagagtaatgctcacaaaaatgtgcaacccgagatctagtggttacccccttatgaatgtcgtcgaggatggtgtcgacggggtgatctcgttggattgcttggtggactcttgggtgtggcggccttggttgttcatcctccttgtcttgatcatttgcatctctcccttgatcgttgtcgtcatcttgaggaggctcatctctttgatcttctccttcatcaacttgagcctcgtcctcattttgagttggcggagatgcttgcgtggaggaggatggttgatcttgtgcatgtggaggctcttcggattctttgggacacacatccccaatggacatgttccttagcgcgatgtacggagcctgttcttcacctatctcatcaagatcaacttgctctacttgagagccattagtctcatcaaacacaacgtcacaagaaacttcaacaagtcctgaggacttgttaaagactctatatgcctttgtgtttgagtcatatcctagtaagaagccttctacagttttaggagcaaatttagattttctacctctcttaacaagaataaaacatttgctaccaaaaactctaaaataagaaatatttggctttttaccggttaggagttcataggatgtcttcttgaggattcggtgtagatataaccggttgatggcgtagcaggcagtgttgacggcctcggcccaaaaccgatccggtgtcttgtactcatcaagcatggtcctcgccatgtccaaaagagttcgattcttcctctccactacaccattttgttgtggggtgtagggagaagagaactcatgcttgatgccctcctcctcaaggaagccttcaatttgagagttcttgaactccatcccgttatcgcttctaattttcttgatccttaagccgaactcaatttgagctcgtctcaagaatccctttaaggtctcttgggtatgagatttttcctgcaaaaagaacacccaagtgaagcgagaataatcatccccaataactagacagtacttacttccgccgatgcttatgtaagcgatcgggccgaataaatccatgtgtaggagctccagtggcctgtcacttgtcataatgttcttgtgcggatgatgagtgccaacttgctttcctgcttggcatgcgctacaaatcctgtctttctcaaaatgaacatttgttagtcccaaaatgtgctctcccttcagaagcttatgaagattcttcatcccaacgtgggctagtcggcgatgccagagccaacccatgttagtcttagcaattaagcatgtgtcgagttcagctctatcaaaatctaccaagtatagctgaccctctaacacacccttaaatgctattgaatcatcacttcttctaaaaacagtgacaccttggtttccatccccgaatgtgatagctcgttggggatcttggtttttctcatatgaggagaacatcttcttctcccctgtcatgtggtttgtgcacccgctgtcgatgatccaacttgagcccccagatgcataaaccttgccggatttgttagtcaaaacataagatgcatcaaaagtcttaaatgagatgctaggttcatttgatgcactaagagttttcttcttaggcaattttgcatgggttgatttcctagaactagatgtctcacccttatacataaaagcatgatttgggccagagtgagacttcctagagtgaattctcctaattttgctctcaggataaccggcagggtacaaaatgtaaccctcgttatcctgaggcatgggagccttgcccttaacaaaattagataatcttttaggaggggcattaagtttgacattgtcccctttttggaagccaatgccatccttgatgccagggcgtctcccactataaagcatactacgagcaaacttaaatttttcattttctagttcatgctcggcaattttagcatctaatttagctatatgatcattttgttgtttaatcatggaaaggtgatcatgtatagcattaacatcaatatctctacatctagtgcaaatagtgacatgctcagtggtagatgtagagggtttgcaagaattaagttcaacaatcttagcacgcaatatatcatttttatctctaagatcggaaattgtaacattgcaaacatctagttctttagccttagcaagcaatttttcattctcaatcctaaggctagcaagagaaatgtttaattcttcaatcttagcaagcaaatcatcattatcatttctaagatttggaattgaaacatcacaagcatttgaatcaaccttagcaattaaactagcattttcatttctaaggttgttaatggtctcatggcaagtgcttagctcattagatagtttttcacatttttctacttctagagcataagcatttttaaccttaacatgcttcttattttctttaataaggaagtcctcttgggtgtctaagagatcatccttctcatgaatagcactaatcaattcatttaatttttccttttgttgcatgtttaggttggcaaaaagaatgcgtaggttatcctcctcattgctagcattatcctcatcactagaggtttcatatttagtggaggatcttgattttaccttcttccttttgtcgtcctttgccatgaggcacttgtggccgacgttggggaagagaagacccttggtgacggcgatgtttgcggcgtcctcgtcggaggaggagtcggtggagctctcgtcggagtcccattcccggcaaacatgggcatcgccgcccttcttcttgtaatacttcttcttctcctttcttctccccttcttgtcgtcgcccctgtcactatcactagataatggacatttagcaatgaaatgaccgggcttaccacatttgtagcaaactttcttggagcggggcttgtaatcttcccccctcctttgcttgaggatttggcggaagctcttgatgatgagcgccatctcctcattatcgagctttgaggcgtcgattggttgtctacttgatgtagactcctccttcttctcctccgtcgctttgaatgcgatcggttgtgcttcggacgtggaggggccatcaagctcgttgattttctttgagcctttgatcatgcactcaaaacttacaaaatgcccgataacttcctcgggggtcattttagtatatctaggattaccacgaatcaattgaacttgagtgggattaagaaaaatgagagatcttaagataacatttaccacttcgtgatcgtcccacttcttgctcccgaggttgcgcacttggttcaccaaggttttgagccggttgtacatgtgttgcggctcctctcctttgtgaagccggaaccgaccgagctccccctcgatcgtttcccgcttggtgatcttggtgagctcgtctccctcgtgcgcggttttgagtacatcccaaatctctttagcactcttcaacccttgcaccttattatactcctctttgcttaaagaggcgaggagtatcgttgttgcttgagagttgaagtgctcgatttgggccacttcgtcctcatcataatcatcatcccctacgaaaggtacctgtacaccaaactcaacaacatcccatatacttttatggagcgaggttaggtgatatcgcatcatatcactccacctagcataatcttcaccatcaaacgttggtggtttgcctaatgggacagaaagtaaaggtgtatgtttaggaatgcaaggatagcgtagggggatcttactaaacttcttgcgctcatggcgcttagaagtgacggacggtgcgttggagccggaggtggaaggtgatgaagtatcagtctcgtagtagaccaccttcctcatcttctttttcttgtcgccatttcgatacgacttgtgggaagaggatttcttctctttccccttccccttgttgcgggactcttccgatgaagccttctcgtggcttgtagtgggcttgtcgccggtctccatctccctcttggtgtgatctcccgacat

SEQ ID NO: 30997 - DNA, 667 bp, Zea mays
  Clone ID: MRT4577_12827C.1
ttcctcactgcgccgtcgcctccgaatcgtctcttcgtccccacgagcaaccgataatccgccggcgctgagatgttaggtttatcaagacctcctatctggtgactagctcctgtcgtgattcattcacctacaacgagctcgagaacggcgtcctgtgggaggtcaagggaaagtggttcacccaaggacctgttgatgtaaacattgatgccaatccatccgccgagggtggtgaggatgaaatggttgatgacacagccgcgaagggggttgatattgctgacacattccgtctacatgagcaacctccttttgacaagaaatcatttgtctcttacataaaaaaatacatcaagaatctcactgctgtgttgaagtcatagaaagcggatgacttcaaaaagggtgtcgaggtggcaaccaagtttctccttaccaagctgaacgaccttcaattttttggtgctgacatcatgaatgaccaagcgtccgtggtattcgcctattacaaggatggcggcactaatccgacattcctctatttctctcatggtcttaaggagatcaagtgtctagattaactacccatgcatggcactatatatgatcgattgttataggcacaactataactgccctgtctgaactgaactcaagttttttt

SEQ ID NO: 30998 - DNA, 381 bp, Zea mays
  Clone ID: MRT4577_128280C.1
tttattctttggggtcatcgtgaacacacgaggacgcgaacaatacactggcagggctgatccattgatcgtcaccacatctcgggtgggtgaagcacattcatgccctaaacatatactattgacctaggtaaaaactatcacgcaatagaccacgtttaggcattaaggtagctttcatccttttgtggtgtgccatacgtttcagacataaagcttagggactgatgcatcctgtctgctctcccagcactttatatgaggtgaagattcattcgaacagcgaaggttcaagctgatatatcagcacttgatagacatgccactggtgtccatgaggacctgacgatatcgaatggcccaacaggggcgagtgctctt

SEQ ID NO: 30999 - DNA, 4752 bp, Zea mays
  Clone ID: MRT4577_128281C.1
ctaagacaccagggaccttcctaagaactggcaagtccccgatgtgctctttctattaattttacaccctcccgtgtcgaggtcgagatgcccattggttcccatgggtgtcttgatgggcttggcgtccttcatcccaaacttgtttagaatgtcttgtatatacttcgtttggctaatgaaggtgccctcttggagttgcttcacttgaaatcccaagaagtacttcaactcctccatcatagacatctcgaatttctgtgtcatgatcctactaaactcttcacatgtagattcgttagtagacccaaatataatatcatcaacataaatttggcatacgaacaaatcattttcaagtgttttagtaaagagtgtaggatcggcctttccaactttgaagccattagtgataagaaaatctcttaggcattcataccatgctcttggggcttgcttgagcccataaagcgccttagagagtttatatacataattaggatactcactatcttcaaagctgggaggttgctcaacatagacctcctccttgattggtccattgaggaaggcacttttcacgtccatttggtagagcttaaagccatggtaagtagcataggcaagtaatattcgaattgactcaagcttagctatgggtgcataggtttcaccgaaatccaaaccttcgacttgtgaataccccttggccacaagtcgggctttgttccttgtcaccacaccattctcatcttgcttgttgcggaagacccacttggttcctacaacattttggttaggacgtggaactaaatgccatacctcattcctagtgaagttgttgagctcctcttgcattgccaccacccaatccgaatcttgaagtgcttcctctaccctgtgtggctcaatagaggaaacaaaagagtaatgttcacaaaaatgagcaacacgagatcgagtagttacccccttttgaatatcgccgaggatggtgttcacggggtgatcacgttggattgcttggtggactcttgggtgtggcggctttggagcttgttcatcttcctcatcttgatcatgggcatctcccccttgatcattgctctccccttgaggtggctcaacttcttgatctacgacttcatcattttgagcctcatcctcatcttgagttggtggagatgcttgcattgaggaagatggttgatcttctgcatgtggtggctcttcggattccttaggacacacatccccaatggacatgttccttagtgcgacgcacgaagcctcttcatcacctatctcatcaagatcaacttgctctacttgagagccgttagtctcatcaatcacaatgtcacaagaaacttcaacttgtccagaggacttgttaaagactctatatgcccttgtgtttgaatcatatcctagtaaaaagccttctacagctttaggagcaaatttagattttctacctcttttaacaagaataaagcatttgctaccaaagactctaaaatatgaaacattgggctttttaccggttaggagttcatacgatgtcttcttgaggattcggtgtagatacaaccggttgatggcgtagcaagcggtgttgaccgcctcgacccaaaaccgatccgaagtcttgtactcatcaagcatggttcttgccatgtccaatagagttctgttcttcctctccactacaccattttgttgtggcgtgtagggagaagagaactcatgcttgatgccctcctcctcaaggaagccttcaatttgagagttcttgaactccgtcccgttgtcgcttctaattttcttgatccttaagccgaactcgttttgagcccgtctcaagaatccctttaaggtctcttgggtatgagatttttccaaaccttgatttccatccccgaatgtgatagctcgttggggatcttgatttttctcgtaggaggagaacatcttcttctcccctgtcatgtggtttgtgcacccgctatcgatgatccaacttgagcccccggatgcataaaccttgcctgatttgttggttagcacataagatgcatcaaaggttttaaatgaaatgttatgatcatttgatgcagtaggagttttctttttaggcaattttgcacgggttgattgcctagagctagatgtctcacccttatacataaaatcttgattagggctagagtgagacttcttagaatgaattctcctaattttgctctcgggataaccggcagggtacaaaatgtaaccctcgttatcctgaggcatgggggccttgcccttaacaaagttggacaatcttttaggaggggcattaagtttgacattgtcccccttttggaagccaatgccatccttaatgccagggcatctcccactatagagcatgcttctagcaaatttaaattttccattttctaagtcatgctcattaatcttagcattaagttgagctatgtgatcattttgtttcttgattaaggctaggtgatcatggatagcatcaacattaatgtatctacatctagtgcaaatggaaacatgctcaatggtagatgtagagggtttgcaagattttagttcaacaatgttagcatgtaaaatgtcattttcacttctaaggttggaaattgtaacattgcaaacatctaaatctttagccttagcaatcaattcttcattttcaatcctaaggctagcaagtgaatcattcaacttttcaatcttagcaagcaaattagcattatcatcactaagattgggaattgaatcattacaaacatttgaatcaaccttagcaattaatttagcattctcatttctaaggttgacaatagtatcatggcaagtgcttagctcactagatagtttttcacatttttctacttctagagcgtaggcatttttaaccttaacatgcttcttattttccttaattaggaagtcctcttgggtgtccaagagttcatccttcttccttttgccgtcctttgccatgaggcacttgtggccgacgttggggaagaggagtcccttggtgacggcgatgttggcggcgtcctcgtcagaggaggagtcggaggagctctcatcggagtcccactcgcggcacacatgggcatcgccgcccctctttttgtggtacctcttattttctgtcctctttcccttcttgtcgtcgcccctgtcactgtcactagatagtggacattttgcaataaaatgaccaggcttaccacacttgtagcacactttcttggagcggggcttgtaatccttccccctcctttgcttgaggatttggcggaaactcttgatgatgagcgccatctcctcattgtcgagcttagaggcgtcgatgggttgcctacttgatgtagactcctcctttttctcctccgttgccttgaatgcgatgggttgcacctcgggtgtggaggtgccgccttgctccaagtcgacgatgtgtttggaacctttgatcatcaactcaaagctcacaaacttcccaattacctcctcaggagacattagcttatatctaggatcaccacgtattaattgaacttgagtaggattacaaaatacgagggatctaagaataaccttgaccatctcatggtcatcccattttttgctcccgaggttgcgcacttgattcaccaaggctttgagccagttgtatattgcttgtggctcctctccttggtggaggacgaatcgacctagctccccctcgatcgtttcccgcttggtgatcttggtcactgtggggggacggatatcccctgggtccactagaaggcaagaaggcctcgcgaaaggccttgggcctgttgactcgcgaggccatcccttcgtgggccaagggagaactgcgggcagaatgggccggcgtagggaatgagcagactcgggtccaggtggctcgttggatttaaacgttatccacatccttgatccgattctcccgcgcgacacctctcgaggggtaaccccaggtgcacggtcgggctccaaacactgacaactggtgcaccaggaagggggtgtgttgttgatccaagctagctcaatggctgtcactttccaatgccagattgctttctgccctggatccgtattttgctttgcgaccatctcgtccgtagcggatgagaagggagttcgcgacactgcatcaatgactggagcgacttcagtcggtgcttcatcgccaactttcagttcctctccgacaagccggcgcagccatgggacctcaaatccatcaggcatcggggcgatgaaacacttcggtcgtacctcaagaggttttagaccatgagaaatcgcataaccgtggtcactgaggcagtggtaattgaggatttctaccggggatctaatgacttggcctttgttcgagccatactgcataaggcgccaaccacctccgagcagctgtttcgggaagtggacctctacatcaccgccgacgaacgggctcaagacctcatctggggagcgaagcctgcaccgtcggacttcggtcttccgccgccgtgcgtggaccgagctatccagtgagtctccgcccaattcctcgcgctcatatcttctctggcatcccgtggacctctctgacccatttgattgaactatctcgccgtgaccaggccggtctcctcgccgccgacgagcatccccgcctgcgcgcgtggaccgaccgactccggccat

SEQ ID NO: 31000 - DNA, 343 bp, Zea mays
  Clone ID: MRT4577_128282C.1
aaaaaaaaaaacaaacctccatgaaacggggggtttttacttttggggggcttcgggcccggaaaaggggcaacattccccttcacaaacccccccgggggccagaaaaccaaaggcccccgagcagaattgcacaggggcctgccccccccctggggttttgccccgggaccaccacccggggccgcccgtttgggggttttgccttgcctttaatccccaccccttaatatttacaggacggttgacaatttgcaccgaacgacaggggtttgccccccccccccggggggttaacaagggatggggctttaactttccttgggccttggggggccacccc

SEQ ID NO: 31001 - DNA, 456 bp, Zea mays
  unsure (1)..(456): unsure at all n locations
  Clone ID: MRT4577_128283C.1
tggagctaatattccagagtcgaacactttaatcttttgcatgngaaacttggtttgggttcatgcgtattaaaaaacttgctggatcgattcttacatcgcattttagttgttcagacatatgggtttgaatctgatttgactattgaataccgaagatgaggaaagactttaaagacctgtcttttattcatttcccatcaattctacctgtctagactttgtaacagccgaatgtgtaaatgatctgatacgaggtgccgcaattacttgcaaaaacgagctggagaagaatcacgacgaacatctggaggtcgtggcctgtcagttacgtcaagctatgctggagggaccatctccaagcaaggctattgacatggattgcagcacgagacctggaaactctgagaatttttgtgatgaggatgacataccggatcaaaagcctttgagttt

SEQ ID NO: 31002 - DNA, 449 bp, Zea mays
  Clone ID: MRT4577_128284C.1
ttttctcaaacctacaccacagccagacccaaaacctggacccaaacctacaccacaaccacagccagacccaaaacccacaccacaaccaggcccagagccgaaacccaagccagcaccacagcctgaaccaaaacccacgccgcaaccagatccgaaacccgagccaaaaccaacaccacaaccacccttcccacatcccgagcctcaaccagatcccaaaccccaacctgaaccatccaaaccagaccctaaactccaacccgaaccatccaagccagacccccagccagagcccaaacctacaccagagccattgaagccgaagccatcgtcgtctcttccaccaccatttggcacggtcgtcgtggaagggaactgagaggagcatagtggaaccgatcatcatcgtgcatgccatctatagctttttggctatgattgataag

SEQ ID NO: 31003 - DNA, 6142 bp, Zea mays
  Clone ID: MRT4577_128285C.1
agtcaaaggtatatgaatagattgcaagatgcatattcatgttttgaagtttctccacctgtttcaaatgattgtcctttgactaaacaaaactcccccctgaatgaaattctcctcttatctttcaacagggttttaatgaatatcaattgcaaatatgtaatttattccaattatgaaaaataccgatttgaaagtaggcataccaatttgcaatatattaattaagaaaatttcgaaggatggtggtgcggtccttttgctttgggctaatactttctccccctttggcattaatcaccaaaaacggagactttgtgagccctctttactttctcccccattggtaaatgaaatgtgagtgaaagattataccaatgtgagagtcatgtggagtgacggcgaaggttaaatgataccgatagagtggagtggaagctttgtcttcgccgaaaaactccatttcccttacattagtcgtagtcatgaaagagatatgatctaaggtatataaatgagctatgtgtgcaatgtttcaatcaaagttccaagaatcatgaatatttagctcattcctaagtttgctaaaggttttctcatctaaaggcttggtaaagatgtcggttaattgttctttggtgctaacataagctatctcgatatccccattttgttggtgatccctcaaacagtgatgctgaatgtatatgtgcttagtgcggctgtgttcaacgggattatatgccatgcggattgcactctcattatcacattggagagggacttttctcaatttgtagccatagtccctaagggtttgcctcatccaaagtaattgcgcacaacagtggcctatggcaatgtactcggcttcggcggtggaaagtgctatggagttttgtttctttgaagcccatgacaccagggatctccccagaaactgacaagtccctgatgtgctcttcctatcaattttacatcgtgtccaatcggcatcgaaatatcctattaaatcaaaagtggatcccttggggtaccaaagcccaaacttaggagtgtaaactaaatatctcatgattctcttcacgaccctaaggtgaacttccttaggatctgcctggaaccttgcacacatgcatacagaaagcataatatccggtcgagatgcacataagtagagtaaagatcctatcatcgaccggtataccttttgatctacggatttacctcccgtgtcgaggtcgagatgcccattggttcccataggtgtcttgatgggtttgccatccttcattccaaacttcttaagtatgtcttgaatgtacttcgtttggctgatgaaggtgccctcttggagttgcttgatttgaaatcctaggaaatttttcaactcccccatcattgacatctcgaatttctgtatcatgatcctactaaactcttcacaagttgacttattagtagacccaaatataatatcatcaacataaatttggcatacaaacaaattatctttaaagccaggaggttgctcaacatagacctctttgttgataggtccattgaggaaggcacttttcacgtccatttgatagagcttaaagccatggtaagtagcataggaaagtaatatatgaattgactcaagcctagctatgggtgcataagtttcatcaaagtccaaatcttcgacttgtgaataacctttggccacaagtcgggctttgtttcttgtcgccacaccatgttcatcttgcttattgtggaatacccatttggtacctacaacattttggttaggacgtggaactatatgccatacctcattcctcgtgaagttgttgagctcctcttgcattgccaccacccaatccgaatcttgaagtgcttcctccaccctgtgtggctcaatagaggaaacaaaagagtaatgctcacaaaaatgtgcaacccgagatcgagtagttacccccttatgaatgtcgccgaggatggtgtcgacggggtgatctcgttggattgcttggtggactcttgggtgtggcagccttagttcttcctcatcctccttttcttgatcatttgtatctctcccttgatcattgccgtcatgttgaggtggctcatcttcatgatcttcttgttcaacatcttgagcctcatcctcattttgagttggtggagatgcttgcatggaagaggatggttgatcttgtgcacttggaggcttttcggattccttaggacacacatccccaatggacatgttccttagcgctatgcatggagcctcttcattacctatctcatcaagatcaacttgctctacttgagagccgttagtttcatcaaacacaacatcacatgagacttcaactagtccagtggacttgttaaagaccctatatgcccttgtgtttgagtcataaccaagtaaaaagccttctacagttttaggagcaaatttagattttctacctcttttaacaagaataaagcatttgctaccaaaaactctaaagtatgaaatgttgggctttttaccggttaggagttcataggatgttttcttgaggattcggtgaagatataaccggttgatggcgtagcaggcggtgttgaccgcttcggcccaaaaccggtccggtgtcttgtactcatcaagcatggttcttgccatgtccaatagagttcgattcttcctctccactacaccattttgttgtggcgtgtagggagaggagaactcatgcttgattccctcctcctcaaggaagccttcaatttgagagttcttgaactccgtcccgttgtcgcttcttattttcttgatccttaagccgaactcattttgagcccgtctcaagaatccctttaaggtctcttgggtttgagatttttcctgtaaaaagaatacccaagtgaagcgagaataatcatccactattacaagacaatacttactcccgccgatgcttatgtaagcaatcgggccgaatagatccatgtggagtagctcaagcggcctgtcggtcgtcatgatgttcttgtgtggatgatgggctccaacttgctttcccgcctggcatgcgctacaaatcctgtctttctcaaaatgaacatttgttaatcctaaaatgtgttctccctttagaagcttatgaagattcttcatcccaacatgagctagtcggcgatgccagagccaacccatgttagtcttagcaattaagcatgtgtcgagttcagctctatcaaaatctactaagtatagctgaccctctaacacacccttaaatgctattgaatcatcacttcttctaaagacagtgacaccttgatttccatccccgaatgtgatagctcgttggggatcttggtttttctcatatgaggagaacatctttttctccccagtcatgtggttcgtgcacccgctgtcgagtatccaacttgagcccccggatgcataaacccaaatggttttgggtcctttggcattagacacaagaactttgggtacccaaacacaagtcttggagcccttgtgcttgcccccaacatatttggcaactatcttgccggatttgttagtcaacacataagatgcatcaaaagtcttaaatgaaatgttatgctcatttgatgcaataggagttttcttaggcaacttagcacgggttggttgcctagagctagatgtctcacccttatacataaaagcatgattagggccagagtgagacttcctagaatgaattctcctaattttgctctcaggataaccggcagggtataaaatgtaaccctcgttatcctgaggcatgggagccttgcccttaacaaaattagacaagttcttaggaggggcattaagtttgacattgtctcccctttggtagccaatgccatccttaatgccagggcgtctcccattatagagcatacttctagcaaatttaaatttttcattttccaagttatgctcggcaattttagcatctagttttgctatatgatcattttgttgtttaattaaagccatatgatcatgaatagcatcaatgttaacatctctacatctagtgcaaatagatacatgctcaacgatagatgtagagggtttgcaagattttaattctacaaccttagcttgtaacatgtcatttttagttctaaggtcggaaattgtagcattgcaaatatcaagatctttagccttagtaagcaatttttcattttcaattttaaggctagcaagagaaatgtttaattcttcaatcctagcaagcaaatcatcattattatttctaggattgggaatattacaaacatgagaatcaaccttagtatttaaactagcattttcattcctaaggttgtcaatcatctcacggcaagtgcttagctcattagataacttttcacatttctcaatttcaagagcataagcctttttaaccttaacatgtttcttgttttctttaattagacaatcctcttgagaatccaaaaggtcatccttttcatgaatagcactaaccaattcatttaatttttccttttgagctatgttaaggttggcaaaaagggaacgcaaattatcctcctcatcactagcattatcatcactagaagattcatatttagtggaggagttggatttaaccttcttccgtttgccgtcctttgccatgaggcacttgtggccgacgttggggaagagcagtcccttggtgacggcgatgttggcggcgtcctcgtcgtcggaggagtcgcttgagctttcgtcggaatcccactcccgacaaatatgggcatcgccgcccttcttcttgtagtacctcttcttctcctttcttctccccttcttgtcgtcgcctcggtcactgtcactagatatgggacatttagcaataaaatgaccgggcttaccacatttgtagcagaccttcttggagcgggacttgtagtccttccccttcctttgcttgaggatttggcggaagctcttgatgacgagcgccatttcctcattgtcgagcttggaggcgtctattggttgtcgacttggtgtagactcctccttcttctcctccgttgccttgaatgcaacgggttgagcttcggatgtggtggcatcatcaagctcgttgatcttcctcgagccttcgatcatgcactcaaaactaacaaaattctcgataacttcctcgggggtcattttagtatatctaggattgccacgaattaattgaacttgagtagggttaaggaaaataagagatcttagaataaccttaaccacctcgtggtcatcccactttacgctcccgaggttgcgcacttggttcaccaaggtcttgagccgattgtacatgtgttgtggctcctcccctttgtgaagccggaaccgaccgagctccccctcaatcgtttcccgcttggtgatcttggtgagctcatcaccttcgtgcgcggtcttgagtaaatcccaaatctcctttgcgttcttcaacccttgaactttgttatactcctctctacttaaagaggctaggagtattgttgttgcttgagagttgaagtgctcgatttgggccacctcatcctcatcatagccctcatcccctacagacggtacctgcgcaccaaactcaacaacatcccatatacttttgtggagcgaggttagatgaaatcgcattaaatcgctccaccttgcataatcttcaccatcaaaagttggtggtttgcctaatgggacggaaagtaaaggtgtatgtttggaaatgcgaaggtaatgtagggggatcttactatacttcttgcgctcttggcgcttagaagtgacagatgccgcgtcggagccggaggtagatgtcgatgaagtgtcggtctcgtaatagacgactttcctcatcctcttgtgtttgtccccactccgacgtggcttgtgggaagaagatttctccctcctctccttgtgatgagaagaagacttcttctccttccctttgttggaggagctcttcttcttctctttccttttgatgcgggactcttccgatgaagtgctcccgtggcttgtagtgggcctttcgccggtctccatctccttcttggcgtgatctcccgacat

SEQ ID NO: 31004 - DNA, 228 bp, Zea mays
  Clone ID: MRT4577_128286C.1
ggaacgcacacaccggccgggctccggtctcctatgcgggttcccgtaggagatgcgagatgcacatctttctcaagactctcaatggaaagactatcaccctcgaggcggagagctctgacaccattcacaacgtcaaggcctagatgcatgacaaggaatgcatattcactgaccagcaacagctcatgttcgctgccatgcatactataagacggagtgacactt

SEQ ID NO: 31005 - DNA, 1285 bp, Zea mays
  unsure (1)..(1285): unsure at all n locations
  Clone ID: MRT4577_128287C.1
cattgggacctcgagccggcgggcgcctcgggacgggccggggcacaagcgtccacagctcttgcactagctagagaccgaacagagagagattggagaaccatgatgaggtccggccttatctcgctatgtttccacctagccctggccatcacactggctgcaagtgttcctggccttgctcgtagtagggtaatcgacatggaaccgcaactcaaaccgacgctgcaactagaaccaaagcatggtgtatctcaaccagacagaaaccaagaacccaaaccgacaccacagcctgagccaaaaccagagcctaaaccggaaccgaaacctgcaccacaaccagaccccaaacccgcaccacagccggacccaaaacccgcaccacaaccggacccaaaaccagaacccaaacctacaccacagccagacccaaaaccttcaccacaaccaggcccagagccgaaacccaagccagcgccacagcctgaaccaaaaccagaacccaaacctacaccacaaccagacccaaaacctggaccacaaccagacccaaaaccagaacccaaacctacaccacaaccaggcccagagccgaaacccaagccagcgccacagcctgaaccaaaacccacactgcaaccagatccgaaacctgagccaaaaccaacaccacaaccacccttcccacagcccgagcctcaaccagatcccaaaccccaacccgaaccatacaagccaggcccctaaaccccaacctgaaccatccaagccagaaccccagccaggatctaaacctacaccggaaaccaaaaccctaaccagaaccatcgaagccgtctcttccaccaccatttggcacgggcgtcgtggaagggaactgagaggagcatagtggaaccgatcatcatcgtggatgccatctatagcttttggctatgactgataagtaatactgtttgtgtaagagtgagctctctttttatatagggtgtgtgtattgtgtgtagtactatgtttggacgattgtgtgtgtgtacccaccttttcccgtgtgtttccatcagcatgcatcaatgattccatgtatatgccttgctaagtttttatcaatgaaaaaagaaacatgcctttgtaaaaaaaaaaaaaaaaaaggcccctaccgaagccgccaccgccacctgccccagcgcgccgccgccgcagccaccatggggtcgcgtccgcaccaagaccgtgaagaagacctccaggcaggtgatcgagaagtactactnccgcatga

SEQ ID NO: 31006 - DNA, 5667 bp, Zea mays
  Clone ID: MRT4577_128288C.1
ctagcaaaagaaatttctagaatcaagaatattgagctcatgcctaagtctggtaaaagattgttcatcaagtggcttggtaaagatatcggctaattgatctttagtgttaatgtaagaaatctcgatatcccccttttgttggtgatccctaagaaaatgataccgaatggctatgtgcttagtgcggctatgctcgacgggattgtcggccattttgattgcactctcattatcacatagcaaagggactttggttaatttgtaaccgtagtcccgcagggtttgcctcatccaaagcaattgcgcgcaacaatgtcctgcggcaatgtactcggcttcggcggtggaaagagcgaccgaattttgcttctttgaagcccaagacaccaaggatcttcccaagaactggcaagtccctgatgtgctcttcctattaattttgcaccccgcccaatcggcatccgaataaccaatcaaatcaaatgtggatccccgagggtaccaaagcccaaacttaggtgtataagccaaatatctcaaaattcgttttacgaccgtaaggtgtgattccttagggtcggattggaatcttgcacacatgcaaacggaaagcataatgtccggtcgagatgcacataaataaagcaatgaaccaatcatcgaccggtataccttttgatccacggacttacctcccgtgtcgaggtcgagatgcccattagttcccatgggtgtcttgatgggtttggcatccttcatcccaaacttggttagaatgtcttgagtgtacttcgtttggctaatgaaggtgccctcttggagttgcttgacttggaagcctagaaaatacttcaactcccccatcatcgacatctcgaatttctgtgtcatgatcctactaaactcctcacatgtagactcgttagtagacccaaatataatatcatcaacataaatttggcatacaaacaagtcattttcaagagttttagtaaagagtgtaggatcggccttgccgactttgaagccattagcaataaggaaatctctaaggcattcataccatgctcttggggcttgcttgagcccataaagcgccttagagagcctatagacatgattaggatactcactgtcttcaaagccgggaggttgctcaacatagacctcttccttgatcggtccattgaggaaggcacttttcacgtccatttgatagagcttaaagccatggtaagtagcataggccaataatatgcgaattgactcaagcctagctacgggtgcataggtttcaccgaaatccaaaccttcgacttgtgaataccctttggctacgagtcgagctttgttccttgtcaccacaccatgctcatcttgcttgttgcggaagacccatttggttcctacaacattttggttaggacgtggaactaaatgccagacctcattcctcgtgaaattgttgagctcctcttgcatcgccaccacccaatccgaatcttggagagcttcctctaccctgtgtggctcaatagaggaaacaaaagagtaatgttcacaaaaatgagcaacccgagatcgagtagttacccccttatgaatgtcgccgaggatggtgtcgacggggtgatctcgttggattgcttggtggactcttgggtgtggcggtcttggttcttcctcatcctccttttcttgatcatttgtatctcccccttgatcattgctatcatcttgaggtggctcgtcttcttgattttgctcttcatcattttgagcctcatcctcattttgagttggtggagatgcttgcatggaggaggatggttgatcttgtgtacttggaggctcttcggattccttaggacacacatccccgatggacatgttccttagcgcgatgcatggagcctgttcttcacctatctcatcaagatcaacttgctctacttgagagccgttagtttcatcaaacacaacgtcacaagagacttcaactagtccagtggacttgttaaagaccctatatgcccttgtgtttgagtcataaccaagtaaaaagccttctacagttttaggagcaaatttagattttctacctcttttaataagaatgaagcatttgctaccaaaaactctaaaatatgaaatgttgggctttttaccggttaggagttcatatgatgtcttcttgaggattcggtgaagatataaccggttgatggcgtagcaggcggtgttgaccgcttcggcccaaaaccggtccggtgtcttgtactcatcaagcatggttcttgccatgtccaatagagttcgattcttcctctccactacaccattttgttgtggcgtgtagggagaggagaactcatgcttgatgccctcctcctcaaggaagccttcaatttgagagttcttgaactccgtcccgttgtcgcttcttattttcttaatccttaagccgaactcattttgagctcgtctcaagaatccctttaaggtctcttgggtttgagatttttcctgtaaaaagaatacccaagtgaagcgagaataatcatccacaataacaagacaatacttactcccgccgatgcttatgtaagcaatcgggccgaatagatccatgtggagtagctcaagcggcctgtcggtcgtcttgatgttcttgtgtgggtgatggactccaacttgcttccccgcctggcatgcgctacaaatcctgtctttctcaaaatgaacatttgttaatcctaaaatgtgctctccctttagaagcttgtgaagattcttcatcccaacatgggctagtcggcgatgccagagccaacccatgttagtcttagcaattaagcatgtgttgagttcagctctattaaaatccactaagtatagctgaccctctaacagacccttaaatgctattgaatcatcacttcttctaaagacagtgacaccttgatttccatccccgaaggtgatagctcgttggggatctaggtttttctcatatgaggagaacatcttcttctcccctgtcatgtggtttgtgcacccgctgtcgagtatccaacttgagcccccggatgcataaaccttgccggatttgttagtcaatacataagatgcatcaaaagttttaaatgaaatggcatgatcatttgatgcattaggaattttcttcttaggcaacttagcatgggttggttgcctagaactagatgtctcacccttatacataaaagcatgattagggctagagtgagacttcctagaatgaatcttcctaattttgttctcaggatagccggcagggtataaaatgtaaccctcgttatcctgaggcatgggagctttgcccttaacaaagttagacaagttcttaggaggggcattaagtttgacattgtctcccctttggaagccaatgccatccttgatgccagggcgtctcccattataaagcatgctacgagcaaatttaaatttctcattttctaagttgtgctcggcaattttagcatctagtttagctatatgatcattttgttgcttaattaaaatcatgtgatcatgaatagcatcaatatcaacatttctacatctagtacaaatagatacatgctcaacaatagatgtagagggtttgcaagattttaattctacaaccttagcatgcagcatatcatttttagttctaaggtcagaaattgtaacattgcaaacatctagttctttagccttagtaatcaacttttcattttctactctaaggctagcaagagaaatgttcaattcttcaatcctagcaagcaaatcatcattattatctctaggagtggaaattgaaacatcacaaacatgagaatcaaccttagcatttaaaatagcattttcattcctaaggttgtcaattatttcacggcaagtgcttagctcactagataatttttcacatttttctacttctagagcataagcctttttaaccttaacatgttttttgttttctttaattagacaatcctcttgggaatccaaaaggtcgtccttttcatgaatagcactaaccaattcatttaatttttctttttgagctatgttaaggttggcaaaaagggaacgcaaattatcttcctcatcactagcattgtcatcactagaagattcatatttagtggaggatttagatttaaccttctttttgccgtcctttgccatgaggcacttgtggccgacgttggggaagaggagtcccttggtgacggcgatgttggcagcgtcctcgtcgtcggaggagtcgcttgagctctcgtcggagtcccactcgcgacaaacatgggcatcgccgcccttcttcttgtaatacctcttcttttcctttcgtctccccttcttgtcgtcacctcggtcactgtcactagatataggacatttagcaataaaatgaccgggcttaccacacttgtagcaaactttcttggagcgggacttgtagtctttccccctcctttgtttgaggatttggcggaagctcttgatgacgagcgccatttcctcattgtcgagcttggaggcgtcgattggttgtcgacttggtgtagcctcctccttcttctcctccgttgccttgaatgcaacgggttgggcttcggatgagtcgccaagctcgttgattttcctcgagccttctatcatgcactcaaaacttacaaaatgcccgataacttcctcgggggtcattttagtatatctaggattaccacgaatcaattgaacttgagtgggattaagaaaaatgagagatcttaaaataacatttaccacttcgtggtcatcccacttcttgctcccgaggttgcgcacttggttcaccaaagtcttgagccggttgtacatgtgttgtggctcctcccctttttgaagccggaaccgaccgagctccccctcgatcgtttcccgcttggtgatcttggtgagctcatctccctcgtgcgcagttttgagcacatcccaaatctcctttgcatttttcaatccttgcactttgttgtattcttccttgcttagagaggcaaggagtatggttgtggcttgagagttgaagtgctcgatttgggccacctcatcctcatcatagttttcatcccctacggatggtacctgcgcaccaaactcaacaacatcccatatgcttttgtggagcgagattagatgaaatcgcattaaatcgctccacctagcgtaatcttcaccatcaaaagttggtggtttgcctagtgggacggaaagtaaaggtgtatgtttggaaatgcgagggtagcgtagagggatcttactatacttcttgcgctcttggcgcttagaagtgacggagggcgcatcggagtcggaggtcgatgttgatgaagtgtcggtctcgtagtagaccaccttcctcatcctcttgtgcttgtcgcctttccgatgcggcttgtgggaagaagatttttccttcttctctttgtggtgagaagaagatttcttctccttccctttgttggaggagctcttcttcttctccctccttttggtgcgggactcttccgatgaagtgctcccgtagcttgtagtgggcttttcgccggtctccatctccttcttggcgtgatctcccgacat

SEQ ID NO: 31007 - DNA, 881 bp, Zea mays
  unsure (1)..(881): unsure at all n locations
  Clone ID: MRT4577_128289C.1
tcgagggccggcnncgggaaaaattgggtacctcgaggccggccggggcacagtgcacaagcgtccacagcttgcactactagagaccgaacagatagagattggagtgtgtgatccagcgcccatctggactggtggcaaccaaccatgatgaggtccggccttctctcgctatgtttccacctagccctggccatcacactggctgcaagtgttcctggccttgctcgtagtagggtaatcgacatggaaccgcaactcaaaccgacgctgcaactagaaccaaagcatggtgtatctcaaccagacagaaaccaagaacccaaaccgactccacagcctgaaccaaaaccagagcctaaaccggaaccaaaacctgcaccacagccagacccaaaaccagaacccaagcctacaccacagccagacccaaaacctgcaccacaaccggacccaaaaccagaacccaaacctacaccacaaccagacccaaaacccacaccacaaccgggcccagagccgaaacccaagccagcaccacagcctgaaccaaaacccacgccgcaaccagatccgaaacctgagccaaaaccaacaccacaaccacccttcccacggcccgagcctcaactagatcccaaaccccaacccgaaccatccaaaccaaaccctaaaccccaacccgaaccatccaagccagacccccagccagagcccaaacctacaccagagccaaaaccccaaccagaaccatcgaagccggagccaccgtcgtctcttctaccaccatttggcacgggcgtcgtggaagggaactgagaggagcacagtggaaccaatcatcatcgtgcacgccatctatagctttttggctatgactg

SEQ ID NO: 31008 - DNA, 220 bp, Zea mays
  Clone ID: MRT4577_12828C.1
tgggtacctcgatgccggccgggccgggtttgcctgatctgcttgtccctccctttcctagcccgagcggggttaacaagtctagtgtacggcgaaccgcgtgccgcgccgtttcgccccggtagttccacctgaaaaggagacatgaagcagtccggcgttctttacggcagcgccggcaccggccgcgtcgtgccgctgtttgcgctcgccgcggggt

SEQ ID NO: 31009 - DNA, 4938 bp, Zea mays
  Clone ID: MRT4577_128290C.1
ttaggtggtggtgcggtccttttgctttgggctaatattctctccccctttggcatgaatcgccaaaaacggagtcattagagcccttagaattactctttcccccttttgatcgacggatttacctccttcgtcgaggtcgagaagcccattggttcccatgggtgtcttgatgggtttggcatccttcattccaaacttgcttagaatatcttgagtatactttgtttggcttaggaaggtgccctcttggagttgctttacttgaaatcctaagaagtacttcaactcccccatcatagacatctcgaatttttgtgtcatgatcctactaaactcttcacatgtagactcgttagtagacccaaatataatatcatcaacataaatttggcatacaaacaagtcattttcaagagttttagtgaataaagtaggatcggcctttccgactttgaagccattatctataagaaaatctctaaggcatccataccatgctcttggggcttgcttgagcccataaagcgccttagagagtttataaacatggttagggtactcactatcttcaaagccgggaggttgctcaacatagacctcttccttgattggtccattgaggaaggcacttttcacgtccatttggtaaagcttaaagccatggtaagtagcataggccaataatatacgaattgactcaagcctagctacgggtgcataggtttcaccgaaatccaaaccttcgacttgggagtatcctttggccacaagtcgagctttgttccttgtcactacaccatgctcatcttgcttgttgcggaagacccatttggttcctacaacattttgatttggacgtggaaaaaaatgtgcaacacgagatctagtagttacccccttatgaatgtcgccgaggatggtgtcgacggggtgatctcgttggattgcttggtggactcttgggtgtggcggcctttgttcttcatcctccttgtcttgatcatttgcatctcccccttgatcattgtcgtcatcttgaggtggctcatttgcttgattttctactgcatcaacttgagcttcatcctcattttgagttggtggagatgcttgagtggaggaggatggttgatcttgtgcatttggaggctcttcggattccttaggacacacatcctcaatggacatgttccttagcgcgatacacggagcctcttcaccacctatctcatcaagatcaacttgctctacttgagagctgttagtctcatcaaacacaacgtcacaagaaacttcaactagtccagaggacttgttaaagactctatatgcccttgtgtttgaatcatatcctagtaaaaagccttctacagtcttaggagcaaatttagattttctacctcttttaataagaataaagcatttgctaccaaagactcggttgatggcgtagcaggcggtgttgaccgcctcggcccaaaaccgatccgaagtcttgtactcatcaagcatggttcttgccatgtccaatagagttctattctttctctccactacaccattttgttgtggcatgtagggagaagagaactcatgcttgatgccctcctcctcaaggaagccttctatttgtgagttcttgaacttcgccccattgtcgcttctaatctttttgatccttaatccgaactcattttgagcctgtctcaagaatccctttaacgtttcttgggtgtgagatttttcctgcaaaaagaacacccaagtgaagcgagaataatcatccacaataactagacagtacttactcccgtcgatgcttatgtaagcgattgggccgaataggtccatgtgtaggagctccagtggcctatcagtcgtcatgatgttcttatgtggatggtgagcaccaacttgcttccctgcctggcatgcgctacaaatcctgtctttctcaaaatgaacatttgttaatcctaaaatgtgctctccctttagaagcttgtgaagattcttcatcccaacatgtgctagtcggcggtgccagagccaacccatgttagtcttagcaattaagcatgtgtcgagttcagctctatcaaaatctactaagtatagctgaccctctaacacacccttaaatgctattgaatcatcacttcttctaaagacagtgacaccttggttcccatccccgaatgtgatgactcgttgggggtcttggtttttctcataggaggagaacattttcttctcccctgtcatgtggtttgtgcacccgctgtcgatgatccaacttgagcccccggatgcataaatccaaatggttttgggtcctttggcattagatacaagaactttgggtacccaaacacaagtctttgaccccttgtgcttgcccccaacatatttggcaactactttgccggatttgttagttaacacataagatgcatcaaaagttttaaatgaaatgctatgatcatttgatgcattaggagttttcttcttaggcaacttagcacgggttggttgcctagaactagatgtctcacccttatacataaaagcatgattagggccagagtgagactttctagaatgaattctcctaattttgttctcagggtagccggcagggtacaaaatgtaaccctcgttatcctgaggcatgggagccttgcccttaacaaaatttgacaacttcttaggaggggcattaattttgacattgcctccctgttggaagccaatgccatcctcaatgccagggtgtctccctttatagagcatgcttctagcaaatttaaaattttcattttctaagtcatgctcggcaatcttggcatctagttttgctatatgatcattttgttgtttaattaaagccatgtgatcatgaatagcattaacatcaacatctctacatctagtacaaatagaagtgtgctcagcggtagatgtagagggtttgcaagattttaattctacaaccttagcatgcaaaatatcattcttagttctaaggtcggaaatagtagtattgcaaacatcaaaatttttagccttagcaagcaatttctcattttccatcctaaggctagcaagagacatgtttaattcttcaatcttagcaagtaaatcatcattatcatttctaagattggaaattgaaacattacaaatatttgaatcaaccttagctaacaaattagcattttcatttctaaggttgtctattgtctcatgacaagtgcttagctcactagataatttttcacatttctcaacttctagagcataagcatttttaactttaacatgttttttgttttccttgattaggaagtcctcttgggagtccaagagatcatccttctcatggatggcactaatcaattcatttaatttctctttttgttgcatgtttaagttggcaaaaagagtacgcaaattatcttcctcatcactagcattatcatcactagaggactcatatctagtggaggatttggatttaaccttcttctttttgccgtactttgccatgaggaatttgtggccgacgttggggaagaggagtcccttggtgatggcgatgttggcggcgtcctcgtcgtcggaggagtcgcttgagctttcatcggagtcccactcgcgacaaacatgggcatcgccgcccttcttcttgtagtacctcttcttctccttccttctccccttcttgtcatcgcccctgtcactgtcactagaaataggacattttgcaataaagtgaccgggcttaccacacttgtagcaaaccttcttggagcggggcttgtaatctttccctctcctttgcttgaggatttggcgaaagcttttgatgacaagcgccatttcctcattgtcgagtttggaggcgtcgatgggtgttctactcagtgtagactcctcctccttctcctccgtcgctttgaatgcgaccggttgagcttcggacgtagaaggaccgtcaagctcgttgatcttccgtgagcccttgatcatgaattcaaagctcacaaaattctcgattacttcctcgggagtcattagtgtgtatctaggattaccacgaattaattgtacttgagtagggttaagaaaaataagtgatcttagaataaccttaaccacttcgtggtcatcccatttcttgctcccgaggttgcgcacttggttcaccaaggttttgagccggttgtacatatcttgtggctcctctccttggcgaagacggaagcgaccgagctccccctcgatcgtttcccgcttggtgatcttggtgagttcatcaccctcgtgcgcggtcttgagcacgtcccaaacttctttggcgctcttcaatccttgcaccttgttgtactcctccctacttagagaggctaggagtattgttgtggcttgggagttgaagtgctcgatttgggccacctcgtcctcatcataatcctcatcccctacggatggtacctgtgctccaaactcaacaacattccatatacttttgtggagtgaggttagatgaaatttcattaaatcactccacctagcataatcttcacagtcaaaggttggcggtttgcctaatggaacggaaagtaatggagtatgtctagaagtacgaggatagtgtaaggggatcttactaaacttcttgcgctcatggcgcttagaagttatggagggcgcgtcggagccggaggtagatggcgatgaggtgtcggtctcgtagtagaccaccttcctcattttctttttcttgtcgccactccgatgcgacttgtgggaggaggccttcttgtccttccctttctttttgttgcgggattcttccgatgaagctttcccgtggcttgtagcgggcttttcgccggtttccatctccttcttggcgtgttctcccgacat

SEQ ID NO: 31010 - DNA, 952 bp, Zea mays
  unsure (1)..(952): unsure at all n locations
  Clone ID: MRT4577_128291C.1
gtaccctncgggggccggccggnagaaaaaaccatgtggaccgctacggggcacaagcgtccacagcttgcactactagagaccgaacagatagagattggccggagtgtgtgatccagcgccccatctggactggtggcgaccaaccacatgatgaggtccggccttctctcgctatgtttccacctagccctggccatcacactggctgcaagtgttcctggccttgctcgtagtagggtaatcgacatggaaccgcaactcaaaccgacgctgcaactagaaccaaagcatggtgtatctcaaccagacagaaaccaagaacccaaaccgacaccacagcctgagccaaaaccagagcctaaaccggaaccaaaacctgcaccacaaccagaccccaaaccagaccccaaacccgcaccacagccagacccaaaacctgcaccacaaccggacccaaaaccagaacccaaacctacaccacagccagacccaaaaccttcaccacaaccaggcccagagccgaaacccaagccagtgccacagcctgaaccaaaaccagaacccaaacctacaccacaaccagacccaaaacctggaccacaaccagacccaaaaccagaacccaaacctacaccacaaccaggactagagccaaaacctaagccagcgccacagcctgaaccaaaacccacgccgcaaccagatccgaaacctgaaccaaaaccaacaccacaaccaccctttccacagcccgagcctcaaccagatcccaaaccccaacccgaaccatccaagccagaccctcgaccagattctaaaccccaacccgaaccatccaagccagacctccagccagggcccaaacctacactagagccaaaaccccaaccagaaccatcgaagccggagccaccgtcgtctcttccaccaccatttggcacgggcgtcg

SEQ ID NO: 31011 - DNA, 383 bp, Zea mays
  Clone ID: MRT4577_128292C.1
aaacagctgaagggcccactcaaaattgcagggagaagcccgtccattggtttcttatcagcatagtttgcaggaggggagatctgccaaatttccttacccccaaaacatcactaccagctagttgagccgcaaaaaaaaaaaaaagcgcacccctagttactgggggccccttcagggggcctggtgatgaacccatttaaacagaactttttttttgaaaagcttcaaaaaccctctcggttgggcccttttcctccaacttcctaaggggtcccctcaaccccaaaacaaaaaacaggttggggagagtcaacagcgatttaacgcccccgtgcagccagtcaacgttggacagggagggcccaaaatgaacttttggg

SEQ ID NO: 31012 - DNA, 445 bp, Zea mays
  unsure (1)..(445): unsure at all n locations
  Clone ID: MRT4577_128293C.1
gtgagcacaggagagagaaaggggactggattgactctaagacggagagcaagaagcaaaatgtttttggagattgagtgatgcgatctgatagtgaaaatgcttctgcgagaaatggatggtgatccattccatcccatgcccagctatgatttcctgtctgggaacggttattcattaaagcagttagtgcgcagcaactctgatatagactcttcatcatccaagtctaaggagtcttggcaagacttatctgacagcagcctcagtggacaacacacaccaacacaatctgataacaacgatatttgtggaaagtgggaccagggcatggngaagtctgtattgtcctttagtagcccggaagatgcctttttcccttacaagggttgtgcttcttatagtgctgatccctattaggcggggtgtgggcaggatacacttc

SEQ ID NO: 31013 - DNA, 784 bp, Zea mays
  Clone ID: MRT4577_128294C.1
ggccgggaaagcggtcccagcttgcactagagaccgaacagatagagattggagaaccatgatgagatccggccttctctcgctatgtttccacctagccctggccatcacactggctgcaagtgttcctggccttgctcgtagtagggtaatcgacatcgaaccgcaactcaaaccgacgctgcaactagaaccaaagcatggtgtatctcaaccagacagaaaccaagaacccaaaccgacaccacaacctgagccaaaaccggagcctaaaccggaaccaaaacctgcaccacaatcagacaccaaatcagaccctaaacccgcaccacagtcagacccaaaacctgcaccacaaccggacctaaaaccagaacccaaacctacaccacagccagacccaaaaccttcaccacaaccaggcccagagccaaaacccaagccagcgccacagcctgaaccaaaaccagaacccaaacctacaccacaaccagacccaaaacctggaccacaaccagacccaaaaccagaacccaaacctacaccacaaccaggcccagagccgaaacccaagctagcgcctcaacctgagccaaaacccacgccgcaaccagatccgaaacctgagccaaaaccaacaccacaaccaccctttccacagcccgagcctcaaccagatcccaaaccccaacccgaaccatacaagccagaccctcgaccagatcctaaaccccaacccgaaccatccaagccagacccccagccaggacctaaacctacacca

SEQ ID NO: 31014 - DNA, 4990 bp, Zea mays
  Clone ID: MRT4577_128295C.1
tcaatcaaagttccgagaatcaagaatgtttagctcattcctaagtttggtaaaggttttctcatctaaaggcttggtaaagatatcggctaattgatctttggtgttgatataggctatctcgatatccctcctttgttggtgatctctcaaaaagtgatactgaatggctatgtgcttagtgcggctgtgttcaacgggattatccgccatgcggattgcactctcattatcacataggagagggactttgctaaatttgtagccatagtccctaagggtttgcctcatccaaagtaattgcgcgcaacaatgacctgcggcaatgtactcggcttcggcggtagaaagagctactgagttttgtttctttgaagcccaagacaccagggatctccctagaaactgacaagtccctgatgtgctcttcctatcaattttacacactgcccaatcagcatcagaatatcctcccgtgtcgaggtcaagatgcccattggttcccatgggtgtcttgatgggcttggcatccttcattccaaacttggtgagtatgtcttgaatgtacttcgtttggctgatgaaggtgctctcttggagttgcttaacttgaaatcctaggaaatacttcaactcccccatcatagacatctcgaatttttgaaccattatcctactaaactcttcacaagtagatttgttagtagacccaaatatgttatcattaacataaatttggcatacaaacaaatcttttgcaatagttttagtaaagagagtaggatcgactttaccgactttgaagccattagtgataagaaaatctcttaggcattcataccatgctcttggggcttgcttgagcccataaagcgccttagagagtttataaacatggttaggatactcactatcttcaaagccaggaggttgctcaacatagacttcttccttgattggtccattgaggaaggcattcttcacgtccatttgatataactcattcctcgtgaagttgttgagatcctcttgcatcgccaacacccaatccaaatctttaagtgcatcctctaccctgtgtggtcttgggtgtggcggtcttggatcttgttcatcttccttgtcttgatcattgtcatctcccccttgatcattgctctccttttgagatggctcatcctcttgatcttcattttcatcatcttgagcttgatcctcatcttgagttggtggagatgcttgtgtggaagatgatggtcgatcttgtgcttgtggaggctcttcggattccttaggacacacatccccaatagacatgttcgttagcgcgacgcacagagcctcttcttcatctagctcatcaagatcaacttgccctacttgagagccgttagtctcatcaaacacaatgtcaaaagaaacttcaactagtccagtggacttgttaaagactctatatgcccttgtgtttgagtcataaccaagtaaaaagccttctacagccttaggagcaaatttagattttctacctcttttaacaagaataaaacatttgctaccgaagactctaaaatatgaaacattgggctttttaccggtgaggagttcatatgatgtcttcttgaggattcggtgaaggtataaccggttgatggcgtagcaagcggtgttgaccgcctcgacccaaaaccgatccgaagtcttgtactcatcaagcatggtccttgccatgtccaatagagttctattcttcctctccactacaccattttgttgtggcgtgtagggagaagagaactcatggttgatgccctcctcctcaagaaagccttctatttgtgagttcttgaactccatcccattgtcgcttctaatctttttgatccttaagccgaactcattttgagctcgtctcaagaatccctttaaggtctcttgggtttgtgattttctcccgccgatgcttatgtaagctatctggccgaataggtccatgtggagtagctcaagtggcctgtcggtcgtcatgatgttcttgtgtggatgatgaacgccaacttgcttccctgcttggcatgcactacaaatcctgtctttctcaaaatgaacatttgttagttccaaaatgtgttctccctttagaagcttatgaaggttcttcatcccaacgtgggctagtcggcggtgccagagccaacccatgttggtcttagcaattaagcaagtgtcgagttcagctctattgaaatcaactaagtatagctgaccctctaacactcccttaaatgctactgaatcatcacttcttctaaagacagtaacaccttggtttccatccccgaatgtgatagctctttggggatcttggtttttctcataggaggagaacatccttttctccccagtcatgtggtttgtgcacccgctatcaatgatccaacttgagcccccggatgcataaactttgcctgatttgttagtgagcacatatgaagcatcaaaagtcttaaatgaaatgttatgatcatttgatgcaataggagatttcattttaggcattttaacatgggtagaacgcctagagctagaagcctcattcttataaataaaagcatggtgagaaacataatgagtcttcttagcatgaattctcctaatcttatcctcaggataaccagcaggatataaaatatagccctcgttatcctgaggcatgggagccttgcccttaacaaaattagacaatcttttaggaggggcattaagcttgacattgtctccctgttggaagccaatgccatcattaatgtcagggcgtctcccactatagagcatgcttctagcaaatttaaatttttcattttccaagtcatgctcattgattttagcagttaatgtagctatgtgatcattttgttgtttaattaaagcaaggtgatcatgaatagcatctacattaacatctctatatctagtgcaaatagaaacatgatcaatcatagatgtagagggtttgcaatcatttaattcaacaatcctagcgtgtaaaatagcattctcatctctaagattggtaatagcatcattgcaaacatttaaatctttagccttagcaattaattgttcattaataatcttaaggctagcaagagaggcattcaatttatcaatcttagcaatcaaactagcattatcatttctaagattgataattgaatcatcacagatatttgacttctcaaccttagcaatcaaattagcattctcaattctaaggttagagatagtgtcatggcaaatgctaagctcactagttaatttttcacatttttctacttcctgagcataagcatttttgaccttgtcacaccaaaggtgggagttcatgaagtgtaaggctttacccacaagtcgtgttacccatttgccacggagttgatcagaccccatacacctcttaacatacttcttattttctttaattaggaagtcctcttggctatccaagagttcatccttctcatgaatagcactaatcaattcattcaatttttctttttgttgcatgtttaggttggcaaaaagggtgagcaagttatcctcatcatcactagaattatcctcatcactagaagttgcatacttagtggaggatctagattttaccttcttcttcttgtcgtcctttgccatgaggcacttgtggccgacgttgggaaagaggaggcccttgttgatggtgatgttggcggcgtcctcgtcgtcggaggagtcggtggagctctcgtcggagtcccactcccggcaaacatgggcatcaccgcccttcttcttgtagtatctcttcttctccttcttcttccccctcttgtcgtcgcccctgtcactgtcactagaaataggacattttgctataaagtgaccgggcttaccacacttgtagcaaactttcttggagcggggcttgtagtctttccccctcctttgcttgaggatttggcggaagctcttgatgatgagcgccatttcctcgttgtcgagcttggaggcgtcgatggggacactacttggtgtagagtctttcttttcttcttccgtcgccttgaatgcgacgggttgcacctcggatgttgaggtggtgccttgctcgatgattttcttagagcctttgatcatcaattcaaagctcacaatttttcctatcacttcctcgggagacattagtttgtatctaggatcaccacgaattaattgtacttgagtaggattaagaaaaactagtgatcttagaataaccttgaacatttcatggtcatcccatttggtgctcccgaggttgcgcacttggttcaccaaggtctttagccggttgtacatggcttgcagatcctctccttggttgagcatgaaacaaccgagctccccctcgatcgtctccctcttggtgatcttggtcacctcatctccttcgtgcgcggttttgagcacgtcccaaatctccttggcactcttcaacccttgcaccttgttatactcctctcgacttagagaggcgaggattatagcggtagcttgggagttgaagtgccggatttgggcaaccttgtccgaatcataatctttatcccccggtgatggtacctgtactccaatcttaacaacattccaaatgctagcgtggagtgaagttaggtgatgcctcattttatcactcaacatataataatcttcaccgtcaaaaatcggtggtttgctaaacttcttgcgctcatggcgcttagaagtgacatacggagtgtcggagccggaggtggatgatgatgaggaatcggtctcgtagtagaccactttcttcatcttctttttcttgtcgccgctccgatgtgacttggcatgtgaaggggatcccttcattttgttgtcagactctcccgatggagccttcccgtggcttgtagacttgtcaccaccggtcacgatctccttctta

SEQ ID NO: 31015 - DNA, 779 bp, Zea mays
  unsure (1)..(779): unsure at all n locations
  Clone ID: MRT4577_128296C.1
gcacaagcgtccacagctcttgcactagctagagaccgaacagagagagattggagaaccatgatgaggtctggccttatctcgctatgtttccacctagccctggccatcacactggctgcaagtgttcctggccttgctcgtagtagggtaatcgacatggaaccgcaactcaaaccgacgctgcaactagaaccaaagcatggtgtatctcaaccagacagaaaccagaacccaaacctacaccacagccagacccaaaaccttcaccacaaccaggcccagagccgaaacccaagccagcgccacagcctgaaccaaaaccagaacccaaacctacaccacaaccagacccaaaacctggaccacaaccagacccaaaaccagaacccaaacctacaccacaaccaggcccagagccgaaacccaagccagcgccacagcctgaaccaaaacccacactgcaaccagatccgaaacctgagccaaaaccaacaccacaaccacccttcccacagcccgagcctcaaccagatcccgaaccccaacccgaaccatccaagccaggccctaaaccccaacctgaaccatccaagctagaacctcagccaggatctaaacctacaccggagccaaaaccctaaccagaaccatcgaagcggagccaccgtcgtctcttccaccaccatttggcacgggcgtcgtggaagggaactgagaggagcatagtggaaccgatcatcatcgtggatgccatctatagctnttggctatggctg

SEQ ID NO: 31016 - DNA, 4660 bp, Zea mays
  Clone ID: MRT4577_128297C.1
ttatagcggagcggcttccccaaattcccgaggctggcaagttcgagtgaatcctccctggtgcactggacactgtccggtggcacaccggacaatccggtgcgtcagaccagggttgccttcagtttgactttgctccttgttttgaaccctttcttttatctttgtattggtttgttgtgaacctttggcaccggcaaataccaatggagttgagtggaagcgccttctttgccgaatactccatttccctttcaattctatgactctcgtgtcgaggtcgagatgcccattagttcccatgggtgtcttgatgagcttggcatccttcattccaaacttggtgagtatatcttgaatgtacttcgtttggctgatgaaggtaccctcttggagttgctttacttgaaatcctagaaaatacttcaactcccccatcatagacatctcgaatttttgaatcatgattctactaaactcttcacaaatagatttgttagtagacacaaatatgatatcatcaacataaatttggcatacaaacaaatcattcttaatcgtcttagtaaagagagtaggatcggccttgccgactttgaagccattagtgataaggaaatctcttaggcattcataccatgctcttggggcttgcttgagccaataaaagcgccttagagagtttatacacgtgattaggatactcactatcttcaaagtcgggaggttgctcaacatagacctcttccttgattggtccattgaggaaggcacttttcacgtccatttggtaaagcttaaagccatggtaagtagcataggcaagtaatatgcgaattgattcaagcctagctacgggtgcataggtttcaccgaaatccaaaccttcgacttgtgaatatcctttggccacaagtcgggctttgttccttgtcaccacaccatgctcatcttgcttgttgcggaagacccactcgttcctagtgaagttgttgagctcctcttgcatcgccactacccaatccgaatcttgtagtgcttcctctaccctgtgtggctcaatagaggaaacaaaagagtaatgctcacaaaaatgtgcaacacgagatctagtggttacccccttatgaatgtcgccaaggatggtgtcgacggggtgatcttgttggattgcttggtggactcttgggtgtggcggcctttgttcttcatcctccttgtcttgatcatttgcatctcccccttgatcattatcgtcatcttgaggtggctcatttgcttgatcttctacttcatcaacttgagcttcatcatccccaatggacatgttccttagcgcgatgcacggagcctcttcatcacctatctcatcaagatcaacttgctctacttgagagccgttagtttcatcaaacacaacgtcacaagaaacttcaaccagtcccgaggacttgttaaagactctatatgcccttgtgtttgaatcatatcctagtaaaaagccttctacagtcttaggagcaaatttagattttctacctcttttaacaagtataaagcatttgctaccaaagactcggttgatggcgtagcaagcggtgttgaccgcttcggcccaaaaccgatccgaagtcttgtactcatcaagcatggttcttgccatgtccaatagagttctattcttcctctccactacaccattttgttgtggcgtgtagggagaggagaactcatgcttgatgccctcctcctcaaggaagccttcaatttgagagttcttgaactccgtcccattgtcgcttctaattttcttgatccttaagccgaactcattttgagcctgtcttaagaatccctttaaggtctcttgggtttgagatttttccctgtctttctcaaaatgaacattggttagtcctaaaatgtgttctccctttagaagcttgtgaagattcttcatcccaacatgggctagtcggcggtgccagagccaacccatgttagtcttagcaattaagcaaatgtcgagttcagctctatcaaaatctaccaagtatagctgaccctccaaaactcccttaaatgctattgaatcatcacttcttctaaagacagtgacaccttggtttccatccccgaatgtgatcgctcgttggggatctttgtttttctcgtaggaggagaacattttcttctccccagtcatgtggtttgtgcacccgctatcgatgatccaacttgagcccccggatgcataaacgatcatttgatgcactaggagttttccttttaggcaacttagcatgggttggttgcctaaactagatgtctcacccttatacataaaagcatgatttgggccagagtgagacttcctagagtgaattctcctaatcttgctctcgggataaccggcagggtacaaaatgtaaccctcgttatcctgaggcatgggagccttgcccttaacaaaattagacaatcttttaggaggggcattaagtttgacattgtctcccctgtggaagccaatgccatccttgatgccagggcgtgtcccattataaagcatactacgagcaaatttaaatttttcattctctaagttatgctcggcaattttagcatctaattttgctatatgatcattttgttgtttaattaaagacatgtgatcatgaatagcatcaatatcaacatctctacatctagtacaaatagatacatgctcaacgatagatgtagacggtttgcaagattttaattctacaacctttgcatgtaatatatcgttttcatttctaaggttagaaatagtaatattgcaaacatcaaaatctttagccttagcaagcaatttctcattttcaatcctaaggctagcaagagaaacattcaactcatcaatcctagcaagtaaatcaacattatcatctctaggattgaaagttgaaacattacaaacatgagaatcaaccttagtaattaatttcgcattttcatttctaaggttggcaatagtgtcatggcatgtgcttagctcactagataatttctcacatttttctacctctagagcataagcattcttaaccttaacatgctttttattttccttgattaggaagtcctcttgggagtccaagagatcatccttttcatggatggcactaattagctcatttagtttttccttttgttccatgttaaggttggcaaaaagggtacgcaaattatcttcctcatcactagcattatcatcactagaagattcatatttagtggaggattttgatttaaccttcttccttttgccgtcctttgccatgaggcacttgtggcctacattggggaagagaagtcctttagtgacggcgatgttggtggcgtcctcgtcgtcggaggagtcgctagagctttcgttggagtcccactcccgacaaacatgggcatcgccgcccttcttcttgtagtaccttttcttctcctttcttctccccttcttgtcgtcgcccctgtcactgtcactagatataggacattttgcaataaaatgaccgggcttaccacatttgtaacacactttcttggagcgaggtttgtaatccttccccctcctttgtttgaggatttggcggaagctcttgatgatgagcgccatttcctcattgtcgagcttggaggcgtcgattggttgtctacttgatgtagactcctccttcttctcctccgtcgccttgaatgcgaccggttgtgcttcgggtgtgtaggaggtgccttgctcgatgattttctttgagcctttaataattagctcaaagctcacaaattttcctatgacttcctcgggagacattagcttatatcttgaccatctcatggtcatcccattttcactcccgaggttgcgcacttggttcaccaaggtcttcaagcggttgtacatagcttgtggatcctccccttggtgaagcatgaagcgaccgagctccccctcgatcgtttcccatttggtgatctttgtcacctcgtctccttcgtgcgcggtcttgagtacatcccaaatttccttcgcactttttaacccttgcaccttattatactcctctcgacttagagaggcgaggagtgtagtagtggcttgggagttaaagtggtgaatttgggccacctcgtccgagtcgtagtcttcatcccctacggatggtacctgtacaccaaactcaacaacattccatatgcttgtgtggagtgaggttagatgatgcctcattttgtcactccacatattataatcttcaccgtcaaaaaccggtggtttgcctaatggaatgaaaagtaatggagtatgtctagaagtacgaggataatgtaagggaatcttactaaacttcttgcgctcatggcgcttagaagttatggagggcgcgtcggagccggaggtagaaggtgatgaagtgtcggtctcatagtagaccaccttcctcatcttcttaattttgtcgccactccgatgcgacttgtgggaagaagtcttcttttccttcttcttctccttcctcttctccttgttgcgggactctcctgatagagcattctcgttgcttgtagtgggcttttcgtcggtctccatctccttcttggcgtgatctcccgacat

SEQ ID NO: 31017 - DNA, 829 bp, Zea mays
  unsure (1)..(829): unsure at all n locations
  Clone ID: MRT4577_128298C.1
acagtgtacaagcgtccacagcttgcactactagagaccgaacagatagagattggagtgtgtgatccggcgcccatctggactggtggcaaccaaccatgatgaggtccggccttctctcgctatgtttccacctagccctgaccatcacactggctgcaagtgttcctggccttgctcgtattacggtaatcgacatggaaccgcaactcaaaccgacgctgcaactagaaccaaagcatggtgtatctcaaccagacagaaaccaagaacccaaaccagcaccacagcctgaaccaaaacccacgccgcaaccagatccgaaacctgagccaaaaccaacaccacaaccacccttcccacggcccgagcctcaactagatcccaaaccccaacccgaaccatccaaaccaaaccctaaaccccaacccgaaccatccaagccagacccccatgcatagcccaaacctacaccagagccaaaaccccaaccataaccatcgaagccggagccaccgtcgtctcttctacacncatttggcacgggcgtcgtgtaagggaactgagaggagcacagtggaaccaatcatcatcgtgcacgccatctatagctttttggctatgactgataagtaatattgcttgtgtaagagtgagctctctttatatatagggtacggtgtgtgtattgtgtgtagcactatgtttggacgacgtgtgtgtacccaccttgttccggtgtgtttccatcagcatgcatccatgatccatgtatatgccttgctaagcttgcgtgttatccaatgaataanagaaacatgccttgtaa

SEQ ID NO: 31018 - DNA, 2026 bp, Zea mays
  Clone ID: MRT4577_128299C.1
ctaagttttgaaattggtggtggtgcggtccttttgctttgggctcatactttctccccctttggcatgaatcgccaaaaacggaatcattagagcccacgaagtaatttcttcccctcccgtgtcgaggtcgagatgcccattagttcccatgggtgtcttgatgggtttggcatccttcatcccaaacttggttagaatgtcttgagtgtacttcgtttggctaatgaaggtgccctcttggagttgcttgacttggaatcctagaaaatacttcaactcccccatcatcgacatctcgaatttctgtgtcatgatcctactaaactcttcacatgtagactcgttagtagacccaaatataatatcatcaacataaatttggcatacaaacaagtcattttcaagagttttagtaaagagtgtaggatcggccttgccgactttgaagccattagcaataaggaaatctcttaggcattcataccatgctcttggggcttgcttgagcccataaagcgccttagagagcctataaacatggttaggatactcactgtcttcaaagccgggaggttgctcaacatagacctcttccttgattggtccgttgaggaaggcacttttcacgtccatttgataaagcttaaagccatggtaagtagcataggccaataatatgcgaattgactcaagcctagctacgggtgcataggtttcaccgaaatccaaaccttcgacttgtgaatatcctttggccacgagtcgagctttgtttcttgtcaccacaccatgctcatcttgcttgttgcggaagacccatttggttcctacaacattttggttaggacgtggaactaaatgccatacctcattcctagtgaagttgttgagctcctcttgcatcgccaccacccaatccgaatcttgaagtgcttcctctaccctgtgtggctcaatagaggaaacaaaagagtaatgttcacaaaaatgtgcaacacgagatcgagtggttacccccttatgaatgtcgccgaggatggtgtcgacggggtgatctcgttgtattgcttggtggactcttgggtgtggcggtcttggttcttcctcatcctccttttcttgatcatttgcatctcccccttgatcatttccatcatcttgaggtggctcatcttcttgattttgcccttcatcaacttgagcctcatcctcattttgagttggtggagatgcttgcatggaggaggatggttgatcttgtgcatttgaagactcttcggattccttaggacacacatccccaatggacatgttccttagcgcgatgcacggagcctcttcattacctatttcatcaagatcaacttgctctacttgagagccgttagtttcatcaaacacaacgtcacatgagacttcaactagtccagtggacttgttaaagaccctatatgcccttgtgtttgagtcataaccaagtaaaaagccttctacagttttaggagcaaatttggattttctacctcttttaacaagaataaagcatttgctaccaaaaactctaaagtatgaaatgttgggctttttaccggttaggagttcatatgatgtcttcttgaggattcggtgaagatacaaccggttgatggcgtagcaggcggtgttgaccgcttcggcccaaaaccggtccggtgtcttgtactcatcaagcatggttcttgccatgtccaaaagagttcgattcttcctctccactacaccattttgttgaggtgtgtaaggagaagagaactcatgcttgatgccctcctcctcaaggaagccttcaatttgagagttcttgaactccgtcccattgtcgcttcttattttcttgatccttaagccgaactcattttgagcccgtctcaagaatccctttaaagtctcttgggtttgagatttttctcccgctgatgcttatgtaagcaatcaggccgaataggtccatgtggagtagctcaagcggcccgtcggtcgtcat

SEQ ID NO: 31019 - DNA, 616 bp, Zea mays
  Clone ID: MRT4577_12829C.1
cgatcctccgccggcgctgtgcagtggtgtttatcaagtacctctctatctggcgcaccagactcctagtcggaattcatctcaccgtacagaggcagctcaagcaacgcgtgttctgacgggcaggttcgagaggaaagtgcttcacccaaggctctgttgatgtagcacattgctgccaatccatccaccgagggtggtgaggatgaaagcgttgatgactcagtcgtgaaggtggttgatattgatgacacattccgtctacaggagcaacctccttttgacaagaaatcatttgtctcttacataaaataatacatcaagaatctcactgctgtgttggagccagagaaagcggctgagttcaaaaagggtgtcgagggtgcaaccaagtttctccttagcaagctgaaggaccttcaattttttgttggtgagagcatgaatgacgaaacgtacgtggtattcacctattacaaggatggtgccactaatcctacattcctttattgctctcatggtcttaaggagatcaagtgctagattagttacccatgttgggtactatatatgaactattgttatagccacaactatagctgccctgcctgaactg

SEQ ID NO: 31020 - DNA, 574 bp, Zea mays
  Clone ID: MRT4577_1282C.1
cactcctatgggcgattgggtccctcgaggccggccggggaacggaggtcgagcaccagacctcatctcactccgctaccccctcatcctgccatccaccagaagcagtgcgagcaggcggcgcggctcgaggccagcctccagggcacccggtgggccgccgccgtcaacgacgcgcgcagggccgacccggcctcgccctacaccgtcgcgcagtacaactcgcccttcgagttcaccggcagggtcaacgagatctggatgctcttcgacgcggacgacgacgccagtatgtgatgcgattccaagcgtgctctcggggcactgaggcgtttagggaaggacgcgcatgcacctgtgcagtgcagctgtgctaccatgaagtatttcgtgctcttgtgcgctagcttcgtttactttcgacttttcgagtaaggaataaggtgcctcttgttgcaataatgataaagctaatcctgcttgtaattacatttcgtggcatggccattccggcaacatgtccagtaaaaaaaaactttttagtttcaaaaaaaaaaaaaaaaaaggcccctac

SEQ ID NO: 31021 - DNA, 1069 bp, Zea mays
  Clone ID: MRT4577_128300C.1
gcacaagtgtccacagcttgcactagagaccgaacagatagagattggagaaccatgatgagatccggccttctctcgctatgtttccacctagccctggccatcacactggctgcaagtgttcctggccttgctcgtagtagggtaatcgacatcgaaccgcaactcaaaccgacgctgcaactagaaccaaagcatggtgtatctcaaccagacagaaaccaagaacccaaaccgacaccacaacctgagccaaaaccggagcctaaaccggaaccaaaacctgcaccacaatcagacaccaaatcagaccctaaacccgcaccacagtcagacccaaaacctgcaccacaaccggacctaaaaccagaacccaaacctacaccacagccagacccaaaaccttcaccacaaccaggcccagagccaaaacccaagccagcgccacagcctgaaccaaaaccagaacccaaacctacaccacaaccagacccaaaacctggaccacaaccagacccaaaaccagaacccaaacctacaccacaaccaggcccagagccgaaacccaagccagcgcctcaacctgagccaaaacccacgccgcaaccagatccaaaacctgagccaaaacccacgccgcaaccagatccgaaacctgagccaaaaccaacaccacaaccacctttcccacagcccgagcctcaaccagatcccaaaccccaacccgaaccatccaagccagatcctaaaccccaacccgagccatccaagccagaccctcagccagagcccaaacctacaccagagccaaaaccccaaccagaaccatcgaagccggagccaccgtcgtctcttccaccaccatttggcacgggcgtcgtggaagggaactgagaggagcatagtggaaccgatcatcatcgtggatgccatctatagcttttggctatgactgataagtaatactgtttgtgtaagagtgagctctctttttatatagggtgtgtgtattgtgtgtagtactatgtttggacgatgtgtgtgtacccaccttttcccgtgtgtttcc

SEQ ID NO: 31022 - DNA, 3769 bp, Zea mays
  Clone ID: MRT4577_128301C.1
ctcattcctagtgaagttgttgagctcctcttgcatcgccaccacccaatccgaaacttgtagagcttcctctaccctgtgtggctcaatagaggaaacaaaagagtaatgttcacaaaaatgagcaacacgagatcgagtagttacccccttttgaatatcgccgaggatggtgttcacggggtgatctcgttggattgcttggtggactcttgggtgtggcggccttggaacttgttcatcttccttatcttgatcacgggcatctcccccttgatcattgctctcctcttgaggtggctcaacttcttgattttctccttcatcattttgagcctcatcctcatcttgggttggtggagatgcttgcatggaggaagatggttgatcttgtgcatttggaggctcttcggattccttaggacacatatccccaatggacatgttccttagcgcgacgcacagagcctcttcatcacctatctcatcaagatcaacttgctctacttgagagtcgttagtctcatcaaacacaatgtcacaagaaacttcaactagcccagaggacttgttaaagactctatatgcccttgtgtttgaatcatatcctagtaaaaagccttctacagccttgggagcaaatttggattttctacctcttttaacaagaataaagcatttgctaccaaagactctaaaatatgaaacattgggctttttaccggttaggagttcataagatgtcttcttgaggattcggtgtagatacaaccggttgatggcgtagcaagcggtgttgaccgcttccgcccaaaaccgatccgaagtcttgtactcatcaagcatggtccttgccatgtccaatagagttctattcttcctctccattacaccattttgttgtggtgtgtacggagaagagaactcatgcttgatgccctcctcctcaaggaagccttcaatttgagagttcttgaactccgtcccgttgtcgcttctaatctttttgatccttaagccgaactcattttgagcccgtctcaagaatccctttaaggtctcttgggtatgagatttttcctgcaaaaagaacacccaagtgaagcaagaataatcatccacaataactagacagtacttactcccgccgatgcttatgtaagctatcgggccgaatagatccatgtgtaggagctcgagtggcttgtcagtcgtcatgatgttcttgtgtggatgatgaacaccaacttgcttccctgcctgacatgcgctacaaatcatgtctttctcaaaatgaacatttgttagtcccaaaatgtgttctccctttagaagcttgttaagattcttcattccaacatgtgctagtcggcgatgccagagccagcctatgttagtcttagtaattaagcaagtgtcgagttcagctctatcaaaatctactaagtatagctgaccctctaacactcccttaaatgctattgaatcatcacttcttctaaagacagtaacacctgtatcttgattcccatccccgaatgtgatagctcgttggggatcttgttttttctcataggaggagaacatcttcttctcccctgtcatatggtttgtgcatccgctgtcgatgatccaacttgagcccccggatgcataaaccttgcctgatttgttggttagcacataagatgcatcaaaagttttaaatgaaatgttatgatcatttgatgcagtaggagttttcttcttaggcaattttgcacgggttgattgcctcgagctagatgtctcacccttatacataaaagcatgattagggccagactgagacttcctagaatgaattctcctaattttgctctcgggataaccggtagggtacaaaatgtaaccctcgttatcctgaggcatgggacccttgccctttacaaagttagacaatctcttaggaggggcattaagtttgacattgtctcccttttggaagccaatgccatccttgatgccagggcgtctcccactatagagcatgcttctagcaaatttaatttttttcattttatttgaatcaaccttagctattaaattagcattctcatttctaaggttgataataatatcatggcacttgcttagctcactagataatctttcacatttttctacttctagagcataagcatccttaaccttaacatgcttcttattttctttaattaggaagtcctcttgggagtccaagagttcatccttttcatgaatagcactaattaattcatttaatttatccttttgttgcatgttaaggttggcaaaaagaatacgcaaattatcttcctcatcactaacatgatcttcatcactagaggatgtatatttagcggaggatcttgattttactttctttcttttgccgtcctttgccatgaggcacttgtggccgacgttggggaagaggagtcccttcgtgacgatgatgttggcggcgtcctcgtcggaggaggagtcggaggagctctcatcggagtcccattcgcgacacacatgggcatcaccgcccttcttcttgtagtatctcttctttttctctcctctttcccttcttgtcgtcgcccctgtcacttccacggtagcataccttcttggagcgggacttgtagtccttccctctcctttgcttgaggatttgacgaaagctcttgatgatgagcaacattttctcgttgtcgagcttggaggcgtcgattggaaacctacttgatgtagactccttcttctcttcttctgtcgccttgaatgcgacgggttgcaccttggatgtagaggtggcgccttgctccaagttgataatatgtttggagtctttgatcataagttcaaagctcacaaacttgccaatcacttcctcgggagacattagtttgtatctaggatccccacgtattaattgaacttgagtaggattacgaaaaacaagggatcttagaataaccttgaccatttcatggtcatcccatttggtgctcccgaggttgcgcacttggttgaccatcgtcttgagccggttgtacatggtttgtggctcttcccctttgttgaggatgaatcgaccgagttcttcctcgatcgtttcgcgcttggtgatcttggtcacctcgtccccttcgtgcgcggtcttgagcacgtcccaaatctccttggcgctcttcaatccttgcaccttattatactcctctcgacttagagaggtgagaagtatagtggtggcttgggagttgaagtgcatgatttgggccacttcgtcctcatcataatcttcatcccccgatgatggtacctgtactccaatctcaaaaacatcccaaatgctagtgtggagtgaggttagatgatgtctcattttatcactccacatattgtaatcttcaccatcaaacataggtggtttgcctaatgggacggaaagtaatggagtacgtttggaaatgcgagggtagcgaaggggaatcttactaaacttcttgcgctcatggcgcttagaagttatggacggcgtgtcggagccggaggtggatggcgacgaagaattggtctcgtagtagaccaccttcctcatcttcttcttcttcttgtcaccgctccgacgcgacttgtcgtgtgaaggggataccttcaccttgttggcggactccccggatggagccttcccatggcttgtagcgggcttctcgccggtcccgatctccctcttggtggatgctcccgacat

SEQ ID NO: 31023 - DNA, 2073 bp, Zea mays
  Clone ID: MRT4577_128302C.1
ttaagcctgatcctcatcttgggtaggtggagatgcttgcatggaggaagatggttgatcttgtgcttgtggaggctcttcggattctttaggacacacatccccaatggacatgttctttagcgcgacacatggagcctcttcatcatctagctcatcaagatcaacttgctctacttgagagtcgttagtctcatcaaacacaatgtcacaagaaacttcaactagtccagtggacttgttaaagactctatatgcccttgtgtttgaatcatatcctagtaaaaagccttctacaaccttaggagcaaatttggattttctacctcttttaacaagaataaagcatttgctaccaaagactctaaaatatgaaacattgggctttttaccggttaggagttcatatgatgtcttcttgaggatttggtgaagatataatcggttgatggcatagcaagcggtgttgaccgcctcggcccaaaaccgatccaaagtcttgtactcatcaagcatggtcctcgccatgtcaagtagagttctattcttcctctccactacagtattttgttgtggcgtatagggagaagagaactcatgcttgatgccctcctcctcaaggaagccttctatttgtgagttcttgaactccgtcccgttgtcgcttctaatctttttgatccttaagccgaactcattttgaacccgtctcaagaatccctttaaggtctcttgggtttgtgatttttccctgtctttctcaaaatgaacatttgttagtcccaaaatgtgctctccctttagaagcttatgaagattcttcatcccaacgtgggatagtcgacgttgccagagccaacccatgttagtcttagcaattaagcaagtgtcgagttcagctctattaaaatcaactaagtacagctgaccctctaacactcccttaaatgctactgaatcatcacttcttctaaagacagtaacacctaaatcttgatttccatccccgaatgtaattgctctttgggggtcttggtttttctcataggaggagaacatccttttctccccagtcatgtggtttgtgcacccgctatcaatgatccaacttgagcccctggatgcataaaccttgggtacccaaacacaagtctttgatcccttgtgtttagccccaacatatttggcaactactttgcctgatttgttagttaaaacataagatgcatcaaaagtcttcaatgaaatactagattcatttgatgcaataggagttttcttcttaggcaatttagcatgagtggattgcctagaactagatgcctcactcttatacataaaagcatgatgagagccagagtgagacttcctagagtgaattctcctaattttgtgctcgggataaccggcagggtataaaatgtaacccttgttatcctgaggatggtagccttgcccttaacaaagttggacaatttcttaggaggggcattaagtttgacattgtcccccttttggaagccaatgccatccttgatgccagggcgtctcccactataaagcatactacgagcaaatttaaaattttcattttcaagttcatgctcggcaattttagcatctagtttagctatatgattattttgttgtttaattaaagccatgtgatcatgtatagaataaatatcaacatctctacatctagtgcaaattgaagtatgttcaacggtagatgtagagggtttgcaagattttaattctacaaccttagcatgcaatatatcatttttacttctaaggtcggaaatggtagcattgcaaacatcaaaatctttagccttagtaattaatttttcattttcattcctaagactagcaagagatatgttcaattcttcaatcttagcaagcaaatcatcattatcatttttaagattgggaattggaacattacaagcattagaatcaaccttagctaacaaattagcattctcatttctaaggttgtctatagtctcatggcaagtgcttagctcactcgataatttttcacatttttcaacttctagagtc

SEQ ID NO: 31024 - DNA, 211 bp, Zea mays
  Clone ID: MRT4577_128303C.1
ccaaaaaggcagcggagactgattaaaactgacggggctgttacatgactaactggcatccattttgtaaaagggggagccattgacccacgcgttttcaacaaaagaacatacatgtcccttgttgcacgcctaatatcatggacaggtgacactggcacgcccagaccttatgatgccctcctccatcttcatcaaaagaaattcaccc

SEQ ID NO: 31025 - DNA, 260 bp, Zea mays
  Clone ID: MRT4577_128304C.1
agagtttttgtttatggtgaggtacgtcctttggggtggggaggttttgtgaagtatgcgtggtccaataatacaaaagaggactgttaagtacatgttctacagtattacttgaggcgcccttttatactatggccttctgaatgtgttgatttttactaggaaccgacattagcagtggtagggggggccactcgcccatgggcacgtggctaatccagaccaaaaaataaaacctggagggaggtgggccgaaatga

SEQ ID NO: 31026 - DNA, 546 bp, Zea mays
  Clone ID: MRT4577_128305C.1
aagcccccaacaaaaaacatttgggaaagggacaaaaatttttaaaaaaaaggccaaaactacttggggggggaagaggaccaaaaaaaaaagaaaaaaaaccccatttaaggggtaaaaagggaaaaccgggagaaaaaaaaaccaaaccggggggcaaaagaaaaactaggggggactaaaccaaaaaaagcacagggggggggaaaaaacaaaagggggggcaggaaacggaagccctaaaaagacagggacaaaggggggtttcaggccaaaaattaaggatgggcggcacaaaaagcgggggccggggggggcgggggccttggtaggggagcccaccacaccaaaagggccccgattaacggaagggatgggggggaaaaaaaacaacaaagaaccgggaaaaacgcaaaaagggcttcgaaactgggcccgccatgggggggaaacgggaaggggggcccaccatctggaaccagggggggggaaacaacacctcgggagaggaaaaactttgaaggccgaaggcttcctttcaaaaag

SEQ ID NO: 31027 - DNA, 168 bp, Zea mays
  Clone ID: MRT4577_128307C.1
cattgcagtcgtcttggtacacagcgtgtcagtaaccacttgactgtatgtacggcacaagcatcgacattgccaatgctcaaatagagagctgagaccagctaagagcacagcatacactttccggaaggataacatgaagatccagcctgatatggaggacttgaa

SEQ ID NO: 31028 - DNA, 265 bp, Zea mays
  Clone ID: MRT4577_128308C.1
gcacaaacaagctctgaaacatgcgggctggctttgtgatgttgccatactaaaggctcaccagctaccctgcaactgagggcattcagcagtacgacggtaggcctgacaagagctggtccttcccggatttgaaataaaagctatgcccatggtgtcaacaagggccatggaacatttattcgaccaggtgatgatcgtcatcaggggggggttgcgcactggcagttgcaagctcagcttcatgctgctgctgcatgggcat

SEQ ID NO: 31029 - DNA, 364 bp, Zea mays
  Clone ID: MRT4577_128309C.1
gggggggaaacccaatttttttgggtaaaaccattacatttccaaatctttactttttttccggggggaagaggggcaaaattaagacaaattgtttaaaaaaaagcgggccccctggggggcttgatgggggggaggggttccaattaactaatcaagcccaacaacccaagggggttggatcggttaatcggcactcctgttccttgggggctccggggccccccgggatgaactggcccacctttttggcccccgggcccccggggaggcccttccaccaagcccttacttgggggagcccatggacaaaagggggttactcgggggccatgaggcaatccattatgggaaaggggcttag

SEQ ID NO: 31030 - DNA, 381 bp, Zea mays
  Clone ID: MRT4577_12830C.1
tctttctttcttccgcgtgctcatggaaaccatgggggggactatgacctcccggtgggagccattccccgccgacacttacttgtctacctatgcgagcgagttgacgcgaatctccgaacaaatcatgccctaccttagcacagccaacccaagaaggtatgtgtccttcctccaaacttcctacgagtttttcaccaggaaaaagctaatggccgacgtgaggtaatatgacaccttcctgcgaacattcatcaacgctgagcgccggttgatcaacggctacaagcgacagcgacaagaacatgatgatccccgcgctgttctctatgcaaaactgagatccagaactgtacaccgaaaccatgatcatggcgctgt

SEQ ID NO: 31031 - DNA, 287 bp, Zea mays
  unsure (1)..(287): unsure at all n locations
  Clone ID: MRT4577_128310C.1
gcgtncgacggctgcgagaagacgacagaagggagggataataaaaatgaatggatgattagaacaccaaatacacnaggatagtaacgatattntaaaaatatccaaaagacattatattatgtataatagnaaagaatctaattgggctttccgtgtagaaaaataggagactcccagaatccgaccagagttacttcatccaccgttattaaatactatagaaacgaataatccttaattttggaagcccctttatttacttaccanaaagactggatagaaca

SEQ ID NO: 31032 - DNA, 2805 bp, Zea mays
  Clone ID: MRT4577_128311C.1
atgtcgggagatcacgccaagaaggagatggagaacggcgaaaagcccactacaagccacgggagcacttcatcggaagagtcccgcaccaagaggaaggagaagaaagactcctccaaagggaaggagaagaagaaggactcctccaaggggaaggagaagaaatcttcttcacacaaagaaaagaaggagaagtcttcctcccacaagccgcaacggagtggggacaagaaaaagagaatgaggaaagtggtctactacgagaccgattcttcagcgacatccacctccggctccgacgcggcgtccgtcacttctaaacgccaagagcgtaagaagtatagtaagattcccctacgctaccctcgcatttctaaacatacacctttactttccgtcccattaggcaaaccaccaacttttgatggtgaagattatgctaggtggagtgatttaatgcgatttcatctaacctcactccacaaaagtatatgggatgttgttgagtttggtgcacaggtaccatccataggggatgaagactatgatgaggatgaggtggcccaaatcgagcacttcaactctcaagcaacaacaatactcctcgcctctctaagtagagaagagtataacaaagtgcaagtattgaagagcgccaaggaagtttgggatgtgctcaaaaccgcacacgaaggagatgagcttacaaagatcaccaagtgggagacgatcgagggggagctcggtcggttccggcttcgcaaaggggaagagccacaaaacatgtacaaccggctcaagaccttggtgaatcaagtgcgcaacctcgggagcaaaaagtgggatgaccatgaggtagttaaggttattctaagatctcttattttccttaaccctactcaagttcaattaatccgtggcaacccaagatatacactattgacccccgaggaagtaatcgggaattttgtgagttttgagtgcatgatcgaaggctcgaggaagatcaacgagcttgatgatccctccacatccgaagctcaacccgtcgcattcaaggcgacggaggaaaagaaggaggagtctacaccaagtagacaaccaatcgacgcctccaagctcgacaatgaggaaatggcgctcgtcatcaagagcttccgccaaatcctcaaacaaaggagggggaaagactacaagtcccgctccaagaaggtttgctacaagtgtggtaagctcggtcactttattgccaaatgtccattatcaagtgacagtgacagggataacgacaagaagggcaagaggagagaaaagaggaggtaccacaagaagaggggcggtgatgcccacgtgtgccgcgagtgggactccgacgagagctccaccgactcctccgacgatgaggacgccgccaacatcgccgtcaccaagggactcctcttccccaacgtcggccacaaatgcctcatggcaaaggacggcaaaaagaagaaggttaaatcaaaatcctccactaaatatgaatcttctagtgatgataatgctagtgatgaggaagataatttgcgtactctttttgccaaccttaacatggaacaaaaagaaaaattaaatgaactaattagtgccatccatgagaaggatgatctcttagactcccaagaggacttcctaatcaaggaaaataaaaaacatgttaaggttaaaaatgcttatgctctagaagtagaaaaatgtgaaaatttgtctagtgatctaagcacttgccatgagacaatagacaaccttagaaatgaaaatgctaacttgttagctaaggttgattctcatgtttgtaatgtttcaattaccaattctagaaataatgatgatgatttacttgctagaattgaagaattgaacatttctcttgctagccttagaattgaaaatgaaaaattgcttgctaaggctaaaaattttgatgtttgcaatgctactatttccgaccttagaactaagaatgacatgttacatgctaaggttgtagaattaaaatcttgcaaaccctctacatctattgttgagcatgtatctatttgtactagatgtagagatgttgatatcaatgctattcatgatcacatggctttaattaaacaacaaaatgatcatatagctaaattagatgctaaaattgtcgagcataacttagaaaatgaaaagtttaaatttgctagaagtatgctctataatgggagacgccctggcatcaaggatggcattggcttccaaaggggagacaatgtcaaacttaatgcccctcctaaaagattgtctaatttcgtaaagggcaaggctcccatgcctcaggataacgagggttacattttataccctgccggttatcccgggagcaagattagaagaattcactctaggaagtctcactctggccctaaccatgcttttatatataagggtgagacatctagctctaggcaaccaactcgtgctaagttgcctaagaagaaaactcctagtgcatcaaatgatcatgacatttcattcaaaacttttgatgcatcatatgtcttaactaacaaattcgggaaggtttatgcatccgggggctcaagttggatactcgacagcgggtgcacaaaccatatgacaggggagaaaaggatgttctcctcctacgagaaaaaccaagatccccaacgagctatcacattcggggatggaaatcaaggtgtcactgtctttagaagaagtgatgattcaatagcatttaagggagtgttagagggtcagctatacttg

SEQ ID NO: 31033 - DNA, 1476 bp, Zea mays
  Clone ID: MRT4577_128312C.1
ggtaccggcgcccttcctcgagtttttttttttttttttttttttttttttttttttttttttgatgcaacacccatgacggttagggtttggtttatacatgacacgaacacttgtcactatactggtttgaaattgggaagagggagcaaacggggaaagagaaaagagagcaacgcccaaatttggtgagagaaaagaagaaaaaaattctacccccaaattcagggcgttacaatcacccaatccgaattttgaactgcttactctaccctgtggggctcaatagaggaaacaaacgagtaatgttcacaaaaatgtacaacacgagatctagtggttacccccttatgaatgtcgtcaaggatggtgtcgacggagtgatctcgttgtattgcttgatggactcttgggtgtggcggccttggttgttcatcctccttggcttgatcatttgcatctcccccttgatcattgtcgtcatcttgaggtggctcatcattgggttcttctcctttatcaacttgagcctcatcctcattttgggttggtggagatgcttgcgtggaggaggatggttgatcttgcgcatttggaggctcttcggattccttaggacacacatccccaatggacatgttccttagcgcgatgcacggagtctcttcatcacctatctcatcaagatcaacatgctctacttgagagccgttagtctcatcaaacacaacgtcacaagaaacttcaacttgtccagaggacttgttaaagactctatatgcccttgtgtttgaatcatatcctagtaaaaagccttctatagtcttaggagcaaatttagattttctacctcttttaataagaataaagcatttgctaccaaagactctaaaatatgaaatattgggctttttactagtaaggagttcgtatgatgtcttcttgaggattcagtgtagatataaccggttgatggcgtagcaggcggtgttgaccgcctcggcccaaaaccgatccgaagacttgtactcatcaagcatggttcttgccatgtccaatagagttctattcttcctctccactacaccattttgttgtggggtgtaggaagaagagaactcatgcttgatgccctcctcctcaaggaagccttcaatttgagagttcttgaactccgtcccgttgtcgcttctaattttcttgatcctcaagccgaactcattttgagcccgtctcaagaatacctttagggtctcttgggtgtgagatttttcctgcaaaaagaacacccaagtgaagcgagaataatcatccacaataactagacagtacttactcccgccgatgcttatgtaagctatcgggccgaatagatccatgtgtaggagctccagtggccggtcggtcgtcatgatgttcttgtgtgggatggtaagcaccaacttgcttttctgcttggcatgcgctacaaatcct

SEQ ID NO: 31034 - DNA, 468 bp, Zea mays
  unsure (1)..(468): unsure at all n locations
  Clone ID: MRT4577_128313C.1
gcacgcgttcgttaagcttggnacctctagaacggccgccctggggggtgtttttttttttttttttttttttttttttttttttttttttttttttttttttttttccggaaacagggttccaccgggcccttttttttttcggggggtccgattttcggcgcccccgtttaaccggggctcgcttttggggcgggcggggggggaataaaacgggccgccctgggcttggtttgcccctccccacccgggccccccttggccgggcatttcccccacccgttaaaggagacttccttgttcttaaccccacaataacccccctggcttttttccccctgggcgtttctccccctggggtttttttttttttttcccgctgccttggcgctgccggggtgtctttctgccgggtccggcttgtggagggttccccccggttatgtcccgctgcccgcccccccggtt

SEQ ID NO: 31035 - DNA, 5067 bp, Zea mays
  Clone ID: MRT4577_128314C.1
tcaatcaaatttccgagaatcaagaatgtttagctcattcctaagtttgataaaggttttctcatctaatggcttggtaaagatatcggctagttgttctttggtactaacataagcaatctcgatatcccccctttgttggtgatccctcaaaaagtgataccgaatggctatgtgcttagtgcggctgtgctcaacaggattatccgccatgcggattgcactctcattatcacataggagagagactttagttaatttgtagccatagtccctaagggtttgcctcatccaaagcaattgcgcgcaacaatggcctgcggtaatatactcggcttcggcggtagaaagagctcctgaattttgtttctttgaagtccaagacaccagggatcttcccaagaactgacaagtccctgatgtgctcttcctatcaattttacaccctccccaatcagcatctgaataacctattaaatcaaaggtgtatcccttggggtaccaaataccaaacttaggtgtatgaactaaatatctcaagattcttttcatggccctaaggtgaacttccttaggatcggcttgaaatcttgcacacatgcatacagaaagcataatatctcccgtgtcgaggtcgagatgcccattggttcccatgggtggcttgatgggcttggcatccttcattccaaacttggtgagtatgtcttgaatatacttggtttggctgatgaaggtgcccttttggagttgcttgacttgaaatcctaagaaatacttcaactcccccatcatagacatctcgaatttttgaatcatgatcctactaaactcttcacaagtagatttgttagtagacccaaatatgatatcatcaacataaatttggcatataaacaaatcatttgcaatagttttagtaaagagagtaggatcggctttgccgactttgaagccattagtgataagaaaatctcttaggcattcataccatgctctaggggcttgcttgagcccataaagcgccttagagagtttgtaaacatgattagggtactcactatcttcaaagccgggaggttgctcaacatagacctcttccttgattggtccatttaggaaggcacttttcacgtccatttggtaaagcttaaagccatggtaagtagcataggcaagtaatatatgaattgactcaagccttgctacgggtgcataggtttcaccgaaatccaaaccttcgacttgtgaatatcccttggccacaagtcgggctttgttccttgtcaccacaccatgctcatcttgcttgttgcggaagacccacttggttcctacaacattttgattaggatgtggaacaagatgccatacctcattcctcgtgaagttattgagttcctcttgcattgccaacacccaatctgaatcccttaatgcgtcttccaccctatatggctcaatagaagacacaaaggagtaatgttcacaaaaatgagcaacacgagatcgagtggttacccccttatgaatatcgccgaggatagtgttcacggggtgatctcgttgtattgcatggtggacgcttggttgtggcggtcttggaccctcatcatcttccttgtcttgatcatcgacatctcccccttgatcattgtcctcttcttgaggtggctcctcttgatctccattttcatcatcttgagcttgatcctcatcttgggtcggtggagatgcttgcatggaagatgaaggttgatcttgtgcatgtggaggctcctcggattccttaggacacacatccccaatggacatgttccttagtgcgacgcacgaggcctcttcatcatctagctcatcaagatcaacttgctccacttgggagccgttagtctcatcaaacaaaatgtcacaagaaacttcaactagtccagtggacttgttaaagactctatatgcccttgtgtttgagtcataaccaagtaaaaagccttctacaaccttaggagcaaatttagattttcttcctcttttaacaagaataaaacatttgctaccaaagactctaaaatatgaaacattgggctttttaccggtgaggagttcataggatgtcttcttgaggattcggtgaaggtagagacggttgatggcgtagcaagcggtgttgactgcttctgcccaaaaccggtccgaagtcttgtactcatcaagcatggtcctcgccatgtcaagtagagttctattcttcctctccactacaccattttgttgtggagtgtaggaagaagagaactcatgcttgatgccctcctcctcaagaaagccttctatttgtgagttcttgaactccgtcccattgtcgcttctaatctttttgatccttaagccgaactcattttgagcccgtctcaagaatccctttaaggtctcttgggtttgtgatttttccctgtctttctcaaaatgaacatcggttagtcccaaaatgtgttctccctttagaagcttgtgaagattcttcatcccaacatgggcttgatttccatccccgaatgtgatagctctttgaagatcatggtttttctcataggaggagaacattcttttctccctagtcatgtggtttgtgcacccgctatcagtgatccagcttgagcccccggatgcataaactcttatacataaaagcatgatgagagccagagtgagacttcctagagtgaattctcctaattttgtgctcgggataaccgacaggatataaaatgtaaccctcgttatcctgagccatgggagctttgctctaacaaagttagacaatcttttaggaggggtattaagcttgacattgtctccctgttggaagccaatgccatccttaatgccagggcgtctcccactatagagcatgcttctagcaaatttaaaattttcattttctaagtcatgctcatcaattttagcactaagttgagctatgtgatcattttgtttcttaattaaagctaagtgatcctgaatagtatcaacattaatgtctctacatctagtgcaaatagtaacatgctcaacgatagatgtagagggtttgcaagtatttaaatcaacaatcttagcatgtaagatagcattctcatctctaagattggaaatggaaacattgcaaacatttaagtctttagccttagcaattaatttttcatttgcaattttaagactagagagcgaagcattcaaattgtcaatcttagtaatcaaactagcattatcatttctaagactaataattgaatcatcacaaatgtctaacttctcaaccttagctattaatttagcattttcatctctaaggttggaaataacattatggcaagtacttagcttactagttaatttttcacatttttctacctctagagcataagcatttttagtcttaacatgctttttattttccttaataaggaagtcctcttggctatccaagagttcatccttctcatgaatagcactaatcaattcatttaatttctccttttgttgcatattaatattggcaaaaagggtaagcaagttatcctcatcatcactagaattatcctcatccctagaggttgtatacttagtggaggattttgattttaccttcttcttcttaccgtcctttgccatgaggcacttgtggccgacgttggggaagaggagtcccttgttgacggcgatgtttgcggcgtcctcgtcggaggagtcgatggagctctcgtcggagtcccactcccagcaaacatgggcatcaccgcccttctttttgtaatacttcttcttttctctcctctttcccttcttgtcgtcgcccctgtcactgtcactagaaataggacattttgctataaagtggccgggcttaccacatttgtagcaaaccttcttggagcggggtttgtaatccttccccctcctttgcttgaggatttggcggaagctcttgatgatgagcgccatttcctcattgtcgagcttcgaggcgtcgatgggaagcctactcgatgtacattcttccttcttctcctccgttgctttgaatgcgaccggttgcacttcgggtgtggagggggcgccttgctcgatgattttcttggagcctttgatcatcaattcaaagctcacaaattttcctatcacttcctcgggagacattagtttatatcttggatcaccacgaattaattgtacttgagtagggttaagaaatacgagtgatctaagaataaccttgaccatctcatggtcatcccattttgtgctcccgaggttgcgcacttggttcatcaaagtcttgagctggttgtacattgtttgtggctcctccccttggtgaagcatgaagcgactgagctccctctcgatcgtttccctcttggtgatcttggtcacctcgtctccttcgtgcacgatcttgagcacgtcccaaatctcttttgcgctcttcaacccttgcaccttattatactcctctcgacttagagaggtgaggagtatagtagttgcttgagagttgaagtgctcgatttgggccacctcgtcctcatcataatcttcatcccctacggttggtacctgtactccaaactcaacaacatcccatatgcttttgtggagtgaggttaggtgatatctcatcatatcactccacctagaataatcttcaccgtcaaacgtcggtggtttgcctaatgggaccgaaagtaatggagtatgtctaggaatgcgagggtagcgtagggggatcttactatacttcttgcgctcttggcgcttagaagtgatggacgcggcgtcggatcctgatgtagagggcgatgaagagtcggtctcgtagtagaccactttcttcattttcttcttctcaccactcttgtgcgtcctaatgcgtgaaggggatcccttcttctttttgttgccggactcctttgatggagccttcccgtggcttgtggccttggcggggcttgtaggcttgttcccgccgatcaccatctccttcttggcgtgatctcccgacat

SEQ ID NO: 31036 - DNA, 384 bp, Zea mays
  Clone ID: MRT4577_128315C.1
tactagctttctgcgcaactcccctctcgcgatgaatgcgtctcctcctcatggcgctctccagtgtccaggtcggccatggttgtccctgtcttcttcctccccgccaacggtcagatgctacacgataccaccgaacgctggcacagcacctttggaagctgatccaccgtggcaagaggccggacaaggctgcgctccaccgtccgtgcgggtacataccgcaaaggaggcggcgccacgcgtcagggacgcgtgcgggacgaccatccagggaggtcaagccgaccccggctctgggaagctacatgctcccccgcagcatgcgtagggagataggaccctgaaggtaactcacgacatatcaggcgcccttgacatggc

SEQ ID NO: 31037 - DNA, 5790 bp, Zea mays
  Clone ID: MRT4577_128316C.1
atgtcgggagatcacgccaagaaggagatggagaccggcgaaaagcccactacaagctacgggagcacttcatcggaagagtcccgcaccaaaaggagggagaagaagaagagctcctccaacaaagggaaggagaagaaatcttcttctcaccacaaagagaagaaggaaaaatcttcttcccacaagccgcatcggaaaggcgacaagcacaagaggatgaggaaggtggtctactacgagaccgacacttcatcaacttctacctccgactccgatgcgccctccgtcacttctaagcgccaagagcgcaagaagtatagtaagatccccctacgctaccctcgcattcctaaacacacacctttactttccgtcccattaggcaaaccaccaacttttaatggtgaagattatgctatgtggagtaatttgatgcgatttcatctaacctctctccacaaaagaatatgggatgttgttgagtatggtgtacaggtaccatcaataggggatgaggactatgacacggacgaagtggcccaaatcgagcacttcaactcccaagccgcaaccatcctccttgcctccctaagcaaggaggaatacaacaaagtacaaggattgaagaacgccaaggagatttgggacctactcaagacggcgcacgagggtgatgaactcaccaagatcaccaagcgggaaacgatcgagggggagctcggtcgcttccgtcttcgccaaggggaggagccacaagacatgtacaaccggctcaagaccttggtgaatcaagtgcgcaacctcgggagtacaaagtgggatgaccacgaagtggttaaggttattctaagagctcttattttccttaaccccacacaagttcaattaattcgtggtaatccaagatatccactaatgacccccgaggaagtcatcgggaattttgttagttttgaatgcatgattaagggctccaagaagatcaacgagcttgacgagccctccacatccgaggcgcaaccggtggcctttaaggcaacggaggagaagaaggaggagtctacaccaagtagacaaccaattgacgcctccaagctcgacaatgaggagatggccctaatcatcaaaagctttaggcaaatcctcaagcaacggaaggggaaggactacaaacctcgttccaagaaggtttgctacaagtgtggtaagcccggtcacttcattgcaaaatgtcctatgtctagtgacagtgacaggggcgacgacaagaagggaagaagaaaggagaagaagaaatactacaagaagaagggcggcgatgcccatgtttgtcgggagtgggactccgacgaaagctcaagcgactcctccgacgacgaggacgccgccaacatcgccgtcaccaagggtcttctcttccccaacgtcggccacaagtgtctcatggccaaggacggcaaaaagaaggtaaaatcaaggtcctccaccaaatatgaaacatctagtgatgaggatgatgataaaaatgaggaggataacttgcgcattctttttgctaaccttaacatggaacaaaaggaaaaattaaatgaactaattagtgccatccatgaaaaggatgatctcttggactcccaagaggacttcctaatcaaggagaataagaaacatgttaaggttaaaaatgcttacgctctacaagttgaaaaatgtgaaaaattgtctagtgagctaagcacttgccgtgagatgattgacaaccttagaaatgaaaatgctattttaaatgctaaggttgattcacatgtttgtaatgtttcaattcccaatcttaaaaatgataacgttgacttgcttgctaagattgatgaattgaatgcatctcttgctagccttagattagagaatgaaaatttaattgctaaggctaaaaattttgatgtttgcaatgctactatttccgaccttagaactaagaatgaaatgttgcatgctaaggttgtagaacttaaatcttgcaaaccctctacatctaatgttgagcatgtttctatttgcactagatgtagagatattaatattgaggctatccatgatcacctagccttaattaaaaaacaaaatgatcatatagctaaactagatgctaaaattgccgagcacaacttagaaaatgagaaatttaaatttgctcgtagcatgctttataatgggagacgccctggcatcaaggatggcattggcttccaaaggggagacaatgtcaaacttaatgcccctcctaagaacttgtctaactttgttaagggcaaagctcccatgcctcaggataacgagggttacattttataccctgcaggctatcctgagagcaaaattaggaagattcattctaggaagtctcactctggccctaaccatgctttcatgtataagggtgagacatctagtcctaggcaaccaacccgtgccaagttgcctaagaagaaaattcctaatgcatcaaatgatcatgccatttcatttaaaacttttgatgcatcttatgtgcttactagcaaatccggcaaagtagttgccaaatttgttgggggcaaacacaagggctccaagacttgtgtttgggtacccaaagttcttgtatctaatgccaaaggacccaaaacagtttgggtttatgcatccgggggctcaagttggatactcgacagcgggtgcacaaaccacatgaccggggagaaaaggatgttctcctcatatgagaaaaacaaagatccccaacgagctattacatttggggatggaaatcaagggttggtcaaaggtgtcactgtctttagaagaagtgatgattcaatagcatttaagggtgtgttagagggtcagctatacttagtagattttgatagagctgagctcgacacatgtttaattgctaagactaacatgggttggctctggcaccgccgactagcccatgttgggatgaagaatcttcataagcttctaaagggagagcacattttaggactaaccaatgttcattttgagaaagacaggatttgtagcgcatgccaagcagggaagcaagttggcactcatcatccacacaagaacataatgacgactgacaggccactggagctgctacacatggatctattcggcccgatcgcttacataagcatcggcgggagtaagtactgtctagttattgtggatgattattctcgcttcacttgggtattctttttacaggaaaaatctcaaacccaagagaccttaaagggattcttgagacgagctcaaaatgagttcggcttaaggatcaagaaaataagaagcgacaatgggacggagttcaaaaactctcaaattgaaagcttccttgaggaggagggcatcaagcatgagttctcttctccctacacgccacaacaaaacggtgtagtggagaggaagaatcgaactctattggacatggcaagaaccatgcttgatgagtacaagacaccggaccggttttgggccgaagcggtcaacaccgcctgctacgccatcaaccggttatatcttcaccgaatcctcaagaagacaccatatgaactcctaaccggtaaaaagcccaacatttcatattttagagtttttggtagcaaatgcttcattctcattaaaagaggtagaaaatctaaatttgctcctaaaactgtagaaggctttttacttggttatgattcaaacacaagggcatatagggtctttaacaagtccactggactagttgaagtctcttgtgacgttgtgtttgatgaaactaacggctctcaagtagagcaagttgatcttgatgagataggtgaagaacaggctccatgcatcgcactaaggaacatgtccatcggggatgtgtgtcctaaggaatccgaagagcctccaagtacacaagatcaaccatcctcctccatgcaagcatctccaccaactcaaaatgaggatgaggctcaaaatgatgaagagcaaaatcaagaagacgagccacctcaagatgatagcaatgatcaagggggagatacaaatgatcaagaaaaggaggatgaggaagaaccaagaccgccacacccaagagtccaccaagcaatccaacgagatcaccccgtcgacaccatcctcggcgacattcataagggggtaactactcgatctcgggttgctcatttttgtgaacattactcttttgtttcctctattgagccacacaggatagaggaagctctccaagattcggattgggtggtggcgatgcaagaggagctcaacaatttcacgaggaatgaggtatggcatttagttccacgtcctaaccaaaatgttgtaggaaccaaatgggtcttccgcaacaagcaagatgagcatggtgtggtgacaaggaacaaagctcgactcgtggccaaagggtattcacaagtcgaaggtttggattttggtgaaacctatgcacccgtagctaggcttgagtcaattcgcatattattggcctatgctacttaccatggctttaagctctatcaaatggacgtgaaaagtgccttcctcaacggaccaatcaaggaagaggtctatgttgagcaacctcccggctttgaagacagtgagtaccctaaccatgtctataggctctctaaggcgctttatgggctcaagcaagccccaagagcatggtatgaatgcctaagagatttccttattgctaatggcttcaaagttggcaaggccgatcctacactctttactaaaactcttgaaaatgacttgtttgtatgccaaatttatgttgatgatattatatttgggtctactaacgagtctacatgtgaagagtttagtaggatcatgacacagaaattcgagatgtcgatgatgggggagttgaagtattttctaggattccaagtcaagcaactccaagagggcaccttcattagccaaacgaagtacactcaagacattcttgctaagtttgggatgaaggatgccaaacccatcaagacacccatgggaaccaatgggcatctcgacctcgacacgggaggtaagtccgtggatcaaaaggtataccggtcgatgattggttcattgctttatttatgtgcatctcgaccggacattatgctttccgtttgcatgtgtgcaagatttcaagccgaccctaaggaatcacaccttacggccgtaaaacgaatcttgagatatttggcttatactcctaagtttgggctttggtaccctcggggatccacatttgatttaattggttattcggatgccgattgggcggggtgcaaaattaataggaagagcacatcagggacttgccagttcttgggaagatccttggtgtcttgggcttcaaagaagcaaaattcggtcgctctttccaccgccgaagccgagtacattgccgcaggacattgttgcgcgcaattgctttggatgaggcaaaccctgcgggactacggttacaaattaaccaaagtccctttgctatgtgataatgagagtgcaatcaaaatggccgacaatcccgtcgagcatagccgcactaagcatatagccattcggtatcattttcttagggatcaccaacaaaagggggatatcgagatttcttacattaatactaaagatcaattagccgatatctttaccaagccacttgatgaacaatcttttaccagacttaggcatgagctcaatattcttgattctagaaatttcttttgctaa

SEQ ID NO: 31038 - DNA, 1427 bp, Zea mays
  Clone ID: MRT4577_128317C.1
gggaccctcgaggccggccgggaaataattcgggcagccacagccatccatggaggcgctctacttgctggcctccctggccgcgactgtcgtcacctccgccttccactcgctcctgctgttcctccgcctcctcctccgctacccgcgccgcgctgcccctaccgatgatgggcccgccgcggcggcgcggctctacgagggccgggtccggcacgcgcgacggcgcccggcggcgcacaccttcgagtaccccgcgcgctacgccctcgtcgacctcgaccgactgccgctccccggccacctctccgccgacgatgcccgccgcgtcgcctccacctccggccccgtgcacctcttgacggtacccgagagcgtggggtacgagcagaacccgctgagcatttactactgctacgattctgcaggacaggggcaagatggagagctcagaacgtgcattgccgaggtcacaaacaccccctgggcagagagagtgatgtttaccttccaaccgggctctgatctcattgcgaagcccttgcatgtcagcccctttatggatatgctcagcaactggagtattcgcgctgatgctcctggtgatagactctatgttggtatatcagttcagcatccgacacttggggactacttcactgcagttttggatgccaaattggttgaacagacaagtaattctctgaggctggcaaccttcttctggctgatgccgcacaaagttgctgcatggatatactgggaggccctcaaactttggctgaagaacgtcaagttcctggaccatcccaggtatctgaacccgaggtacagggacgaagcgctggcgcgcgaccttgagctccgcacctcttgctgccaccttcagcggcaggagcagaacgaccgaagaagcagaaccgcagaaaagacagctgaaatcacggaccacgtagatggcaagggcgatgcggacatcgcgaagaggtggtgcgtttggagggacgctcggtggccgtggtcatgaaaaaaaaactcagacatgccgttttgtgttcagattcagcctggtgctcccgtttcgaccaaatatcgtagttttaattggttggtgccttcgcagccgccactacgagttgacagtatcgatactgggtaacgttgttcgctgttaaagaagaagagattactagggacatgtttttttttctctcaaaagatgcattttcttcttcgtagtatccagtttttgaccaattattcggcttcaatgtataacatttggaatgtgcaagaggtgcgcgtcagcgcgtgtatgctgccatcttcaatgcacatgcgtgcctgattgctgcaagatatattacattaatataacattacatcatatgtcgttatattatattgtttatgttatattccaaccc

SEQ ID NO: 31039 - DNA, 4470 bp, Zea mays
  Clone ID: MRT4577_128318C.1
ctaggttagaatatcttgaatatacttcgtttggctgatgaaggtgccctcttggagttgcttcacttgaaatcccaagaagtacttcaactcccccatcatagacatctcgaatttttgtgtcatgatcctactaaactcttcacatgtagattcgttagtagacacaaatataatatcatcaacataaatttggcatacaaacaaattattttcaagtgttttggtaaagagtgtaggatcggcctttccgactttgaatccattagtgataaggaaatctctaaggcattcataccatgctcttggggcttgcttgagcccataaagcgccttagagagtttataaacatggttagggtactcactatcttcaaagccgggaggttgctcaacatagacctcttccttgattggtccattgaggaaggcacttttcacgtctatttgataaagcttgaagccatggtaagtagcataggctaataatatacgaattgactcaagcctagctacgggtgcataggtttcaccgaaatccaaaccttcgacttgggagtatcccttggccacaagtcgagctttgttccttgtcaccacaccatgctcatcttgcttgttgcggaacacccacttggttcctacaacattttgattaggacgtggaaccaaatgccatacctcattcctagtgaagttgttgagctcctcttgcatcgccaccacccaatctgaatcttgaagtgcttcctctaccttgtgtggctcaatagaggaaacaaaagagtaatgttcacaaaaatgagcaacacgagatcgagtagttacccccttttgaatatcgccgaggatagtgttcatggggtgatctcgttggattgcttggtggactcttgggtgtggcggccttggaacttgtttatcttcctcatcttgatcatgggcatctcccccttgatcattgctctcctcttgaggtggctcaacttcttgatcttctctttcatcattttgagcctcatcctcatcttgagttggtggagatgcttgcgtggaggaagattgttgatcttgtgcttgtggaggctcttcggattccttaggacacacatccccaatggacatgttccttagtgcgacgcacaaagcctcttcatcatctagctcatcaagatcaactttctctacttgagagccgttagtctcatcaaacacaatgtcacaagaaacttcaactagtctagaggacttgttaaagactctatatgcccttgtgtttgaatcatatactagtaaaaagccttctacagccttaggagcaaatttggattttctacctcttttaacaagaataaagcatttgctaccaaagactcgatccgaagtcttgtactcatcaagcatggtccttgccatgtccaatagagttctattcttcctctccactacaccattttgttgtggcgtgtagggagaagagaactcatgcttgatgccctcctcctcaaggaagccttcaatttgagagttcttgaactccgttccgttgtcgcttcttattttcttgatcctcaagctgaactcattttgagcatgtctcaagaatccctttaaggtctcttgggtatgagatttttcctgcaaaaagaacacccaagtgaagcgagaatagtcatccacaataactagacagtacttactcccgccgatgcttatgtaagctatcgggccgaataggtccatgtggaggagctccagtggcctgtcagtcgtcatgatgttcttgtgtggatgatgaacaccaacttgtttccctgcttggcatgcgctacagatcctatctttctcaaaatgaacatttgttagtcgtaaaatgtgttctccctttagaagcttgtgaagattctttatcccaacatgtgctagtcggcgatgccagagccagcccatgttagtcttagcaatcaagcaagtgtcgagttcagctctattgaaatcaactaagtatagctgaccctccaacactcccttgaatgctactgaatcatcactccttctaaagacagtgacaccttgatttccatccccgaatgtgatagctctttggggatcttggtttttctcataggaggagaacatcttcttctcccctgtcatgtggtttgtgcacctgctgtcgatgatccaacttgagcccccggatgcataaaccttgccggatttgttagttaaaacataagatgcattaaaagtcttaaatgagatgttagaattatttgatgcaataggagttttcttcttaggcaattttgcacgggttgattgcctagagctagatgtctcacccttatacataaaagcatgattagggccagagtgagacttcctagaatgaattctcctaatcttgtgcttgggataaccgacagggtacaaaatgtaaccctcgttatcctgaggcatgggagccttgcccttaacaaagtttgacaatcttttaggaggggcattaagtttgacattgtctcccttttggaagccaataccatccttgatgccagggcgtctcccactatagagcatgcttcttgcaaatttaaaattttcattttctaagtcatgctcattaattttggcattaagttgagctatgtgatcattttgtttcttaattaaagctaggtgatcattaatagcatcaacattaatatctctacatctagtgcaaatggaaacatgctcaacgatagatgtagagggtttgcaagattttagttcaacaatcttagcatgtaaaatgtcattttcacttctaagattggaaattgtaacattgcaaacatctaagtctttagccttagcaattaatttttcattttcaatcttaaggctagcaagagagacattcaattcttcaatcttagcaagtaaactaacattatcatctataagattgggaattgaaacatcacaaacatttgaatcaaccttaacaattactttagcattttcatttctaaggttggaaataacatcatgacaagtgcttagctcactagataatttttcacatttttctacttctagagcataagcattcttaaccttaacatgcttcttgttttctttaattaggaagtcctcttgagaatccaagagttcatccttctcatgaatagcactaattaattcatttaatttttctttttgctgcatgtttaggttggcaaaaagggtgcgcaaattatcctcctcaacaccagagttatcctcatcactagaggtttcatatttagtggaggattttgattttaccttcttccttttgccgtcctttgccatgaggcacttgtggccgacgttggggaagaggaggcccttggtgacggcgatgttggcggcgtcctcgtcagaggaggaatcggtggagctctcgtcggagtcccactcgcggcacacatgggcatcgccacccttcttcttgtagtatctcttcttttctcccctctttcctttcttgtcgtcgcccttgtcactatcagtagataatggacatttagcaatgaaatgaccgggcttaccacacttgtagcacaccttcctggaacggggcttgtaatctttccccttcctttgtttgaggatttgacggaagctcttgatgatgagcgccatctccttattgtcgagcttagaggcgtcgatggggattctacttggagtagaatcttctttcttctcctccgttgctttgaatgcaacgagttgtgcttcgggcgtggaggagtcgccttgctcgatgatcattttggagccgagctccccctcgatcgtctcccgcttggtgattttagtcacctcatctccttcgtgcgcggtcttgagcacgtcccaaatctccttggcgctctttaatccttgcaccttgttatactcctctcgacttagagaggcgaggagtatagtggtggcttgagagttgaagtgtcggatttgggcgacctcgtccgaatcatagtcttcatcccccggtgatggtacctgtactccaatctcaacaacatcccaaatgctagtgtggagtgaggttagatgatgcctcattttatcactccacatattataatcttcaccatcaaacatgggtggtttgcctagtgggacggaaagtaatggagtacgtatggaaatgcgagggtagcgtagggggatcttactaaacttcttgcgctcatggcgcttagaagttacggacggtgtgttagagccggaggtggatggtgacgaagagtcggtgtcgtagtagaccaccttcttcatctttttcttcttgtcaccgctctgacgcgacttgttgtgtgaagaagatcccttcaccttgttggcggactccccggatggagccttcccattgcttgtggcgggcttctcgccggtcccgatctccctcttggcggatgctcccgacat

SEQ ID NO: 31040 - DNA, 130 bp, Zea mays
  Clone ID: MRT4577_128319C.1
cgccaaccccgtcatcgatctcgtttcatatccatgggtcctcgtttctttcgtaccgaaggttctgtacccaatggtcaagagcaagatcggtatcaatgggttcggcaggatctgaaggctggtggcc

SEQ ID NO: 31041 - DNA, 431 bp, Zea mays
  Clone ID: MRT4577_12831C.1
aacaatattgagctttaacaagcaatccaatcttgggacaattttttctcaaacaaacccttttgggttcaattcagcccggacaactatagttttggatttaataataggccatagataggccccaacatgggtaactaatttcgccgcacccctagcacttgatctccttaagaccctggagaaaaatagaggaatggcggattaggggcaccatccttgtaataggggaataccacaaacccattatcctttatggactcaccaacaaaaaattggagggccttcaacttgctaaggaaaaacttggttgcaccctcgacaccctttttgaactcatccgctttttttggctccaacacagcagggagattcttgaaggattttttgaaggaaaacacaaaagatttcttggcaaaaggaggttgctc

SEQ ID NO: 31042 - DNA, 5145 bp, Zea mays
  Clone ID: MRT4577_128320C.1
tcagggtgttacaggtgcataccctagggtggagttaaccaccacgttcccttctttgcgctgaggtggaggaccttttccctttctaagtttgcacctccgagctgtatgctcggagacaccacaaacgtagcagataaagtcctcctttttcttcttcatctttttggacttaggttggttcatattcttctgtggagagttcttcttcttcttctggaattttctatctccacccttctcaacaacgtgagcctggagttgctgggatggcttgttactggaccttgcacgctcttccacattaatcgtagctgacaactcagtgagagtcatttgcttcttcatgtggcggcgtgaagtcacaaagtctcgccaagacggcgggagctttgccagtattgcattcacctgaaaactgtctggtaggacgcagccatattggaccaagtccctaacaaggagttgaatctcctgtagctgctccataacagaccttccctcaaccattttatagttgaggtagttttctgttgtgaatgactcattgccattgtcaacttcagagaactcgttctcaagttcagtccatagacccttagcggaggtaaaactagagtacacgtcaaataagcggttcgacaagacgttcaccagacgagacaagcatgcctcatcggcttcgtcccacttggccttctccgctagtgcggcggcctttgctgcatcatcagcattatctgatgcagcctcgggaacagccaacgtcactaccagctcagcgaacacaaggttctgtcccagaaaaccaattccgccgcccacgtccggcccggacggtccgcgcctgaggccggacggtccgcgcgaggtcttggacggtccttgctttttccttcggacggtctgtagtgtagacttagatttttgcattggttctgtccgagggtcatcctggtgttgcggacggtccgccgcaagggcccggacggtccgcgcttggcctatttttccaaaaagcttctcctgtccggaataatctacggtatttcggacagtcgatttagtatagttgtagatgaacctttgacactttctccccctttggcatgaatcgccaaaaacggagtcattagagcccttagaaatactctctccccctccttcgtcgaggtcgagatgcccattggttcccatgggtgtcttgatgggtttggcatccttcatcccaaacttgcttagaatatcttgagtatacttcgtttggcttaggaaggtgccctcttggagttgcttcacttgaaatcctaagaaatacttcaactcccccatcatagacatctcgaatttttgtgtcatgatcctactaaattcttcacatgtagactcgttagtagacccaaatataatatcatcaacataaatttggcatacaaacaagtcattttcaagagttttagtgaataaagtaggatcggcctttccgactttgaatccattagtgataagaaaatccctaaggcattcataccatgctcttggggcttgcttgagcccataaagcgccttagagagcttatagacatggttaggatactcactgtcttcaaagccgagaggttgctcaacatagacctcttcctcattcctagtgaagttgttgagctcctcttgcattgccaccacccaatccgaatcttgaagtgcttcctctatcctgtgtggctcaatagaggaaacaaaagagtaatgctcacaaaaatgtgcaacacgagatctagtggttacccccttttgaatgtcgccgaggatggtgtcgatggggtgatctcgttggattgcttggtggactcttgggtgtggcgacctttgttcttcatcctcctcatcttggtcatttgcatctcccctttgatcattgccgtcatcttgaggtggctcatttgcttgatcttctatttcatcaacttgagcttcatcctcattttgagttggtggagatgcttgagtggagaaggatggttgatcttgtgcatttggaggctcttcggattccttaggacacacatccccaatggacatgttccttagcgcgatgcacggagcctcttcaatacctatctcatcaagatcaacttgctcggtaaggagttcgtatgaggtcttcttgaggattcggtgtagatatagccggttgatggcgtagcaggcggtgttgactgcctccgcccaaaaccgatctgaagtcttgtactcatcaagcatggtccttgccatgtccaatagagttctattcttcctctccatcccgccgatgcttatgtaagtgatcgggccgaatagatccatgtgtaggagctccagtggcatgtcagttgtcatgatgttcttgtgtggatggtgagcaccaacttgctttcctgcttggcatgcgctacaaaccctgtctttctcaaaatgaacattggttaatcctaaaatgtgctctccctttagaagcttatgaagattcttcatcccaacatgtgctagtcggcgatgccagagccagcccatgttagtcttagcaattaagaaagtgtcgagttcagctctatcaaaattcactaagtatagctgaccctctaacactcccttaaatgctattgaatcatcacttcttctaaagacagtgacaccttgatttccatccccaaatgtgatagctcgttggggatcttggtttttctcgtaggaggagaacatcttcttctcccctgtcatgtggtttgtgcacccgctgtcgataatccaacttgagcccccggatgcataaaccttgccggatttgttagttaacacatatgatgcatcaaaagttttgaatgaaaagctatgttcatttgatgcactaggagttttcttcttaggcaacttagcatgggttggttgcctagagctagatgtctcacccttatacatgaaagcatggttagggccagagtgagacttcctagaatgaattctcctaattttgtcctcgggataaccggcagggtataaaatgtaaccctcgttatcctgaggcatgggagccttgcccttaacaaagttggacaatttcttaggaggggccattaagtttgacattgcctccctgttggaagccaatgccatccttaatgccagggcgtctcccactataaagcataatctagtacaaatagaagtgtgctcaacggtagatgtagagggtttgcaagattttaattctacaaccttagcatgcaatatatcatttttagttctaaggtcggaaattgtagcattgcaaacatcaaaatctttagccttagcaagcaatttttcattctcaattctaaggctagcaagagaaatgtttaattcttcaatcctagcaagcaaatcatcattatcattcctaagattgggaattgaaacattacaagcaatagaatcaaccttagctaacaaattagaattctcatttctaagtttgtctatagtctcatggcaagtgcttagctcactagataatttttcacatttttcaacttctagagcataagcatttttaaccttaacatgctttttgttttccttgattaggaagtcctcttgggtgtccaagaggtcatccttctcatggatggcactaattaattcatttaacttttctttttgttgcatgtttaggttggcaaaaagagtgcacaagttatcttcctcatcactagcattttcatcactagaggattcatatctagtggaggatttagatttaaccttcttctttttgccgtcctttgccatgaggcacttgtggccgacgttggggaagagaaggcccttggtgacggcgatgttggcggcgtcctcgtcgtcggaggagtcgctagagctttcgtcgaagtcccactcccgacaaacatgggcatcgccgcccctcttcttgtagtatctcttcttctcctttcttctccccttcttgtcgtcgcctctgtcactgtcactagatataggacattttgcaataaaatgaccgggcttaccacatttgtaacacactttcttggagcgaggtttgtagtccttccccctcctttgtttgaggatttggcggaagctcttgatgacgagcgccatttcctcattgtcgagcttggaggcatcgattggttgtctacttggtgtagactcctccttcttctcctccgtcgccttgaatgcaaccggttgagcttcggacgtggagggaccgtcaagctcgttgttcttccgtgagcctttgatcataaattcaaagctcacaaaattcccgataacttcctcgggagtcattagtgtatatcttaaccacctcgtggtcatcccattttttgctcccgaggttgcgcacacttggttcaccaaggttttgagccggttgtacatatcttgtggttcctccccttggcgaaggcggaagcgaccgagcttcccttcgattgtttcccgcttggtgatcttggtgagttcatcaccctcgtgcgtcgtcttgagcacgtcccaaacttccttggcgctttttagtccttgcaccatgttgtactcctccctacttagagaggcgaggagtatggttgtggcttgggagttgaagtgctcgatttgggccacctcgtcctcatcataatcctcatcccctacggatggtacctgtgctccaaactcaacaacattccatatacttttgtggagtgaggttagatgaaatttcattaaatcactccacctagcataatcttcaccgtcaaaggttggcggtttgcctaatggaacggaaagtaatggagtatgtctagaggtacgaggataatgtaaggggatcttactaaacttcttgcgctcatggcgcttagaagttatggagggcgcgtcggagccagaggtagaaggtgacgaagtgtcggtctcgtagtagaccaccttcctcatcttctttattttgtcgccactctgatgcgacttgtgagaagaagtcttcttctccttcttctccttcatcttctccttgttgtgggactctcccgatgaagccttcccgtggcttgtagcgggcttgtcgccggtctccatctccttcttggcgagttctcccgacat

SEQ ID NO: 31043 - DNA, 192 bp, Zea mays
  Clone ID: MRT4577_128321C.1
aaaatacttagattcttttttaacaggggaaaaccgaatctacccaagggcctctgggggtcaaagatccacatctaaaccgctaaattaaaactgggagcgatacatggagaccttagacccacgctcaaaggacccccttttttatctaaatcaaaggaacggacccctggggaagggccaaatgcggaa

SEQ ID NO: 31044 - DNA, 4011 bp, Zea mays
  Clone ID: MRT4577_128322C.1
tcatgctcttggggcttgcttgagcccataaagcgccttagagagtttgtaaacattgttaggatactcactatcttcaaagccgggaggttgctcaacatagacctcttccgtaataggtccgttgaggaaggcactcttcacgtccatttggtaaagctcattccttttgaaattgttgagctcctcttgcatcgctagcacccaatccgaatcttgaagtgcttcctctaccctgtgtggctcaatagaggaaacaaaagagtagtgttcacagaaatgagcaacacgagatcgagtagttacccccttttgaatatctcttaagatggtgttcacggggtgatctcgttgaattgcttggtggactcttgggtgtggcggtcttggaacttgctcatcctccttgtcttgatcatttgcatctcccccttgatcattgacgtcttcttgaggtggctcatcttcttgatcttcttcttcatcatcttgagcctcatcatcatcttgagttggtggagatgcttgcatggaggaggatggttgatcttgtgcttgaatgggctcttcggattccttaggacacacatccccaatggacatgttccttagcgcgacgcacagagcctcttcatcatctaattcatcaagatcaacttgctccacttgggagccattagtctcatcaaacacaatgtcacaagaaacttcaacaagtccagtggacttgttaaagactctatatgcccttgtgtttgaatcatatcctagtaaaaagccttctacagccttaggagcaaatttggattttctacctcttttaacgagaataaagcatttgctaccaaagactctaaaatatgaaacatttggctttttaccggtgaggagttcgtatgatgtctttttgaggattcggtgtagatacaatcggttgatggcgtagcaagcggtgttaaccgcctcggtccaaaactgatccgaagtcttgtactcatcaagcatggtccttgccatgttcaatagagttctattcttcatctccactacaccattttgttgtggcatgtagggagaagagaactcatgcttgatgccctcctcctcaaggaagccttctatttgtgagttcttgaactccgtcccattgtcgcttcttattttcttgatcctcaagccgaactcattttgagcccgtctcaagaatccttttaaagtctcttgggtttgagctttttcctgtttccctgcttggcatgcgttacaaatcctgtctttctcaaaatgcacatttgttagtcctaaaatgtgctctccctttagaagcttgtgaagattcttcattccaacgtgggcctctaatactcccttaaaagctactgaatcatcacttcttctaaagacagtaacaccttgatttccgtccccgaatgtgatagctcgttggggatcttggtttttctcgtaggaggagaacatctttttctccctagtcatatggtttgtgcacccgctgtcgatgatccaacttgagcccccggatgcataaaccttgccagatttgttagtaagcacataagaagcatcaaaagttttaaatgaaacattatgatcatttgatgctttaggagttttcttcttaggcaatttagcatgggttgattgcctagaactagatgcctcactcttatacataaaagcatgattagggccagagtgagacttcctagagttaattctcctaattttatgttcgggataaccggcagggtataaaatgtaaccctcgttatcctgaatcatgggagccttgcccttaacaaaattagacaatcttttaggtggggcattaagcttgacattgtctcccttttggaatccaatgtcatccttaataccagggcgtctcccactatagagcatgcttctagcaaatttaaatttctcattttctaagtcatgctcattgattttagcagttaatgtagctatgtgatcattttgttgtttaattaaagcaaggtgatcatgaatagcatctacattaacatctctacatctagtacaaatagtaacatgctcaatggaagatgtagagggtttgcaagtattaaattcaacaatcttagcatgcaaaatatcattctcatctctaagattggaaatagaagcattgcaaacatctaattctctagccttaacaattaatttttcattttcattcttaaggctagcaagagaagcattcaatttgtcaatcttagcaataaaattagcattatcatttctaagactaacaattgaatcatcacaaacatcaagcttcccaaccttagcaattaaattggcattctcatttctaaggttggaaataatatcatggcaagtgcttagctcactagttaatttttcacatttttctacttctagagcataagcatttttcactttaacatgctttttgttttctttaattaggaagtcctcttggctatcccagagttcatccttatcatgaatagcactaattaattcatttaatttttccttttgttgcatgtttaagttggcaaaaagagtaaacaagtcatcctcattgtcactagaattagcctcatcgctagatgttgcatatttagttgaggattttaatttcaccttcttccttttgccgtcctttgccatgaggcacttgtggccgacgttgaggaagaggagccctttgttgacggcgatgttgacggtgtcctcgtcgtcggaggagtcggtggagctctcgttggagtcccactcccggcaaacatgggcatcgccgcccttcttcttgtaatacttcttcttttctctcctctttcccttcttgtcgttgtccctgtcactatcatttcttggaacggggcttgtaatctttcccttcctttgtttgaggatttgacggaagctcttgatgatgagcgtcatctcctcattatcgagcttggaggcgtcgatggggattctacttggagtagaatcttctttcttctcctccgttgctttgaatgcaacgggttgtgctttgggtacggaggaggatgcaccttgctcgatgatctttttggagcctttgatcattagttcaaagctcacaaatttacctatcacttcctcgggagatattagcttgtatctaggatcaccacgaattaattgtacttgagtaggattaagaaaaactagtgatcttagaataaccttgaccatctcatggtcatcccatttggtgctcccgaggttgcgcacttggttcaccaagatcttgagccggttgtacattgcttgtggctcctccccttggtgaagcatgaatcgaccgagctccccctcgatcgtctccctcttggtgatcttggtcacgtcatctccctcgtgcgctgttttgagtacgtcccaaatctctttggcacttttcaatccttgcaccttgttatactcctctcgacttagagaggcgaggagtattgtggtggcttgtgagttgaagtaccggatttgggcaacttcgtccgaatcgtagtcctcatcccctacggatggtacctgtacaccaaactcaacaacgttccaaatactagtgtggagtgaggttaggtgatgcctcattttgtcactccacatgttataatcttcaccgtcaaaaaccggtggtttgcctaatggaacagaaagtaatggagtatgtttagaaatgcgagggtagtgtaggggaatcttactaaacttcttgcgctcatggcacttagaagttacggacggtgcgtcggagtcggaggtggatggcgatgacgagttggtctcgtagtagaccaccttcctcatcttctttttcttttctccactccgatgtgacttgtgtgaaggggattccttctccttccccttgttgcgggactctcccgatggagccttcctgtggcttgtagcgggcttattgccggtcaccatctccttcttggcgtgatctcccgacat

SEQ ID NO: 31045 - DNA, 1528 bp, Zea mays
  Clone ID: MRT4577_128323C.1
atcctttcctgttaccacaggaaaagaaggatttggcaggaacagcaaaagctagattctcagcaaaggattatagtgatcatatggcccttgttcgggcttatgaaggatggaaggatgcagagagagaagggtctgcttatgaatactgctggagaaatttcctttcttctcaaacactacaagccattcactctctccggaagcaattcagctatattttaaaggattccggtttgatagactctgatgggaatacaaacaacagtttgagccataatcaatcattggtccgcggtattatatgttctgggctttttcctgggatagcatctgttgtgcatcgagaaagctccatgtcctttaagaccatggatgacgggcaagttcttctttatgctaattcagtgaatgcaaaatatcagaccatcccatatccatggctggtctttggtgagaaggtgaaggtgaatgctgtcttcatccgtgattcaaccggagtatcagactccatattgattttgtttggcggtgctgtagcaaaaggaggcatggccgggcacttgaagatgctcgatggctacattgatttcttcatggaccccagcctgtctgaatgctacctgcaacttaaagaagaactcgataaacttatacagcagaagcttgaagacccaaacttcggagatttcctttcttctcaaacactacaagccattcactctctccggaagcaattcagctatattttgaaggattccggtttgatagactctgatgggaatacaaacaacagtttgagccataatcaatcattggtccgcggattatgcgatctatccacaaggaaggcaagtacatcctattcgccgtacaagagctcgccgccggcgacctgtgcgaagggaggttcgtgttcggccgcgagacgagccgggccaggctccggagccccgaggacgacgccaagagcaacctcataaaggacgggatgaaccccaagagcctgctgcagacgctgctgatgcgggccggccacaccccgcccaggtacaagacgaagcacctcaagacgaacgagttcagggccgtggtggagttcaaggggatgcagttcgtggggaagccgaagcggaacaagcagctcgcggagcgggacgccgccatcgaggcgctggggtggctgacgcagacctccggcgtgaaggctcaggacgagaaagacgacgactcgccgctggacctgactgacagcatgctcaagctcctcaccaggccgaggcggcactcgaagaatagctctaggaaacggtgattttttgggcgaggatttgctgtagattgatcgcgcacacgcacaaaaggcagagagagagagagagagataggaaacgtcagctttggttacacgaatgcctcatggtctcgatgtgttgctttgtacattttttatttttatttttccacgctatgtcatcagaatcagaagttcctccaaaaaaaaaaaaaaaaaaaaaccccccccccc

SEQ ID NO: 31046 - DNA, 5825 bp, Zea mays
  Clone ID: MRT4577_128324C.1
atgtcgggagatcacgccaagaaggaaatggagaccggcgaaaagcccactacaagctacgggagcacttcatcggaagagtcccgcaccaaaaggagggagaagaagaagagctcctccaacaaagggaaggagaagaaatcctcttctcaccacaaagagaagaaggaaaaatcttcttcccacaagccacatcggaaaggcgacaagcacaagaggatgaggaaggtggtctactacgagaccgacacttcatcaacttctacctccgactccgatgcgccctccgtcacttctaagcgccaagagcgcaagaagtatagtaagatccccctacgctaccctcgcatttccaaacatacacctttactttccgtcccattaggcaaaccaccaacttttgatggtgaagattacgctaggtggagcgatttaatgcgatttcatctaatctcgctccacaaaagtatatgggatgttgttgagtttggtgcacaggtaccgtcggtaggggatgagaactatgatgaggatgaggtggcccaaatcgagcacttcaactctcaagcaacgacgatactcctcgcctctttaagcaaagaggagtataacaaagtacaagggttgaagagcgccaaggagatttgggatgtactcaaaaccgcgcacgagggagacgagctcaccaagatcaccaagagggaaacaatcgagggggagctcggtcggttccggcttcacaaaggagaggagccgcaacacatgtacaaccggctcaagactttggtaaaccaagtgcgcaacctcgggagcaagaagtgggacgatcacgaagtggtaaatgttattttaagatctctcatttttcttaatcccactcaagttcaattgattcgtggtaatcctagatatactaaaatgacccccgaggaagttatcgggcattttgtaagttttgagtgcatgatagaaggctcaaggaaaatcaacgagcttggcgacccatccgaagcccaacccgttgcattcaaggcaacggaggagaagaaggaggagtctacaccaagtagacaaccaatagacgcctccaagctcgacaatgaggaaatggcgctcgtcatcaagagcttccgccaaatcctcaagcaaaggaggggaaggactacaagtcccgctccaagaagtgaccgaggcgacgacaagaaggggagaagaaaggagaagaaaaggtactacaagaagaagggcggcgatgcccatgtttgtcgggaatgggattccgacgaaagctcaagcgactcctccgacgacgaggacgccgccaacatcgccgtcaccaagggactcctcttcccaaacgtcggccacaagtgcctcatggcaagggacggcaaaaagaagaaggttaaatccaactcctccactaaatatgaatcttccagtgatgataatgctagtgatgaggaggataatttgcgtattctctttgccaatcttaacatggagcaaaaagaaaaactaaatgaattgattagtgctattcatgaaaaggatgatcttttggactcccaagaggattgtctaattaaagaaaacaagaaacatgttaaggttaaaaaggcttatgctctagaagtagaaaaatgtgaaaaattgtctagtgagctaagcacttgccgtgagatgattgacaaccttagaaatgaaaatgctattttaaatgctaaggttgattcacatatttgtaatgtgtcaattcccaatcttagagatgataacattgacttgcttgctaagattgatgaattgaatgcatctcttgctagccttagattagagaatgaaaatttaattgctaaggctaaagattttgatgtttgcaatgctactatttccgaccttagaactaagaatgaaatgttgcatgctaaggttgtagaattaaaatcttgcaaaccctctacatctaccattgagcatgtttccatttgtactagatgtagagatgttgatattaatgctattcatgatcacatggctttaattaaaaatcaaaatgatcatatagcaatattagatgctaaaattgccgagcacaacttagaaaatgagaaatttaaatttgctcgtagcatgctttataatgggagacgccctggcatcaaggatggcattggcttccaaaggggagacaatgtcaaacttaatgctcctccaaagaacttatctaactttgttaagggcaaggctcccatgcctcaggataacgagggttacattttgtaccctgccggctatcctgagagcaaaattagaaagattcattctaggaagtctcactctggccctaatcatgcttatatgtataagggtgagacatctagctctaggcaaccaacccatgctaagttgcctaagaagaaaattcctaatgcatcaaatgatcatgccatttcatttaaaacttttgatgcatcttatgtgcttactagcaaatccggcaaggtttatgcatccgggggctcaagttggatactcgatagcgggtgcacaaaccacatgacaggggagaaaaggatgttctcctcatatgagaaaaaccaagatccccaacgagctatcacattcggggatggaaatcaagggttggtcaaaggtgtcactgtctttagaagaagtgatgattcaatagcatttaagggtgtgttagagggtcagctatacttagtggattttaatagagctgaactcgacacatgcttaattgctaagactaacatgggttggctctggcatcgccgactagcccatgttgggatgaagaatcttcacaagcttctaaagggagagcacattttaggattaacaaatgttcattttgagaaagacaggatctgtagcgcatgccaggcagggaagcaagttggagtccatcacccacacaagaacatcatgacgaccgacaggccgcttgagctactccacatggatctattcggcccgattgcttacataagcatcggcgggagtaagtattgtcttgttattgtggatgattattctcgcttcacttgggtattctttttacaggaaaaatctcaaacccaagagaccttaaagggattcttgagacgagctcaaaatgagttcggcttaaggatcaagaaaataagaagcgacaacgggacggagttcaagaactctcaaattgaaggcttccttgaggaggagggcatcaagcatgagttctcctccccctacacgccacaacaaaatggtgtagtggagaggaagaatcgaactctattggacatggcaagaaccatgcttgatgagtacaagacaccggaccggttttgggccgaagcggtcaacaccgcctgctacgccatcaaccggttatatcttcaccgaatcctcaagaagacatcatatgaactcctaaccggtaaaaagcccaacatttcatattttagagtttttggtagcaaatgcttcattcttattaaaagaggtagaaaatctaaatttgctcctaaaactgtagaaggctttttacttggttatgactcaaacacaagggcatatagggtctttaacaagtccactggactagttgaagtctcttgtgacgttgtgtttgatgaaactaacggctctcaagtagagcaagttgatcttgatgagataggtgaagaacaggctccatgcatcgcgctaaggaacatgtccatcggggatgtgtgtcctaaggaatccgaagagcctccaagtacacaagatcaaccatcctcctccatgcaagcatctccaccaactcaaaatgaggatgaggctcaaaatgatgaagagcaaaatcaagaagacgaaccacctcaagatgatagcaatgatcaagggggagatacaaatgatcaagaaaaggaggatgaggaagaaccaagaccgccacacccaagagtccaccaagcaatccaacgagatcaccccgtcgacaccatcctcggcgacattcataagggggtaactactcgatctcgggttgctcatttttgtgaacattactcttttgtttcctctattgagccacacagggtagaggaagctctccaagattcggattgggtggtggcgatgcaagaggagctcaacaatttcacgaggaatgaggtctggcatttagttccacgtcctaaccaaaatgttgtaggaaccaaatgggtcttccgcaacaagcaagatgagcatggtgtggtgacaaggaacaaagctcgactcgtagccaaagggtattcacaagtcgaaggtttggatttcggtgaaacctatgcacccgtagctaggcttgagtcaattcgcatattattagcctatgctacttaccatggcttcaagctttatcaaatggacgtgaagagtgccttcctcaatggaccaatcaaggaagaggtctatgttgagcaacctcccggctttgaagacagtgagtatcctaaccatgtttataggctctctaaggcgctttatgggctcaagcaagccccaagagcatggtatgaatgccttagagatttccttattgcaaatggcttcaaagtcggcaaggccgatcctacactctttactaaaactcttgaaaatgacttgtttgtatgccaaatttatgttgatgatattatatttgggtctactaacgagtctacatgtgaagagtttagtaggatcatgacacagaaattcgagatgtcgatgatgggggagttgaagtattttctaggattccaagtcaagcaactccaagagggcaccttcattagccaaacgaagtacactcaagacattcttgctaagtttgggatgaaggatgccaaacccatcaagacacccatgggaactaatgggcatctcgacctcgacacgggaggtaagtccgtggatcaaaaggtataccggtcgatgattggttcattgctttatttatgtgcatctcgaccggacattatgctttccgtttgcatgtgtgcaagattccaatccgaccctaaggaatcccaccttacggccgtaaaacgaatcttgagatatttggcttatacccctaagtttgggctttggtaccctcggggatccacatttgatttacttggttattcggatgccgattgggcggggtgcaaaatcaataggaagagcacatcggggacttgccagttcttgggaagatccttggtgtcttgggcttcaaagaagcaaaattcggtcgctctttccaccgtcgaagccgagtacattgccgcaggacattgttgcgcgcaattgctttggatgaggcaaaccctgcgggactacggttacaaattaaccaaagtccctttgctatgtgataatgagagtgcaattaaaatggccgacaatcccgtcgagcatagccgcactaagcacatagccattcggtatcattttcttagggatcaccaacaaaagggggatatcgagatttcttacattaatactaaagatcaattagccgatatctttaccaagccacttgatgaacaatcttttaccagacttaggcatgagctcaatattcttgattctagaaatttcttttgctaagcttgcacacatagctcttttgaatacctttgatcatatctcttttataagctatgactaatgagttttcaagtttatttcaaaccaagtcataggaatattgaaagggaattggagtcttcggcgaagacaaaggcttccactccgtaactcatacttcgccatcactccgagcaactctctcttctttgggggagaaatgagca

SEQ ID NO: 31047 - DNA, 108 bp, Zea mays
  Clone ID: MRT4577_128325C.1
gctcagagtgaaggaatattaatgtagcttgatgggatcaggaaaaacagtaacacttcagagtagggagaagatgctgaagtggatgtattgagggtatgattaata

SEQ ID NO: 31048 - DNA, 9024 bp, Zea mays
  Clone ID: MRT4577_128326C.1
ctaagggtttgcctcatccaaagtagttgcgcgcaacaatgtcctgcggcaatgtactcggcttcggcggtagaaagagctacggaattttgcttctttgaagcccaagacaccaaggatcttcccaagaactggcaagtccccgatgtgctctttcttttgatcgacggatttacctccttcgtcaaggtcaagatgcccattggttcccatgggtgtcttgatgggtttggcatccttcatcccaaacttgcttagaatatcttgagtatacttcgtttggcttaggaaggtgccttcttggagttgctttacttgaaatcctaagaaatacttcaactcccccatcatagacatctcgaacttttgtgtcatgatcctactaaactcttcacatgtagactcgttagtagacccaaatataatatcatcaacataaatttggcatacaaacaagtcattttcaagagttttagtgaataaagtaggatcggccttgccgactttgaatccattagtgataaggaaatccctaaggcattcataccatgctcttggggcttgcttgagcccataaagtgccttagagagtttatacacatggttagggtactcactatcttcaaagccgggaggttgctcaacatagacctcttccttgattggtccattgaggaaggcacttttcacgtccatttgataaagcttgaagccatggtaagtagcataggctaataatattcgaattgactcaagcctagctacgggtgcataagtttcatcgaaatccaaaccttcgacttgggagtatcctttggccacaagtcgagctttgttccttgtcaccacaccatgctcatcctgcttgttgcggaagacccatttggttcctacaacattttgattaggacgtggaactaaatgccataccttattcctagtgaagttgttgagctcctcttgcattgccaccacccaatccgaatcttgaagtgcttcctctatcccccttatgaatgtcgccgaggatggtgtcgacggggtgatctcattggattgcttggtggactctcgggtgtggcggcctttgttcttcatcctccttgtcttggttatttgcatttccccttgatcattgccgtcatcttgaggtggctcatttgattgatcttcttcatcaacttgagcctcatcctcattttgagttggtggggatgcttgcgtggaggaggatggttgatcttgtgcatttggaggctcttcggattccttaggacacacatccccaatggacatgttccttagcgcgatgcatggagcctcttcaatacctatctcatcaagatcaacttgctctacttgagagacgttagtctcatcaaacacaacgtcacaagaaacttcaacttgtccagaggacttgttgaagactctatatgcccttgtgtttgaatcatatcctagtaaaaagccttctactgtcttaggagcaaatttagattttctacctcttttaacaagaataaagcatttgctaccaaagactctaaaatatgaaatattgggctttttaccgattaggagttcgtatgatgtcttcttgaggattcggtgtagatataaccggttgatggcgtaacaagcggtgttgaccgcttcggcccaaaatcgatccgaagtcttgtactcatcaagcatggttcttgccatgtccaatagagttctattcttcctctccactacaccattttgttgtggggtgtagggagaagagaaatcatgcttgatgccctcctcctcaaggaagccttcaatttgtgagttcttgaactccgtcccgttgtcgcttctaattttcttgatccttaagccgaactcattttgagtccgtctcaagaatccctttaaggtctcttgggtgtgagatttttccttgatttccatccccgaatgtgatagctcgttggggatcctggtttttttctcataggaggagaacatcttcttctcccctgtcatgtggtttgtgcacccgctgtcgatgatccaacttgagcccccggatgcataaaccttgccggatttgttagtcaaaacataagatgcatcaaaagttttaaatgaaaagttatgttcatttgatgcactaggagttttcctcttaggcaacttagcatgggttggttgcctagagctagatgtctcacccttatacatgaaagcatggttagggacagaatgagacttcctagaatgaattctcctaattttgctctcagtgtagccggcagggtacaaaatgtaaccctcgttatcctgaggcatgggagccttgcccttaacaaagttggacaatttcttaggaggggcactaagtttgacattgcctccctgttggaagccaatgccatccttaatgccagggcgtctcccactatagagcatacttctagcaaatttaaatttttcgttttctaagttatgctcgacaattttagcatctaattttgctatatgatcattttgttgtttaattaaagccatgtgatcatgtatagcatcaatgttaacatctctacatctagtacaaatagtagtatgctcaacggtagatgtagaggatttgcaagaattaagttcaacaatcttagaacgcaatatatcatttttgtctctaagatcggaaatagtagcattgcaaacatcaaaatctttagccttagcaaccaatttttcattttcatttctaaggctagcaagagaaatgtttagttcttcaatcctagcaagcaaatcatcattatcatttctaggattgagaattgaaacattacaagcatttgaatcaaccttagctaacaaattagcattttcatttctaaggttgtcaatagtttcatggcaagagcttagctcactagaaagtttttcacatttttcaacttctagagcataagcatttttaaccttaacatgccttttgttttccttgattaggaagtcctcttgggtgtccaagaggtcatccttctcatggatggcactaattaattcatttaacttttctttttgttgcatgtttaggttggcaaaaagagtgcgtaagttatcttcctcatcactagcattttcatcactagaagactcatatctagtggaggatttagatttaaccttcttctttttgccgtcctttgccatgaggcacttgtggccgatgttggggaagagaagtcccttggtgatggcgatgttggcggcgtcctcgtcgtcggaggagtcgctagagctttcgtcggagtcccactcccgacaaacatgggcatcgccgcccctcttcttgtagtatctcttcttctcctttcttctccccttcttatcgtcgcccctgtcactgtcactagatataggacattttgcaataaaataaccgggcttaccacatttgtaacacactttcttggagcggggtttgtagtccttccccctcctttgtttgaggatttggcggaagctcttgatgacgagcgccatttcctcattatcgagcttggaggcgtcgattggttgtctacttgttgtagactcctccttcttctcctccgttgccttgaatgcaaccggttgagcttcggacgtggaggggccgtcaagctcgttgatctttcgtgagccttgagtagggttaaggaatataagtgatcttaaaataaccttaaccacctcgtggtcatcccatttcttgctcccgaggttgcacacttgattcaccaaggtcttgagccggttgtacatatcttgtggctcctccccttggcgaagacggaagcgaccgagctccccctcgatcgtttcccgcttggtgatcttggtgagttcatcaccctcgtgcgccgtcttgagcacgtcccaaacttccttggcgctttttagtccttgcaccttattgtattcctccctacttagagaggcgaggagtatggttgtggcttgggagttgaagtgctcgatttgggccacctcgtcctcatcataatcctcatccccaacggatggtacctgtgctccaaactcaacaacattccatatacttttgtggagtgaggttagatgaaatttcattaaatcactccacctagcataatcttcaccgtcaaaggttggcggtttgcctaatggaacggaaagtaatggagtatgtctagaagtacgaggataatgtaaggggatcttactaaacttcttgcgctcatggcgcttagaagttatggagggcgcgtcggagccggaggtagaaggtgatgaagtgttggtctcgtagtagaccaccttcctgttaacctctcctaccagaaggactcgagaagagagaggcagaatcagatattgagaggaggagagggaaggcggccttttggcatacgggggcccaacaggcactatggttggtccggcccattgatcatctccttcctgctgactgtcgttgtccttctcttcagttatgctaacattcccccctgctaagcctgctggatgtccccagacagcttcattaggaaattgttgttgcaaatcttggacattctcccaagttgccagctcctcaggcatagcagaccattgcaccagcacttggggacaggaattgagcccacgaacagaagaacgatgctgcaaaatcttaactggaacactgaaacggtactgatcagatggtaatgcaggtgaggccaccaaacctttccccagcgctcgcttcaactgtgagacatgaaaaaccggatggatacgcgacgatgaaggaagttgcagtttataggcgacagaccccacacgttggatcacctgaaatggcccgaaaaacttaaaggcaagtttctggttagcccgatgagcaactgaagactggacgtatggctgtaatttgagaaacacccaatcaccaactgtaaattctctctcggaacgctgtttgtctgcttgacgtttcatcctcattttagccctctccaaatgttgtttgaccaaatcagaaataagctggcggtcctgcaaccaggcagacaactcagtagaagagataacaacgttatcagagatgccaaactgtctaggacgacaaccatacaatacttcaaatggggcgcgacctgtagctgaatgcggcgaagaattgtaccaaaattgtgcaacagacaaccaatgactccattgagtaggacaggcatggacaaagcaacgaaggaatgtttcgaggcactgattgacacgctctgtctgcccatcagattgcggatgatatgcggaactcatctgtaactgcacatcagcccagcgaaacagttccttccacaaattactgaggaacaccttgtcgcgatccgatacaatggactggggcaacccatgatgcttgtacacttgatcgtgaaaaagacgtgccacggacaaagctgtatacagatgcttgagcggcaagaagttggcatatttggtgaaggtgtccacaataaccaggatgcaagtgtaagattgagagcgaggtaaggcttcgatgaaatccatagaaataatttgccaaagcgaagatggaacgggcaatggttgaaggaggccgggtaaacgagtgcggtctgctttggcttgttgacaaattatacaatgagcaacaaatgtatgcactgaacttttcatccccttccaagcaaaaatttgtttcatccttgcatatgtgactggaaatccggaatgaccacccacagcagaagcatggaatgcagagatcagtttgtattgtagaatatcagactgaccgatccaaattctgttcttataacgtaacaaaccatctttccaagaaaaatgaggtacaaccgaggtatcgacggccagctttgcgatgatagccaaagtctgtgaatcctgattatatgagtcagccacttctgtaatccatttaggagtacatgatgaaattgctaaacatgatgaagacagacttgggtgacgagacaaggcgtctgcagcgtcgttgtccactccttttttatatatgatgcggtacttcaaacccaacagacgtgtgaacatcttcttttgccaaggagtgtgcaaacattgctcatccaattgtgccaaactacggtgatccgtatgtatgtgaaattctttgagttgcaagtagtggcgccaatgatctactgcaatcaaaagagccaagaactccttttcataggtagaaagtccctgcgatctgggtcccaatgccttgctaagatatgcaataggatgtccagcttgcatcaaaactgcccccacacccaactgactggcatcagtttccaacgagaaaggcaatgaaaaattcggaagtgccaacacaggcgctgaaatcaaagcctccttgagagccacaaatgatgcttcatgagatggtgtccagataaacaaatttcctttcttaagtaaggtcgtcaaaggcttggctaacagtccaaaatgtcgaacgaatcgtctgtaataaccggccaggcctaaaaaacttcgcagttccttcacattcttaggagtaacccactgagccacaacttcaattttcgcaggatctgtagccacaccagccgcagaaataacatgacccagatatgtcaactgtgattgagcaaacgaacacttcgaccacttaacttgccatttgtcccgaaccaatagctccaagacttggcgcacatgctgcaaatgctcctcaaagctggcactgtatatcaagatgtcgtcgaagaaaaccagcacacaacgacgaagcaacggtgacaaagtagtattcattgcccgttgaaaggtagccggagcaccagtcaacccgaaagccatcacacgaaattcataatgacccgaatgagtttggaatgctgttttgtgagcatccgcaggaaggagacgtatctgatggcatcctgctgtcaaatccaaactggtgaaccacgacgcctgtcccaattcatccaaaagctcttcaataactggtactggaaaaatggacttcactgttagagcattcaagtgatgaaaatccacacaaaacctccatgagttgtctttcttcttcaccatcaacacaggagaagagaactggctagaactgtggtgcactataccagcctgaagcatctctgatatttgacgttcaatttcatctttaatggctggtgggtaccgatatggacgaattttgacaggagttgccccatgcactaaaggaatggtgtggtcacattctcgagaaggtggcatcccaattggaggggcaaaaacagaagaaaattcagataataaggctttcatagccgatggaagatccagctgctcaaactgaatcggagtagtgtccaccatagccaactccactaccgaccctggaggaatcatggctgacagtccatataacaacaccggggatcgttgatagggaataatcatccacttgtgctcccaatgaaccttcataggactattggcacataacaacgagctcccaacagctgcctggaatagatcaaccggttgccatcgaccacttggaccatcatggaacatggcatatctgaaattcctctggcataatcccctagcgcgacgatatgctcgaagcaccgccaatttgtcttcaaaggtgcactgtcgaggcggttcaactttcttagcctcctccacaccagcgggggacgtattcagccgaggctggaaagacacaggcaacgccggcttgctgaatgctttgccagcctgtgaaacgtccagacgcctcccctcccaacgcttgtccgggaccgccacctcctcctgcaagagagccagagcacaagcagaatccaaagacgatggacgttgaagcaaaactgtagcacgaatatctggcctaagaccatccacaaagcgttgcacaaagtaaagagggtccataggtcgcccataagccgccagtttatctaccaaggctgcaaactgatccacatactcaaccacagtagcagtttgcctaatacgaaacaactgcctgataaatgactcatgctcatctctgccaaagcgctcaagcagcaactgacagaacacaggccaactggatagttgggagcgctcgtccaacgatgaaaaccaccgtgcagctgccccgacaaaatgcatcgacacaatccggatccacagatgcgactccacttcatacatatcaaaataatcgtgactgcgatggatccacaacttgggattctcgccgtcaaacattgggaagttaaacttaggtaaacgaccgcgcatcgctccgcctgatccggacgactgaatctctccatacggcggacaggcagggtgtaaaggaactttagacgaatgaagaacagcgggtcgaggtccagaggaaaatgtacccttggccgggggatggagtagggtggtgaccgacccaaatccatcctcccgaggccacgattcgatgcggtgcccgtgggccgatgcagctggaactccgacaggtacacgctcaacagctgctggtgaaggagccaatacgcccgccatagtagtggatttgtcggtgacggcccgcttccagtgcttggcgattttgcccacttccaagcgcagatcatccaccataccctccatgttcattcgccagtcctccagagcgccggtcgtgtgctccaaagcacccacgcgacggtcctggccagcagtgaactcggagaaggcggcctcccagcgcgagtcctgctcggacgccggccgatcccacttggcgtcgtgctccgcgaatcgccgggacagctcgtcgagaataatttgagtgtacttcctcatcttctttattttgtcgccactccgatgcgacttgtgggaagaagtcttcttttccttcttcttctccttgttgcgggactctttcgatgaagcctttccgtggcttgtagtgggctttttgccggtctccatctccttcttggcgtgttctcccgacat

SEQ ID NO: 31049 - DNA, 4239 bp, Zea mays
  Clone ID: MRT4577_128327C.1
atggtgaccggcgagaagcccgccacaagccacgggaaggctccatcgggggagtccggcaacaagaagagggaggaatcacctccccacgtcaagtcgcaccggagtggcgacaagaagaataaaatgaagaaggtggtctactatgagactgattcttcatggccatccacccccggctctgacgcgccgtccgtcacttctaagcgccatgagcgcaagaagtttagtaagatccccctacgctaccctcacatttctaaacgcactcctttactttccatcccactaggcaaaccaccggtttttgacggtgaagattactcatatgggacattgttgagtttggagcgcatgtaccatccatgggggatgaaggctatgactcggacgaggtagctcaaatccgagcacttcaactcccaagccactactatactcctcgcctctctaagtcgagaggagtataataaggtgcaaggattgaagagtgccaaagagatttgggacgtgctcaaaaccgcgcacgaaggagatgaggtgaccaagatcaccaagagggaaacgatcgagggggagctcggtcgcttcatgcttcatcaaggggaagatccacaagcgatgtacaaccggctctagaccttggtgaacgaagtgcgcaacctcgggagcaccaaatgggatgaccatgaaatggccaaagttattctaagatcactcattttttgcaatcctacgcaagttcaattaattcgtggtgatcctagatacaagctaatgtctcccgaggaggttataggaaagtttgtgagctttgaattgatgatcaaaggctccaaacaaatcatcaacttagagcaaggcgccacctctacatccgaggtgcaacccgtcaccttcaaagcgacagaagaaaagaaagaatagtctccatcaagtaggctccccatcgacgcctccaagctcgacaacgaggaaatggcgctcatcatcaagagcttccgccaaatcctcaagcaaaggagggggaaggattacaaaccccgctccaagaaggtttgctacaaatgtggtaagcccgatcattttatcgctaaatgtcctttgtatagtgatagtgacagggataacgacaagaagggaagaatgaaggagaagaagaagtattacaagaagaagggcggcgatgcccatgtttgtcgggaatgggactccgacgagagctccaccgactcctcctccgacgaggacgccgccaacatcgccatcaacaagggactcctcttccccaacgtcggccacaagtgcctcatggcaaaggacgacaagaagaagaaggtaaaatctagagcctccactaaatatgcaatatctagtgatgaggaaaactctagtgataatgaggataatttacttgccctttttgccaaccttaacatgcaacaaaaggaaaagttaaatgaattaattagtgatattcatgagaaggatgaactcttggacacccaagaggacttccttattaaggaaaataagaagcatgttaaagttaaaaatgcttatgctcaggaagtagagaagtgtgaaaatttaactagtgagctaagcacttgccatgatatcatttccaaccttagaaatgagaatgctaaattgattgctaaggttgagaaattagatgattgtgatgattctcttgtcaaacttaaaaatgataatgctaatttaattgctaagattgacaagttgaatgaatcaattgctagccttaagatagaaaatgaaaaattgattattaaggctaaaaatttaaatgtttgcaatgatattgtttccaatcttagaaatgaaaatgtcatgttacatgctaagattgatgaattaaatgtttgcaaaccctctacatctactgttagtcatgtctctaattgcactagatgtagagatgttaatattgatgctattcatgatcacattgctatgattaaacaacaaaatgatcatatagcaaaattagatgctaaaattgccgagcatgaattagaaattgaaaaatttaaatttgctcgtagtatgctttatagtgggagacgcccaggcattaaggatggcattggcttccaaaagggagacaatttcaagctccatgcccccaagaaattgtccaactttgttaagggcaaagctcccatgactcaggataacaagggttacattttataccctgtcggttatcccaagcacaaaattaggagaattcactctaggaagtctcactctggctctcatcatgcttttatgtataagagtgagccatctagttctaggcaatcaacccatgctaaattgcctaaaaataaaactcccattgcatcaaatgaacctaacattttgtttaagacttttgatgcatcatatgttttaactaacagatcaggcaaagtagttgccaaatatgttggagccaaacacaagggctcaaagacttgtgtttgggtacccaaggtttatgcatccgggggctcaagttggatcattgacagcgggtgcacaaaccacatcactggggagaagagaatgttctcctacgagaaaaccatgatccccaaagagctatcacatttggggatggaaatcaaggaaaaatcacaaacccaagagaccttaaagggattcttgagacgggctcaaaatgagttcggcttaaggatcaaaaagattagaagcgataacgggacagagttcaagaactcacaaatagaaggctttcttgaggatgagggaatcaagcatgagttctcttctccctacacaccacaacaaaatggtagaaaatctaaatttgctcctaaggcagtagaaggctttttacttggttatgactcaaacacaagggcatatagagtctttaacaagtccactggactagttgaagtctcttgtgacattgtgtttgatgagactaacggctctcaagtagagcaagttgatcttgatgagctagatgatgaagaggctccatgcatcgcgctaaggaacatgtccattggggatgtgtgtcctaaggaatccgaagagcccacacaagcacaagatcaaccatcatcttccatgcaagcatctccaccaacccaagatgaggatcaagctcaaaatgatgaaaatgaagatcaagaggatgagccacctcaagaggaggacaatgatcaatgggaagatagagttgatcaagacaaggaagatgatcagggaaccaagtgggtattccgcaacaagcaagatgagcatggtgtggtgacaaggaacaaagcccgacttgtagccaaaggatattcacaagtcgaatgtttggatttcggtgaaacctatgcacccgtagctaggcttgagtcaattcgtatattacttgcctatgctacttaccatggctttaagctttaccaaatggacgtgaaaagtgccttcctcaatggaccaatcaaggaagatgtctatgttgagcaacctcccggctttgaagatagtgagtattctaaccatgtgtacaaactctctaaggcgctttatggacttaagcaagccccaagagcatggtatgaatgcctaagagatttccttatcactaatgacttcaatgtcggtaaagccaatcctacactctttactaaaaccattgcaaatgatttgtttgtatgccaaatttatgttgatgatatcatatttgggtctactaacaaatctacttgtgaagagtttagtaggataatgattcaaaaattcgagatgtctatgatgggggagttgaaatacttcttaggatttcaagtcaagcaactccaagagggcaccttcatcagccaaatcgagtatattcaagacatactcaccaagtttggaatgaaggatgtcaatctcatcaaaacacccatgggaaccaatgggcatctcgaccttgacacgggagggtgtaaaattgatagaaagagcacatcagggacttgccagttcttgggaagatccctggtgtcttgggcttcaaagaaacaaaattcagtagctctttctaccgcggaagccgagtacattaccgcaggccattgttgcgcgcaattgctttggatgaggcaaacccttagggactatggctacaaatttggcaaatccctctcctatgtgataatgggagtgcaatctgcatggcggacaatcccgttgagcacaacctcactaaacacataa

SEQ ID NO: 31050 - DNA, 332 bp, Zea mays
  unsure (1)..(332): unsure at all n locations
  Clone ID: MRT4577_128328C.1
acgccccnatnttttttttttttttttgagcaattgaaaccaacggccaaaggctaatatcctataggggggcatagaaaaaaaaattacctgttcctgcacccaggattaattcatccatttcctatccttctaattaaacaaatatggactttaattgactactttacgatgatcctattctactcattcgggatgacgggtgggctgaacacccaccctccatgtaaagaaatttcctttcgaaaaaacaccttggcctttctccgaaggtggtctctcaccgcaccccccagctatttccgaagggggcaaacacacagccccattct

SEQ ID NO: 31051 - DNA, 459 bp, Zea mays
  Clone ID: MRT4577_128329C.1
ctcgaggccggccgcgtcgtcacggcggcgctggccgaggccgaggccgaggcggcgagggacgcggacccggaggacgaggagcggctccggcgtcagcgccgcaaggtgtcgaaccggctctcggcgcagcggtcgcgcgcgcggaagcagcagcggctggaggagctccgcgaggcggcggcgcggctccgcgccgagaagcagcagctggaggcccggctgcaggccctggcgcggcacgacctcgccgtgcgctgccagaacgcgcggctcggcgccgaggcctccgcgctcgcgcgccgctcccgcgaggcgcgcaggctcctcgcgctgcgccgcctcgcgttcgccgccctgcagccgcggcccggcgtcgctcccgcgcccgcgccgccggcgcccctgctgggactggcctcgctcctgacgcatgtggcttggtggggtcgtgctgcc

SEQ ID NO: 31052 - DNA, 780 bp, Zea mays
  Clone ID: MRT4577_12832C.1
ttgggtacctcgaggccggccggggcgttggggagcctcagccctcaggcctcagccagcgtgcgcgcccacaacccctcacgtcgtccccgccaatcacaccgcacgaaccgaggacgacgggacaccaccgtcaccgcgacgtagtagtagtactacatgcatagcatagcctcgtggagtcgtggtagtagtagtttagttttgctcgcttccacaccgcaccgccgttcccttttttatatcccgcggatgcgcctgcctctgcctcggggtcgggggggcagctggtgacatcggattcggatcaggccgagaagatcgaactgctccgatccggcgcttaatttctctctctctctctcgggctagctgcccgggcaaatggacgccgagtggagcggcgacgagagcaaggctggcgctgcgggcggagtttcgtcggctgattgcccaggttcgccaccgccggtgtcgccggcgccaccgtcgacgtcgccagctgctaccggtgccgggaggaggcggtcggcgaacaagcgggtggtcaccgtgccgctggcggacgtcagtggcccacggcccaagggcgtcggcgagggcaacacgccgacggacgcgtgggcgtggcgcaagtacggccagaagcccatcaagggctcgccttttccgagggcttactacaggtgcagcagctccaaggggtgcccggccaggaagcaggtggagcggagcagggcggagccggacaaggtgatcgtcacgtactcgttcgagcac

SEQ ID NO: 31053 - DNA, 282 bp, Zea mays
  Clone ID: MRT4577_128330C.1
gtggaccggtacaaactgggttatttttttcacaaaaatcaaaacgcacacttcattttcatgaaaccgggaaacggaaaaaaaagaaaaaggaaaacagggagggcaaaacctgggggggggggcaacttttccaaggaaggacctactatactaggactaactaatagctagggacaagaagaacgatggggctgccaccttttgggggcgggatccagaagtccagaaagaaaacaaggggggggggggggggggtttccataccgagcaggggttggg

SEQ ID NO: 31054 - DNA, 128 bp, Zea mays
  Clone ID: MRT4577_128331C.1
ctatctctctacatccactatagctaatcccttctttcttaccttcccgaacaacctccgaataataatacactagcactagcgatagaggaattttgttggaggtaaagtatccagaccgaccggag

SEQ ID NO: 31055 - DNA, 222 bp, Zea mays
  Clone ID: MRT4577_128332C.1
agccgccggtccagcgtacgcgtgacaccgacgcgttcgacggtgacatagatacactcattcctctcgagcaagaagccccctcacctcaccagccggatgtcaccacagtagcgcctcgtctgagcacccagcaagccgaggctctcccgggtaggcgctgggccgccagcttattacgcgcaaccgcgacaggtcggaagccacaaccgacacgaccaa

SEQ ID NO: 31056 - DNA, 727 bp, Zea mays
  unsure (1)..(727): unsure at all n locations
  Clone ID: MRT4577_128333C.1
gggtaccctncggagccggccgggatcgagctccaaactcctggcgtctcagccttgcttgccatgcccagctcgtagtcgtagccttagacaatcaggcaccgagcgcgggcgccgttgctcctgagcacctcatccggcgctggcacttgttcttgctccgtcctgactcctgagccattatggcgaaggctgtggctgtcactgcacttgcagcagcactcgtagtgctgcagctgcttgcatgctgcccgtgtcgggcgcgaggtgacgaatcgcccaacgtcacggcgtcgctcgtcagcttcttgaccgcgctggccggcgacgacggcgggcagacagcgatcaggttgaggtggaacgcgtcaatcaacccgtgtgttcccggcaccaaagcctcactgtggagcggaaccgtccagtgcttcgaccgaggcgtaaacgacgggcacatcaagaggatcgacctcgacgagcagggcctgaacggcaccatcgacgcggcgctgctctgcgccgcgccggctctccgcgtgctgaaccttcacaacaacagcctgcgcggcggcctccccgcgggcatctcggcctgctcgggactcacccacctggtcgtcagcggcaaccggctctcaggtaacctgccgtcttcgctcgcccagtccaggagcttacgcgttatcgaggtttccggaaacaaccttttcggcgagctccccggggg

SEQ ID NO: 31057 - DNA, 454 bp, Zea mays
  Clone ID: MRT4577_128334C.1
aaaaaccaaaagggtttaaaggggccaactttatttacaaaaggcaattctaagaccgttcaaaaaggggtggtgggaggaaaccccccaacttttcccggggggggcagaaaacaaaaaaagggttttaaaccccaaaaattgggttgaagggcaaacaaatttttgggaggaaaatagtttttctccttcttggacccggaataattggcgccctttggggggaactccttggtgtcttttttcagggggggcaggtccttcggggccttggaaaaatccccctttttaatgcccttcgggaggaaccaaagaacaaaccccccgttgggggaaaaaagggcaaacttggtgttggggggggaaaacaccctcaccacctttgggggagtggaagaaatgcccccccggccctgcaccttggggagggtggcgcccgccacccctgtggggg

SEQ ID NO: 31058 - DNA, 1290 bp, Zea mays
  Clone ID: MRT4577_128335C.1
ggcccagctcggcagctctccagcctactgcagtcctgtggtcgcacggtccttcactcctgcgtcctgcctcggtgcctcccagagtcccagacccaggcggccaggctcccagcctcccaggtccccggtggcggcagcaggctcccagtcccagatggccaccagttctaaaccctagccgccaaaccaacacgagcagctgtcgacctccaggccggtcgagcggggcgccgggcaccgtcgcgccgagcggagagtgtagcacctgcaccgagcggccagcggggcgccaagcactcgtctactcgtcttctctgatcctgggcgtgcctgccaatgagcaagaagaggaagcatctggatccagcgaactcgttgaaagacagcgaacaagtagtcgcctcagatttcataagaggagacgatcttgatgacctattatcgaagcttatcaggagtgtggagattgccaaggcttcaaggggaggcttaccagaaaagatatggatgaagcaacaatttgctatcggcgtcaatgatgtcacaagggttcttgagcgaatgccgcattctgtcactgctcatcctgctcaaatgtctagtggagcaccaactgtctcaggccgacgtcaagctcctttggtgccattgcaggctgtccttgtagctgccgactgcaatcccaaatggttaacaaaacacataccaacactagcgtctacaaggcaggtaccggtattgtgcgtgaaggacaacaagggaggctcagtaaggttaggccatgtggtgaatgtcagaacagcccttgccattggagtaaaggccaaagatagcgttctcaacaagaccattgatgagttcctgaaagacagtaaactggttgccaatgaaccataaagtaaccccaagtctagtgacacgtttgtactaaaaagcctgtacttctgggcatgcaacatcccaggatcatctcataaatgggtttaagtttgagaaggggatcgagtatcttgagcagattgtggcaatatcaatttggagggacttcttgagagaacagtcatgggaaataggacagactatttgtttggtccgtgcaatattgtttgactggtgaacctagttatccattgtgatctagaacttgtatcaaactccaatgtaacgagatgttagaatccttgtttattgggtacagttttttcttctaaaaaaaaaaaaaaaaaaaaaagggcggccgccgactagtgagctcgtcgacccgggaattaattccggaccggtacc

SEQ ID NO: 31059 - DNA, 626 bp, Zea mays
  Clone ID: MRT4577_128336C.1
gccggggtgagaggggcacatccgctcatggctagcaatctccaccgtatagggactacgaaggcgacaccgaatgcgccgggcgcttgcgggacggatcgagcgatggagcaggcccctactacgacagatggagctggaccagctaagcaacagaacagacgttcaacacggtacaatcaccagttgcgccaccaggagcgccacccttggctgcgccatgactctctaccatctacctgcccacgtacacggagggcaaccttgccgcgcagagctggacctagccgactaaacctagcccgaccagaacatgatcagaaagaccggagcccagagcgccgccgatgtccacggaaacttcctcctggaacctagactgctccccaggtgctgtaaagatggaaggagaggaaaacacatacgactcagacgccggaagccacaatgttattagaaagccacacatgaaaagagccaaaacaggcgcatggagcactacatcgtgaagcaaccccaaaggccaaagtgagagctgttgaacaactcaccaaggtacaggcatcaacttgtggacaccaaaggggagggcaaggatcgctgacaggggacttgaaaaacacggc

SEQ ID NO: 31060 - DNA, 1400 bp, Zea mays
  Clone ID: MRT4577_128337C.1
ttgggaccctcgttgccggcctcgaggccggccggggcagtcctgtggtcgcacggtccttcactcctgcgtcctgcctcggtgcctaccagagtcccagacccaggcggccaggctcccagcctcccaggtccccggtggcggcagcaggctcccagtcccagatggccaccagttctaaaccctagccgccaaaccaacacgagcagctgtcgccctccaggccggtcgagcggggcgccgggcaccgtcgcgccgagctgagcggagagtggagcacctgcaccgagcggccagcggtgcgccgtgcgccgagcacctgagtggccagcggggcgccgagcactcgtctagtcgtcttctctgtcctttgtattttgaatttgaatactattttcaagatcctgggcgtgcctgccaatgagcaagaagaggaagcatctggatccagcgaactcgttgaaagacagcgaacaagtagtcgcctcagatttcataagaggagacgatcttgatgacctattatcgaagcttatcaggagtgtggagattgccaaggcttcaaggggaggcttaccagaaaagatatggatgaagcaacaatttgctatcggcgtcaatgatgtcacaagggttcttgagcgaatgccgcattctgtcactgctcatcctgctcaaatgtctagtgaagcaccaactgtctcaggccgacgtcaagctcctttggtgccattgcaggctgtccttgtagctgccgactgcaatcccaaatggttaacaaaacacataccaacactagcgtctacaaggcaggtaccggtattgtgcgtgaaggacaacaagggaggctcagtaaggttaggccatgtggtgaatgtcagaacagcccttgccattggagtaaaggccaaagatagcgttctcaacaagaccattgatgagttcctgaaagacagtaaactggttgccaatgaaccataaagtaaccccaagtctagtgacacgtttgtactaaaaagcctgtacttctgggcatgcaacatcccaggatcatctcataaatgggtttaagtttgagaaggggatcaagtatcttgagcagattgtggcaatatcaatttggagggacttcttgagagaacagtcatgggaaataggacagactatttgtttggtccgtgcaatattgtttgactggtgaacctagttatccattgtgatctagaacttgtatcaaactccaatgtaacgagatgttagaatccttgtttattgggtacagttttttcttcttctcgaggctcgacaccggtacattaatttttcttgttttttatattctatagtatatataataatgtgaaaaggcttatattgtgatgttaagtcttccgagtagc

SEQ ID NO: 31061 - DNA, 647 bp, Zea mays
  Clone ID: MRT4577_128338C.1
gaaataggtgtaagcctaattccctttcactgggcgttagccttgtacctgagataacggtgcagtccgtccctgacgtgacttcgtcaccgtccatcgatcaagaggtaccatccgttttccaccctgtgccttttagattcagcttcgatccaccaagcgacccggcttcggtgagcgctttcgtaaaggcataccctaaccttccgaggtaccatatgtggtcatcttgggaccgactgatggccgtctcaacctacggacccccgggttccgaggaagaagacgagcccgactctggttgggatttctccgggctccgcgctcctagtgccatgcgagacttcatgaccgcatgtgactactgcctctccgattgctccgatgatggccatagccttgacgacgagggttgtggcccaagtcgcgaatgtttccatgttgatctagggggtcacgacgaaggcaaccacctcggtatgccggaggatgacgatccccctgggcctgcttctcgcgttgacatcctgcgggagctagctgtggtcccagtccctatggggggtcaggacacacagctcgagcaaatccgcgggatacaggccaagctcgacgaggaagcagggcaacttgtgcagctccggtaa

SEQ ID NO: 31062 - DNA, 372 bp, Zea mays
  Clone ID: MRT4577_128339C.1
caaagaaaccaatagcataactgtcatacaccactagttacataggcaacaaaattccaaccaacacaagcacaaaggtttcaaaccaccaaaagaagataacagacacccttctagttctgaaggcagccttggcaaaattaaaccctaaatttgtacaaccaaatcatttttgccccctaccaaaagttttttttttcacaaatccattatcacagaccacacccacagagaagtgcgcacaccaaaaaattcccacaaagcggggcccgtaactgggtccggccgtccgggtgataaaacttccctgggctcctcctcctcctcttccttgggttgctttgccccaacagagaagaactcggtgatgac

SEQ ID NO: 31063 - DNA, 729 bp, Zea mays
  Clone ID: MRT4577_12833C.1
acttgatcgttgcgaagccggctctgacatcgtctcttcggccccacgatgaaccgtagattccgccagcgttgagatgtagaattatcacgatctcctatgtgtggacaagttcctgtcctattacttctcctactacgagctcgagaacggcgtcctgtgggacatcaagggaaagtgcaccaccctagggactgatgatgagcacattgctgtctattaatccaacgaggatggtgacgacgagagcgttgatcgtagacagatgggaacgtggttgatattgttgacacattccgtctacaggagcaacctccttttgacaataaatcatttgtgtcttacatcgaaaaatacatcaggaatctcactgtgtgcgatgaagccagagaaagcgtatgagttccaaaagggtgcacagggtgcaacaaagtttcatccttagcaagctgaaggacctccaattgtttgttggtgagtccatgaaggatgatgcgtcgtgtggtattcgcctattacaaggatggtgccactaatccgacattcctctatttctctcatggtctttaggagatcaacgtgctacgagtgcgccgaaattaggtacccatgttgggatactatctatgtactattattatatccaaaactatagttgttcctgactgaattgaactccaaaaggggttgttttgagaaaaaaatggcccaagaattgcattgtttgtt

SEQ ID NO: 31064 - DNA, 707 bp, Zea mays
  Clone ID: MRT4577_128340C.1
gaatccttgatgccttccgcagctacgccttacgcaccagcacggagggcactccggctgctctgctgcatgtcttaaaccttacccttcctctgggtctgatctaacttctataggacctgaccgacaagcgttagatccagaagaggatccctcactgaacgctggccacttcaagtcacttacaactgcgtctcagctagcaactcgagtgctaaccttagcgtttctgtgacctcgcggcgctagaagaggaccatggagcagcattttttttgtttgcttgctctcgagactgatagtacatgatcgtgatatagtacatatccaaatgagcacaaatagctctattaatgctctttatgcctaaagcttgcacagacggtgcgatagcattatcttgagacttggatgaacctccaagcaattcatcactggatgctccaatgtgatgtaccaagggcatatttgggtcatccaactgcagtcttatgttggaacagcgaacttcaggtggtagcaaactaccttgccttagaccaagaatgagactcctttgtcatctcccacccacttgggagagggcacactttatgagcagagagctactggactgaacctcttgcggctatgatagtacatactatattaaaagcagtttgacttgcgttgttcacattaccaagggcagtggatggcctactgat

SEQ ID NO: 31065 - DNA, 575 bp, Zea mays
  Clone ID: MRT4577_128342C.1
gcccttcacgcgcgcgccttctgccgaggccagcggaacgaacggcgcgtcaaaggctgtgatcgccctgatggcaggtggagcgatgggccacgcaggtgcttatgagggcaggcgactgtaggctcgctttccaccccagacagctgaccagccaaggcatggccgacaccgatcacatcgaatagaagaaccggcagcttgctgcacaacggcggctacgcacgaaaaccaggtgcggagcatggtgctggtgaacaacatcttcagagaggagtacctgagcgcccgaggcgaaacctacttcgtgacatgggaccgtgccgagaacctacctgttctactgggagtctgatcaaggagacccgatggcggtgaggaacaccgagaactaattaatgttggtatcgctggatctccataaatgcattacctgcggctaccgggtctggactgagtcgatatgctacatttatacatgacgtgcgcattgacacagaaacgccaggtacaagtaagcatatacgcatacaacgaggtgaacgattgtaaacaaaaaaagaaaacggccggcg

SEQ ID NO: 31066 - DNA, 361 bp, Zea mays
  Clone ID: MRT4577_128343C.1
gcccgcaagcaaaaaaatgcgggatttgattggcccaaaatcggtttcggaaagcagattacccaacccggggctgaaagactggggtttgggaaaacagccccacgcccaaaatacacaggggtcaggggtgaattttcggggaggaggcctgaaccccgggggatgaaccccgaatttccacctgaatgacccgacgttgcgtttgggcttgctttggaccaccgcctcgatcctgtcgaagacccccggggtcaacagggggatgacatctagggccttaatgttccccaaaatcgggctttctttgggggccccagggttcacaggcgaaaaattggggttcaacgggcacccaggg

SEQ ID NO: 31067 - DNA, 200 bp, Zea mays
  Clone ID: MRT4577_128344C.1
ccgagcgaagaaccccaccagcaaaggaagacgggagcgaccaaaggcaaagaacagaagaagaaccaggacgggaatagaagagacgcgaccaacaccacgcgcaacgagaaggacgacacagaagagagcaaacacgagggccgcaggaagaaccgtaagggcagacaaagcacacagaccgcccacacggcaccccc

SEQ ID NO: 31068 - DNA, 1001 bp, Zea mays
  Clone ID: MRT4577_128345C.1
aatagcatttgcaagaatttccggatccgcaaaaagcagagaggaacgacgccaccggcgatggcgatggcgatggcggccgtaagacgcgaggggcggcgtgttctcctctccaccccctccacggcagccgccatggctgcgctctccccggctgcctcccagtcgcaaattgctctgctcggtgcacggtccatctcaacacaaattgtgaggaaccgcatgaaaagtgtcaagaacatccaaaagattacgaaagcaatgaagatggttgcagcatcaaagcttcgtgctgttcaaacaagaactgagaattcacgtggtctatggcagccattcacagctcttcttggggatgctcctagtataaatgtcaagaagaatgttattgtagccattacatctgacaagggtctctgtggtggtatcaattctacatctgttaaagtcagcaaagcacttcagaagatgacttctggtccagagaaagaaagcaagtatatcatcttaggagaaaaggggaaagttcaactcatccgtgactccaggaagcatattgaaatgacagtatctgagttgcagaagaaccctattaattacacacaggttgctgtgctggcagatgatatcttgaaaaatgtggaatatgatgctataagagttgtttttaacaagtttcagtctgtcatttcatttaggcctacactggccacaatactttccccagaggtcatggagaaagaatcagaatctggtgggacggttggtcagctggattcgtatgaaattgagggaggtgaaacaaaatcagaaatcctgcagaatcttactgagttccagttttcttgtgttatgtataatgctgttctagagaatgcgtgcagtgagcttggtgcacgtatgtctgctatggacagctccagcagaaatgccggtgaaatgcttgatcgtcttacactgacatacaacaggacacgtcaagcatctatcactactgagct

SEQ ID NO: 31069 - DNA, 198 bp, Zea mays
  Clone ID: MRT4577_128346C.1
ggacaggcccaaagggcagtttatttttattgcatatgttacccactcagccccaaagcagtttctgggactggcataacacaatgtcacaacaaaagtttatatataggtacaatatgccggtggtaccaagggattcactaatcaaggcccgcccaccttgacgactagttcaacatacctgataatcggcttctg

SEQ ID NO: 31070 - DNA, 228 bp, Zea mays
  Clone ID: MRT4577_128347C.1
aaaaaaccaaggggttagaaaagatttttttacccagatttgactttatttaaaaaaaaagcaactgggggggcatttttccccccatatcaacattttaaaggggaaagggattccggtcttttaattaaaaaattttaaaagggttgttttaaatgctaaatgctcgacacatggtaaacattttttccatccaccaaaatttcttttcggagtgtgttaggtgtt

SEQ ID NO: 31071 - DNA, 389 bp, Zea mays
  Clone ID: MRT4577_128348C.1
attggacaggggcctttattacaggaacaggagccccattttacaaattacagggggaacgggaaccatttacttccaggcccctcaaaagctacattatggagcgggttaaatggcccatatataaattaccggaccagataaaagcggacagatcaacaaaaaatggccggaacactagtaagggacaaaaccattccatcggttcgatttacttggggggggaaccccagtaaggcccaaacaaagtttatggggaaggaaacctaaggagggacccctgattcaccccccaaaccagaaacggccacggaattttcgcctttcaaaaaatactatggacattgccgcaaagggcccctaaaaggccccttactttcttccccccc

SEQ ID NO: 31072 - DNA, 5157 bp, Zea mays
  Clone ID: MRT4577_128349C.1
atgtcgggagatcacgccaagaaggagatggagaccggcgaaaagcccactataagccacgggagcacttcatcggaagagtcccgcaccaagaggaaggagaagaaggactcctccaaagggaaggagaagagatcttcttcacatcacaaagagaagaaggagaaatcctcttcccacaagccgcatcggagtggggacaagaaaaagaggatgaggaaggtggtctactacgagaccgattcttcatcggcatccacctccggctccgacgcggcgtccgtcacttctaagcgccaagagcgtaagaagtatagtaagattcccctacgctaccctcgcatttctaaacatacacctttactttccgtcccattaggcaaaccaccaacatttgatggtgaagattacgctaggtggagtgatttaatgcgatttcatctaacctcgctccacaaaagtatatgggatgttgttgagtttggtgcacaggtaccatccgtaggggatgaagactatgatgaggatgaagtggcccaaatcgagcacttcaactcccaagccacaaccatactccttgcctctctaagtagagaggaatataacaaggtgcaagggttgaagagtgcaaaggagatttgggacttactcaagaccgcgcacgagggtgatgaactcaccaagattaccaagcgggaaacgatcgagggggagctcggtcgcttccgtcttcgccaaggggaggagccacaagacatgtacaactggctcaaaaccttggtgaaccaagtgcgcaacctcgggagcaaaaagtgggatgaccacgaagtggttaaggttattctaagatctcttattttccttaaccctactcaagttcaattaattcgtggcaacccaagatatacactaatgactcccgaggaggtaatcgggaattttgtgagctttgagtatatgatcaagggctcgaagaagatcaacgagctagatgatccctccacatccgcggcacaaccggacgcatttaaggcgacggaggagaaggatgagtctacatcgagtagacaaccaatcgacacctcaaagctcgacaacgaggagatgacgcttgtcatcaaaagctttcggcaaatcctcaagcaaaggagggggaaggattacaagccccaatcaaagaaggtttgctacaagtgtggtaagcccgatcactttatagctaaatgtcctatttctagtgacagtgacaggggcgatgacaagaagggcagaagaaaggagaagaagagatactacaagaagaagggcggcgatgcccatgtttgtcgggagtgggactccgacgaaagctctagcgactcctccgacgacgaggacgccgccaacatcgccgtcaccaagggactcctcttccccaacgtcggccacaagtgtctcatggcaaaggatggcaaaagaaagaaggttaaatccaaatcatccactaaatatgagacttctagtgatgataatgctagtgatgaggaggataacttgcgtaccctttttgccaaccttaacatggaacaaaaagaaaaattaaatgaattaattagtgctattcatgaaaaggatgaccttttggattctcaagaggacttcctaattaaggaaaataagaaacatgttaaggttaaaaatgcttatgctctagaaatagaaaaatgtgagaaattatctagtgagctaagcacatgccatgacactattgccaaccttagaaatgaaaatgccaaattaattgctaaggttgattctcatgtttgcaatgtttcaacttccaatcctagagatgataatgttgatttacttgctaggattgatgaattgaacatttctcttgttagccttaggattgaaaatgagaaattgcttgctaaggctaaagattttgatgtttgcaatgttactatttctaaccttagaagtgaaaatgacatattgcatgctaaggttatagaattaaaatcttgcaaaccctctacatctatcgttgagcatgtatctatttgtactagatgtagagatgttgatgttaatgctattcttgatcacatggctttaattaaacaacaaaatgatcatatagcaaaattagatgctaaaattgtcgagcataacttagagaatgaaaaatttaaatttgctagaagtatgctctataatgggagacgccctggcatcaaggatggcattgacttccaaaggggagacaatgtcaaacttaatgcccctcctaaaagattgtctaattttgttaagggcaaggctcccatgcctcaggataacgagggttacattttgtaccctgccggttatcccgagagcaagattaggagaattcactctaggaagtctcactctggccctaaccatgcatttatgtataagggtgagacatctagttctaggcaaccaacccatgccaagttgcctaagaagaaaactcccagtgcatcaaatgaacatagcatttcatttaagacctttgatgcatcttatgttttgactaacaaatccggcaaaatagttgccaagtttgttgggggcaaacacaagggatcaaagacttgtgtttgggtacccaaagttcttgtttctaatgccaaaggacccaaaaccgtttgggtttatgcatccgggggctcaagttggatactcgacagcggatgcacaaaccatatgacaggggagaagaagatgttctcctcctacgagaaaaaccaggatccccaacgagctatcacattcggggatggaaatcaaggtgtcactgtctttagaagaagtgatgattcaatagcatttaagggtgtgttagagggtcagctatacttagaaaaatctcaaacccaagaaaccttaaagggattcttgagacgagctcaaaacgagttcggcttaaggatcaagaaaattagaagcgacaacgggacggagttcaagaactctcaaatcgaaggcttccttgaggaggagggcatcaagcatgagttctcttctccctacacgccacaacaaaatggtgtagtagagaggaagaatcgaactctattggacatggcaagaaccatgcttgatgagtacaagacttcggatcggttttgggccgaggcggtcaacaccgcttgctacgccatcaaccggttatatctacaccgaatcctcaagaagacatcttatgaactcctaaccggtaaaaagcccaatatttcatattttagagtctttggtagcaaatgttttattcttattaaaagaggtagaaaatctaaatttgctcctaagactgtagaaggctttttactaggacatgattcaaacacaagggcatatagagtctttaacaggtccactggacaagttgaagtttcttgtgacgttgtgtttgatgagactaacggctctcaaatagagcaagttgatcttgatgagataggtaatgaagaggctccatgcatcgcgctaaggaacatgtccattggggatgtgtgtcctaaggaatccgaagagcctccaaatgcacaaaatcaaccatcctcctccacgcaagcatctccatcgactcaaaatgaggatgaagctcaagttgatgaagtagaagatcaagcaaatgagccacctcaagatgacgacaatgatcaaaggggagatgcaaatgatcaagacaaggaggatgaagagcaaaggccgccacacccaagagtccaccaagcaattcaacgagatcaccccgtcgacaccatcctcggcgacattcataagggggtaactactagatctcgtgttgcacatttttgtgagcattactcttttgtttcctctattgagccacacagggtagaggaagcacttcaagattcggattgggtggtggcgatgcaagaggagctcaacaacttcactaggaatgaggtatggcatttagttccacgtcctaaccaaaatgttgtaggaaccaaatgggtcttccgcaacaagcaagatgagcatggtgtggtgacaaggaacaaagctcgacttgtggccaagggatactcccaagtcgaaggtttggatttcggtgaaacctatgcacccgtagctaggcttgagtcaattcgtatattattggcctatgctacttaccatggctttaagctttatcaaatggacgtaaaaagttccttcctcaatggaccgatcaaggaagaggtctatgttgagcaacctcccggctttgaagacagtgagtaccctaaccatgtctataagctctctaaggcgctttatgggctcaagcaagccccaagagcatggtatgaatgccttagagatttccttattaataatggcttcaaagtcagaaaggccgatcctacgctctttaccaaaacacttgagaatgatttgtttgtatgccaaatttatgttgatgatattatatttgggtctactaacgaatctacatgtgaagagtttagtaggatcatgacacaaaagttcgagatgtctatgatgggggagttaaagtatttcttaggatttcaagtaaagcaactccaagagggcaccttcctaagccaaacgaagtatactcaagacattctaaacaagtttgggatgaaggatgccaagcccatcaaaacacccatgggaactaatgggcatctcgacctcgacacgggagggtgtaaaatcaataggaagagcacatcggggacttgccagttcttgggaagatccttggtgtcttgggcttcaaagaagcaaaattcggttgctctttccaccgccgaagccgagtacattgccgcaggccattgttgcgcgcaattgctttggatgaggcaaaccctgcgagactacggttacaaattaaccaaagtccctttgctatgtgataatgagagtgcaatcaagatggcggataatcccgtcgagcatagccgcactaaacacatagccattcggtatcattttcttagggatcaccaacaaaagggagatatcgagatttcttacattaatactaaagatcaattagccgatatctttaccaagccacttgatgaacaaacctttaccaaacttaggcatgagctcaatattcttgattcgcgcaacttcttttgttga

SEQ ID NO: 31073 - DNA, 789 bp, Zea mays
  unsure (1)..(789): unsure at all n locations
  Clone ID: MRT4577_12834C.1
aattcggcacgagggagccgcagtccgcagcagcagctcccagcttcgtcccccgacctcggcacgcggcactggtgcagcaggctcgctcgccgccgccgccgccgcgtgaagtgaggcgcgcccccccgcggacgctgacgctgggacccgcgcctgctgggagtgggcccgccccattgatgggcgccggcaggcgccggcggcgagggaaagcgtgaggacgaggagggccggcgggctccgcacgaagcaggccgggcgagcctgccgccgcgccgcctagggagggcgccgcccgtctttgcttgtttgctcgcaccgtcgcacgtcctgttccagtaccaggccagagagaaggggggcgggactgcaggcggcgggccgcggaggagctagggttctctctgttctcactctccctgcgtcgccgggatggcggttggggacgcgctgcgccggctctgcgaggaggtcggctggtcctacgccgtcttctggaaggccatcggcgccgccgaccctgtgcatttggtgtgggaggacggttgctgcggccacgtgtcatgctccgccgggtctgaggctcctgaagctgggtgcgagctgggcaccagtgtgtgcacgcttgttaggaaggtcatgacctcgcanattcatgttgntggtgagggtaccattggccgtgctgctttcaccggaatcatcaatggattgtccatgatcctgccatgatcacatctcagacccgagtttctgctgagatgatcatcagtttgcagctggcat

SEQ ID NO: 31074 - DNA, 4998 bp, Zea mays
  Clone ID: MRT4577_128350C.1
atgtcgggagatcacgccaagaaggagatggagactggcgaaaagcccactacaagcaacgggagcacttcatcggaagagtcccgcaccaaacggagggagaagaagaagaactcctccaacaaagggaaggagaagaaatcttcttctcaccacaaagagaagaaggaaaaatcttcttcccacaagccgcatcggagtggggacaaacaaaagaggatgaggaaggtggtctactacgagaccgacacttcatcaacatcgacctccggctccgacacgccctccgtaacttctaaacgccaagagcgtaagaagtttagtaagatccccctacactaccctcgcatttctaaacatgcatctttactttccgtcccattaggcaaaccaccaactttcgacggtgaagattatgctaggtggagtgatttaatgcgatttcatctaacctcactccacaaaagtatatgggatgttgttgagtttggtgcacaggtaccatcggtaggggataaggactatgatgaggatgaggtggcccaaatcgagcacttcaactctcaagcaacaacgatactcctcgcctctttaagtagagaggagtataacaaagtgcaagggttgaagagcgccaaggaggtttgggatgtgctcaaaaccgcgcacgagggagatgagctcaccaagatcaccaagcgggaaacgatcgagggggagctcggtcggttccggcttcgcaaaggggaggagccacaacacatgtacaaccggctcaagactttggagaaccaagtgcgcaacctcgggagcaagaagtgggacgaccacgaagtggtaaatgttatcttaagatctctcatttttcttaatcccactcaagttcaattgattcgtggtaatcctagatatactaaaatgacccccgaggaagttatcgggcattttgtaagttttgagtgcatgatagaaggctcgaggaaaatcaacgagcttggcgacccatccgaagcccaacccgttgcattcaaggcaacggaggagaagaaggaggtgtctacaccaagtagacaaccaatagacgcctccaagctcgacaatgaggaaatggcgctcgtcatcaagagcttccgccaaatcctcaagcaaaggagggggaaagactacaagtcccgctccaagaaggtttgctacaaatgtggtaagcccggtcattttattgctaaatgtcccatatctagcgacagtgaccgaggcgacgacaagaaggggagaagaaaggagaagaaaaggtactacaagaagaagggcggcgatgcccatgtttgtcgggaatgggattccgacgaaagctcaagcgactcctccgacaacgaggacgccgccaacatcgccgtcaccaagggacttctcttccccaacgtcggccacaagtgcctcatggcaaaggacggcaaacggaagaaggttagatctaactcctccactaaatatgagtcttctagtgatgacaatgctagtgatgaggaggatagtttgcgttccctttttgccaaccttaacatagctcaaaaggagaaattaaatgaattagttagtgctattcatgaaaaggatgaccttttggattcccaagaggacctcctcattaaggaaaataagaagcatgttaaggttaaaaagtcttatgctcttgaaattgagaaatgtgaaaagttatctagtgagctaagcacttgccgtgagatgattgacaaccttaagaatgaaaatgctagtttaaatgctaaggttgattctcatgtttgtaatgtttcaattcccaatcctagagataataatgatgatttgcttgctaggattgaagaattaaacatttctcttgctagccttaaggtagaaaatgaaagtttaattgctaaggctaaagattttgatgtttgcaaagttacaatttccgatcttagagataaaaatgatattcttcatgctaagattgttaaacttaattcttgcaaactgtctacatctattgttgaacatgtcactatttgtactagatgtagagatattgatatcaatgctatacatgatcacatgactctaattaaacaacaaaatgatcatatagcaaaactagatgctaaaattgccgagcacaacttagaaaatgagaaatttaaatttgctcgtagcatgctttataatgggagacaccctggcattaaggatggcattggcttccaaaggggagacaatgtcaaaattagtgcccctcctaagagattgtccaactttgttaagggcaaggctcccatgcctcaggataacgagggttacattttataccctgccggttatcccgagagcaaaattaggaaaattcattctaggaagtctcactctggccctaatcatgcttttatgtataagggtgagacatctagctctaggcaaccaacccatgctaaattgcctagaaagaaaactcctaatgcatcaaatgatcatgctatttcatttaaaacttttgatgcatcctatgttttgactaacaaatccggcaaggtcgttgccaagtttgttgggggcaaacacaaggggtcaaagacttgtgtttgggtacccaaagttcttgtgtctaatgccaaaggacccaaaacagtttgggtttatgcatccgggggctcaagttggatactcgacagcggatgcacaaaccacatgaccggggagaaaaggatgttctcctcatatgagaaaaatcaagatccccaacgagctatcacattcggggatggaaatcaaggtgtcactgtctttagaagaagtgatgattcaatagcatttaagggagtgttagagggtcagctatacttggtagattttgatagagctgaactcgacacttgcttaattgctaagactaacttgggctggctctggcaccgccgactagcccatgttgggatgaagaatcttcacaagcttctaaagggagaacacattataggattaacaaatgttcattttgagaaagacagggaaaaatctcaaacccaagagaccttaaagggattcttgagacgggctcaaaatgagttcggcttaaggatcaagaaaataagaagcgacaacgggacggagttcaagaactctcaaattgaaggctttcttgaggaggagggcatcaagcatgagttctcttctccctacacacctcaacaaaatggtgttgtggagaggaagaatagaactcttttagacatggcaaggaccatgcttgatgaatataagacttcggatcggttttgggccgaggcagtcaacaccgcctgctacgccatcaaccgattatatctacaccgaatcctcaagaagacatcatatgaactcctaatcggtaaaaagcccaacatctcatattttagagtctttggtagcaaatgctttattcttgttaaaagaggtagaaaatctaaatttgctcctaagactgtagaaggctttttacttggttatgactcaaacacaagggcatatagggtctttaacaagtccactggactagttgaagtctcatgtgacgttgtgtttgatgaaactaacggctctcaagtagagcaagttgatcttgatgagataggtgatgaagaggctccatgcatagcgctaaggaacatgtccattggggatgtgtgtcctaaggaatccgaagagtctccaaatacacaagatcaaccatcctcctccacgctagcaactccaccaactcaaaatgagaatgaagctcaagttgatgaagtagaagatcaagcaaatgagccacctcaagatgacggcaatgatcaagggggagatgcaaatgatcaagacaaggaggatgaagagcaaaggccgccacatccaagagtccaccaagcaatacaacgagatcaccccgtcgacaccatcctcggcgacattcataagggggtaactactcgatctcgtgttgcccatttttgtgaacattactcgtttgtttcctctattgagccacacagggtagaggaagcactccaagattcggattgggtggtggcgatgcaagaggagctcaacaacttcactaggaatgaggtatggcatttagttccacgtccgaaccaaaatgttgtaggaaccaaatgggtcttccgcaacaagcaagatgagcatggtgtggtgacaaggaacaaagctcgacttgtggccaagggatactcccaagtcgaaggtttggatttcggtgaaacctatgcacccgtagctaggcttgagtcaattcgcatattattggcctatgctacttaccatggctttaagctttatcaaatggacgtgaaaagtgccttcctcaatggaccaatcaaggaagaggtctatgttgagcaacctcccggctttgaagacagtgagtatcctaaccatatctataagctctctaaggcgctttatgggctcaagcaagccccaagagcatggtatgaatgccttagagatttccttattgctaatggcttcaaagttggaaaggccgatcctacactctttactaaaactcttgaaaatgacttgtttgtatgccaaatttatgttgatgatattatatttgggtctactaacgagtctacatgtgaagagtttagtaggatcatgacacagaaattcgagatgtctatgatgggggagttgaagtatttcttaggattccaagtaaagcaactccaagagggcaccttcatcagccaaacaaagtacactcaaggcattctaaacaagtttgggatgaaggatgccaaacccatcaagacacccatgggaactaatgggcatctcgacctcgacacgggaggggaagaaactacttcgcgggctctaatgattccgtttttggcgattcatgccaaaaagggggagaaaggagcccaaagcaaaaggaccgcaccaccaccaatttcaaaaactcagtgttga

SEQ ID NO: 31075 - DNA, 139 bp, Zea mays
  Clone ID: MRT4577_128351C.1
attctgttcttttttacatatcaagaacattccagacagcgataaagaatgcgcgggtgtggatatacacctcaaggcactctatttacatactgatgtatgtttactctaccaaggaactagagaggtcatatctcat

SEQ ID NO: 31076 - DNA, 5517 bp, Zea mays
  Clone ID: MRT4577_128352C.1
ttaacaaaagaagttcctagaatcaagaatattgagctcatgcctaagtttgttaaaagattgttcatcaagaggcttggtaaagatatcggctaattgatctttagtattaatgtatgaaatctcgatatctcccttttgttggtgatccctaagaaaatgataccgaatggctatgtgtttagtgcgactatgctcgacgggattatccgccatcttgattgcactctcattgtcacatagcaaagggacttcggttaatttgtaaccgtagtcccgcagggtttgcctcatccaaagcaattgcgcgcaacaatggcctgcggcaatatactcggcttcgacggtggaaagagcgaccgaattttgcttctttgaagcccaagacaccaaggatcttcccaagaactggcaagtccccgatgtgctcttcctattaatcttacaccccgcccaatcggcatccgaataaccaatcaaatcaaatgtggatccccgagggtaccaaagcccaaacttaggagtataagccaaatatctcaagattcgttttatggccgtaaggtgagcttccttagggtcggcatggaatcttgcacacatgcatacagaaagcataatatccggtcgagatgcacataaatagagtaaagaacctatcatcgatcggtataccttttgatccacggacttacctcccgtgtcgaggtcgagatgcccattggttcccatgggtgtcttgatgggcttggcatctttcatcccaaacttgtttagaatgtcttgagtgtacttcgtttggctaatgaaggtgccctcttggagttgtttcacttggaatcctaagaaatacttcaactcccccatcatagacatctcgaatttctgtgtcataatcctactaaactcttcacatgtagactcgttagtagatccaaatataatatcatcaacataaatttggcatacaaacaagtcattttcaagagttttagtaaagagtgtaggatcggcctttccgactttgaaaccattagcaataaggaaatctctaaggcattcataccatgctcttggggcttgcttgagcccataaagcgccttagagagcttatagacatggttagggtactcactgtcttcaaagccgggaggttgctcaacatagacctcttccttgattggtccattgaggaaggcacttttcacgtccatttgataaagcttaaagccatggtaagtagcataggctaataatatacgaattgactcaagcctagctacgggtgcataggtttcaccgaaatccaaaccttcgacttgggagtatcctttggccacaagtcgagctttgctccttgtcaccacaccatgctcatcttgcttgttgcggaagacccatttggttcctacaacattttggttaggacgtggaactaaatgccatacctcatttctagtgaagttgttgagctcctcttgcattgccaccacccaatccgaatctaggagtgcttcctctatcctgtgtggctcaatagaggaaacaaacgagtaatgttcacaaaaatgtgcaacacgagatcgagtagttacccccttatgaatgtcgccgaggatggtgtcgacggggtgatctcgttggattgcttggtggactcttgggtgtggtggcctttgctcttcatcctccttgtcttgattatttgcatctcccccttgatctatgccgtcatcttgaggtggctcatttgattgatcttcttcttcatcaacttgagcttcatcctcattttgagtcggtggagatgcttgcgtggaggaggatggttgatcttgtgcatttggaggctcttcggattccttaggacacacatccccaatggacatgttccttagcgcgatgcacggagcctcttcaatacctatctcatcaagatcaacttgctctacttgagagccgttagtctcatcaaacacaacgtcacaagaaacttcaacttgtcctgaggacttgttaaagactctatatgcccttgtgtttgaatcatatcctagtaaaaagccttctacagtcttaggagcaaatttagattttctacctcttttaacaagaataaagcatttgctaccaaagactctaaaatatgaaatgttgggctttttaccggttaggagttcataagatgtcttcttgaggattcggtgtagatacaaccggttgatggcgtagcaagcggtgttgaccgcctcggcccaaaaccgatccgaagtcttgtactcatcaagcatggttcttgccatgtccaatagagttcgattcttcctctccactacaccattttgttgaggcgtgtagggagaagagaactcatgcttgatgccctcctcctcaaggaagccttcaatttgagagttcttgaactccgtcccgttgtcgcttcttattttcttgatccttaagctgaactcattttgagcccttctcaagaatccctttaaggtctcttgggtttgagatttttcctgtaaaaagaatacccaagtgaagcgagaataatcatccacaataacaagacagtacttactcccgccgatgcttatgtaagcgatcgggccgaataggtccatgtgtaggagctccagtggcctgtcggtcgtcattatgttcttatgcggatgatgcgagccaacttgctttcctgcttggcatgcgctacaaatcctgtctttctcaaaatgaacatttgttagtcctaaaatgtgttctccctttagaagcttatgaagattcttcattccaacatgggctagtcggcggtgccagagccaacccatgttagtcttagcaattaagcatgtgtcgagttcagctctttcaaaatctactaagtatagctgaccctctaacacacccttaaatgctattgaatcatcacttcttctaaagacagtgacaccttgatttccatccccgaatgtgatagctcgttggggatcttggtttttctcgtaggaggagaacatcttcttctccccagtcatgtggtttgtgcacccgctgtcgagtatccaacttgagcccataaaagcatgattagggccagagtgagacttcctagaatgaattctcctaattttgctctcgggataaccggcagggtacaaaatgtaaccctcgttatcctgaggcatgggagccttgcccttaacaaagttggacaatcttttaggtggggcactaattttgacattgtctcccctttggaagccaatgccatccttgatgcccgggcgtctcccattataaagcatgctacgagcaaatttaaatttctcattttctaagttgtgcttggcaattttagcatctagttttgctatatgatcattttgttgtttaattaaagccatatgatcatgaatagcatcaatgttaatatctctacatctagtgcaaatagatacatgctcaacgatagatgtagagggtttgcaagattttaattcaacaaccttagcatgtaacatgtcattcttagttctaaggtcggaaattgtagcattgcaaacatcaaaatctttagccttagcaagcaatttttcattttcaattctaaggctagctagggaagcattcaactcatcaatcctagcaagtaaatcaacattattgtctctaggatttgaagttgaaacattgcaaacatgtgaatcaaccttagtatttaaactagcattttcattcctaaggttgtcaatcatctcacggcaagtgcttagctcactagataacttttcacatttctcaatttcaagagcataagcctttttaaccttaacatgcttcttattttccttaataaggaggtcctcttgggaatccaaaaggtcatccttttcatgaatagcactaaccaattcatttaatttttccttttgagctatgttaaggttggcaaaaagggaacgcaaattatcctcctcatcactagcattatcgtcactagaagattcatatttagtggaggagttagatttaaccttcttccgtttgccgtcctttgccatgagacacctgtggccgacgttggggaagagaagtcccttggtgacggcgatgttggcggcgtcctcgtcgtcggaggagtcgcttgagctttcgtcggaatcccactcccgacaaacatgggcatcgccgcccttcttcttgtaatatctcttcttctcctttcttctccccttcttgtcgtcgcctcggtcactgtcactagatataggacatttagcaataaaatgaccgggcttaccacatttgtagcaaacctttttggagtgggacttgtagtctttccccctcctttgtttgaggatttggcggaagctcttgatgacgagcgccatttcctcattgtcgagcttggaggcgtctattggttgtcgagttggtgtagcctcctccttcttttcttccgtcgccttgaatgcgacgggttgagcttcggatgtggatggatcatcaagctcgttgatcttcctcgagccttcgatcatgcactcaaaacttacaaaattcccgataacttcctcgggggtcattttagtatatctagtattaccacgaattaattgaacttgagtggggttaaggaaaatgagagatcttagaataaccttaaccatttcgtggtcgtcccactttacgctcccgaggttgcgcacttggttcaccaaggtcttgagccggttgtacatgtgttgtggctcctcccctttgcgaagccggaaccgaccgagctccccctcgatcgtttcccgcttggtgatctttgtgagctcgtctccctcgtgcgcggttttgagcacatcccaaacttctttggcgctcttcaacccttgaactttgttatactcctctctacttaaagaggcgaggagtattgttgtcgcttgagagttgaagtgctcgatttgggccacctcatcctcatcataatccttgtcccctacggacggtacctgtgcaccaaactcaacaacatcccatatacttttgtggagtgaggttagatgaaatcgcattaaatcactccacctagcataatcttcaccatcaaaagttggtggtttgcctaatgggacggaaagtaaaggtgcatgtttagaaatgcgagggtagtgtagggggatcttactaaacttcttacgctcttggcgtttagaagttacggagggcgcatcggagtcggaggtcgatgttgatgaagtgtcggtctcgtagtagaccactttcctcatcctcttttgcttgtccccactccgacgaggcttgtgggaagaagatttttccttcttctctttgtggtgagaagaagatttcttctccttccctttgttggaggagatcttcttcttctccttcctcttggtgcgagactcttccgatgaagtgctcccgtggcttgtagtgggcttttcgccggtctccatctccttcttggcgtgatctcccgacat

SEQ ID NO: 31077 - DNA, 2029 bp, Zea mays
  Clone ID: MRT4577_128353C.1
ttactttctccccctttggcatgaatcgccaaaaacggaatcattagagccctttaaattactttctcctcctttggtcataagtaaaagagtgaagattaaaccaaagtaggagtccttttgctttgctctctcccccgaagatagagagcggttcggagagacgacgaaggatgagttacggagtggaagcctttgtcttcgttgaagactccaattccctttcaatacacctatgacttggtttgaaatagacttttgatccacggacttacctcccgtgtcgaggtcgagatgtccattagttcccatgggtgtcttgatgggcttggcatccttcattccaaacttgtttagaatgtcttgaatgtacttcgtttggctaatgaaggtgccctcttggagttgcttcacttgaaatcctaagaagtacttcaactcccccatcatagacatctcgaatttttgtgtcatgatcctactaaattcctcacatgtagattcgttagtagacccaaatataatatcatcaacataaatttggcatacaaacaaatcatttgcaagtgttttagtaaataaagtaggatcggcttttccgactttgaagccattagtgataaggaaatctcttaggcattcataccatgctcttggggcttgcttgagcccataaagcgccttagagagtttatatacatagttagggtactcactatcttcaaagccaggaggttgctcaacatagacctcctccttgattggtccattgagaaagacactcttcatgtccatttggtaaagcttgaagccatggtaagtagcataggcaagtaaaatgcaaattgattcaagcctagctacgggtgcataggtttcaccgaaatccaaacctttgacttgtgaatatcccttggccacaagtcgggctttgttcctcgttcctagtgaagttgttgagctcctcttgcatcgccaccacccaatccgaatcttgaagtgcttcctctaccctgtgtggctcaatagaggaaacaaaagagtaatgctcacaaaaatgtgcaacacgagatctagtggttacccccttatgaatgtcaccgaggatggtgtcgacggggtgatctcgttggattgcttggtggactcttgggtgtggcggccttggttcttcatcctccttgtcttgattatttgcatctcccccttgatcattgccgtcatcttgaggtggctcatttgcttgatcttctccttcatcaacttgagcctcatcctcattttgagttggtggagatgcttgcgtggaggaggatggttgatcttgtgcatttggaggctcttcgaattccttaggacacacatccccaatggacatgttccttagcgcgatgcacgaagcctcttcattacctatctcatcaatatcaacttgctctacttgagagccgttagtctcatcaaacacaacatcacaagaaacttcaacttgtccagaggacttgttaaagactctatatgcccttgtgtttgaatcatatcctagtaaaaagccttctacattcttaggagcaaatttagattttctacctcttttaacaagtataaagcatttgctaccaaagactcgatccgatatcttgtactcatcaagcatggttcttgccatgtctaatagagttctattcttcctctccactacaccattttgttgtggcgtgtagggagaagagaactcatgcttgatgccctcctcctcaaggaagccttcaatttgagagttcttgaactccgtcccgttgtcgcttctaattttcttgatccttaaaccaaactcgttttgagcccgtctcaagaatccctttaaggtctcttgggtgtgagatttttcctgcaaaaagaacacccaagtgaagcgagaataatcatccacaataactagacagtacttactcccgtcgatgcttatgtaagctatcaggccgaatagatccatgtgtaggagctccagtggcctgtcggtcgtcat

SEQ ID NO: 31078 - DNA, 4793 bp, Zea mays
  Clone ID: MRT4577_128354C.1
tttgcgccctctctctcggactcatttatatttctaacgctaactcggcttgtcgttgtgcttaagtttataaattttagattcgccctactcaccccacctctaggcgactttcaattggtatcagagcccggtgcttcattagagcctaaccgctcgaagtgatgtcgggagcatccgccaagagggatctcgggaccggcgacaagtccgcaagctcgggaagaacacactcaagggagtccgcccacaagcacaaggagaaatcctcttcctccatcaagtctcatcggatgggtgacaagaagaagaagatgaggaaggtggtctactacgagaccgactcttcgtcaccctccagctcggaatcggcctccaccacttcaaagcgccatgagcgcaagaagtatagtaagatgccccttcgctatcctcgcatttcgagacgcactccattactctccgttccattaggcaaaccacctatgtttgaaggtgaagattattctatgtggagtgataaaatgaggcatcacctaacctcactccacaaaagcatatgagatattgttgagtatggagtgcaggtaccaaagaagggagacaaggattatgactcggaggaggtcgaacaaatccatcacttcaactcccaagccacaactatactcctcgcctctctaagtcgagaggagtataataaggtgcaagggttgaagagcgcaaaggaaatttgggacgtgctcaagaccgcgcacgaaggagacgaggtgaccaagatcaccaagcaggagacgatcgagggggagctcggtcgcttccggcttcgccaaggggaggagccacaagaaatgtacaaccggctcaagaccttggtaaaccaagtacgcaacctcgagagcaaaaaatgggatgaccatgaaatggttaaggttattcttagatcactcatttttcttaaccctacgcaagttcaattaattcgtggtaatcctagatatacactaatgtctcccgaggaagtaataggaaactttgtgagctttgagttgatgatcaaaggctcaaagaaaattatcgagcacgatggcccctccacgcccgaagcacaaccggtcgcattcaaggcgacggaggagaaaaaggaggaatctacatcaagtagactacccatcgatgcctccaagctcgacaacgaggaaatggcgcttatcatcaaaagctttcgccaaatcctcaagcaaaggagggggaaggattacaagccccgctccaagaaagtttgctacaagtgtggtaagcccagtcattttattgcaaaatgtctactatctagtgacagtgacaggggcgacaacaagaagggaaagaggagagaaaataagagataccacaaaaagaagggcggcgatgcccatgtgtgccgcgagtgggactccaacgagagctcctccgactcctcctccgacgaggacaccgcctacatcgccgtcaccaagggacttctcttccctaacgtcggccacaagtgcctcatggcaaaggacggcaaaaggaagaaggtaaaatcaaaatcgtccactaaatatgcatcctctagtgatgaagatcattctagtgatgaggaagataacttgcgcaccctttttgccaacctaaacatgcaacaaaaagaaaagttaaatgaattaattagtgctattcatgagaaggatgaactctttgattcccaagaggacttcctaataaaggaaaacaagaagcatgttaaggttaaaagtgcttacgctctagaagtagaaaaatgtgaaaaactatctagtgagctaagcacttgccatgatattattgtcaaccttagaaatgagaatgctagtttaatagctaaggttgattcaaatgtatgtgatgattcaatttccattcttagagatgataatgttaatttgcttgctagaattaaaaaattgaatgattctcttgctagccttagaaatgataatgaaaaatcaattgctaaggctaaagacttagatgtttgcaatattaccatttcagatcttagaagtaaaaatgacatattacatactaagattgttgaattaaattcttgcaaaccctctacatctaccgttgagcatgtttccatttgcactagatgtagagacattaatgttgatgctatccatgatcacctagccttaattaagaaacaaaatgatcacatagctcaacttaatgctaaaattaatgagcatgacttagaaaacgaaaaatttaaatttgctagaagcatgctctatagtgggagacgccctggcatcaaggatggcattggcttccaaaagggagacaatgtcaaacttaatgcccctcctaaaagattgtctaattttgttaagggcaaggctcccatgcctcaggataacgagggttacattttgtaccctaccggttatcccgagcataaaattaggagaattcactctaggaagtctcactctggccctaatcatgcttttatatataagggtgagacatctagctctaggcaatcaacccgtgctgaattgcctaagaagaaaactcctattgcatcaaatgattctaacatttcatttaaaacttttgatgcatcttatgttttgactaacaaatccggcaaggtttatgcatccgggggctcaagttggatcatcgttagcaagtgcacaaaccacatgacaggggagaagaagatgttctcctcctatgagaaaaatcaagatccccaacgagctatcacattcggggatgagaatcaaggtgttactgtctttagaagaagtgatgattcaatagcatttaagggagtgttagagggtcagctatacttagtagattttgatagagctgaactcgacacttgcttaattgctaagactaacatgggctggctctggcatcgccgactagcacatgttggaatgaagaatcttcacaagcttctaaagggagaacacattttgggactaacaaatgttcattttgagaaagacaaaatttgtagcgcatgtcaggcagggaagcaagttggtgttcatcatccacacaagaacattatgacgactgacaggccactcgagctcctacacatggacctattcggcccgattgcttacataagcatctgcgggagtaagtactgtctagttattgtggatgattattctcgcttcacttgggtgttctttttgcaggaaaaatctcatacccaagagaccttaaaggggttcttgagacgggctcaaaataagttcagcttaaggataaaaaagataagaagcgataacgggacggagttcaagaactctcaaattgaaagcttccttgaggaggagggcatcaagcatgagttctcttctccctacatgccacaacaaaatggtgtagtggagaggaagaatagaactctattggacatggcaagaaccatgcttgatgagtacaagacttcggatcggttttgggtcgaggcggtcaacaccgcttgctacgccatcaaccggttatatctacaccgaatcctcaagaagacatcgtatgaactcctaaccggtaaaaagcccaatgtttcatattttagagtctttggtagcaaatgctttattcttgttaaaagaggtagaaaatccaaatttgctcctaaggctgtagaaggctttttactaggatatgattcaaacacaagggcatatagagtctttaacaagtcctctggactggttgaagtttcttgtgacattgtgtttgatgagactaatggctctcaagtagagcaagttgatcttgatgagataggtgatgaagaggctccgtgcgtcgcgctaaggaacatgtccattggggatgtatgtcctaaggaatccgaagagccaccacatgcacaagatcaaccatcttcctcaatgcaagcatctccaccaactcaagatgaggatgatgctcaagatgatgaaggagaagatcaagaagttgagccacctcaagaggagagcattgatcaagggggagatgcccatgatcaagatgaggaagatgagcaagctacaaggccgccacacccaagagtccaccaagcaattcaacgagatcaccccccacatagggtagaagaagcacttcaagattcagattgggtggtggcgatgcaagaggagctcaacaacttcactaggaatgagctttaccaaatggacgtgaaaagtgccttcctcaatggaccaatcaaggaagaggtctatgttgagcaacctcccggctttgaagatagtgagttccctacctatgtttacaaactctctaagacgctttacgggctcaagcaagccccaagagcatggtatgagtgcctaagagattttcttatcactaatggcttcaaagttggaaaggccgatcctaccttatttactaaaactcttgaaaatgatttgcttgtatgccaaatttatgttgatgatattatatttgggtctactaacgaatctacatgtgaggaatttggtaggatcatgacacaaaaattcgagatgtctatgatgggggagttgaagtacttcttaggatttcaagtgaagcaactccaagagggcaccttcattagccaaacgaagtatattcaagacattctaaacaagtttgggatgaaggatgccaagcccatcaagacacccatgggaaccaatgggcatctcgacctcgacacgggagattccaagccgaccctaaggaagctcaccttacgaccgtaa

SEQ ID NO: 31079 - DNA, 7243 bp, Zea mays
  Clone ID: MRT4577_128355C.1
tcatttctccccctttttggcatgaatcgccaaaaacggaatcattagagccctggtagtaatttcttcccctttggtcataagtaaatgagttaagattttaccaaagacgaagtccggtccttttgcttttgagcttttactctctccctcaaggatgaagtccttttctttgatgctcatttctcccccaaagaatagagagttgcttggagtgatggcgaagcatgagttacggagtggaagcctttgtcttcgccgaagactccaattccctttcaatatacctatgacttggtttgaaatagacttttgatccacggacttacctcccgtgtcgaggtcgagatgcccattagttcccatgggtgtcttgatgggtttggcatccttcatcccaaacttggttagaatgtcttgagtatactttgtttggctaatgaaggtgccctcttggagttgcttgacttgaaagcctagaaaatacttcaactcccccatcatcgacatctcgaatttctgtgtcataatcctactaaactcttcacatgtagactcgttagtagacccaaatatgatatcatcaacataaatttggcatacaaacaagtcattttcaagagttttagtaaagagtgtaggatcggcttttccgactttgaagccattagcaataaggaaatctctaaggcattcataccatgctcttggggcttgcttgagcccataaagcgccttagagagcctataaacatggttaggatactcactgtcttcaaagccgggaggttgctcaacatagacctcttccttgatcggtccgttgaggaaggcacttttcacgtccatttgatagagcttaaagccatggtaagtagcataggccaataatatgcgaattgactcaagcctagctacgggtgcataggtttcaccgaaatccaaaccttcgacttgtgaataccctttggccacgagtcgagctttgttccttgtcaccacaccatgctcatcttgcttgttgcggaagacccatttggttcctacaacattttggttaggacgtggaactaaatgccatacctcatttctagtgaagttgttgagctcctcttgcatcgccaccacccaatccgaatcttgaagtgcttcctctaccctgtgtggctcaatagaggaaacaaaagagtaatgttcacaaaaatgagcaacacgagatctagtggttacccccttttgaatgtcgccgaggatggtgtcgacggggtgatctcgttggattgcttggtggactcttgggtgtggcggtcttggttcttcctcatcctccttttcttgattattttcatctcccccttgatcattgccattatcttgaggtggctcatcttcttgattttgcccttcatcatcttgagcctcatcctcattttgggttggtggagatgcttgcatggaggaggatggttgatcttgtgcaattggaggctcttcgaattccttagggcacacatccccaatggacatgttccttagcgcgatgcatggagcctgttcttcacctatttcatcaaaatcaacttgctctacttgagagccgttagtttcatcaaacacaacgtcacatgagacttcaactagttcagtggacttgttaaagaccctatatgcccttgtgtttgagtcataaccaagtaaaaagccttctacagttttaggagcaaatttagattttctacctcttttaacaagaataaagcatttgctaccaaaaactctaaagtatgaaatgttgggctttttaccggttaggagttcatatgatgtcttcttgaggattcggtgaagatataatcggttgatggcgtagcaggcggtgttgacgcaccggacagtccggtgcacagcggacagtccggtgaattatagtggactagccgttggagtttcccgaagctggcgagttcctgaggccgacctcccttggcgcaccggacactgtccggtgtacaccggacagtccgatgaattataacgcgagtgcccctggaatttctcgaaggtggagagtttggcttggagttccctggtgcaccggacactgtccggtggcacaccagacagtccggtgcgccagaccaggggtgccttcggttatccattgctctttttgttgaacccatttcttggtctttttattggctaagtgtgaacctttggcaccttccgtgtcgaggtcgagatgcccattggttcccatgggtgtcttgatgggcttggcatccttcatcccaaacttgtttagaatatcttgagtgtactttgtttggctcaggaaggtgccctcttgaagttgctttacttgaaatcccaagaaatacttcaactcccccatcatagacatctcgattttttgtgtcatgatcctactaaattcttcacatgtagactcgttagtagacccaaatataatatcatcaacataaatttggcatacaaacaagtcattctcaagagttttagtgaataaagtaggatcgacctttccgactttgaagccattatctataaggaaatctctaaggcattcataccatgctcttggggcttgcttgagcccataaagcgtcttagagagtttataaacatgattaggatactcactatcttcaaagccgggaggttgctcaacatagacctcttccttgattggtccattgaggaaggcactcttcacgtccatttggtaaagcttgaagccatggtaagtagcataggctaataatatacgaattgactcaagcctagctacgggtgcataggtttcaccgaaatccaaaccttcgacttgggagtatcctttggccacaagtcgggctttgttccttgtcaccacaccatgctcgtcttgcttgttgcggaacacccatttggttcctaaaacattttgattaggacgtggaactaaatgccatacctcattcctcgtgaagttgttgagctcctcttgcatcgccactacccaatccgaatcttgtagtgcttcctctaccctgtgtggttcaatagaggaaacaaaagagtaatgcttacaaaaatgtgcaacatgagatctagtggttacccccttatgaatgtcgccgaggatggtgtcgacggggtgatctcgttggattgcttggtggactcttgggtgtggcagccttggttcttcatcctccttgtcttgatcatttgcatctcccccttgatcattgccatcatcttgaggtggctcatttgcttgatcttctccttcatcaacttgagcctcatcctcattttgagttggtggagatgcttgcgtggaggaggatggttgatcttgtgcatttggaggctcttcggattctttaggacacacatccccaatggacatgttccttagcgcgatgcacagagcctcttcatcacctatctcatcaagatcaacttgctctacttgagagctgttagtctcatcaaacacaacgtcacaagaaacttcatcttgtccagaggacttgttaaagactctatatgcccttgtgtttgaatcatatcctagtaaaaagccttctacagtcttaggagcaaatttagattttctaccccttttaacaagtataaagcatttgctaccaaagactctaaaatatgaaatattgggctttttaccggttaggagttcatatgacgtcttcttgaggattcggtgtagatataaccggttgatggcgtagcaggcggtgttgaccgcctcggcccaaaaccgatctgtagtcttgtactcatcaagcatggttcttgccatgtctaatagagttatattcttcctctccactacaccattttgttgtggcgtgtagggagatgagaactcatgcttgatgccctcctcctcaaggaagccttcatgttgagagttcttgaactccgtcccgttgtcgcttctaattttcttgatccttaagccgaactcattttgagcccgtctcaagaatccttttaaagtttcttgggtatgagatttttcctgcaaaaagaatacccaagtgaagcgagaataatcatccacaataactagacagtacttactccctccgatgcttatgtaagcaatcaggccgaatagatccatgtgtaggagttccagtggcctgtcagtcgtcatgatgttcttgtgtggatgatgagcaccaacttgcttccctgcttggcatgcgctacaaatcctgtctttctcaaaatgaacatttgttaatcctaaaatgtgctctccctttagaagcttatgaagattcttcatcccaacatgggctagtcggcggtgccagagccaacccatgttagtcttagcaattaagcaagtgtcgagttcagctctatcaaaatctactaagtatagctgaccctctaacactcccttaaatgctactgaatcatcacttcttctaaagacagtgacaccttggtttccatccccgaatgtgatcgctcgttggggatcttggtttttctcgtaggaggagaacatcttcttctcccctgtcatgtggtttgtgcacctgctgtcgatgatccaacttgagccctcggatgcataaacccaaatggttttgggtcctttggcattagacacaagaactttgggtacccaaacacaagtctttgaccccttgtgcttgcccccaacatacttggcaactaccttgccagatttgttagttaaaacatatgatgcatcaaaagttttaaatgaaatgtcatgatcatttgatgcactaggagttttctttttaggcaacttagcacgggttggttgcctagaactagatgtctcacccttatacataaatgcatggttagggcaagagtgagacttcctagtatgaattctcctaatcttgctctcaggataaccggcagcgtacaaaatgtaaccctcgttatcctgagccatgagagacttgcccttaacaaagttggataatttcttaggaggggcattaagtttgacattgtcccccttttggaagccaatgccatccttaatgccagggcgtctcccactataaagcatactacgagcaaacttaaatttttcattttctagttcatgctcggcaattttagcatctagtttagctatatgatcattttgttgtttaattaaagccatgtgatcatgaatagcattaatatcaacatctctacatctagtgcaaatagacgtatgttcaatggtagatgtagagggtttacaagattttaattctacaaccttagcatgcaatatatcatttttacttctaaggtcggaaattgtaatattgcaaacatcaagttctttagccttagcaagcaagtttttattttcattcctaaggctagcaagagtaatgtttaattcttcaatcttagcaagcaaattatcattatcatttctaagattgggaattgaaacattacaaacatttgaatcaaccttagctaacaaattagcattctcatttctaaggttgtctatagtctcatggcaagtgcttagctcactagatagtttttcacatttttctacttctagagcgtaagcatttttaactttaacatgctttttgttttctttaataaggaagtcctcttgggagtccaagagatcatccttctcatggatagcactaattaattcatttaatttttctttttgttgcatgtttatgttggcaaaaagagtacgcaaattatcttcctcatcactagcattatcatcgctagaggactcatatctagtggaggatttggatttaacctttttctttttgtcgtcctttgccatgaggcacttgtggtcgacgttggggaagagaagacccttgttgatggcgatgttggcggcgtcctcgtcgtcggaggagtcggaggagctctcgtccgagtcccactcgcggcaaacatgggcgtcgccacccttcttcttgtagtatttcttcttctcctttcttctccccttcttgtcgtcgcccctgtcactgtcactagaaataggacattttgctataaagtgaccgggcttaccacacttgtagcaaaccttcttggagcggggcttgtaatctttccccctcctttgcttgaggatttggcggaagctcttgatgacgagcgtcatttcctcgttgtcgagctttgaggcgtcgattggttgtctactcggtgtagactcctccttcttctcctctgtcgccttaaatgcgacaggttgtgcttcggatgtggagggatcatctagctcattgattttctttgagcccttgatcatgtactcaaagctcacaaaattcccgattacttcctcgggagtcattagtgtatatctaggattaccacgaattaattgaacttgagtagggttaaggaaaataagtgatctaagaataaccttaaccatctcgtggtcatcccactttttgctctcgaggttgcacacttggttcaccaaggttttgagccggttgtacatgtcttgtggctcttctcctttgcgaagccggaagcgaccgagctccccctcgatcgtctcccgcttggtgatcttggttagttcatcaccctcgtgcgcggtcttgagcacgtcccaaacttccttggcgctctttagtccttgcaccttgttgtactcctccctacttagagaggcgaggagtatggttgtggcttgggagttgaagtgctcgatttgggccacctcgtcctcatcataatcctcatcccctacggatggtacctgtgctccaaactcaacaacattccatatacttttgtggagtgaggttaggtgaaatttcatcaaatcactccacctagcataatcttcaccgtcaaaggttggcgatttgcctaatggaacggaaagtaatggagtatgtctagaagtgcgaggatagtgtaaggggatcttactaaacttcttgcgctcatggcgcttagaagttacggagggcgcgtcgaagccggaggtggaaggtgatgaagtatcggtctcgtagtagaccaccttcctcatcttctttttcttgtcaccactctgatgcgacttgtgggaagaggctttcttctccttccctttcccctttttgcgggactcttccgatgaagccttcccgtggcttgtagtgggcttatcgccggtctccatctccttattggcgtgttctcccgacat

SEQ ID NO: 31080 - DNA, 1419 bp, Zea mays
  Clone ID: MRT4577_128356C.1
atggccgacggcggctcggcggtgatggctcggcgctccaagcctccactcgtctccaccgaccaccggtcagcggtccaggctgcgccgcggcgcagcgttagcgggcagcggccaaccggccaccggcatcacgcgcggccgcgcgcccaaacggccacttctccaagctccagtccagctccagcactccagcgtcagcactcagccgctctcgtagtcccgcatagtcgcgcccgcacgcaaaccctagttggtgtctcggcgacggccgacggtgactcggcggatcggtgctccaagcctccactcgtctccaccgaccaccggtcagcggtccaggtagcgccgcggcacagcgccagcgggcaacggccaaccgggcaccggcatcacgtgcggccgcacgcccaaacggccaccgctccatgctccaacaattcagcatcactggctcactgcgtctgcgtctcagcgtctacgtcaggatccagcgtcactgcgtctacgactgtgtcaggctcagcatcgatatccagccctatggaggagaacactccattgccagcaagtttggggtctcgatctcgaattcgaaccaagcaactcacaaagaagccacccatttcgatgcagaagatgtctgcagcgacaacatcatcggcgtccggcaatcggtctaatgtttctatatctgtggaaccaacaactaattctagagaggaggaagacaaggaggaggacaatagcctcgacatggaggatgatttctctctaagcctatcttcagaggatggtgggagccagggtgaagatgaggttcaggtggcacaagttcataatgcaaagagaggagtcaaaaaggcaaagggtgatgttccattatctccttcaaagtgtaaggtcaagagggtgaagcgagccgattgctggaagtattttaaggtggtcgaagttcaatcaaagaagaagtttggggaaatggtgacgaaggccaagtgcaagttttgttacaaacttgaatatgatcgtgatcacactagaaatttgattgctaagatgattattgttcatgagtattcacttcgaatggtagagcacagatggtttaatatcttgatgaaatggatgaataacagctatgaaagtattggtagaaagactataaaaaacgagtgcatgaaagtgtatgaatctgaaaaggaccttctaaagaaaactcttagaaaggttgaatccataagtttgactaccgatctgtggacatctaaccaaaatgtccaatacatgagtttggttgcacactacatagatgtaaattgggaattgcaatgtcgtgtactaaactttgtggagttggatcctccccacactggtgtagtgatagctcaagctattttagagtgcctggttgaatga

SEQ ID NO: 31081 - DNA, 1287 bp, Zea mays
  Clone ID: MRT4577_128357C.1
atgtcgggagatcacgccaagaaggagatggagaccggcgaaaagcccactacaagccacgggagcacttcatcggaagagtcccgcactaagaggaaggagaagaagaaggactcctccaaaggaaaggagaagagatcttcttcacaccacaaagagaagaaggagaaatcctcttcccacaagccgcatcggagtggggacaagaaaaagaggatgaggaaggtggtctactacgagaccgattcttcatcggcatccacatccggctccgacgcggcgtccgtcacttctaaacgccaagagcgtaagaagtatagggatgaaaactatgatgaggatgaagtagcccaaatcgagcacttcaactcccaagccacaaccatattcctcgcctctctaagtagagaggagtataacaaggtgcaagggttgaagaatgcgaaggagatttgggatctactcaagaccgcgcacgagggtgatgaactcaccaagatcaccaagcgggaaacgatcgagggggagctcggttgcttccgtcttcgccaaggggaggagccacaggatatgtacaaccggctcaaaaccttggtgaaccaagtgcgcaacctcgggagcaagaaatggaatgaccacgaggtggttaaggttattcttagatcactcatcttccttaaccccactcaagttcaattaattcgtggtaatcctagatacacactaatgactcccgaggaagttatcgggaattttgtgagctttgaatgtatgatcaagggctcaaaaaagaacaacgagcttgatgatccctccacatccgaagcacaaccggtggcattcaaggcgacggaggagaagaagaaggagtctacaccaagtagacaaccaatcgacgcttcaaagctcgacaacgaggagatggctttaatcatcaaaagctttcgccaaatcctcaagcaacggaagaggaaggattacaaatcccgttccaagaaggtttgctacaagtgtggtaagcccagtcactttattgctaaatgtccattatcaagtgacagtgacagggataacgacaagaagggcaagaggagagaaaagaagaggtaccacaagaagaggggcggcgatgcccacgtatgccgcgagtgggactctgacgagagctccaccgactcctccgacgacgaggacgccgccaacatcgccgtcaccaagggactcctcttccccaacgtcggccacaagtgtctcatggcaaaggacggcaaaaggaagaagccttaa

SEQ ID NO: 31082 - DNA, 1172 bp, Zea mays
  unsure (1)..(1172): unsure at all n locations
  Clone ID: MRT4577_128358C.1
caaaaacgactgctcanaataattcacagtcaactggtatgcatgctacaccacctggtgcacatggattttggatttcacaacaaatacagctgatcacaatatgaacagagagtccagtaataaccaaaatgactgngaaagctaacaatgtgcttggacaagacatgcacaatagccaaaatgtcttcaatagcaacgagaactcttggaagtcaactggaggtaatgttaattcagtccagagatttcagcagaggaagtctgatgtaagcactactaatgaaagttcagatggtaaaagtattagcatgatgagctcaagcatgtcaatgatggcacaggatcattatcagatggtcactagtcggagtggcgagcaaattggcatgaaccgtagtatggcgcatagagctccagaaatgtctggatcaccaagaaaaagcacagaattcggcacgagtgatttcaaccaggaatatctaaatgcaactcctaacgaaaggcaaacacacactttaaaccatggacaacacataacaagtgattctgctcccagaaggcattctatatttgctgggaaggaatccgaaaatttaggtcagtctagtcagcaagcaatgggatcttacatgttgcaaaatcgtgctatggggagctctggaatgaacattagcccatctccaggcaatccagtgtcaaataatctgtttccacctcagatgcgaaataatctgcagcatcattttggcacaaactcccttgtttccaataatatgccttcagtaagtgagaaaatgatgatggcacaggaacaacttcaatctcgacatggtgtccctaatagctctagtgcattaccttttggaggagctgatactggtctgtctcagaacagagcagttcaaaacagtcaacatatgcttcagcttcttcataaggtggataactcaagaaatagcgatgtggctgctgacatacccaacaacccccttggncgttgntttctgcccagcaacaacctaaccattctttgcanggatcttgggttgagactggcaccaccatcccaacgccaatcaaatttcgggtaatttaatggtctagtcagactaatgttgatggcaagcaatctgaccactcagcacaagatgatgaccgcacaccacaac

SEQ ID NO: 31083 - DNA, 3921 bp, Zea mays
  Clone ID: MRT4577_128359C.1
atgaaggtggtctactacgagaccgactcttcgtcaccctccacctccggctcggaatcggcatctgccacttctaagcgccatgagcgcaagaagtatagtaagatgccccttcactatcctcgcatttcaaaacgcactccattactttccgtcccattaggcaaaccacctatgtttgaaggtgaatattattcaatgtggagtgataaaatgaggcatcacctaacctcactccacaaaagcatatgggatattgttgagtatggagcgcaggtaccgaagaagggggacaaggattatgattcggaggaggtcgaacaaatccaacacttcaactcccaagtcaccactatactcctcgcctctctaagtcgagaggagtataataaggtgcaagggttgaagagtgcaaaggagatttgggacgtgctcaagaccgcgcacgaaggagacgaggtgaccaagatcaccaagagggaaacgatcgagggggagctcggttgcttcatgcttcaccaaggagaggagccacaagtcatgtacaaccggctcaagaccttggtgaaccaagtgcgcaacctcgggagcaccaaatgggatgaccatgaaatggtcaaggttattcttagatcacttgtttttcttaatcctactcaagtacaattaattcgtggtgatccaagatataaactaatgtctctcgaggaagtgataggaaagtttgtgagctttgaactaatgatcaaaggctccaaacaaatcatcgagcgaggcgccacctccacacctgaggtgcaacccgtcgccttcaaagcgacggaggagaagaaggaagagtttacaccaagtaggcttcccatcgacgcctccaagctcgacaacaaggagatggctttaatcatcaaaagctatcgccaaatccttaagcaaaggaaggggagagattacaagctccgttccaagaaggtgtgctacaagtgtggtaagcccggtcatttcattgctaaatgtccattatctagtgatagtgacaggggcgacgacaagaagggaaagagaagagaaaagaagaggtactacaagaagaagggcggcgatgcccatgtttgccgagagtgggactccgacgagagctccaccgactcctcctccgacgaggacgccgcaaacatcgccatcaacaagggccttctcttccccaacgtcggccacaagtgccccatggcaaagtacggcaagaagaaggaaaaattaaatgaattgattagtgttattcatgagaaggatgaactcttggatagccaagaggatttccttattaaggaaaacaaaaggcatgttaatactaaaaatgcttatgctcaggagacaattgagaatgaaaaattaattgctaaggctaaagatctaaatgtttgcaatatttctatttccaatcttaagaatgaaaatgctattttacatgctaagattgatgaattaaatgcatgcaaaccctctacatctaccgttgagcatgttactatttgtactagatgtagagatattaatgttgatgctattcatgatcacctaactttaattaaacaacaaaatgatcacatagctcaacttagtgccaaaattaatgagcatgacttagaaaatgaaaattttaaatttgctagaagcatgctctatagtgggagatgcccaggcattaaggatggcattagcttccaacagggagacaatgtcaagcttaatgcccctaaaagattgtctaactttgttaagggcaaggctctcatggttcaggataacgagggttacattttataccctaccggttatcccgaacacaaaattaggagaattcactctaggaaatctcactctggctctcatcatgcttttatgtataagagtgaggcatctagttctaggcaatccactcatgctaaattgcctaaaaagaaaactcctattgcatcaaatgaacctaatatttcatttaagacttttgatgcatcttatgttttaactaacaaatcaggcaaagtagttgccaaatatgttgggggcaaacacaaggggtcaaagacttgtgtttgggtacccaaggtgcttgtttctaatgtgaaaggacccaagaccgtctgggtttatgcatccgggggatcaagttggatcattgatagcgggtgcacaaaccacatgacttgggagaaaaggatgttctcctcctacgagaaaaaccaagatccccaaagagctatcacattcagggatggaaatcaagcccatgttgggatgaagaatctttctaagcttctaaagggagagcacattttgggactaaccaatgttcattttgagaaagacagggataaatctcaaacccaagagaccttaaagggattcttgagacgggctcaaaatgagttcggcttaaggatcaaaaagattagaagcgataacgggacggagttcaagaactcacaaatagaaggcttccttgaggaggaaggcatcaagcatgagttctcttcttcctacacgccacaacaaaatggtgtagtggagaggaagaatagaactctacttgacatggtgaggaccatgcttgatgagtacaagacttcggaccgagtctttggtagcaaatgctttattcttgttaaaagaggtagaaaatctaaatttgctcctaaggttgtagaaggctttttactaggatatgattcaaacacaagggtatatagagtctttaacaagtccactggactagttgaagtttcttgtgacattgtgtttgatgagactaacggctctcaagtagagcaagttgatcttgatgagctagatgatgaagaggctccatgcgtcgtgctaaggaacatgtccattggggatgtgtgtcctaaggaatccgaagagcctccacaagcacaagatcaaccatcttcctccatgcaagcatctccaccaactcaagatgaggatcaagctcaagaggatgaaaatgaagatcaagaagatgagccacctcaagaggaggacaatgatcaagggggagatgctaataatcaagacaaggaagatgatgacgctaggcttgagtcaattcgtatattacttgcctatggtacttaccatggcttcaagctctatcaaatggacgtgaagagtgccttcctcaatggaccaatcaaggaggaagtctatattgagcaacctcccggctttgaagataagtttagtaggatcatggttcaaaagttcgagatgtctatgatgggggagttgaagtatttcttaggatttcaagtcaagcaactccaagagggcaccttcattagccaaacaaagtacattcaacacattcttaccaagtttgggatgaaggatgccaagcccatcaagacacccatgggaaccaatgggcatctcgacctcgacacgggaggtaaatccgtagatcaaaaggcggggtgtaaaattaatagaaagagcacatcggggacttgccagttcttgggaaggtctctggtgtcttggacttcaaagaagcaaaattccgtagctctttctaccgccgaggccgagtatattgacgcaggccattgttgcgcgcaattactttggatgaggcaaacccttagggactatggttacaaattaaccaaagttcctcttctatgtgataatgagagtgcaatccgcatggcggataatcccgttgaacatagccgcactaaacacatagccattcggtatcattttctaagggatcaccaacaaaagagggatatcgagattgcttatatcaacactaaagaacaattggccgatatctttaccaagccactagatgaacaaacctttaacaaacttaggcatgagctaaatattcttgattctaggaatttcttttga

SEQ ID NO: 31084 - DNA, 1271 bp, Zea mays
  Clone ID: MRT4577_12835C.1
acactcccgtccgccgccccaggtgcagagtctttcgtcatctcttctccggcgaagaacccccagtcgcccaccagatcacttgttaaactttgttgaggggtgatggcggtttctttcgcaaacctcaactccgaggcagggcttaaaaagcttgatgagtaccttgtcactgggagctacatcactggctaccaagcttgcaaggatgacttggctgtctacacttcattggggtcctcgaggccggccgggccttgctcgctgtgccgcctccgacatcctactttcgtccccacgagtgaccgataatccgccggcgctgagatgttggtttatcaagatctcctatctggcgacgagctcctgtcggattcattcacctacaaggagctcgagaacggcgtcctgtgggaggtcgagggaaagtgggtcacccaaggtcctgttgatgtagacattggtgccaatccatccgccgagggtggtgaggacgaaagcgttgatgacacagccgtgaaggtggttgatattgttgacacattccgtctacaggagcaacctccttttgacaagaaatcatttgtctcttacattaaaaaatacatcaagaatctcactgctgtgttggagccagagaaagcggatgagttcaaaaagggtgtcgagggtgcaaccaagtttctccttagcaagctgaaggaccttcaattttttgttggtgagagcatgaaggatgatgcgtccgtggtattcgcctattacaaggatggtgccactaatccgacattcctctatttctctcatggtcttaaggagatcaagtgctaggcttgcggcgagattagttacccatgttgggtactatctatgtactattgttatatccacaactatagttgtcctggctgaattgaactcaaaagggtttgtttgagaaaaaactgtccaagattggattgcttgttaaagctcaatattgttattgaagtgttattgcttagttgtcattgtctttcagctcgctgacttgtttatgacgtaagtagacgtgagtttattattagtatttctatttggactaaagaattggatgagttaattgttaatagataattattatctgtagagatccaaaaaaaaaaaaaaaaaagcggccaaaaagtgtcatgaccttcacggatcactaacgagctttattgatgctttggggggggggggggggggcggccccccagagattccaggcttacgtaacggctgcaatgcga

SEQ ID NO: 31085 - DNA, 5169 bp, Zea mays
  Clone ID: MRT4577_128360C.1
agtctaaccactcaaagtgatgtcgggagcatccgccaagagggagatcgggaccggcggcgacaagtccacaagctcgaggagaacccgagggagtctgcccacaagcataaggaggaatcctcttcctctgtcaagacacaacggaagggagacaagaagaagaagatgaagaaagtggtctactatgagaccgactcttcgtcaccttccacctccggttccgaatcggcatccaccacttctaagcgccatgagcgcaagaagtatagtaagatgcccctctactatcctcgcatttccaaacgcactccattactttccatcccattaggcaagccaccggtaccaaaggaaggggacaaggactatgattccgaggaggtcgaacaaatccggcacttcaactcccaatccactactatactcctcgcctctctaagtcgagaggggtataataaggtgcaagggttgaagagtgccaaagagatttgggacatgctcaagaccacgcacgaaggagatgaggtgaccgagatcaccaagcgggaaacaatcgagggggagctcggtcgattcatgctcaaccaaggggaggagccacaagccatgtacaaccggctcaagaccttggtgaaccaagtgcgcaacctcgggagcaccaaatgggatgaccatgaaatggtcaaggttattctaagatcacttgtatttcttaatcctacacaagttcaattaattcgtggtgatcctagatacaagctaatgtctcccgaggaagtgataggaaagtttgtgagctttgagttgatgatcaaaggctccaaacaaatcattgagcgaggcaccacctccacacccgaggtgcaacccgtcgccttcaaagcgatggaggagaagaaagaagagtctacgtcaagtaggcttcccatcaacgcctccaagctcgacaatgaggagatggctttaatcatcaaaagctttcgccaaatcctcaagcaaaggaggggaaggactataagccccactccaagaaagtttgctacaagtgtggggcgacgacaagagggaaagaaggagaagaagagatactacaagaagaagggcggcgatgcccatgtttgccgagagtgggactccgatgagagctccaccgactcctcctccgacgaggacgccgcaaacatcgccgtcaacaagggtcttctcttccccaacgtcggccacaagtgcctcatggcaaaagacggcaaaagaagtgatgaggataactctagtgatgatgaggataatttgcttgctctttttgccaacctcaacatgcaacaaaaggaaaaattaaatgaattaataggagctattcatgagaaggatgaactcttggatagccaagaggacttcctaattaaagaaaataagaagcatgttaaggttaaaaatgcttatgctcaagaagtagaaaaatgtgaaaaattgactagtgagctaagcacttaccatgatgttatctcaaaccttagaaatgaaaatgccaaattaattgctaaggttgagaagttagatatttgtgatgattcaattgttagtcttagaaatgataatgataatttgattactaagattgacaaattaaatgcatctctctctagccttaaaattgataatgaaaaattaattgctaaggctaaagaattaaatgtttgcaatgatgttatttccaaccttagaattgaaaatgtcatgttacatgctaagattgatgaattaaatgtttgcaaaccctctacatctatcattgagcatgttactatttgtactagatgtagagatattaatgttgatgctattcataatcacctagctttaattaaacaacaaaatgatcacatagctcaacttagtgctaagattaatgaacatgacttagaaaatgaaaaatttgaatttgctagaagcatgctctataatgggagacaccctggcattaaagatggcattgacttccaaaagggagacaatgtcaagcttaatgcccctaagaaattgtctaattttgttaaggacaaagctcccatggctctggataacgagggttatattttatatcccgccggttgtcccgaacacaaaataaggagaattcattctagaaagtctcactctagctctcatcgtgcttttatttacaagaatgaggcttctagctctaggcgttctacacatgttaaaatgtctaagaagaaaactcctattgcatcaaatgagcctaacatttcatttaagatttttgatgcttcctatgtgctaactaacaaatcaggcaaagtagttgccaaatatgttgggggcaaacacaaggggtcaaagacttgtgtttgggttcccaaggtttatgcatccgggggctcaaattggatcatcgatagcgggtgcacaaaccacatgaaaggggagaaaaggatgttctcctcctatgagaaaaaccatgatccccaacgagccatcacattcggggatggaaatcaagattcattagattacaatttgctttctatttctcaattatgcaaaatgggctacaactgtctttttacggatataggtgttactgtctttagaagaagcgatgattcagtagcatttaagggagtgttagagggtcagctatacttagttaattttaatagagctgaactcgacacttgcttaattgctaagactaacatgggctggctctggcatcgccgactagcacatgttggaatgaagaatcttcacaagcttctaaagggagagcacattttgggactaacaaatgttcattttgagaaagacagggaaaaatctcaaacccaagagaccttaaagggattcttgagacgggctcaaaatgagttcggcttaaggatcaaaaagattagaagcgacaacgggacggagttcaagaactctcaaattgaaggctttcttgaggatgagggcatcaagcatgagttctcttctccctacacgccacaacaaaatggtgtagtggagaggaagaatagaactctattggacatggcaagaaccatgcttgatgagtacaagacttcggatcggttttgggccgaggcggtcaacaccgcttgctacgccatcaaccggttatatcttcatcgaatcctcaagaaaacatcatatgaactcctcaccggtaaaaagcccaatatttcatattttagagtctttggtagcaaatgctttattcttgttaaaagaggtagaaaatctaaatttgctcctaaggctgtagaaggctttttacttggttatgattcaaacacaaggacatatagagtctttaacaagtccagtggactagttgaagtttcttgtgacattgtgtttgatgagactaacggctctcaagtagagcaagttgatcttgatgagctagatgacgaagaggctccgtgcgtcgcgctaaggaacatgtccattggggatgtgtgtcctaaagaatccaaagagcctccacaagcacaagatcaaccatcttcctcaatgcaagcatctccaccaactcaagatgaggatcaagctcaagatgatgatgatgaagatcaagaggagtcacctcaagaagaagacaatgatcaagggggagatgcaaatgatcaagacaaggatgaagaacaagatccaagactgccatacccaagagtccaccaagaaattcaacgagatcaccccgtgaacaccatcctcagcgatattcataaggggggaaccactcgatctcgtgttgctcatttttgtgaacattactcttttgtttcctctattgagccacacagggtagaggaagcacttcaagattcggattgggtactggctatgcaagaggagctcaacaacttcacgaggaatgaggtatggcatttggttccacgtcctaaccaaaatgttgtaggaaccaagtgggtattccgcaataagcaagatgagcatggtgtggtgacaaggaacaaagcccgacttgtggccaagggatattcacaggtcgaaggtttagatttcggtgaaacctatgcacccgtagctaggcttgagtcaattcgtgtattacttgcctatgctacttaccatggctttaagctttaccaaatggacgtgaaaagtgtcttcctcaatggaccaatcaagaaagacgtctatgttgagcaacctcccgactttgaagatagtgagtaccctaaccatgtgtataaactctcaaaggcgctttatgggctcaagcaagccccaagagcatggtatgaatgcctaagagattttattatcactaatggctacaaagtcagtaaagtcgatcctactctctttactaaaactattgcaaaagatttgtttgtatgccaaatttatgttgatgatatcatatttgggtctactaacaaatccacttgtgaagagtttagtaggatcatggtacagaaatttgagatgtctatgatgggggagttgaagtattttctaggatttcaagtcaagcaactccaagagggcaccttcatcagccaaatgaagtacattcaagaaatactcactaagtttggaatgaaggatgccaagcccatcaagactcccatgggaaccaatgggcatctcgacctcgacacgggaggtaaatctgtagataaaaggttccaagctgatcctaaggaagttcaccttagggccatgaaaagaattatgagatatttagtttacactcctaagtttgggctatggtaccccaagggatctacctttgatctaattgggtattccgatgccgattatgtcggatgtaaaatagatagaaagagtacatcagggacttgtcagtttctgggaagatccctggtgtcatgggcttcaaagaaacaaaactccgtagctctttccaccgccgaagccgagtatattgtcgtaggtcattgttgtgcgcaattactttggatgaggcaaacccttagggactatggctacaaattgagcaaagtccctctgttatgtgataatgagagtgcaatccgcatgtcggataatcccgttgaacacaaccgcacaaaacacatagacatcaggtatcactttctgagagatcaccaacaaaaggggatatcgaaattgcttatgtga

SEQ ID NO: 31086 - DNA, 4635 bp, Zea mays
  Clone ID: MRT4577_128361C.1
atgtcggaagaactcgccaagaaggagatggagaccggcgacaagcccactacaagccatgggaaggcttcatcggaagagtctcgcaacaaggagaagaggaaggagaagaagaaggaaaataagacttcttctcacaagtcgcatcggagtggcgacaaaataaagaagatgaggaaagtggtctactacgagaccgacacttcatcaccttctacctccggctccgacgcgccctccataacttcgaagcgccatgagcgtaagaagtttagtaagatccccttacattatcctcgtacctatagacatactccattactttccgttccattaggcaaaccgccaacctttgacggtgaagattatgctaggtggagtgatttaatgaaatttcatctaacctcactccacaaaagtatatggaatgttgttgagtttggtgtacaggtaccatccataggggatgaagactacgactcggacgaggtggcccaaattcaccactttaactcccaagccactactatactcctcgcctctctaagtcgagaggagtataataaggtgcaagggttaaaaagtgcgaaggaaatttgggacgtactcaagaccgcgcacgagggagacgaggtgacaaagatcaccaagcgggaaacgatcgagggggagctcggtcgcttcatgcttcaccaaggggaggatccacaagctatgtacaaccgcttgaagaccttggtaaaccaagtgcgcaacttcgggagcgaaaaatgggatgaccatgagatggtcaaggttattcttagatccctcgtattccttaaccctacacaagttcaattaattcgaggtgatcctagatataagctaatgtctcccgaggaagtcataggaaaatttgagagctttgagctaatgattaaaggctcaaagaaaatcatcgagcaaggcacctcctccacacccgaagcacaaccggtcgcattcaaggcgacggaggagaagaaggaggagtctacatcaagtagacaaccaatcgacgcctccaagctcgacaatgaggaaatggcgctcgtcatcaagagcttccgccaaatcctcaaacaaaggaaggggaaggactacaaatctcgctccaagaaagtgtgttacacatgtggtaagcccggtcattttattgcaaaatgtcctatatctagtgacagtgacaggggcgacgacaagaaggggagaagaaaggagaagaagaaatactacaagaagaggggcggcgatgcccatgtttgtcgggagtgggactctgacgaaagctctagcgactcctccgacgacgaggacgccgccaacatcgccgtcaccaagggacttctcttccccaacgtcggccacaagtgcctcatggcaaaggacggcaaaaagaagaaggttaaatctaaatcctccactagatatgaatcctctagtgatgaaaatgctagtgatgaggaagataacttgcacactctttttgctaacttaaacatgcaacaaaaggagaaattaaatgaattaattagtgccatccatgagaaggatgatctcttggactcccaagaggactttcttattaaagaaaacaagaagcatgttaaagttaaaaatgcttatgctctagaagttgagaaatgtgaaaaaatatctagtgagctaagcacttgccatgagaccattgacaaccttagaaatgaaaatgctaatttgttagctaaggttgattcaaatgcttgtaatgtttcaattcctaatcttaggaatgataatgatgatttgcttgctaagattgaagaattgaatttatctcttgttagccttagaaatgaaaatgaaaaattaattgctacggctaaagattttgatgtttgcaatgctactatttctaaccttagaagtgaaaacgatatattgcatgctaaggttgtagaattaaaatcttgcaaaccctctacatctatcgttgagcatgtatctatttgtactagatgtaaagatgttgatattaatgctattcatgatcacatgtctttaattaaacaacaaaatgatcatatagcaaaattagatgctaaaattgccgagcataacttggagaatgaaaaaattaaatttgctcgtagtatgctttataatgggagacgccctggcatcaaggatggcattggcttccaaaggggagacaatgtcaaacttagtgcccctcctaaaagattgtctaactttgtaaagggcaaggctcccatgcctcaggataacgagggttacattttgtaccctgccggttatcccgagagcaaaattaggaggattcactctaggaagtctcactctggccctaaccatgctttcatgtataagggtgagacatctagttctaggcaaccaacccgtgctaagttgcctaagaagagaactcctaatgcatcaaatgatcatgacatttcattcaaaacttttaatgcatcatatgctttaactaacaaatccagcaacgtagttgccaagtttgttgggggcaaacacaagggctccaagacttgtgtttgggtacccaaagttcttgtttctaatgccaaaggacccaaaaccgtttgggaaaaatctcaaacccaagagaccttaaagggattcttgagacgggctcaaaatgagttcggcttaaggatcaagaaaataagaagcgacaacgggacggagttcaagaactctcaaattgaaggcttccttgaagaggagggcatcaagcatgagttctcttctccctacacgccacaacaaaatggtgtagtggagagaaagaatataactctattggacatggcaagaaccatgcttgatgagtacaagacttcggatcggttttgggccgaggcggtcaacaccgcctgctacgccatcaaccggttatatctacaccgaatcctcaagaagacatcatacgaactcctaaccggtaaaaagcccaacatttcatattttagagtctttggtagcaaatgctttatacttgttaaaagaggtagaaaatctaaatttgctcctaagactgtagaaggctttttactaggatatgattcaaacacaagggcatatagagtctttaacaagtcctctgggcaagttgaagtttcttgtgacgttgtgtttgatgagactaacggctctcaagtagagcaagttgatcttgatgagataggtattgaagaggctctgtgcatcgcgctaaggaacatgtccattggggatgtgtgtcctaaggaatccgaagagcctccaaatgcacaagatcaaccatcctcctccacgcaagcatccccaccaactcaaaatgaggatgaagctcaagttgatgaagtagaagatcaagcaaatgagccacctcaagatgacggcaatgatcaagggggagatgcaaatgatcaagacaaggaggatgaagaacaaaggccgccacacccaagagtccaccaagcaatccaacgagatcaccccgtcgacaccatcctcggcgacattcataagggggtaaccactagatctcgtgttgcacatttttgtgagcattactcttttgtttcctctattgaggcacacagggtagaggaagcactacaagattcggattgggtggtggcaatgcaagaggagctcaacaacttcactaggaatgaggtatggcatttagttccacgtcctaaccaaaatgttgtaggaaccaaatgggtcttccgcaacaagcaagatgagcatggtgtggtgacaagaaacaaagctcgacttgtggccaacggatactcacaagtcgaaggtttggatttcggtgaaacctatgcacccgtagctaggcttgagtcaattcgcatattattggcctatgctacttaccatggctttaagctttatcaaatggacgtgaaaagtgccttcctcaatggaccaatcaaggaagaggtctatgttgagcaacctcccggctttgaagatagtgagtaccctaaccatgtttataaactctctaaggcgctttatgggctcaagcaagccccaagagcatggtatgaatgccttagagatttccttatcactaatggattcaaagtcggaaaggccggtcctactttattcactaaaactcttgaaaatgacttgtttgtatgccaaatctatgttgatgatattatatttgggtctactaacgagtctacatgtgaagaatttagtaggatcatgacacaaaaattcgagatgtctatgatgggggagttgaagtacttcttaggttttcaagtgaagcaactccaagagggtaccttcctaagtcaaacgaagtatactcaagatattctaagcaagtttggaatgaaggatgccaaacccatcaagacacccatgggaaccaatgggcatctcgacctcgacgagggaggtaaatccgtcgatcaaaagaaagagcacatcggggacttgccagttcttgggaaggtccttggtgtcttaggcttcaaagaagcaaaattccgtagctctttctaccgccgaagccgagtatattgccgcaggacatttttgcgcgcaactactttggatgaggcaaacccttag

SEQ ID NO: 31087 - DNA, 179 bp, Zea mays
  Clone ID: MRT4577_128362C.1
ggagtcgcgggtgcgcgcaggccgtgagtgtgcgcttttgagagtcgcggcgccccgagcccggccgccgcccgccggcatgagctacgaccgcgccatcaccgtcttctcgcccgacggccacctcttccaagtggagtacgcgcaggaggccgtcacgaagggctcgaccgcggttg

SEQ ID NO: 31088 - DNA, 415 bp, Zea mays
  Clone ID: MRT4577_128363C.1
aattcggcacgaggctcgacaaaggaggaacgacacggacaagttgtcgcacacaagcgacatggctctcgcgcccaaaacggcctcctcctcctcgctctcctgggcgttgcaagcagatgattcgccggcgctggtcctgaagcatatggcgccaaccctaccaccgagacggaggtacgacgcggacgctgaagtcaataccaccaccactgctaaaactgctgcggatgctgtcacggctgccgccgccccgccgtatgcgccggcgccggagccggtgccgccaaagcattgcggtggcccccgtcgagaggacgatccgtacgcagacagacaccatgtcctgatctcatggccaatggcaagacggcgtgcatcccgcacatgaccgccggtgaccccgacctatcga

SEQ ID NO: 31089 - DNA, 419 bp, Zea mays
  Clone ID: MRT4577_128364C.1
ccctaaaaaacgttttctttcaaaaaggttcaaacatcttaaaaaaggggccgaacctgaagggagggggaggcatcccaaaggggagaaacccaaatcaaaaatcatttgaaggggggccaaacaacgggtcacaagggaaccggaagaagtggggggaaaataataagaaggggacaaaaaggcttgggacctaaaacaatggaaccgaaaaactttgaacaagcacctataaatacctcccctaagggaccccccccaaattaccgaaaacaaattaatccacaaagacaaaaaaaaggcgaaaaaatggggccaaaaccagggagaaaaaaagcaaaaaaacctacaacaaacaaccggaaaaattttaaaagacctttcaaacaaaaacaccgaagggcttacacccctggccc

SEQ ID NO: 31090 - DNA, 265 bp, Zea mays
  Clone ID: MRT4577_128365C.1
cttattaattattactaaaggacaaaacacacagtctggggggtttttgaaaaaggagctctattcatctgttgaaaaatgaaccatacttagaccggattaataaaagatcgcccgtgtagaggatgaacatcaaaggaatttttttgcccgcacgcataggtcaaagtgcgctacataacattgtggaccaaatgtgagtgcacataagactgcccaactcaatttttgtaacggtagacagctttattcttctcaatttaag

SEQ ID NO: 31091 - DNA, 194 bp, Zea mays
  Clone ID: MRT4577_128366C.1
cattgcagagatcttatttgtgggatagtataagaaagatacgtttgactatgaacatgagggctcaatctgataaatggttttcggaatacctccttagaattggtaatggaactgaggagactattggatctgattatgtgcgtcttccagaagaaattgtgattggctatacagacactgaagattcaata

SEQ ID NO: 31092 - DNA, 280 bp, Zea mays
  unsure (1)..(280): unsure at all n locations
  Clone ID: MRT4577_128367C.1
tctaataatatttttctcgatacagatagtcaaactgtttagtctttcttaagacattttagatcttaaataattctttaaagagctccttttcggcctcagtcatacgcacaatcacatgtcgcacattgcaaactcgtttgaaacgatttgctgatggtggcgccacacagttgtcgctaggcgacgagaggcaagnacacgtgaatcgatgcattcactgtccgcatgattggtagccgccctctcgcgcatccgcctcacgctggccaggctcacc

SEQ ID NO: 31093 - DNA, 240 bp, Zea mays
  Clone ID: MRT4577_128368C.1
ccaaaaggttcaaacctaacttacccttgaatgcaaattcaaaccccttcaaaagtgtcaccaaaattaatttcatgggccgtcttttaacaacgtcgtaacgggaaaaaccctgggtttaccaaatttaacccccttgaaaaaaatccccctttcacaaactgggttaataccaaaaaggccccaaccgatcccccttccaaaaaattgcccaccctaaatggtaaatggaaccccccc

SEQ ID NO: 31094 - DNA, 297 bp, Zea mays
  Clone ID: MRT4577_128369C.1
cccactcatctcttgtatcacataccattattgccttttttcttttgcgtgaccaaataattacagcgggaatatcttttaccttgtttggcatcttccacataatcaatttaaacctccacatttggggctaccacaataataattattatgatcaccacaataattcctattttcaccacattaattattaagttgatcaccacattatatacttcttatagcacattgaaggcatcttgtataatatcaagtacaatatcaccgtctaacactgctactagttcttctaccaca

SEQ ID NO: 31095 - DNA, 468 bp, Zea mays
  Clone ID: MRT4577_12836C.1
agatgccgatcgttacagtcgctgctctacgaggatctgcgtcgtaggcgatcataggaccgccggcgcttgaccccagctccccgatcagaatacccacctgctgctcggggtgcatccccgactgggcgttcactccgccattgctgcgcggtcttctggggcaaccgcatcagtccatctctgttgcatcttctctgccagggatctcctacgcaaaccactgttctcccctcgccgtgccatattgcaactcaccatgcgatcctgcgactatgacatccgtatccaacattagagtacgtctaggtgaacagacgagctctgccagcatatatgaactaccactgacactgcttgtaaacaactgacgtttcacgcgtagaacttcagatggagagaagccctctactctccgcctttggacctgtcacagaaggatgagtgcatgcttctgcgcatcgtgag

SEQ ID NO: 31096 - DNA, 637 bp, Zea mays
  Clone ID: MRT4577_128370C.1
ccatcggctccgccgtggacgctgatccagacctaggtctgcgaccgagctacctgccgtcatctcaaatatgataatctctagtgacagggcggggcttgctactattcagaacacagaaccgaaaaatctttagatggggtcaaaaatacgctcgctcgctctgcaaaagcgggttgcacacaagctacctcaagtgtggaaaaggcaaggcgagggttgacccaaatgaagatagagagatctacatggcaaactatggtgaatagtatccgcaagtgggttcaggatgggtgaatcatcaacaagcctaataagcatccactctacatcccgcgcatgacgggcacatgaccgccaagcaaaagggacgccactcatgatatggccaagcgtcagggtaccagggaggctaggctacccaccaaggttctgccgatgacgaggatgcgcgtgctgacgcgccttctacgcaagtatcgggagggcaacatattgacatgcacatgtattatgacatgtacatgaaggtcaaaggtaacgccttgaataacaagagggggcttatgagagagtatccacaagaccaaggctgaaaaggccacatagaagacactttctgaccagcttggaggcc

SEQ ID NO: 31097 - DNA, 636 bp, Zea mays
  Clone ID: MRT4577_128371C.1
atggcacaggggagtgttggtgaggctgggaagatgagcaggggaccggtgggcccggcggctgggcagctgtgcagggggagtggcttggcgttgcgcgcgctagggcgtggggcttggggcggtgcgcatgggagcgcgaggcgcgcaacgcggctgggcgagcgatcctgctcgcgcgccagggcgcaggccgaacggcgaagtgggccgccgcgcgcagggagccggagggagtgccgcgcgcaggggcgagccgccgcgcagggccccctggacgcgacgccgggcgggactgccgagagggtccgtcgaggggagagaggatgggtaagggaagagaggggagaggactcaccgggaaccgccgtgtgcagggacgacagcttctgcgcgatttggatctggggcgatttggatctggggagggagacgagagcggctaacccccttaacaagagcattgatacacacttgatgaagatgcaggcaactctgaacttggctgatcaagagaggttggaggctgccaaccggacaggtgcaagaggaaagggtatggatagaaaaggggaaactactctaaggccatcaaaaggcaaggggaataagaagacatgtagtataggggcatga

SEQ ID NO: 31098 - DNA, 110 bp, Zea mays
  Clone ID: MRT4577_128372C.1
cggccgattcggtcgaccacgcgtcgattagcttattactcagacgcaagaaccgacgcaccatgaggggtgctcgtgccctcgtctctgggtctgctggagcgcactca

SEQ ID NO: 31099 - DNA, 108 bp, Zea mays
  Clone ID: MRT4577_128373C.1
gggacatatattacacaacattatatggatggcactacaaggggtgtgggaaataaggtaccaactactggaactggaaagtgggacagggatattaaggtacatatg

SEQ ID NO: 31100 - DNA, 216 bp, Zea mays
  Clone ID: MRT4577_128374C.1
actcctcccgttgccgcagcacgtagcttcagcgatgctggacgaggcacacgaacgccaaggtcgccacctagacggtgaggagcagcgtccaggcccgtgcgctgcggccagtccgctcctttttcgtgtgcaggccgacctatacgctggcgacgctcgacgacgaagacgccgacttccatcagccagtgtgccaggtatcacacgccccga

SEQ ID NO: 31101 - DNA, 520 bp, Zea mays
  Clone ID: MRT4577_128375C.1
cagctcctgcacacccagaacaccagcctcatcaacaccaagaagaagctggagacagacatttcccagatccagggagagatggaggacatcgtccaggaagcccgcaatgcagaagagaaggccaagatagccatcactgacggccccatgattgccgaagagcttaagaaggagcaggacaccagcgcccacctggagcggatgaagaagaacatggagcagacggtgaaggacctgcagcaccgtctggacgaggctgagcagctggcgctgaagggcggcaagaagcagatccagaaactggaggccagggtccgtgaacttgaaggagaagttgaaaacgaacagaagcgcaatgttgaagctatcaagggtctgcgcaaacatgagagaagagtgaaagaactcacttaccaaactgaggaagaccgcaagaacgttctcaggctccaggaccttgtggacaaactgcaatcaaaggtcaaagcatacaagagacaagccgaggaaccggagg

SEQ ID NO: 31102 - DNA, 5451 bp, Zea mays
  Clone ID: MRT4577_128376C.1
ttcctcggacgttgccaaaaagtatgctcaatcccgtcgactcgtaggattcggtctggcagccggcgaccggcggccctccctccctcacgcagcacgctgcgccgtcgcctccaccccaccctcctctcgcctgccgtcctcccctgccgctgcggcgccgtcgtcgcctcttcctgcaacgccgggaatcgatctgttgcggccgcttccctgacgtcgagaggaggacggctgcgccatcttctccaccacaccgcgcccgtcttcaccttcgcgttcacgcaatgaggatgcccagcggcgggccggtgtggatctgaggccaccaccgcctaagcatcgcccgatcctgtttgtaccctgtcaacggccactagcccaccaccgttatagacccgctcgataaaacatatgagtgaagattataccaaagacggagagtggagcggagcgacgacgaaggatgagtagtagagtggagtggaagccttgtcttcgccgaagactccaattccctttcaatacacctatgacttggtttgaaattcacttgaaaacacattagtcatagcatataaaagagatatgatcaaaggtatattcatgagctatgtgtgcaaaacatcaaaagaaattcctagaatcaagaatatttagctcatgcctaagtttgttaaaagtttgttcatctagtggcttggtaaagatatcggctaattgttctttagtgttaatataagcaatctcgatatcccccttttgttggtgatcccttaagaaatgataccgaatggctatgtgtttagtgcggctatgctcaacgggattatccgccatgcggattgcactctcattatcacatagaagaggaactttggttaatttgtaaccatagtccctaagggtttgcctcatccaaagcaattgcgcgcaacaatggcctgcggcaatatactcggcttcggcggtagaaagagctacggaattttgcttctttgaagcccaagacaccagagaccttcccaagaactggcaagtccccgatgcgctctttctatcaattttacaccccgcccaatcggcatccgaataaccaattaaatcaaatgtggatccccaaggataccaaagcccaaacttaggagtatgaactaaatatctcaagattcgttttacggccgtaaggtgagcttccttagggtcggcttggaatcttgcacacatgcatatggaaagcataatatccggtcgagatgcacataagtagagtaaagaacctatcatcgaccggtataccgtttgatcaacggatttacctcccgtgtcgaggtcgagatgcccattggttcccatgggtgtcttgatgggtttggcatccttcatcccaaacttgcttagaatatcttgagtatactttgtttggctaatgaaggtgccctcttggagttgcttcacttgaaattccaagaagtacttcaactccgccatcattgacatctcgaacttttgtgtcatgatcctactaaattcctcacatgtagattcgttagtagacccaaatataatatcatcaacataaatttggcatacaaacaaatcattgtcaagggttttagtgaaaagagtaggatcggcctttccgactttgaatccattagtgataaggaaatctctaaggcattcataccatgctcttggggcttgcttgagcccataaagtgccttagagagtttgtatacatagttagggtactcactatcttcaaagccgggaggttgctcaacatagacctcttccttgattggtccattgaggaaggcactcttcacgtccatttgataaagcttgaagccatggtaagtagcataggccaataatatacgaattgactcaagcctagctacgggtgcataagtttcaccgaaatccaaaccttcgacttgggagtatcccttggccacaagtcgggctttgtttcttgtcaccacaccatgctcgtcttgcttgttgcggaacaccaacttggttcctacaacattttgattaggacgtggaaccaaatgccatacctcgttcctagtgaagttgttgagctcctcttgcatcgccaccacccaatccgaatcttgaagtgcttcctctaccctgtgtggctcaatagaggaaacaaaagagtaatgttcacaaaaatgagcaacacaagatctagtggttacccccttatgaatgtcgccgaggatggtgtcgacggggtgatctcgttggattgcttggtggactcttgggtgtggcggtcttagttcttcatcctctttgtcttgatcatttgcatctcccccttgatcattgtcgtcatcttgaggtggctcgtctctttgatcttctccttcatcaacttgagcctcatcctcattttgagttggtggagatgcttgcgtggaagaggatggttgatcttgtgcatttggaggctcttcggattccttaggacacacatccccaatggacatgttccttagcgtgatgcacagagcctcttcatcacctatctcatcaagatcaacttgctctacttgagagccgtgagtttcatcaaacacaacgtcacaagaaacttcaacttgtccagaggacttgttaaagactctatatgcccttgtgtttgaatcatatcctagtaaaaagccttctacagtcttaggagcaaatttagattttctacctcttttaataagaataaagcatttgctaccaaagactctaaaatatgaaattttgggctttttaccggttaggagttcgtatgatgtcttcttgaggattcggtgtagatacagccggttgatggcgtagcaggcggtgttgaccgcctcggcccaaaaccgatcagaagtcttgtactcatcaagcatggttcttgccatgtccaatagagttctattcttcctctccactacaccattttgttgtggggtgtatggagaagagaactcatgcttgatgccctcctcctcaaggaagccttcaatttgagagttcttgaactccgtcccattgtcgcttctaattttcttgatccttaagccgaactcattttgagcctgtctcaagaatccctttaaggtttcctgggtatgagatttttcctgcaaaaagaatacccaagtgaagcgagaataatcatccacaataactagacagtacttactcccgccgatgcttatgtaagcaatcgggccgaataggtccatgtgtaggagctccagcggcctgtcagtcgtcatgatattcttgtgtggatgatgagcaccaacttgctttcctgcttggcatgcgctacaaatcctgtctttctcaaaatgaacatttgttaatcctaaaatgtgctctccctttagaagcttatgaagattcttcatcccaacatgggctagtcggcggtgccagagccaacccatgttagtcttagcaattaagcaagtgtcgagttcagctctatcaaaatctaccaagtatagctgaccctctaacactcccttaaatgctactgaatcatcacttcttctaaagacagtgacaccttgatttccatccccgaatgtgatagctcgttggggtcttagtttttctcgtaggaggagaacatcttcttctcccctgtcatgtggtttgtgcacccgctgtcgatgatccaacttgagcccccggatgcataaacccttatacataaaagcatggttagagccagagtgagacttcctagaatgaattctcctaattttgctctcgggataaccggcagggtacaaaatgtaaccctcgttatcctgaggcatgggagccttgcccttcacaaagttggacaattttttaggaggggcattaagtttgacatttcctccctgttggaagccaacgccatccttaatgccagggcgtctcccattataaagcatactacgagcaaacttaaatttttcattttctagttcatgctcggcaattttagcatctaatttagctatatgatcattttgttgtttaatcatggaaaggtgatcatgtatagcattaacatcaacatctctacatctagtacaaatagtgacatgctcagtggtagatgtagagggtttgcaagaattaagttcaacaatcttagcacgcaatatatcatttttatctctaagatcggaaattgtaatattgcaaacatcaagttctttagccttagtaagcaatttttcattctcaatcctaaggctagcaagagaaatgtttaattcttcaatcttatcaagcaaatcatcattatcatttctaagattgggaattgaaacatcacaaacatttgaatcaaccttagctaacaaattagcattctcatttctaagtttgtctatagtctcatggcaagtgcttagctcactagatagtttttcacatttttctacttctagagcgtaagcatttttaaccttaacatgctttttgttctctttaataaggaagtcctcttgggtgtccaagagatcatccttctcatgaatagcactaatcaattcatttaatttttctttttgttgcatgtttaggttggcaaaaagaatgcgcaagttatcctcctcattgctagcatcatcctcatcactagaggtttcatatttagtggaggatcttgattttaccttcttctttttgctgacctttgccatgaggcacttgtggccgacgttggggaagagaagacccttggtgacggcgatgttggcggcgtcctcgtcgaaggaagagtcagaggagctcttgtccgagtcccattcgcggcatacatgggcatcgccacccttcttcttgtagtatctattcttctcctttcttcttcccttcttgtcgtcgcccctgtcactgtcactagaaataggacattttgctataaagtgaccgggcttaccacacttgtagcaaactttcttggagcggggcttgtaatccttccccctcctttgcttgaggatttggtggaagctcttgatgatgagtgccatctcctcattgtcgagctttgaggcgtcgattggttgtctacttgaagtagactcctccttcttttcctccatcgctttgaatgtgactggttgagcttcggacgtagaggggccatcaagctcgttgatcttctttgagcctttgatcatcaatttaaagctcacaaagtttcctattacctccttgaccatctcatggtcatcccatttcttgctcccgaggttgcgcacttggttcaccaaggttttgagccggttgtacatatcttgtggctcctccccttggcgaagttggaagcgtccgagctccccctcgatcgtttcccgcttggtgattttggtcacctcgtctcctttgtgcgcggtctttagcgtgtcccaatgtgacacgccagatgt

SEQ ID NO: 31103 - DNA, 2607 bp, Zea mays
  Clone ID: MRT4577_128377C.1
cgagtacaagcttttttttttttttttttttttttttttttttattattgtttataccaaacatgataatgtgtgaccttttactgcattataaaaaatatatatagatagagatggagagaggagaacccccaaaaaaaaaaaaggaacgggcgcgtggggtataattgtacccctcgaggccggccgggtcgcgggtttcatttcttccccccttctctcgtcacgtgcaataaaaaggggggaaaacttctttctctttttttttccctcccccgcccgaatctgatgcttaaaccctcgccgggaggaggattccaatcccgacgcaccagcccgcgcccgccacctacagccgcgcccggatctccgccatggccgccgcgccgcaccaggcccagggccccgcagatagtgtgattccgctgcagtctgaacctgcacttgataataatccctccaagagtgcaaacgctagggaccagattctttctggtacggagaatgtgactacaggcaatgcacgcggcggcagctccttgaaatcgcaaaaaggcccgccagagaaggctagctctgtcggaaaacctggagaacaaccttttccctaccatcaaaatgtgtatgcaccacagccacaaccactctatcctggaggctacatgaacccttcaggacaatgggaggaatatccccattatgtgagtatggaggggctccattccgtatctcccggaatctacaatgacaaccagtccctcatgctatctcctggatatgcaaacaatccccaaatgatgtatggagcatattctcctgtttccaccgttggggatggccaacaatacctccctatgcattttcccttctcaagtccttactatcaaccaccagcttctcctagcatgggatattcaagctctgcgactggaatatcccaaggagaccctatgctgcagcaagagtacttccttcctgatggtcttctatattcacccacacaagggtatcatcaaccattcagctcattcgacagagcaccaacacaactaaataatgctcctgggttgtttggtcaagggaatctaccactggcttctggaatgcaccatggatcgatgtatggtcctggatcctacaagggacgccagcaaggtagcaaatttggtggcagtactacaagttggagttctgctggccgcagatttggtactatcgacttgagtggcaatcaacaaaggggcagcatgccatttggtagtcacaatggctctctggagtttatgaatgagcaaaaccgtgggccacgcgctacaaaaccgaagatacaaggcacagagaacacctcaggagatgagagaagcgagaaaattgttcctctgattgatagcgaactgtacaatcgctctgattttataactgagtacaaggatgccaaattctttgtaataaagtcctacaccgaggaccatgtacataggagcattaagtataaagtttgggccagcacagccagcgggaacaggaagctggattctgcttaccatgcagccaaagagaaagaagagcattgccctattttcttgtttttctcagttaatggaagtggccaattctgtggcgtggctgagatgattggacctgtcgatttcgacagaagtgttgattactggcagcaggataagtggagtggccagttccctgtgaagtggcacataattaaggatgtaccgaacaaccttctgcggcacatcattcttgagaacaatgacaataagcctgtcacaaatagcagggacacccaggaggtgaagctggaacagggcctccagatgctaacaatcttcaagagccatgaggctgagacaacaattgtggaagatttcgacttctatgagcagcgggagaaagccttgcaggagaacagacgtcaacagcatgctgccagcaccgatactcagaaactggtggataccaaggctcaagatcctgtggccgacatatcagatgcatttgccaaggccgtccagttgaagaatactgagaacagtgggacaacccccaaaactgagggtgcttcagctgaaaagggttccgctgccacagccaaggttgaaggaagtgcaaacctgaacacaggccctgtggaggaaagcagttgattcgtttcccttctatctgcaaatttggagcagcagatgaatagcatggtgcgatgtgaaggtcagaaaggggaaggtgtgttgaatatggtcgtgcccccgtcagttgtacaacatcataggctttcttttatggccatttaggttataaaatttcaatatcatagttccaaaattgttgttcccggttgtcttcgttcctgttctgttttgcttccgtcttccatgttcctgtgtcgtaccatgaatgatggttcaatttagtgggtttaggcataagaagctgcagaattatgccgcggtaaaagttgcattttctgcagctgaatgtgatactctgcactgtctccatccttgtgtaatttcagagatcctttctgtatcctcttgttgctctaaaaaaaaacaaaaaaaaaaaaactcgagactagttctctcctcgtgc

SEQ ID NO: 31104 - DNA, 5001 bp, Zea mays
  Clone ID: MRT4577_128378C.1
ttagagccctctttggtatttttctttctctttggtcataaatgaatgagttaagattataccaaagacgaagtcaggtccttttgcttttgagcttttactctctcccccaaggatgaagtccttttctttgatgctcatttctcccccaaagaatagagagttgctcggagtgatggtgaagtatgagttacggagtggaagcctttgtcttcgccgaagactccaatttcctttcaatatacctatgacttggtttgaaatagacttttgatcgacggatttacctcccgtgtcgaggtcgagatgcccattggttcccatgggtgtcttgatgggcttggcatccttcattccaaacttggttagaatgtcttgagtgtactttgtttggcaaatgaaggtgccctcttggagttgcttgacttggaatcctagaaaatacttcaactcccccatcatcgacatctcgaatttctgtgtcatgatcctactaaactcttcacatgtagactcgttagtagacccaaatataatatcatcaacataaatttggcatacaaacaagtcattttcaagagttttagtaaagagtgtaggatcggccttgccgactttgaagccattagaaataaggaaatctcttaggcattcataccatgctcttggggcttgcttgagcccataaagcgccttagagagcctatagacatggttagggtactcactgtcttcaaagccgggaggttgctcaacatagacctcttccttgattggtccgttgaggaaggcacttttcacgtccatttgatagagcttaaagccatggtaagtagcataggccaataatatgcgaattgactcaagcctagctacgggtgcataggtttcaccgaaatccaaaccttcgacttgggagtatcctttggccacaagtcgagctttgttccttgtcaccacaccatgctcgttttgcttgttgcggaagacccatttggttcctacaacattttggttaggacgtggaactaaatgccatacctcgttccttgtgaaattgttgagctcctcttgcattgccaccacccaatccaaatcttgaagtgcttcctctatcctgtgtggctcaatagaggaaacaaaagagtaatgttcacaaaaatgtgcaacacgagatcgagtggttacccccttatgaatgtcgccgaggatggtgtcgacggggtgatctcgttggattgcttggtggactcttgggtgtggcggccttggttcttcctcatcctccttttcttgatcaattgcatctcccccttgatcattgccatcatcttgaggtggctcatcttctttattttgcccttcatcaacttgagcttcatcctcattttgagttggtggagatgcttgcatggaggaggacggttggtcttgtgcatttggaggctctttggattccctaggacacacatccccaatggacatgttccttagcgctatgcatggagcctgttcttcacctatctcatcaagatcaacttgctctacttgagagccgttagtttcatcaaacacaacgtcacatgagacttcaactagtccagtggacttgttaaagacccgatatgcccttgtgtttgagtcataaccaagtaaaaagccttctacagttttaggagcaaatttagattttctacctcttttaacaagaataaagcatttgctaccaaaaactctaaaatatgaaatgttgggctttttaccggttaggagttcatatgatgtcttcttgaggattcggtgaagatataaccggttgatggcgtagcaggcggtgttgactgcttcggcccaaaaccggtccggtgtcttgtactcatcaagtatggttcttgccatgtccaatagagttcgattcttcctctccactacaccgttttgttgtggtgtgtagggagaagagaactcatgcttgatgccctcctcctcaaggaagctttcaatttgagagttcttgaactccgtcccgttgtcgcttcttattttcttgatccttaagccgaactcattttgagcccgtctcaagaacccctttaaagtctcttgggtttgagatttttccaagtatagctgaccctctaacactcccttaaaagctattgaatcatcacttcttctaaagacagtgacaccttgatttccatccccgaatgtgatagctcgttggggatcttggtttttctcatatgaggagaacatccttttctcccctgtcatgtggtttgtgcacccgctgtcgagtatccaacttgagcccccggatgcataaacccaaatggttttgggtcctttggcattagacacaagaactttgggtacccaaacacaagtccttgaccccttgtgcttgctcccaacatatttggcaactactttgccggatttgttagtcaacacataagaagcatcaaaagttttaaatgaaatggcatgatcatttgatgcattaggagttttctttctaggcaacttggcacgggttggttgcctagagctagatgtctcacccctatacataaaagcatgattagagccagagtgagacttcctagagtgaattctcctaattttgctctcgggataaccgacagggtacaaaatgtaaccctcgttatcctgaggcatgggagccttgcccttaacaaagttagataagttctttggaggggcattaagtttgacattgtctcccctttggaagccaatgccatccttgatgccagggcgtctcccattataaagcatgctacgagcaaatttaaatttctcattctctaggttgtgctcggcaattttagcatctaattttgctatatgatcattttgttgtttaattaaagccatatgatcaagaatagcattaacatcaacatctctacatctagtgcaaatagaaacatgctcaacattagatgtagagggtttgcaagatttaagttctacaaccttagcatgcaacatttcattcttagttctaaggtcggaaatagtagtgttgcaaacatcaaaatctctagccttagcaattaaattttcattctctaatctaaggctagcaagagatacattcaattcatcaatcttagcaagcaagtcaatattatcatctctaagattgggaattgaaacattacaaacatgtgaatcaaccttagcatttaaaatagcattttcatttctaaggttgtcaatcatctcacggcatgtgcttagctcactagacaatttttcacatttttctacttctagagcataagcctttttaaccttaacatgtttcttgttttctttaattagacaatcctcttgggagtccaaaaggtcatccttttcatgaatagcactaatcaattcatttagtttttctttttgctccatgttaagattggcaaagagaatacgcaaattatcctcctcatcactagcattatcatcactagacgattcatatttagtggaggagttggatttaaccttcttcttcttgccgtcctttgccatgaggcacttgtggccgacgtttgggaagagaagtcccttggtgacggcgatgttggcggcgtcctcgtcgtcggaggagtcgcttgagctctcgtcggagtcccactcgcgacaaacatgggcatcgccgcccttcttcctgtagtacctcttcttctcctttcttctccccttcttgtcgtcgcctcggtcactgtcactagacataggacatttagcaataaaatgaccgggcttaccacatttgtagcaaaccttcttggagcgggacttgtagtctttccccctcctttgtttgaggatttggcggaagctcttgatgacgagcgccatctcctcattgtcaagcttggaggcgtctattggttgtcgacttggtgtagactcctccttcttttcttccgtcgccttgaatgcaacgggttgagcttcggatgggtcgccaagctcgttgattttcctcgagccttctatcatgcactcaaaacttacaaaatgcccgataacttcctcgggggtcattttagtatatctaggattaccacgaatcaattgaacttgagtgggatttagaaaaatgagagatcttaaaataacatttaccacttcatggtcgtcccacttcttgctcctgaggttgcgcacttggtttaccaaagtcttgagccggttgtacatgtgttgtggctcctcccctttgtgaagccggaaccgaccgagctccccctcgatcgtttcctgcttggtgatcttggtgagctcatctccctcgtgcgcggttttgagtacatcccaaacctccttggcgttcttcaacccttgtactttgttatattcctctttacttagtgaggcgaggagaattgttgtggcttgtgagttgaagtgctcgatttgggctacctcatcctcatcatagttctcatcccctacggatggtacctgcgcaccaaactcaacaacatcccatatgcttttgtggagcgagattagatgaaatcgcattaaatcgctccacctagcgtaatcttcaccatcaaaagttggtggtttgcctagtgggacggaaagtaaaggtgtatgtttggaaatgcgagggtagcgtagggggatcttactatacttcttgcgctcttggcgcttagaagtgacggagggcgcatcggagtcggaggtcgatgttgatgaagtgtcggtctcgtagtagaccaccttcctcatccttttgtgcttgtcgcctttccgatgcggcttgtgggaagaagatttttccttcttctctttgtggtgagaagaagatttcttctccttccctttgttggaggagctcttcttcttctccctccttttggtgcgggactcttccgatgaagtgcttttgtggcttgtagtgggcttttcgccggtctccatctccttcttggcgtgatctcccgacat

SEQ ID NO: 31105 - DNA, 1068 bp, Zea mays
  Clone ID: MRT4577_128379C.1
ccggccgggcagctcatttgacagaggtagtgtttctcttctaaagtttctacttttcctgtaggcaaaatttttatgactgcaaacaatatgtgttataatgtactacctccgttattatttatttgacgccatatagtttaactttgtgctggcagacgtcaaataaaaacggacggagggagtagtgcttaaagccatgcctgactttgttttgaccttttgcagcactgacacagccaaataatgctcctgggttgtttggtcaagggagtctaccactggcttctggaatgcatcatggatcgatgtatggtcctggatcctacaagggacgccagtatggtagcaaatttggtggcactactccaagttggagttctgctggccgcagatttggtactttcgacttgagtggcaatcaacaaagggggagcatgtcatttggtagtcataatggctctctggagtttatgaatgagcaaaaccgtgggccacgtgctacaaaaccaaagatacaagacacagagaactcaggagatgagaaaagcgagaaaactgttcctctaattgatagtgaactgtacaatcgctctgattttatcactgagtacaaggatgccaaattctttgtaataaagtcctacaccgagcggccgcccgggcaggtacataggggcattaagtataaagtttgggccagcacagccagtgggaacatgaagctggattctgcttaccatgcagccaaagagaaagaagagcattgccctattttcttgtttttctcggctatataaattcaagtaggaatgcaggatggggtgcattcaactcatgcaggtggcaggttcgtatgcaggtggcaactgctatattctgcatctttcgtatgttttgtcacacgaggtcgttcagggcgtattaggttaatggaagtggccaattctgtggcgtggctgagatgattggacctgtcgatttcgacagaagtgttgattactggcagcaagataagtggagtggccagttccctgtgaagtggcacataattaaggatgtactcgg

SEQ ID NO: 31106 - DNA, 247 bp, Zea mays
  Clone ID: MRT4577_12837C.1
gtctttcttacgcctgcgccatgataaccaacagcggtcttatttgaacgatagtggagttctacgccgcttcaataatagcgccagtcaaaaaataggacactatacaggcaatgaaatgaaatgagcaaaagtgagtacatgaaacaagcaaatctgaccccaaatcacaatggcgatgtgactgttactgacctacacacctggctgtgagggatactcggagagaaatgttcaagtgcttcct

SEQ ID NO: 31107 - DNA, 326 bp, Zea mays
  Clone ID: MRT4577_128380C.1
atttctggcaaggcacacactgacaacataatctattattgcactatacgcataagagactcaaagagggcacgaccaatagctgggacgacgggagatcactagaacggggttgccaaatccagatgggggggggggggaaaattcaagcaattggctgcatttaactgtgttaatgattggtgatgatgaatataattaagggagttaaatgatgcagatggttgaaaggaataaaatgttgatgatgggagttggacaaaaggattagtggtataagaagaagtaattgttgggggtggatgttttgagattactaatgagtt

SEQ ID NO: 31108 - DNA, 233 bp, Zea mays
  Clone ID: MRT4577_128381C.1
ttttatgatttttttttttttttggacaaaaacagcggcgcccgttttgattacacacagtacgaaatgaacagcggactttaacaggcggcatgtgacccgaaaataaggttaaatggacatctcagttcattttttgactataaaaattgaaaactgcccaattcacaaatggcggaacgggagaactcgactactggtatctggaggtgttggaccctacaaactttttt

SEQ ID NO: 31109 - DNA, 433 bp, Zea mays
  Clone ID: MRT4577_128382C.1
caactccgcgccgttttctcgttgtcacccgccctgctcttctcaccaatagtgcagccggaagacaaacaaggcagtaggggatcgcatcgcatggcgacgaggccggcagcggaggggaagccgtgggagctggcggcgcacccgcggctgcccaagggcaggacggtggccgtggtggtgctggacggctggggcgaggcggcgcccgaccccttcaactgcatccacgtcgccgacacgcccacgctcgacgccctcaagaaggcagctccggagagatggaggctcatcaaggcgcacgggacggcggtggggctgccgacggacgacgacatggggaacagcgaggtcggccacaatgcgctcggagcgggacagatatacgcgcagggcgcgaaactggtcgatctggcgctgggttccggaagat

SEQ ID NO: 31110 - DNA, 618 bp, Zea mays
  unsure (1)..(618): unsure at all n locations
  Clone ID: MRT4577_128383C.1
tcgaggccggccgggggtntttcatcttccccccttctcgtcacgtgcaataggggggaaaacttctttctctctcttttttttccctcccccgcccgaatctgatgcttaaaccctcgccgggaggaggattccaatcccgacgcaccagcccgcgcccgccacctacagccgcgcccggatctccgccatggccgccgcgccgcaccaggcccagggccccgcagatagtgtgattccgctgcagtctgaacctgcacttgataataatccctccaagagtgcaaacgctagggaccagattctttctggtacggagaatgtgactacaggcaatgcacgcggcggcagctccttgaaatcgcaaaaaggcccgccagagaaggctagctctgtcggaaaacctggagaacaaccttttccctaccatcaaaatgtgtatgcaccacagccacaaccactctatcctggaggctacatgaacccttcaggacaatgggaggaatatccccattatgtgagtatggaggggctccattccgtatctccctccctcatgctatctcctggatatgcaaacaatccccaaatgatgtatgaagcatattctcctgtttc

SEQ ID NO: 31111 - DNA, 1831 bp, Zea mays
  Clone ID: MRT4577_128384C.1
atggcaagaaccatgcttgatgagtacaagacttcggatcgattttgggccgaggcggtcaacaccgcctgctacgccatcaaccggttgtatctacatcgaatcctcaagaagacatcatatgaactcctaaccggtaaaaagcccaatattttatattttagagtctttggtagcaaatgctttatacttgttaaaagaggtagaaaatctaaatttgctcccaagactgtagaaggctttttactaggatatgattcaaacacaagggcatatagagtctttaacaagtcctcagggctagttgaagtttcttgtgacgttgtgtttgatgagactaacgactctcaagtagagcaagttgatcttgatgagataggtgatgaagaggcttcgtgcgtcgcgctaaggaacatatctattggggatgtgtgtcctaaggaatccgaagagcctccaaatgcacaagatcaaccatcctcctccacgcaagcatctccaccaactcaaaatgaggatgaggctcaagttgatgaaggagaagataaaaaagatgagccacctcaagatgacggcaatgatcaagggggagatgcaaatgatcaagacaaggaggatgaggaaccaagaccgccacacccaagagtccaccaagcaatccaacgagatcaccccgtcgacaccatcctcgacgacattcataagggggtaaccactagatatcgtgttgcacatttttgtgagcattactcttttgtttcctctattgagccacacagtgtagaggaagcacttcaagattcggattgggtggtggcgatgcaagaggagctcaacaacttcactaggaacgaggtatggcatttggttccacgtcctaatcaaaatgttgtaggaaccaagtgggtcttccgcaacaagcaagacgagcatggtgtggtgataaggaacaaagcccgacttgtggccaagcgatattcacaagtcgaaggtttggatttcggtgaaacatatgcacccgtagctagacttgaatcaattcgcatgttacttgcctatgctacttaccatggctttaagctttatcaaatggacgtgaaaaatgccttcctcaatggaccaatcaaagaagaggtctatgttgagcaacctcccggctttgaagatagtgagtaccctaaccatgtctataaactctctaaggcgctttatgggctcaagcaagccccaagagcatgaatttagtaggatcatgattcaaaaattcgagatgtctatgatgggggagttgaagtatttcttaggatttcaagtaaagcaactccaagagggcaccttcattagccaaatgaagtacattcaagacatactcaccaagtttgggatgaaggatgccaagcccatcaagacacccatgggaaccaatgggcatcttgacctcgacacgggaggtaaatccgtagatcaaaaggcagggtgtaagattgatagaaagagcacatcagggacttgccagttcttaggaagatctctggtgtcttgggcttcaaagaagcaaaattctgtagctctttctaccgccgaagccgagtacattgccgcaggacattgttgcgcgcaattgctttggatggggcaaacccttagggactatggttacaaattgaccaaagttcctcttctatgtgataatgagagtgcaatccgcatggcggataatcccgttgagcacagccgcactaaacacatagccattcagtatcactttttgagggatcaccaacaaaaggggatatcgagattgcttatattaacaccaaagaacaattag

SEQ ID NO: 31112 - DNA, 1719 bp, Zea mays
  Clone ID: MRT4577_128385C.1
cttagcttttccatctccttttctcctccaccgaaaatgattcgatttggcgatttttttctctctctctctcactctaaaaccgcccattttttcagctataaatggccccctcgtccatgcttcgggggaaggccctttccccctctccccgaactcccttgctaggttaccacgttcttctgcccttcaggccctccctcatctgatcatctctctcactctttcagtagcagcgcagttttgttactgacacacgccccctgtcctgcctgtctgtgttgacctgatagtactagcaaagtttggagactccatccaacctcttgtctctgaaacttggacttgttgccgatcccaaggggaggttctgccaaaatttcggcttctgaacatccatttccagaggggatcgagggaggttctgccaaattttgctcctttgatcataagtttcccagggggaggttctgccgaaatttcatctcctgtgctgtgacgaccatcagctttccagggggagagggggagattctgccgaagttttgtgggctgaccatcagtcttccaagaggaggttctgccgaaattcccttctctcatcatcacttctccaaggccaagcagtcctcctggtcctgccgaagtgttctctgaacaagagggcatgcatgcactccttcttgtccctgatgttagactagctagctagcactagcagagactgaggccgcagcgtctgttgagaattcagatgttgttgttgctcgtcctgtccgagcacctcctcctgtccggatttatgatcggttccgccataacccgcctcgtccagtccttctctgtcgttttcctctactggttctatgtcttctcagtgagctgccactgccagtagtgccagtagttgatctcacctttttcaagtattaataactcggcactataacaaagaggtagctagctatgtcaagtggaagctcgtttgggtcgagccagtggactcagagatccaggtcggcggaggatgacgtggacctggacctccaggccgagatggagaagaggaggaagcgaaggaaggagtcgaaccgagagtcggctcggaggtctaggctaaggaagcagcaacaccacgacgacctcacgtcacaggtagatcagctgaagggccagaacaagcagaactctgtcctgcagacccagaggatggagctggccagcaggctgggagccctgaccgagatcctatggtgcatcagctcaagcaccggcactgctgctcctacgaatccagccatggcggacggcatcacgacgacatggagctggagcgacgcctctggtgatattcttggcgccagcgcatggaaccagcagcagcagcccatagacgcgtaccggtgctaatagagataatgcggaggaaaggaggcttgttgcttctccatcgtttgttttggaggcgacggcgacgttttggtttcttgattgcggacgagcctaaaggatggacaatggcaactttgccttggctttctgtgacgtgaatgcagcgcagttgttctcttgtagttgagggagtatatatagtaggaaataataatattgggccagatagtgaaagagaggtaggtgattttaaagctcctcagtagatatgtataagggagagttatatgcgcaatgatgatgataaaatgctgactaagctgtcgt

SEQ ID NO: 31113 - DNA, 1404 bp, Zea mays
  Clone ID: MRT4577_128386C.1
gctcgctgccggccgggccggggtttcttttcttccccactcctctcgtcgcgtccaataaaaaggggggaagagcattttcccttttttttgctcccctcccccctcgcttcccccgaatttgatgcttaaaccctcgccgggaggaggaggactccacgcgcgagcccgcccgcgccacctaccgccgcgcccggatccccgccatggccgccgcgccgcaccgggcccaggtccccgctgatagcacggctccgttgcagacggggcctgtacttgagaataacccctccaagagtgcaaacgccaaggaccagattctttctggtacagagaatgtgactacaggcaatgcacgtggcgctagctccttgagatcgccaaacggcccaccagagaaggctagctctgtcggaaaagctggagagcaaccttatctctaccagcaaaatgtgtatgcaccacagccacaaccactctatcctggaggatacatgaacccttcaggacaatgggaggaatatccccattatgtgaatatggaggggctccattccgtatctcccggaatctacaatgacaaccagtccctcatgctatctgctggatatgcaaacaacccccaaatgatgtatggagcatattctcctgtttccactgctggagatggccaacaatacttccctgtgcactattccttctcaaatccttactatcaaccaccagcttctcctagcatgggatattcaaactccgcaactggaatgtcccaaggagaccctatgctgcagcaagagtacttccttcctgatggtcttctatattcacccacacaagggtatcatcaaccattcagctcattcgacagagcaccaacacaactaaataatgctcctgggttgtttggtcaagggaatctaccactggcttctggaatggtatgctgtcatgcaattgagttttgagcatacatgggtatactacatttggttgtttgttatggggattcaagaagggtttatatttagaggcaatatttggtttaccatgcagtagttatttgtggaagtcaattttgacttgtttatgttaatgcaccacttattgtccagcgctgataatgtatgttgttgcagcaccatggattgatgtatggtcctggatcctacaagggacgccagcaaggtagcaaatttggtggcagtactacaagtttggagttctgctggccgcagatttggtactatcgacttgagtggcaatcaacaaaggggcagcatgccatttgggtagtcacaatggctctctggagtttatgaattagcaaaaccatgggccacgcgctacaaaatcgaagatacaaggcacagagaacacctcaggagatgagagaagcgagaaaat

SEQ ID NO: 31114 - DNA, 583 bp, Zea mays
  unsure (1)..(583): unsure at all n locations
  Clone ID: MRT4577_128387C.1
gcgtttcggnctagttctagnacgcgagcggacgctctttgtcgtttttatttaggtttgcggcgtgacattcaggacattatggattacaaagaatttaacactgtcaacaagttgttccagtttgctatgcttgcagagacggaattgcagggacgccaacatcgacctagggctacttttggcgcctcctctacatcacggacgcacacacctgcctcgagtcatacaccttcgaccactccagcgtccacgcgacctccctcgacacctgctgcacatgttggtaaccttcctttgcaggtacccaccaagaaacataattcactagcacctgcagcaacttccagtggtcgttcttcgggtattgtttgccaccgctgtcatgggattggtcacgtgaagaaggattgcccgagtcagcgaacatacattgctacggatgatggctacattagtacttccgacgctgagggtgacgatgatgactccagtgatgttgctgccaatgatgatgccatgcttggtgctgatgctatagtgaaccttcgaagcatcatggtgcagcgtgttcttagttctc

SEQ ID NO: 31115 - DNA, 3603 bp, Zea mays
  Clone ID: MRT4577_128388C.1
gactctagagccacccctaaatatacaacatctagtgatgagggtggctctagtgaagacaaagatgatttacttactctttttgccgaccttaacatgaaacaaaaagaaaaattgaatgaattaatagaagctattcatgagatggatgatctcttggaaagccaagaggacttccttattaaagaaaacaagaaacatgttaaggtgaaaaatgcttatgctcaggaagtagagaaatgtgaaaacttgactaaggagcttaccatttgtcatgaatcaattactagcctcagaaatgaaaatgctagcttagtttctaaggttaaagatttaaatgtttgtaatgattcaatttctagtcttagaaatgagaatgctagtttggtttctaagattaaaaaattgaatgtttgcaatgattccatttcctatcttagaaatgaaaatgccatgttaaaatctaagatagaagaattaaatgtttgcaaaccctctacatctactgttgaacatgtttctatttgtactagatgtagagatgttaatgttgatgctataaatgatcaccttgctctaattaaaaacaaaatgatcaaatagctcaattaactgctaaaatcaatgagcatgaaattgaaaatgaaaagtttagatttgcaagaagcatgctctataatgggagacgccctggcattaaggatggcattggtttccaacagggtagcaatgtcaagcttaatgcccctaagagattgtccaactttgttaagggcaaggctccatagtcaggataacgagggttacattttatatcctgctagttatcctgagcataaaattaggagaattcattctaggaagtctcattctggttctcatcatgcttttatgtataagaatgagacatctagttctaggcattccacccatgttaaaatgcctaaaaagaaatctcctgttgcatcaaatgagcctaatgtttcatttaagacttttgatgcttcttatgttctaactaataaatcaggcaaagtagttaccaaatatgttgggggcaaacacaagggctccaagacttgtgtttgggtacccaaggtttatgcatccaggggctcaagttggatcattgatagcggatgcacaaaccacatgacaggggagaaaaggatgttctcctcctacgagaaaaacgaagattcccaaagagctatcacgttcgaggatggaaatcaagatttatgtgttactgtctttagaagaagtgatgattcggtagcatttaagggagtattagagggtcagctatacttagttgattttaatagagctgaactcgatacttgcttatttgctaagactaatatgggttggctctggcatcgccgactagcccatgttgggatgaagaatcttcacaagcttctaaagggagaacacattttgggactaaccaatgttcattttgagaaagacagggaaaaatctcaaacccaagaaactttaaagggattcttgagacgggctcaaactaagtttggattgagaatcaagaagataagaagcgacaacgggacggagttcaagaactctcaaatagaagtctttcttgaggatgagggcatcaagcatgagttctcttctccctacacacctcaacaaaatggtgtagtggagaggaataatagaactgtactggatatggcaaggaccatgcttgatgagtacaagactccggaccggttttgggctgaggcgattaacaccgcctgctactccatcaaccggttatatcttcaccgaattctcaagaagacatcatatgaactcctcaccggtaaaaagcccaatgtttcatatttcagagtctttggtagcaaatgttttattcttgttaaaagatgtagaaaatctaaatttgctcctaaggttgtagaaggctttttacttggttatgactcaaacacaagggcatatagagtcttcaacaaatccactggattagttgaggtttcttgtgacattgtgtttgatgagactaatggctctcaagtagagcaagttgatcttgatgagctagatgatgaagaggcttcgtacgtcacgctaaggaacatgtccattggggatatgtgtcctaaggaatctgaagagcctccacaagcacaagatcaaccatcatcttccatgcaagcatctccaccaacccaagatgaggatcaagctcaaggtgatgaaaatgaagatcaagaggatgagccacctcaagaggaggacaatgatcaagggggggacaacaatgatcaagacaaggaagatgatcaagaaccatacagggtggaagatgcattaagagattcagattacatgttggcaatgcaagaggagctcagcaacttcacgaggaatgaggtatggcatcttgttccacgtcctaaccaaaatgttgtaggaaccaagtgggtattccgcaacaagcaagatgagcatggtgtggtaacaaggaacaaagcccgacttgtggccaaaggatattcacaagtcaaagcttttccaaatgacgtgaaaagtgccttcctcaatggaccaatcaaggaagaggtctatgttgagcaacctcccggctttgaatatagtgagtaccctaatcacgtttataaactctctaaggcgctttatgggctcaagcaagccccaagagcatggtatgaatgcctaagagattttcttatcactaatggcttcaaagtcggtaaagccgatcctacactctttactaaaaccattgcaaatgatttgtttatgtctatgatgggggagctgaagtatttcctaggatttcaagtgaagcaactccaagagggcaccttcatcagccaaaccaagtacattcaagatatacttaccaagtttggaatgaaggatgccaagcccatcaagacacccatgggaacaaatgggcatctcgaccttgacacggaagatattatgctttttgtatgcatgtgtgcaaggttccaagccgatcctaaggaagttcaccttagggccgtgaaaagaatcatgagatatttagtttatactcctaagtttggactttggtaccccaagggatccacttttgatttaataggatactccgatgccgattgggcagggtgtaaaattgataggaagagcacatcagggacttgtcagtttctagggagatccttggtgtcttgggcttcaaagaaacaaaactcagtagctctttctaccgccgaagccgagtacattgccacagaccattgttgtgtgcaattactttggatgaggcaaaccctaagggactatggctacaaattgagcaaagtccctctcctatgtgataatgagagtgcaatccgcatggcggataatcccgttgaacacagccgcactaagcacatagacattcggtatcactttttgagggatcgccaacaaaggggggatatcgagatagcttatgttagcaccaaagaacaattagccgatatctttaccaagcctttagatgagaaaacctttagcaaactaaggaatgagctaaatatacttgattctcggaattttgattga

SEQ ID NO: 31116 - DNA, 811 bp, Zea mays
  Clone ID: MRT4577_128389C.1
ccggccgggccctttccccctctccccgagctcccttgctaggttaccacgttctgctgcccttacttcaggccctccctcacctcatctgatcatctctctcactctttcagtagcagcgcagctttgttactgacacgccccctgtcctgcctgtctgtgttgacctgataccagcaaagtttggagactccatccaacctcttgtctctgaaacttggacttgttgccgatcccaaggggaggttctgccaaaatttcggcttctgaacatccatttccagtgggatcgagggaggttctgccaaattttgctcctttgatcataagtttcccagggggaggttctgccggaatttcctcccgtgaccatcagctttccaggggcagattctgccgaagtttttgcactgagccactgaccatcaatcttccaaggggaggttctgccgaaattcccttctctcaccatcaattaatctccagggcatgcattccttcttcttgtccctgatgttagactagctagtagttagcagagaggccgcagcgtctggttgagaattcagatgttgttgttgctcgtcctgtccgagcacctcctcctgtccggatttatgatcggttccgccataacccgcctcgtccagtccttctctgtcgttttcctctactggttctatgtcttctcagtgagctgccactgccagtagtgccagtagttgatctcacctttttccagttattaataactcggcactataacaaagaggtagctagctatgtcaagtgaaagctcgtttgggtcgag

SEQ ID NO: 31117 - DNA, 412 bp, Zea mays
  Clone ID: MRT4577_12838C.1
gggtcgacccacgcgttcgtgcgcgatcatgtaccgggcggcggttggcatctctaggtcctcatcagcactgcggaggctgctcgtgcggggcgtggtcggggagctgccgtgtctgttggtgcgagggtatgcggccactgcgaaagatgtttcctttggcgttggctccctcgccgccatgctgcagggcgtaaacgacctcgccgactccgacaaggtcaccatgggcccccaatgtgcgcactgtgtatatcgagggggcccatagaggtcccatggttacgaaggacggggtctctgttgtataaagcgtggagtctgtggtatagcgcgaatattgttggggcgaatctgttgaagcaagttgctgatgcttctaacaatgctgctggggatggtaccacctgtg

SEQ ID NO: 31118 - DNA, 332 bp, Zea mays
  Clone ID: MRT4577_128390C.1
caaaaaaaatcatcccccgcctcgttttttctgttgacaaaaaatgaacaggggggtaattgtaaagcttttccgagataaaccaccaccgtaaacagcctttttttttttaaataccccggtggcattgcgggggatttaacaccttttacaacatcgggggtggaaaaccacacatttttttaaaacagcccccctttacccgttggcgggggcaccttttggcaaatcacgggttaagggcagcacactggccttatgctgggttataagaaaacttttttattactcgtaaccctggtggccatcctcgcccttattaaactaaaaac

SEQ ID NO: 31119 - DNA, 5823 bp, Zea mays
  Clone ID: MRT4577_128391C.1
atgtcgggagatcacgccaagaaggagatggagaccggcgacaagcccactacaagccaagggagcacctcatcggaagagtcccgcaccaagaaaagggagaagaagaagaactcctccaaacggaaggagaaaagatcttcctcttctcaccacaaggagaagaaggaaaaatcttcttctcacaagccgcatcggagtggggacaagcacaagaggatgaggaaggtggtctactacgagaccgacacttcatcgacatctacctccggctccgacgcggcgtccgtcacttctaaacgccaagagcgtaagaagtatagtaagattcccctacgctatcctcgtgttcctaaacatacacctctactttccgtcccattaggtaaaccaccaacttttaatggtgaagattatgctatgtggagtaatttaatgcgatttcatctaacctctctccacaagagtatatgggatgttgttgagtatggtgtacaggtaccatctataggggatgaggactatgacacggacgaagtgtcccaaatcgagcacttcaactcccaagccgcaaccatcctccttgcctccctaagcaaggaggaatacaacaaagtacaaggattgaagaacgccaaggagatttgggacctactcaagacggcgcacgagggtgatgaactcaccaagatcaccaagcgggaaacgatcgagggggagctcggtcgcttccgtcttcgccaaggggaggagccacaagacatgtacaaccggctcaagaccttggtgaaccaagtgcgcaacctcgggagtacaaagtgggatgaccacgaagtggttaaggttattctaagagctcttattttccttaaccccacacaagttcaattaattcgtggtaatccaagatatccactaatgacccccgaggaagtcatcgggaattttgttagttttgaatgcatgattaagggctccaagaagatcaacgagcttgacgagccctccacatccgaggcgcaaccggtggcctttaaggcaacggaggagaagaaggaggagtctacaccaagtagacaaccaattgacgcctccaagctcgacaatgaggagatggccctaatcatcaaaagctttaggcaaatcctcaagcaacggaaggggaaggactacaaacctcgttccaagaaggtttgctacaagtgtggtaagcccggtcactttattgcaaaatgtcctatgtctagtgacagtgacaggggcgacgacaagaagggaagaagaaaggagaagaagaagtattacaagaagaagggcggcgatgcccatgtttgtcgggagtgggactccgacgaaagctcaagcgactcctccgacgacgaggacgccgccaacatcgccgtcaccaaaggccttctcttccccaacgtcggccacaagtgtctcatggccaaggacggcaaaaagaaggtaaaatcaaggtcctccactaaatatgaaacatctagtgatgaggatgatgataaaaatgaggaggataacttgcgcattctctttgctaaccttaacatggaacaaaaggaaaaattaaatgaactaattagtgccatccatgaaaaggatgatctcttggactcccaagaggacttcctaatcaaggagaataagaaacatgttaaggttaaaaatgcttacgctctacaagttgaaaaatgtgaaaaattgtctagtgagctaagcacttgccgtgagatgattgacaaccttagaaatgaaaatgctattttaaatgctaaggttgattcacatgtttgtaatgtttcaattcccaatcttagaaatgataacgttgacttgcttgctaagattgatgaattgaatgcatcacttgctagccttagattagagaatgaaaatttaattgctaaggctaaaaattttgatgtttgcaatgctactatttccgaccttagaactaagaatgaaatgttgcatgctaaggttgtagaacttaaatcttgcaaaacctctacatctaatgttgagcatgtttctatttgcactagatgtagagatattaatattgatgctatccatgatcacctagccttaattaaaaaacaaaatgatcatatagctaaactagatgctaaaattgccgagcacaacttagaaaatgagaaatttaaatttgctcgtagcatgctttataatgggagacgccctggcatcaaggatggcattggcttccaaaggggagacaatgtcaaacttaatgcccctcctaagaacttgtctaactttgttaagggcaaagctcccatgcctcaggataacgagggttacattttataccctgcaggctatcctgaaagcaaaattaggaagattcattctaggaagtctcactctggccctaaccatgctttcatgtataagggtgagacatctagttctaggcaaccaacccgtgccaagttgcctaagaaggaaattcctaatgcatcaaatgatcatgccatttcatttaaaacttttgatgcatcttatgtgcttactagcaaatccggcaaagtagttgccaaatttgttgggggcaaacacaagcattccaagacttgtgtttgggtacccaaagttcttgtatctaatgccaaaggacccaaaacagtttgggtttatgcatccgggggctcaagttggatactcgacagcgggtgcacaaaccacatgaccggggagaaaaggatgttctcctcatatgagaaaaacaaagatccccaacgagctatcacattcggggatggaaatcaagggttggtcaaaggtttgggtaaaattgctatttcacctgaccattccatttccaatgtttttcttgttgattcattagattacaacttgctttctgtttcccaattatgtcaaatgggctacaactgtctttttactgatatatgtgtcactgtctttagaagaagtgatgattcaatagcatttaagggtgtgttagagggtcagctatacttagtagattttgatagagctgagctcgacacatgtttaattgctaagacaaacatgggttggctctggcaccgccgactagcccatgttgggatgaagaatcttcataagcttctaaagggagagcacattttaggactaaccaatgttcattttgagaaagacaggatttgtagcgcatgccaagcagggaagcaagttggcactcatcatccacacaagaacataatgacgactgacaggccactggagctcctacacatggatctattcggcccgatcgcttacataagcatcggcgggagtaagtactgtctagttattgtggatgattattctcgcttcacttgggtattctttttacaggaaaaatctcaaacccaagagaccttaaagggattcttgagacgagctcaaaatgagtttggcttaaggatcaagaaaataagaagcgacaatgggacggagttcaagaactctcaaattgaaagcttccttgaggaggagggcatcaagcatgagttctcttctccctacacgccacaacaaaacggtgtagtggagaggaagaatcgaactctattggacatggcaagaaccatgcttgatgagtacaagactccggaccggttttgggccgaagcggtcaacaccgcctgttacgccatcaaccggttatatcttcaccgaatcctcaagaagacatcatatgaactcataaccgaaggttttttacttggttatgactcaaacacaagggcatatagggtctttaacaagtccactggactagttgaagtctcttgtgacgttgtgtttgatgaaactaacgactctcaagtagagcaagttgatcttgatgagataggtgaagaacaggctccatgcatcgcgctaaggaacatgtccatcggggatgtgtgtcctaaggaatccgaagagcctccaagtacacaagatcaaccatcctcctccatgcaagcatctccaccaactcaaaatgaggatgaggctcaaaatgatgaagagcaaaatcaagaagacgagccacctcaagatgatagcaatgatcaagggggagatacaaatgatgaagaaaaggaggatgaggaagaaccaagaccgccacacccaagagtccaccaagcaatccaacgagatcaccccgtcgacaccatcctcggcgacattcataagggggtaactacacgatctcgggttgctcatttttgtgaacattactcttttgtttcctctattgagccacacagggtagaggaagctctccaagattcggattgggtggtggcgatgcaagaggagctcaacaatttcacgagaaacgaggtatggcatttagttccacgtcctaaccaaaatgttgtaggaaccaaatgggtcttccgcaacaagcaagatgagcatggtgtggtgacaaggaacaaagctcgactcgtggccaaagggtattcacaagtcgaaggtttggattttggtgaaacctatgcacccgtagctaggcttgagtcaattcgcatattattggcctatgctactcaccatggctttaagctctatcaaatggacgtgaaaagtgccttcctcaatggaccaatcaaggaagaggtctatgttgagcaacctcccggctttgaagacagtgagtatcctaaccatgtttataggctctctaaggcgctttatgggctcaagcaagccccaagagcatggtatgaatgccttagagatttccttattgcaaatggcttcaaagtcggcaaggccgatcctacactctttactaaaactcttgaaaatgacttgtttgtatgccaaatttatgttgatgatattatatttgggtctactaacgagtctacatgtgaagagtttagtaggatcatgacacagaaattcgagatgtcgatgatgggggagttgaagtattttctaggattccaagtcaagcaactccgagagggcaccttcattagccaaacgaagtacactcaagacattcttgctaagtttgggatgaaggatgccaaacccatcaagacacccatgggaactaatgggcatctcgacctcgacacgggaggtaagtccgtggatcaaaaggtataccggtcgatgattggttcattgctttatttatgtgcatctcgaccggacattatgctttccgtttgcatgtgtgcaagatttcaagccgaccctaaggaatcacaccttacggccgtaaaacgaatcttgagatatttggcttatactcctaagtttgggctttggtaccctcggggatccacatttgatttaattggttattcggatgccgattgggcggggtgcaaaattaataggaagagcacatcagggacttgccagttcttgggaagatccttggtgtcttgggcttcaaagaagcaaaattcggtcgctctttccaccgccgaagccgagtacattgccgcaggacattgttgcgcgcaattgctttggatgaggcaaaccctgcgggactacggttacaaattaaccaaagtccctttgctatgtgataatgagagtgcaatcaaaatggccgacaatcccgtcgagcatagccgcactaagcacatagccattcggtatcattttcttagggatcaccaacaaaagggggatatcgagatttcttacattaatactaaagatcaattagccgatatctttaccaagccacttgatgaacaatcttttaccagacttaggcatgagctcaatattcttgattctagaaatttcttttgctag

SEQ ID NO: 31120 - DNA, 826 bp, Zea mays
  Clone ID: MRT4577_128392C.1
ccggccgggccctttccccctctccccgagctcccttgctaggttaccacgttctgctgcccttacttcaggccctccctcacctcatctgatcatctctctcactctttcagtagcagcgcagctttgttactgacacgccccctgtcctgcctgtctgtgttgacctgataccagcaaagtttggagactccatccaacctcttgtctctgaaacttggacttgttgccgatcccaaggggaggttctgccaaaatttcggcttctgaacatccatttccagggggatcgagggaggttctgccaaattttgctcctttgatcataagtttcccagggagaggttctgccggaattttgccgaagttttgtgcactgactatcagtcttccaaggggaggttctgccaaaattcccttctctcaccatcacttctccaaggccaagtcctcctggtcctgccgaagttttcttcacatacactatcacttgaaatttgcaaggtaactaagttaaacaagagggcatgcattccttcttcttgtccctgatgttagactagctagctagcagagactgaggccgcagcgtctgttgagaattcagatgttgttgttgctcgtcctgtccgagcacctcctcctgtccggatttatgatcggttccgccataacccgcctcgtccagtccttctctgtcgttttcctctactggttctatgtcttctcagtgagctgccactgccagtagtgccagtagttgatctcacctttttttcagttaataactcggctctataacaagaggtagctagggatatacctg

SEQ ID NO: 31121 - DNA, 613 bp, Zea mays
  Clone ID: MRT4577_128393C.1
aagcagtggtaacaacgcagagtacgcggggcgcatcagcagcatcagcaaagcagcaacgaaccatggcacggcatggggcagccatagctaggtcgtcgtcgtcgtcgctacccattctggcagcaaagctactttctgtgcttcctcctctcatcagccgtactacatcgccgtcgctgcttcaattctgatcgctgccgccgcgcgcgcggtgcagaggcaaaacaagatacggccggccgcccagagtgcaacgcgtggcttttgagtcgggtaatcttcatcatctcccgcccctcacttcgcgcgctcatcttttgctcctgttcatgctgtcatcccgtctgaacttaaccacgcaatgcaagcattcaagcctctgcaagctaggatgaggatgatagattggattggataatacacaagtacgcagggaagagatcgaccaacatgtaaactaagctcggatcaattaagcagatgggaagaaaatcatagctacgtgacagtaataatacatgcatgcgttcatcgtctcttttgtctggtcactacatccatatccatgtgttcaattttggtgatataaaagtttcttttttttcccccg

SEQ ID NO: 31122 - DNA, 2469 bp, Zea mays
  Clone ID: MRT4577_128394C.1
atgcctcaggataacgagggttacattttgtaccctgccggttatcctgagagcaaaattaggagaattcattctaggaagtctcactctggccccaaccatgcttttatgtataagagtgagacatctagttctaggcaaccaacccgtgctaagttgcctaagaagaaaactcctagtgcatcaaatgatcatggcatttcatttaaaacttttgatgcatcttatgttttaactaacaaatccggcaaggtttatgcatccgggggctcaagttgggtaattgacagcgggtgcacaaaccacatgacaggggagaagaagatgttctcctcctacgagaaaaaccaagatccccaacgagctatcacattcggggatggaaatcaaggtgtcactgtctttagaagaagtgatgattcaatagcattcaagggtgtgttagagggtaagctatacttagtagactttgatagagctgaactcgacacttgcttaattgctaagactaacatgggttggctctggcaccgccgactagcccatgttgggatgaagaatcttcataagcttctaaatggagaacacattttaggattaacaaatgttcattttgagaaagacaggatttgtagcgcatgccaagcagggaagcaagttggtgcccatcatccacacaaaaacatcatgacgaccgacaggccgcttgagttactccacatggatctattcagtccgattgcttacataagcatcggcgggaagaccttaaagggattcttgagacgggctcaaaatgagtttggcttaaggatcaagaaaataagaagcgacaacgggacggagttcaagaactctcaagtcgaaggctttcttgaggaggagggcatcaagcatgagttctcttctccctacacgccacaacaaaatggtgtagtggagaggaagaatcgaactctattggacatggcaaggaccatgcttgatgagtacaagacttcggatcggttttgggcggaggcggtcaacaccgcttgctacgccatcaaccggttatatcttcaccgaatcctcaagaaaacatcatatgaactcctaaccggtaaaaagcccaacatttcatattttagagtctttggtagcaaatgcttcattcttattaaaagaggtagaaaatctaaatttgctccaaaaactgtagaaggctttttacttggttatgactcaaacacaagggcatatatggtctttaacaagtccactggactagttgaagtctcatgtgacgttgtgtttgatgaaactaacggctctcaagtagagcaagttgatcttgatgagatagatgacggcatagatcaagggggagatgcaaatgatcaagacaaggaggatgaagagcaaaggccgccacacccaagagtccaccaagcaatccaacaagatcaccccgtcgacaccatcctcggcgacactcataagggggtaactactagatctcgtgttgcacatttttgtgagcattactcttttgtttcctctattgagccacacagggtagaggaagcacttcaagattcggattgggtggtggcgatgcaagaggagctcaataacttcactaggaatgaggtatggcatttagttccacgtcctaatcaaaatgttgtaggaaccaaatgggtcttccgcaacaagcaagacgagcatggtgtggtgacaaggaacaaagctcgacttgtggccaagggatactcccaagtcgaaggtttggatttcggtgaaacctatgcacccgtagctaggcttgagtcaattcgcattttattggcctatgttacttaccatggctttaagctttatcaaatggacgtgaaaagtgccttcctcaatggaccaatcaaggaagaggtctatgttgagcaacctcccggctttgaagacagtgagtatcctaaccatgtctataagctctctaaggcgctttatgggctcaagcaagccccaagagcatggtatgaatgccttagagattttcttattacaaatggattcaaagtcggtaaagccgatcctacactctttactaaaactcttgaaaatgacttgtttgtatgccaaatttatgttgatgatattatatttgggtctactaacgagtctacatgtgaagagtttagtaggatcatgacacagaaattcgagatgtctatgatgggggagttgaagtattttctaggctttcaagtgaagcaactccaagagggcaccttcatcagccaaacgaagtacactcaagacattctaaccaagtttgggatgaaggatgccaaacccatcaagacacccatgggaactaatgggcatctcgacctcgacacgggaggtaagtccgtggatcaaaaggggatccacattcgatttaattggttattccgatgccgattgggcggggtgcaaaatcaatag

SEQ ID NO: 31123 - DNA, 745 bp, Zea mays
  unsure (1)..(745): unsure at all n locations
  Clone ID: MRT4577_128395C.1
ggccgcttttttttttttttttttaaccatcaaatcgacatcttaatcagcattttatcatcatcattacgcatataatttcccttatacatatatatgaggagctttcaaatcacctacctctctttcactatctggcccaatattattatttcctatatactccctcaactacaagagaacaactgcgctgcattcacgtcacagaaagccaaggcaaagttgccattgtccgtcctttaggctcgtccgcaatcaagaaaccaaaacgtcgccgtcgcctccaaaacaaacgatggagaagcaacaagcctcctttcctccgcattatctctattagcaccggtacgcgtctatgggctgctgctgctggttccatgcgctggcgccaagaatatcaccagaggcgtcgctccagctccatgtcgtcgtgatgccgtccgccatggctggattcgtaggagcagcagtgccggtgcttgagctgatgcaccataggatctcggtcagggctcccagcctgctggccagctccatcctctgggtctgcaggacagagttctgcgcttgcactgccacgaggttttggctggtcatgctcagcgccatgttcagctgcttgttctggcccttcagctgatctacctgtgacgtgaggtcgncgtggtgttgctgcttccttagcctagacctcccagctgactctcggttcgactcctttcttggcttcctcctcttctccatc

SEQ ID NO: 31124 - DNA, 239 bp, Zea mays
  Clone ID: MRT4577_128396C.1
gaatttaacagaccaacctagataagctcaggagtcccataaatatggacaccctacataaaatatgggctctggcgctatcatcaataatcatgaggagtaaatacagctgcagaataacgtaggaaacatgtccgaggttccagctgaggtgcccgatgggaaaaccgtggataactctgctgcaagaggccgaggattgaagcggaagaagaaaaaaaaaaaaaaggggggccccc

SEQ ID NO: 31125 - DNA, 4854 bp, Zea mays
  Clone ID: MRT4577_128397C.1
atgtcgggagatcacgccaagaaggagatggagaccggcgaaaagcccactacaagccacgggagcacttcatcggaagagtcccgcaccaagaggagggagaagaagaagagctcctccaacaaagggaaggagaagaaatcttcttctcaccacaaagagaagaaggaaaaatcttcttcccacaagccgcatcagagtgaggacaagccaaagaggatgaggaaagtggtctactacgagaccgacacttcatcaacatcgacctccggctccgatgcgccctccgtaacttctaaacgccaagggcgtaagaagtttagtaagatccccctacactaccctcgcatttctaaacatgcacctttgctttccgtcccattaggcaaaccaccaacttttaatggtgaagattatgctaggtggagtgatttaatgcgatttcatctaacctcactccacaaaagtatatgggatgttgttgagtttggtgcacaggtaccatccgtaggggatgaagactatgatgaggatgaggtggcccaaatcgagcacttcaactctcaagcaacaacaatactcctcgcctctttaagtagagaggagtataacaaagttcaagggttgaagagcgccaaggaggtttgggatgtgctcaaaaccgcacacgagggagatgagctcacaaagatcaccaagcgggaaacgattgagggggagctcggtcggttccggcttcgcaaaggggaggagccacaaaacatgtacaaccggctcaagaccttggtgaaccaagtgcgcaacctcgggagcaagaagtgggacgaccacgaagtggttaaggttattctaagatctcttattttccttaaccccactcaagttcaactaatttgtggtaatcctagatatactaaaatgacccccgaggaagttatcgggaattttgtgagttttgagtgcatgatcgaaggctcgaggaagatcaacgagcttgatgatccctctacatccgaggctcaacccgtcgcattcaaggcgacggaggaaagaaaggaggagtctacaccaagtagacaaccaatcgacgcctccaagcttgacaatgaggaaatggcgctcgtcatcaagagcttccgccaaatcctcaagcaaaggagagggaaagactacaagtcccgctccaagaaggtttgctacaatgacaggggcgacgacaaggagagaagaaaagagaagaagaggtactacaagaagaagggcgacgatgcccatgtttgtcgggagtgggactccgacgaaagctctagcgactcctccgacgacgaggacgccgccaacatcgccgttaccaagggactcctcttcccaaacgtcggccacaagtgcctcatggcaaaggacggcaaaaagaaggttaaatctaaaccctccactaaatatgaatcctctagtgatgataatgctagtgatgaggaggataatttgcgtactctttttgccaacctcaacatgcaacaaaaagaaaaacttaatgaattaattagtgccatccatgaaaaggatgatctcttggacacccaagaggacttcctaatcaaggaaaataaaaagcatgttaaggttaaaaattcttacgctctagaagtagaaaaatgtcaaaaactatctagtgagataagcacttgccatgagatgattgacaaccttagacatgaaaatattagtttaaatactaaggttgattcacatgtttgtaatgtttcaattcccaatcctagagataataatgatgatttgcttgctaggattgaagaattaaacatttcccttgctagccttagagtagaaaatgagaatttgattgctaaggctaaagaactagatgtttgcaatgttataatttccgatcttagagataataatgatatcttgcgtgctaagatcgttgaacttaattcatgcaaaccctctactcctagtgttgagcatatttccatttgtactagatgtagagatgttaacattgatgctattcatgatcatatggctttaattaaacaacaaaatgatcatatagcaaaactagatgctaaaattgccgagcataacttagaaaatgaaaaatttaaatttgctagaagtatgctctatagtgggagacgccctggcatcaaggatggtattggcttccaaaggggagacaatgtcaaacttaatgcccctcctaaaagattgtctaattttgtaaagggcaaggctcccatgcctcaggataacgagggttacattttataccctgccggttatcccgaggacaaaattaggaaaattcattctaggaagtctcactctggccccaatcatgcttttatgtataagggtgagacatctagttctaggcaaccaactcgtgctaagttgcctaagaaaattcctattgcatcaaatgatcatgacatttcatttaaaacttttgatgcatcttatgttttgactaacaaatccggcaaggtagttgccaagtttgctgggggcaagcacaaggggtcaaagacttgtgtttgggtacccaaagttcttgtatctaatgtcaaaggacccaaaaccgtttgggtttatgcatccgggggctcaagttggatcatcgacagcggatgcacaaaccatatgacatgggagaagaagatgttctcctcctatgagaaaaaccaagatcctcaacgagctatcacattcggggatggaaatcaaggtttggtcaaaggattgggtaaaattgctatatcacctgaccattctatttcaaatgtttttcttgtagattctttagattataacttgctttcagtttcgcaattatgtaaaatgggttacaactgtctttttacggatataggtgttactgtctttagaagaagtgatgattcagtagcatttaagggagtgttagagggtcagctatacttagtagattttgatagagctgaactcgacacttgcttaattgctaagactaacatgtgctggctctggcatcgccgactagcacatgttggaatgaagaatcttcacaagcttctaaagggagaacacattttgggactaacaaatgctcattttgagaaagacaggatttgtagcgcttgtcaggcagggaagcaagttggtgttcatcatccacacaagaacatcatgacgactgacatgccactcgagctcctacacatggacctattcggcccgatagcttacataagcgtcggcgggagtaagtactgtctagttattgtggatgattattctcgcttcacttgggtgttctttttgcagaaaaaatctcatacccaaaagaccttaaagggattcttgagacaggctcaaaatgagttcggcttaaggatcaaaaagattagaagcgacaatgggacggagttcaagaactctcaaattgaaggcttccttgaggaggagggcatcaagcatgagttctcttctccctacacgccacaacaaaatggtgtagtggagaggaataatagaactctattagacatggcaaggaccatgcttgatgaatacaagacttcggatcggttttgggccgaggcgatcaacaccgcctgctacgccatcaaccggttgtatctacaccgaatcctcaagaagacatcttatgaactcctaaccggtaaaaagcccaatgtttcatattttagagtctttggtagcaaatgctttattcttgttaaaagaggtagaaaatctaaatgtgctcctaaggttgtagaaggctttttactaggatatgattcaaacacaagggcatatagagtctttaacaagtcctctggactagttgaagtttcttgtgacattgtgtttgatgagactaacggctctcaagtagagcaagttgatcttgatgagcttgatgatgaagaggcttcgtgcatcgcgctaaggaacatgtccattggggatgtgtgtcctaaggaatccgaagagtctccaaatgcacaagatcaaccatcttcctcaatgcaagcatctccaccaactcaagatgaggatgaggctcaagatgatgaaggagaagatcaagaagttgagccacctcaagaggagagcaatgatcaagggggagatgctcgtgatcaagatgaggaagatgaacaagttccaagggcgccacacccaagagtccaccaagcaattcaacgagatcaccctgtgaacaccatcctcggcgatattcaaaagggggtaactactcgatctcgtgttgctcatttttgtgaacattactcttttgtttcctctattgagccacacagggtagaggaagcacttcaagattcgaattgggtggtggcgatgcaagagaagctcaacaacttcactaggaatgagctttatcaaatggacgtgaaaagtgccttcctcaacggaccaatcaaggaagaggtctatgttgagcaaccttccggctttgaagatagtaccctaaccacgtatataaactctctaaggcgctttatgggctcaaacaagcctcaagagcatgaatttagtaggatcatgacacaaaaattcgagatgtctatgatgggggagttgaagtacttcttaggatttcaagtgaagcaactccaagagggcaccttcattagccaaacaaagtatattcaagacattctaaacaagtttgggatgaaggatgccaagcccatcaaaacacccatgggaaccaatgggcatctcgacctcgacacgggaggtaaatccatagatcaaaaggggatccacattcgatttgattggttattcggatgccgattgggcggggtgtaa

SEQ ID NO: 31126 - DNA, 1860 bp, Zea mays
  Clone ID: MRT4577_128398C.1
aaaaaattcccaaaaaaaaaaaaaaaaaaaaaaaaaaaaaaaaaaaaaaacccttttccccctcctccccgaactcccttggctaggttaccacggttcttctgcccttcaggccctccctcatctgatcatctctctcactctttcagtagcagcgcagttttgttactgacacacgccccctgtcctgcctgtctgtgttgacctgatagtactagcaaagtttggagactccatccaacctcttgtctctgaaacttggacttgttgccgatcccaaggggaggttctgccaaaatttcggcttctgaacatccatttccagaggggatcgagggaggttctgccaaattttgctcctttgatcataagtttcccagggggaggttctgccgaaatttcatctcctgtgctgtgacgaccatcagctttccagggggagattctgccgaagttttgtgggctgaccatcagtcttccaagaggaggttctgccgaaattcccttctctcatcatcacttctccaaggccaagcagtcctcctggtcctgccgaagtgttctctgaacaagagggcatgcatgcactccttcttgtccctgatgttagactagctagctagcactagcagagactgaggccgcagcgtctgttgagaattcagatgttgttgttgctcgtcctgtccgagcacctcctcctgtccggatttatgatcggttccgccataacccgcctcgtccagtccttctctgtcgttttcctctactggttctatgtcttctcagtgagctgccactgccagtagtgccagtagttgatctcacctttttcaagttaataactcggcactataacaaagaggtagctaggtatatacctgccaaacaaacaagagggagtgaaaaaacttcagattacgcctcagtttgtgagctagaggtgaccatgtcaagtggaagctcgtttgggtcgagccagtggactcagagatccaggtcggcggaggatgacctggacctggacctccaggccgagatggagaagaggaggaaacgaaggaaggagtccaaccgagagtcggctcggaggtctaggctaaggaagcagcaacaccacgacgacctcacgtcacaggtagaccagctgaagggccagaacaagcagctcaacttggcgctgagcacgaccagccaaaacctcgtggcagtgcaagcgcagaactctgtcctgcagacccagaggatggagctggccagcaggctgggcgccctgaccgagatcctctggtgcatcagctcaagcaccggcactgctgctcctcctacaaacccagccatggtgaacggcggcgtcacgacgacatggagctggagcgacgcctctggtgatattcttggcgccagcgcatggaaccaccagcagcagcagcccatagacgcgtaccggtgctattattagctagctctacaagctagctagagagaaggcggtggtagggccaggaggaaaggaggcttgttgcttcgccatcgtttgttttggaggcgacggcgacgttttgttggtagagcggaggagcctaaaggacggacaatggcaactttgccttggctttctgtgacgtgaatgcagcgcagttgttctcttgtagttgaggagtatatatataggaaataataatattgggccagatagtgaaagagaggtaggtgatttgaaagctcttcatatatatgtataagggaaattatatgcgtaatgatgatgataaaatgctcattaagatgtcgatttgatggttacaacttgatatccgttgtgcctctctataaaccctacgtacgggtgcactctcg

SEQ ID NO: 31127 - DNA, 4113 bp, Zea mays
  Clone ID: MRT4577_128399C.1
atgtgtaacacgcggcacactacgcagggggtggctggcgggcggcgacgtttgcgagggggcggcgacgtttccaatgagagctccaccgactcttcctccgacgaggacgccgcaaacatcaccgtcaacaagggtctcctcttccccaatgtcggccacaagtgcctcatggcaagggacggcaaaaagaaggtaaaatctagagcctccactaaatatgcaacatctagtgatgacgagaactctagtgatgatgaggataacttgcttgccctttttgccaacctaaacatgcaagaaaaagaaaaattaaatgaattgataggtgccattcatgagaaggatgaactcttggatagtcaagaggacttcctaattaaagaaaataagaagcatgttaaggttaagaatgcttatgctcaagaagtagaaaaatgtgaaaaattaactagtgatcttagcacttgccatgacactatttccaaccttagatgtgaaaatgctaaattgattgctaaggttgagaaattaaatgtttgtgatgattcgattgttagtcttagaaatgataatgctagtttgattactaagattgacaagttgaatgcatcactctctagccttaaaattgagaatgaaaaattaattgctaagactaaagacttaaatgtttgcaatatttctatttccaatcttaagaatgaaaatgctattttacatgctaagattgatgaattaaatgcatgcaaaccctctacatctagtgttgatcatgttactatttgtactagatgtagagatattaatgttgatgctattcatgatcacctagctttaattaaacaacaaaatgatcacatagctcaacttagtgctaagattaatgagtatgacttagaaaatgaaaaatttaaatttgctagaagcatgctctatagtgggagacgccctggcattaaggatggcattggcttccaaaagggagacaatgtcaagcttaattcccctaagaaattgtctaactttgttaagggcaaaactcccatggctcaggataacgagggttacattttatatcctgtcggttatcccgatcacaaaattaggagaattcattctaggaagtctcactctggctctcatcatgcttttatgtataagagtgaggcatctagttctaggcaatccactcatgttaaattgcctaaaaataaaactcctattgcatcaaatgagccaaatattttatttaagacttttgatgcttcttatgttttaactaacaaatcaggcaaagtagttgtcaaatatgttggggccaaacacaagggctcaaagacttgtgtttgggtttccaaggtttatgcatccgggggctcaagtaggatcattgatagcgggtgcacaaaccacatgactagggagaaaaggatgttctcctcctatgagaaaaaccataatccccaaagagctatcacattcggggatggaaatcaagattccttagattacaatttgctttctgtttctcaattatgcaaaatgggttacaactgtctttttacggatataggtgttactgcctttagaagaagtgatgattcggtagcatttaagggagtgttggagggtcagctatacttagttgatttcaatagagctgaactcgacacttgcttaattgctaagactaacatgggttggctctggcatcgccgactagcccacgttgggatgaagaatctttataagcttctaaagggagagcacattttgagactaacaaatgttcattttgagaaatacagggaaaaatcacaaacccaagagtccttaaagggatttttgagacgggctcaaaatgagtttggcttaaggatcaaaaagattagaagcgacaatgggacggagttcaagaactctcaaattgaaggctttcttgaggatgagggcatcaagcatgagttctcttctccctacacacctcagcaaaatggtgtagtgaagagaaagaatagaaatctacttgacatgacgaggaccatgcttgatgagtacaagacttcagaccggttttgggcggaagcaatcaacaccgcttgctacgccatcaaccgtctctaccttcaccgaatcctcaaaaagacatcatatgaactcctaaccggtaaaaagcccaatgtttcatattttagagtctttggtagcaaatgttttattcttgttaaaagaggtagaaaatctaaatttgctcctaaggctgcagaaggctttttactaggatatgattcaaacacaagggcatatagagtctttaacaagttcactggactagttgaagtttcttgtgacattgtgtttgatgagactaacggctctcaaatagagcaagttgatcttgatgagctagatgatgaagagactctgtgcgtcacgctaaggaacatgtccattggggatgtgtgtcctaaggaatctgaagagcctccacatgcacaagatcaaccatcttcctccatgcaagcatctccgccaacccaagatgaggatcaagctcaagatgatgaaaatgaagatcaagagcagtcacctcaagaggaggacaatgatcaagggggagatgctaatgatcaagacaaggaagatgatgagggtccaaggccgccacacccaagagtccaccaagcaatacaacgagatcaccccgtgaactccatcctcgacgatattcataagggggtaaccactcaatctcgtgttgctcatttttgtgaacattactcctttgtgtcttctattgagccatacagggtagaagatgcattaagggattcagattgggtgttggcaatgcaagaggaactcaacaacttcacgaggaatgaggtatggcatttagttccacgtcctaatcaaaatgttgtaggaaccaagtgggtcttccgcaacaagcaagatgagcatggtgtggtgacaagaaacaaagcccgacttgtggccaagggatattcacaagtcaaaggtttggatttcggtgaaacctatgcacccgtagctaggcttgagtcaattcgtatattacttgtctatgctacttaccatggcttcaagctttatcaaatggacgtgaagagttccttcctcaatggaccaatcaaggaggaggtctatgttgagcaacttcccggctttgaagataatgagtaccctaaccatgtatataaactctctaaggcgctttatgggctcaagcaagccccaagagcatgttatgaatgcttaagagattttcttatcgctaatggcttcaaagtcggaaaagccgatcctactctctttactaaaacaattgcaaataatttgtttatatgccaaatttatgttgatgatattatatttgggtctactaacaaatctacttgtgaagagtttagtaggatcatgattcaaaaattcgagatgtctatgatgggggagttgaagtatttcttaggatttcaagtgaagcaactccaagaaggcaccttcattagccaaatgaagtacactcaagacattctcaccaagtttggaatgaaggatgccaagcccatcaagacacccatgggaaccaatgggcatctcgacctcgacacgggaggttattcagatgctgattgggcagggtgtaagattgatagaaagagcacattagggacttgtcagttcttgggaagatccctggtgtcttgggcttcaatgaaacaaaactctgtagctctttctaccgccgaagtcgagtacattgccgcaggccattgttgcgcgcaattgctttggatgaggcaaacccttagggactatggttacaaattaaccaaagttcctctcctatgtgataatgagagtgcaatccacatggtggataaccccgttgagcacagccgcactaagcacatagccattcagtatcactttttaagggatcaccaacaaaggggggatatcgagatagcctatatgagcaccaaagaacaattagccgatatctttaccaagccattagatgagaaaacttttaccaaacttaggcatgagctaaacattcttgattctaggaattttgattga

SEQ ID NO: 31128 - DNA, 269 bp, Zea mays
  unsure (1)..(269): unsure at all n locations
  Clone ID: MRT4577_12839C.1
ggagcaggaaaaatacaagcttattattgtgtgcagagctaaaatgtgctttaatcaactagattacaggtcctcatacatancagagatnttatatttattgtggcctcgtgcggnncatnntntgaatnncgggggtggggggggggggggtntttttntttttnctttttcttttttttttttggtgggtggggtgtttttttgtttttgggggtgtttggttttgttttttttttttttgttgtggttttttggtttttgccttt

SEQ ID NO: 31129 - DNA, 618 bp, Zea mays
  Clone ID: MRT4577_1283C.1
ccggccggggaacggaggtcgagcaccagacctcatctcactccgctatcccctcatcctgccatccaccagaagcagtgcaagcatatggcgcgccgtgccagcctgctcctcgccgcggcgctgctcgtcgccgtcgctgccgcggcggtgccgccgacgtgcgagcgcatcgaggccagcctccagggcacccggtgggccgccgccgtcaacgacgcgcgcagggccgacccggcctcgccctacaccgtcgcgcagtacaactcgcccttcgagttcaccggcagggtcaacgagatctggatgctcttcgacgcggacgacgacgccagtatgtgatgcgattccaagcgtgctctcggggcactgaggcgtttagggaaggacgcgcatgcacctgtgcagtgcagctgtgctaccatgaagtatttcgtgctcttgtgcgctagcttcgtttactttcgacttttcgagtaaggaataaggtgcctcttgttgcaataatgataaagctaatcctgcttgtaattacatttcgtggcatggccattccggcaacatgtccagtaaaaaaaaaactttttagtttctaaaaaaaaaaaaaaaaaagcggcc

SEQ ID NO: 31130 - DNA, 3678 bp, Zea mays
  Clone ID: MRT4577_128400C.1
acttcatcaactggagcttcatcctcattttgagttggtggaaatgcttgcgtggaggaggatggttgatcttgtgcacttggaggctcttcggattccttaggacacacatccccaatggacatgttccttagcgcaatgcatggagcctcttcttcacctatctcatcaagatcaacttgctctacttgagagccgttagtttcatcaaacacaacgtcacatgagacttcaactagtccagttgacttgttaaagaccctatatgcccttgtgtttgagtcataaccaagtaaaaagccttctacagtcttaggagcaaatttagattttctacctcttttaacaagaataaagcatttgctaccaaagactctaaaatatgaaatgttgggctttttaccggttaggagttcatatgatgtcttcttgaggattcggtgtagatacaaccggttgatggcgtagcaagcggtgttgaccgcctcggcccaaaaccgatccgaagtcttgtactcatcaagcatggtccttgccatgtctaatagagttctattcttcctctccactacaccattttgttgtgttgtagggagaagagaactcatgcttgatgccctcatcctcaaggaagccttcaatttgagagttcttgaactccgtcccattgtcgcttctaatctttttgatccttaagccgaactcgttttgagcccgtctcaagaatccctttaaagtctcttgggtttgagatttttcctccaaaaagaacacccaagtgaagcgagaataatcatccacaataactagatagtacttactcccgccgatgcttatgtaagctatcgggccaaataggtccatgtggagtaactcgagtggcctgtcagtcgtcatgatgttcttgtgtggatgatgaacaccaacttgcttccctgcttgacatgcattacaaaccctatctttctcaaaatgaacattggttagtcccaaaatgtgctctccctttagaagcttatgaagattcttcatcccaacatgggctagttggcggtgccaaagccaacccatgttagtcttagcaattaagcaagtgtcgagttcagctctatcaaaatcaactaagtatagctgaccctctaacactcccttaaatgatactgaatcatcagttcttctaaagacagtgacacctaaatcttgatttccatccccgaatgtgatagctctttgggaatcatggtttttctcgtaggaggagaacatcttcttctcccctgtcatgtggtttgtgcacccgctatcaatgatccaacttgagcccccggatgcataaaccttgggtacccaaacacaagtctttgaccccttgtgtttgcccccaacatatttggcaactactttgcctgatttgttagtgagaacataggatgcatcaaaagtctttaatgaaatattaggctcatttgatgcaataggagttttcttcttaggcaatttagcatgggttgattgcctagaactagaagcctcactcttatacataaaagcatgatgagagccagagtgagacttcctagagtgaattctcctaattttgtgttcaggataactggcagggtataaaatgtaaccctcattatcctgaaccatgggagctttgcccttaacagagttggacaatttcttgggggcattaagcttgacattgtctccctgttggaagccaatgtcatccttaatgccagggcgtctcccattataaagcatgctacgagcaaatttaaacttttcattttctaattcatgctcggcaattttagcatctagtttagctatatgatcattttgttgtttaatcatagcaatgtgatcatggatagcatcaacattaatgtctctacatctagaacaaatagtaacatgatcaacactagatgtagagggtttgcaagcatttaattcatcaatattagcatgtaacattgcattttcatttctaagattggaaatagaaacattgcaaacatttaaatctttagccttagaaattaatttattattctcaatcttaaggcaagagagtgattcattcaacttatcaatcttagtaatcaaactagcattgtcatgtttaaggttgacaagagaatcatcacgaacatttaatttctcaaccttagcaattaatttggcattttcagttctaaggttagagatggtgtcatggcaaatgctaagctcactaattaatttttcacatttctctacttccttcttctttttgccgtcctttgccatgaggcacttgtggccaacgttggggaagaggaggcctttggtaacagcgatgttgacggcgtcctcattggaggaggagtcggtggagctctcatcggagtcccattcccgacacacgtgggcatcgccgcccttcttcttgtagtatctcttcttttccttcctcttttccttcttgtcgtcgcccctgtcactgtcactagaaataggatattttgctataaagtgaccgagcttaccacacttgtagcatactttcttggagcggggcttgtaatctttccccctcctttgcttgaggatttggcggaagctcttgatgatgagctccatttcctcgttgttgtgcttgggggcgtcgatggggagcctacttgatgtagactcttctttcttttcttccgtcgctttgaatgcgacgggttgcacctcgggtgtggaggtgccgccttgctcaacgatttgtttggagcctttgatcattaactcaaagctcacaaactttcctataacctcctcgggagacattagcttatatctaggatcaccacgaattaattgaacttgtgtaggattacgaaaaacaagtgatcttagaataaccttgaccatttcatggtcatcccatttggtgctcccgaggttgcgcacttggttgaccaaggtcttgagtcggttgtacatgccttgtggctcctctccttggttgaggatgaatcgaccgagctccccctcgatcatctcccgcttggtgatcttggtcacctcattccattcatgtgcggtatttagtacgtcccaaatctctttgacactcttaagcccttgcactttattatactcctctcgacatagagaggcgaggagtatagtagtggcttgggagtcaaagtgccggatttgggcaacctcgtccgagtcgtagccttcatcccccacggatggtacctgcgctccaaactcaacaatgtcccaaatgctagcgtggagtgaggttagatgatgcctcattttatcactccacatacaataattctcaccgtcaaaaaccggtggtttgcctaatgggacggaaagtaaaggagtatgtttggaattgcgaggatagcgtaaggggatcttactaaacttcttgcgctcatggcatttagaagtgatggacagagtgtcagagccggaggtggatggcgatgaggaatcggtctcgtagtagaccaccttcttcatcttctttttcttgtagccactccaatgcgacttggtatgtgaaggggctcccttcattttgttgccggactcccccgatggagccttcccgtggcttgtagacttgtcaccgccggtcacgatctccttcttggcgtgttctcccgacat

SEQ ID NO: 31131 - DNA, 4032 bp, Zea mays
  Clone ID: MRT4577_128401C.1
atgtcgggagatcacgccaagaaggagatggagaccggcgaaaagcccactacaagccacgggagcacttcatcggaagagtcccgcaccaagaggaaggagaagaagaagagctcctccaacaaagggaaggagaagaaatcttcttctcaccacaaagagaagaaggaaaaatcttcttcccacaagccgcatcggaaaggcgacaagcacaagaggatgaggaaagtggtctactacgagaccgacacttcatcaacatccacctccgactctgatgcaccgtccgtaacttctaagcgccaagagcgcaagaagtttagtaagatccccttacactatcctcatacatctagacatactccattactttccgttccattaggcaaaccgccaacctttgacggtgaagattatgctaggtggagtgatttaatgaaatttcatctaacctcactccacaaaagtatatggaatgttgttgagtttggagcacaggtaccatccgtaggggatgaggattatgatgaggacgaagtagcccaaatcgagcacttcaactcccaagccacaaccatactcttggcctctctaaatagagaggaatacaacaaggtgcaagggttgaagaatgcaaaggaaatttgggacctcctcaagaccgcgcacgagggtgatgaactaacaaagatcaccaagcgggaaacgatcgagggggagctcggtcgctttcaacttcgccaaggggaagagccacaagatatgtacaaccggctcaaaaccttggtaaaccaagtgcgcaacctcgggagcaaaaagtgggacgatcacgaggtggttaaggttattctaagagctctcattttccttaaccccactcaagttcaattaattcgtggtaatcctagatacccactaatgacccccgaggaagttatcgggaattttgtgagctttgaatgtatgattaaaggatcaaagaagatcaacgagcttgacgaactctccacatccgaggcgcaaccggtggccttcaaggcgacggaggagaagaaggaggagtctacaccaagtagacaaccaattgacgcctccaagctcgacaatgaggagatggctttaatcatcaaaagctttcgccaaatcctcaagcaacggaaggggaaagactacaaatcccgttccaagaaggtttgctacaagtgtggtaagcccggtcactttatcgctaaatgtccattatcaagtgacagtgacagggacaacgacaagaagggcaagagaagagaaaagaagaggtaccacaagaagaggggcgacgatgcccacgtgtgccgcgagtgggactccgacgagagctccaccgagtcctcctccgacgaggacgccgccaacatcgccgtcaccaaggggcttctcttccccaacgtcggccacaagtgcctcatggcaaaggacggcaaaaagaagaaggttaaatctaaatcctccacaaaatatgaatcctctagtgatgataatgctagtgatgaggaggataacttgcttaccctttttgccaatcttaacatggaacaaaaggaaaaattaaatgaattgattagtgctattcatgaaaaggatgaccttttggattcccaagaggattttctaattaaagaaaacaagaaacatgttaaggttaaaaatgcttatgctctagaagtagaaaaatgtcaaaaactatctagtgagctaagcacttgccatgacactattgccaaccttagaaatgaaaatgctagtttaattgctaaggttgagtctcatgtttgtgatgcttcaattcccaatcttagaaatgataataatgacttgcttgctaagattaaggaattgaatgattctcttgctaacattagagtagaaaatgaaaatttgattgctaaggctaaagattttgatgtttgcaattctattatttccgaccttagaactaagaatgatatgttacatgctaagattgttgaattaaaatcttgcaaaccctctacatctaatgttgagcatgtttctatttgtactagatgtagagatgttgatatcaatgctattcatgatcacatgtccttaattaaacaacaaaatgatcatatagcattattagatgcaaaaattgccgagcataacttggaaaatgaaaagtttaaatttgctagaagtatgctctataatgggagacgcccgggcatcaaggatggcattggcttccaaaggggagacaatgtcaaacttaatgcccctcctaaaaatttgtctaactttgttaagggcaaggctcccatgcctcaggataacaagggttacattttgtaccctgccggttatcccgagagcaaaattaggagaattcactctaggaagtctcactctggccctaatcatgcttttatgtataagggtgagacatctagttctaggcaaccaacccgtgccaagttgcctagaaagaaaactcctaatgcatcaaatgatcatgctatttcattcaaaacttttgatgcatcatatgtgcttactaacaaatccggcaaggtttatgcatccgggggcacaagttggatcatcgatagcggatgcacaaaccacatgaccggggagaagaagatgttctcctcatatgagaaaaaccaagatccccaaagaacaatcacattcggggatggaaatcaaggtttggtcaaaggtgtcactgtctttagaagaagtgatgattcaatagcatttaagggagtgttagagggtcagctatacttggtagattttgatagagctgaactcgacacttgcttaattgctaagactaacatgggttggctctggcaccgccgactagcccatgttgggatgaagaatcttcataaacttctaaagggggaacacattttaggactaaccaatgttcattttgagaaagacaggatttgtagcgcctgccaagccggaaagcaagttggcactcatcatccacacaagaacatcttgacgaccgacaggccactggaactcctacatatggatctattcggcctgattgcttacataagcatcggcaggagaaaaatctcaaaccaagagaccttaaaaggattcttgagacgggctcaaaatgagtttggcttaaggatcaagaaaataagaagcgacaacgggacggagttcaagaactctcaaatcgaaggctttcttgaggaggagggcatcaagcatgagttctcttctccctacacgccacaacaaaatggtgtagtggagaggaagaatcgaactctattggacatggctaggaccatgcttgatgagtacaagacttcggatcggttttgggccgaggcggtcaacaccgcttgctatgccatcaaccggttatatcttcaccgaatcctcaagaagacatcctatgaactcctaaccggtagaaaatccaaatttgctcctaaaactgtagaaggctttttactaggatatgattcaaacacaagggcatatagtgtctttaacaagtcctccggacaagttgaagtttcttgtgacgttgtgtttgatgagactaacgactctcaagtagagcaagttgatcttgatgagataggtattgaacaggctccatgcatagcgctaaggaacatgtccattggggatgtgtgtcctaaggaatccaaagagcctccaaatacacaagatcaaccatcctcctccacgcaagcatctccaccaactcaaaatgaggatgaggctcaagttgatgaagtagaagatcaagcaaatgagccacttcaagatgacgacaatgatcaagggggagatgcaaacgatcaagacaaggaggatgaagaacaaagaccgccacacccaagagtccaccaagcaatccaacgagatcaccccgtcgacaccatcctcggtgtaatactcaaaagtgtaataaaagtggatagagttaaacccattagtttgtggcctctactattcattgcatgtgatcaacactag

SEQ ID NO: 31132 - DNA, 843 bp, Zea mays
  unsure (1)..(843): unsure at all n locations
  Clone ID: MRT4577_128402C.1
cctcgaggccggccggaaaatatggaaccacaatggtttaaacatccattggcactgaagtcttgtagaaattagctctgtctgttcccatcaaatccttgttggtgggagcgatgcatttgctaggctgtatgataggagaatgcttccaccattgagctcgtgccaaaccaaaacgaggccgccaccatgtgttaaaatgttctgcccattgcatcttgctaacagtaagacatatttgcaccttacacatgttgcattcagcccaaatgggaaggaggttcttttaagttacagtggtgaacatgtttatctgttcgatgttgacccagataatctgagttcagttagatacacagcagactatgtacgggaacaattatttgtacccccttttcacaaagtaccagcaaaagaacatgcaaaagaaaagaagacttcagtaaatacagctccaagaaatttgtctagggatatgtgcaagaaatttatgcaagttgcaacaagatctctggagataggcaagaacttaatgcacgggattgaagcatgcagtgaagttcttgaatcaacggaaccagatattgatgatgacatgaggcatgggtttttgtgtactcgagcagcattgtacctaaagaggaagtggaaaaatgatgtttacatggcgattcgggattgtaatagagcgcggaagattgatgccacatcatatcaagcgcacctacatatggctgaggcactattgcagttaggaagactgaanggagcatctgagtatgcagagggcagcaataggcttcttcccccctcatgtcattgagcccagcagtggatgatttc

SEQ ID NO: 31133 - DNA, 322 bp, Zea mays
  Clone ID: MRT4577_128403C.1
cggacgcttgggctgactttttttcaagcctagctgacccacctgggaacgtaattttcgttgctgttgcggaccaccaaaacaccggagagattcatattacaattatatttacaggatttatacagtccctccaaaaatcccttttggccaatccaaagcgagcacgtatagtataatacaaatataattgcacttacattccatattaatagatatatctatttgttaaacaattctatttttacttcacctcagaagaatgttataatcatactttcttgctatgcgtggtttatttataaaaatttcttttattttc

SEQ ID NO: 31134 - DNA, 381 bp, Zea mays
  Clone ID: MRT4577_128404C.1
gcttctagggttttcgcgccgccttctccggcgattagaagatcccacaagaccgttgaggagagggcgcctatctcattattgacaacgagagagaccacaaagctgctgactatgtggacgtgctgacggacggggacgacaatgcagcgaccacgctgggcgcgatctacaaccagacgcgcggaaccctgcgcgacgtacacgacaaacactggctgaggctacccaggcgcgaccacctacccgaccgagacaggcaacggggcaggagcggccttcctcccgtccgcaagaccggcgcgtcgcccaccccaaggtttcgtgctctcccccccccccgcccggacggtaagagagcgcaacgtcaccatgccctgg

SEQ ID NO: 31135 - DNA, 335 bp, Zea mays
  unsure (1)..(335): unsure at all n locations
  Clone ID: MRT4577_128405C.1
cttgttttttttttttttttttggggcgggggggggctggggggcagcggggaccgcggcgcccgtggtgcctccgacgcgcccgggttcccccctggtggtacgccgtcatcgttgcacggcggggctccttataccccaccctctagggggggggggggccgtgggtgaattccggcacggcggaccgngggcctgcccacacatcgggcgctgcggtcccccgggcggggagggggggacccatggacacacaccctggacctgccgtccccccacgagacgcctacctgggtgcccggccgtgtgggccggcgcgtttggtcattgaagct

SEQ ID NO: 31136 - DNA, 306 bp, Zea mays
  Clone ID: MRT4577_128406C.1
ttttttttttttttttttttttttttttttttttttttttttttttttttttttttttttttttttggcagcaacgaacaattccttttgttaacggggagaatctcccaagagggggggagactgggccaacaataactgaaagtttcctgcgaagttacttacaacccggggccttttttgaaaacatatataatctgatcatgggtggcaagggaaagtaacatgacttggcccatttgcattaaaggccccaaagatccctacttgaatttcaaatttttaaaatatcccggaattttttgg

SEQ ID NO: 31137 - DNA, 463 bp, Zea mays
  Clone ID: MRT4577_128407C.1
cccggccactgtggacagttcgtgaacgagaaaaatggacatagtttcgtgtgtgagaatagaaattctttatggagttgggggtctcagactagaccttgatgaaggaatacagcaactccaacactgtacccagttagggctgcgagagcagtactaacagttatttctctttttacctgttgaagagagctatgaactgcctgaacacgaccgtatatatcatggtctatataggagacgcgagacatgctcaggagaacttgatctccacgttgctggcttacaactttttcgctcaggctgaggccctcatggtcggcaagacccctgaccaggtcaagactgagggtgctcccgacaacctcgttcctcacaaggggttgcttggtaaccgggccaccaccttcattctggctgacaagaacacacatgccactcttggtgctctgatagactacta

SEQ ID NO: 31138 - DNA, 595 bp, Zea mays
  Clone ID: MRT4577_128408C.1
gtgctcaccatcatgctgcagctgtttgatgagggccggctgacagatggaaaagggaagaccattgattgcaaggacgccatcttcatcatgacctccaatgtggccagcgacgagatcgcacagcacgcgctgcagctgaggcaggaagctttggagatgagccgtaaccgtattgccgaaaacctgggggatgtccagataagtgacaagatcaccatctcaaagaacttcaaggagaatgtgattcgccctatcctgaaagctcacttccggagggatgagtttctgggacggatcaatgagatcgtctacttcctccccttctgccactcggagctcatccaactcgtcaacaaggaactaaacttctgggccaagagagccaagcaaaggcacaacatcacgctgctctgggaccgcgaggtggcagatgtgctggtcgacggctacaatgtgcactatggcgcccgctccatcaaacatgaggtagaacgccgtgtggtgaaccagctggcagcagcctatgagcaggacctgctgccagggggctgtactttgcgcatcacggtggaggactcagacaagcagctac

SEQ ID NO: 31139 - DNA, 2646 bp, Zea mays
  Clone ID: MRT4577_128409C.1
acccacgcgtccggaagtatccaattcagagaccctgaacacagtggagatgcagcagactatctccgataggcttaatttgccatggaatgaatcagagatagttgagaaacgggccagattcctattgaaggcactggccaggaaaagatttctattgctacttgatgacgtaaggaagagattccgactggaggatgtcggtatcccaactccggacacgaagagccaaagcaagctgatcctgacatcacgtttccaagaagtatgcttccagatgggtgcacagaggagccgcattgaaatgaaggttttggatgataatgctgcctggaacctgttcttgagcaagctgagcaacgaggcttttgcagcagttgagtcaccgaatttcaacaaggttgttcgggaccaggccaggaaaatattctccagttgtggaggtctaccacttgcactcaatgtcattgggactgctgtggcagggttggaaggaccaagagaatggatttcagctgctaatgacatcaatatgttcagcaatgaagatgtggatgaaatgttttatcggctgaaatacagctatgacaggctgaaatccactcaacaacagtgctttttgtactgcactcttttcccagaatatggatctattagtaaggaaccattagttgatttttggctggctgaaggtttgcttctcaatgatcgtcaaaagggtgatcagataattcagagccttatttcagcatgcttgttgcagaccggtagctcattgtcatcaaaagtaaaaatgcaccatgtaatcaggcatatggggatttggttggttaacaagacagatcaaaagtttctcgttcaagcagggatggctttggatagtgctccaccagcagaagagtggaaggaatcgacaaggatctccatcatgtctaatgatatcaaagagcttcctttctcaccggaatgtgaaaacctcactacattgttgatccaaaataacccaaatttgaacaagctgagttcagggtttttcaagtttatgccctccttgaaagtgctggatctttctcacactgcaataacaacactcccagaatgtgagacattggttgcattacagcatctcaatttgtcacacacacgtattaggttattacctgagcggctgtggttattgaaagagttgaggcatctggatctcagcgtgactgctgaactcgaagataccttgaacaactgctcaaggttactcaatttaagagttcttaatctctttcgcagtcactatggtattagtgacgtcaacgacctgaatctggattccctgaaggcactgatgttccttggaatcactatttatacagagaaggtgttaaagaaactgaacaagactagtcctttggcaaagtcaacatatcgtctgcatcttaagtactgtagagaaatgcagtcgatcaaaatctccgatctcgaccacttggtgcaactcgaggagctgtatgtcgaatcatgctataatctaaacactcttgttgctgatactgagctgacggcatcagattcaggcctgcagctcctcaccctctcagttcttcctgtgctggagaacgtcattgttgcaccaacgccccaccattttcagcacatccgcaaattgaccatttcgagttgccccaagttgaagaacatcacatgggtcctaaaacttgaaatgctcgagaggctcgtcgtgatccattgtgatgggttgctgaagattgttgaagaagacagcggtgatgaggcagaaacaacaatgttgggtcagggtcatccttctgaagaacaggaagataaacggattgatggtggtcaaagtgtgtgcaagagcgatgacaatgtgcatgctgagctcctgaacctgagatcaatcgtgctgactgatgtcaagagcctgagaagtatctgcaagccaagaaattttcccagcctcgagaccatccgggtggaggattgcccgaatctgagaagcatcccactgagcagcacgtacaactgtgggaaactgaagcaggtgtgcggttcagttgaatggtgggagaaactggagtgggaggacaaggagggcaaggagagcaagttcttcattccaatctgacaggcccctcccgccctccgttcagctgttctcggcggttgctttgtcagttggcaggaagcttcgttcaatgctgccacgaataagcggttcggaatctgtatatgcgacgagttgtttcttttacaggtagtctgtgtatattgcttgtgttcacaaacctgtacatgatctgattcattcatgtattgctgtaaatgcgatcaataaaattccatttgtctacttggataaaaaaaaaaaaaaaaaaaaaaaaaaaaaaaaaaaaaaaaaaaaaaaaaaaaaaaaaaaaaaaaaaaaaaaaaaaaaaaaaaaaaaaaaaaaagaaaaaaaaaaaaaaaaaaaaaaaaaaaaattttgggggggggccccgcccccaattcccccttatgggggggttttaaccccccccctgggggcgggtttttaaaaccggggggagggaaaaacccggggggcccccaattttaaagcgttaaaaaaaaacccctttttccccggtgggg

SEQ ID NO: 31140 - DNA, 831 bp, Zea mays
  Clone ID: MRT4577_12840C.1
atccagaaactcgaatcgtagacacgaacgactacttgagagaggagaggcggcgggagagagaagagtcgacgacgacggtaaccggccgccatggagattgggatggcaagtggactggaaactctatgcggtcaagcctatggagcaaaacagtatgacaaactggggatgcacacctacagagctatagtcacactcattgctgtgagcattccaatctcacttctgtgggcattcataggcaaactcctgatcctcataggtcaggaccccttgatctcaagggaagctgggagatacatagtctggttgattccaggtctctatgcatacgccatcagccagcctctcacaaaatttctacagtctcagagcctgataattcctatgctttggtcctccattgcaactctgctcttgcacattcctctttgttggttactagtgttcaagaccagtatggggtacattggagcttctttggcaataagcttgtcgtattggttaaacgtgatgatgcttgccgcttacatcagatactcggattcttgtaaggagacccgctcacctccaactgttgaggccttcaaaggagtcagtgtgtttctacgcctggctctgccgtctgcactgatgttgtgggattttaccaaatccagagctgcacacttcagttctttcaatctgtttgacgactatcacattaatgtatactataccttatgggcttggagcggctgcaagcactagggtaacagatgagttgggtggtggtacccctggaagagctcgatcatctgttccgggcatcatgtgtattgcagtgat

SEQ ID NO: 31141 - DNA, 618 bp, Zea mays
  Clone ID: MRT4577_128410C.1
ctccacaaagctcatcgcagcgactcttctccccgctttcctcgccctccatctacacgccccagcagcaatggccaccgcggcaggaagctccaactccaacctcttccgcgactacatcggcgccctctacaacggcgtcaggttcgccgacgtgccggtcgacccgcgcgcccgcttcgacttcatcctcgcgttcgtcatcgactacaccaccgcgacggagcccccgtccccgaccaacggccggttcaacgtcttctggcaggacacggtgctcacccctgacgcggtcgccgaggtcaagcggcggaaccccaaagtgcgcgtggccgtcagcctcggcggcgccacggtcaacggcaggcccgtgttcttcaacgtcacctccggcgtcgactcctgggtccgcaacgccgtcgactccctcaccggcatcatccggcggtacggcctggatggcatcgacatcgactacgagcagttccaggtggacccggccaccttcgccgagtgcgccggccgtctcgtggcggcgctcaagagcaacggcgtcatcagcttcgcgtccatcgcgccgtacggcaacgccgacgtgcaacgctactaccggacgct

SEQ ID NO: 31142 - DNA, 183 bp, Zea mays
  unsure (1)..(183): unsure at all n locations
  Clone ID: MRT4577_128411C.1
tcnctgcggntcccgaaacacgcacagtacgcgagcactcactgagccgagctgcgaggacacactgccgcgggcgcagagatgagccgtggcacaggcgccagctatgaccaccacatcaccatcttgtccccggagggacgcctggccaagtacagaaccgctcaggggggaagcagaggg

SEQ ID NO: 31143 - DNA, 338 bp, Zea mays
  Clone ID: MRT4577_128412C.1
gacccacgcgtacgcccaggcgtacgaccactcatcttcccactttaccttcaacacctctgctctcaatacacgacatgtaccacacaccatagctactgcccacgctaaccatgcatccaacaccagccagactcccacttaaataacacctcactcttaaaaatatcgacccactcgacaatcacaagaacgctttgacataccaacttctggacctacgagcaacaaatatttttactcggactataccacctcagattccacttacaccctgcatcttctaaccaaatctttcttgaacgatacccttcactacttgatcaacaaatttgcct

SEQ ID NO: 31144 - DNA, 5565 bp, Zea mays
  Clone ID: MRT4577_128413C.1
atgtcgggagatcacgccaagaaggagatggagaccggcgacaagcccactacaagccacgggaaggctacatcggaagagtcccgcaacaaagggaaggggaaggagaagaaggcctcttcccacaagtcgcatcggagtggcgacaagaaaaagaagatgaggaaggtagtctactacgagaccgacacttcatcaccttccacttccggctccgacgcgccctccataacttctaagcgccatgagcgcaagaagtttagtaagatccccctacgctaccctcgcattcctaaacatactccattactttccgttccattaggcaaaccgccaacctttgacggtgaagattatgctaggtggagtgatttaatgaaatttcacctaacctcactccacaaaagtatatggaatgttgttgagtttggagcacaggagtataacaaggtgcaagggttaaagagcgccaaggaagtttgggacgtgctcaagaccgcgcacgagggagatgagctaaccaagatcaccaagcgggagacgatcgagggggagctcggtcgctttcggcttcgcaaaggggaagagccacaagacatgtacaaccggctcaaaaccttggtgaaccaagtgcgcaacctcgggagcaaaaaatgggatgaccacgagatggataaggttattcttagatcacttattttccttaaccctactcaagttcaattaattcgtggtaatcctagatatacactaatgactcccgagcaagtaatcgggaattttgtgagctttgagtatatgatcaagggctcaaagaagatcaacgagctagatgatccctccacatccgaagcacaaccggttgcattcaaggcaacagaggagaacaaggaggagtctacatcaagtagacaaccaatcgacgcctcaaagctcgacaacgaggaaatggtgctcgtcatcaagagcttccgccaaatcctcaagcaaaggaggggaaaagattacaaatcccgctccaagaaggtttgctacaatgacagtgaccgaggcgacgacaagaaggggagaagaaaggagaagaagaggtactacaagaagaagggcggcgatgcccatgtttgtcgggagtgggactccgacgagagctcaagcgactcctccgacgacgaggacgccgccaacatcgccgtcaccaagggactcctcttccccaacgtcggccacaagtgcctcatggcaaaggacggcaaacgaaagaaggttaaatccaactcctccactaaatatgaatcttctagtgatgataatgttagtgatgaggaggatagcttgcgttccctttttgccaaccttaacatagctcaaaaggaaaaattaaatgaattagttagtgctattcatgaaaaggatgaccttttggattctcaagaggattgtctaattaaagaaaacaagaaacatgttaaggttaaaaaggcttatgctctagaagttgagaaatgtgaaaaattatctagtgagctaagcacttgccgtgagatgattgacaaccttagaaatgtaaatgctagtttaaatgctaaggttgattctcatgcttgtaatgtttcaattcccaattctagagataataatgatgagttgcttgctaggattgaagaattaaacatttctcttgctagccttagattagaaaatgaaaatttgattgctaaggctaaagattttaatgtttgcaatgctactatttccgaccttagaagtaaaaatgaaatattgcatgctaaggttgtagaactaaaatcttgcaaaccccctacatctaccgttgagcacacttctatttgcactagatgtagagatattaacatcgatgctatacatgatcacatggctttaattaaacaacaaaatgatcatatagctaaattagatgctaaaattgccgagcataacttggaaaatgaaaaatttaaatttgctagaagtatgctctataatgggagacgtccgggcattaaggatggcattggcttccaaaggggaaacaatgtcaaacttagtgcccctcctaaaagattgtccaattttgttaagggcaaggctcccatgcctcaggataacgagggttacattttataccctgacggttatcccgagagcaaaattaggagaattcattctaggaagtctcactctggcccaaatcatgcttttatgtataagggtgagacatctagttctaggcaaccaacccgtgctaagttgcctaagaaaactcctagtgcatcaaatgatcatgttatttcatttaaaacttttgatgcttcttatgtgcttacaagcaaatccggcaaggtcgttgccaagtttgttgggggcaaacacaagggctccaagacttgtgtttgggtacccaaagttcttgtttctaatgccaaaggacccaaaacagtttgggtttatgcatccgggggctcaagttggatactcgacagcgggtgcacaaaccacatgaccggggagaaaaggatgttctcctcatatgagaaaaaccaagatccccaacgagctatcacattcggggatggaaatcaaggtgtcactgtctttagaagaagtgatgattcaatagcatttaagggtgtgttagagggtcagctatacttagtagattttgatagagctgagctcgacacatgcttaattgctaagactaacatgggttggctctggcaccgccgactagcccatgttgggatgaagaatcttcataagcttctaaagggagagcacattttaggattaacaaatgttcattttgagaaagacaggatttgtagcgcatgtcaggcggggaagcaagttggaatccatcatccacacaagaacatcatgacgaccgacaggccgcttgagctactccacatggatctattcggcccgattgcttacataagcatcggcgggagtaagtattgtcttgtaatagtggatgattattctcgcttcacttgggtattctttttacaggaaaaatctcaaacccaagagaccttaaagggattcttgagacgggctcaaaatgagttcggcttaaggatcaagaaaataagaagcgacaacgggacggagttcaagaactctcaaattgaaagctttcttgaggaagagggcatcaagcatgagttctcttctccctacacccctcaacaaaatggtgtagtggagaggaagaatcgaactctattggacatggccagaaccatgcttgatgagtacaagactccggaccggttttgggccgaagcggtcaacaccgcctgctatgccatcaaccggttatatctccaccgaatcctcaagaagacatcatatgaactcctaaccggtaaaaagcccaacatttcatattttagagtttttggtagcaaatgctttattcttgttaaaagaggtagaaaatctaaatttgctcctaaaactgtagaaggctttttacttggttatgactcaaacacaagggcatatagggtctttaacaagtccactggactagttgaagtctcatgtgacgttgtgtttgatgaaactaacggctctcaagtagagcaagttgatcttgatgaaataggtaatgaagaggctccgtgcatcgcgctaaggaacatgtccattagggatgtgtgtcctaaggaatccgaaaagcctccaagtgcacaagatcaaccgtcctcctccatgcaagcatctccaccaactcaaaatgaggatgaagctcaagttgatgaagggcaaaatcaagaagatgagccacctcaagatgatggcaatgatcaagggggagatgcaattgatcaagaaaaggaggatgaggaagaaccaataccgccacacccaagagtccaccaagcaatccaacgagatcaccccgtcgacatcatcctcggcgatattcataagggggtaaccactagatctcgtgttgctcatttttgtgaacattactcttttgtttcctctattgagccacacagggtagaggaagcacttcaagattcggattgggtggtggcgatgcaagaggagctcaacaacttcactagaaatgaggtatggcatttagttccacgtcctaaccaaaatgttgtaggaaccaaatgggtcttccgcaacaagcaagatgagcatggtgtggtgacaaggaacaaagctcgacttgtggccaaaggatactcccaagtcgaaggcctggatttcggtgaaacctatgcacccgtagctaggcttgagtcaattcgcatattattagcctatgctacttaccatggctttaagctttatcaaatggacgtgaaaagtgccttcctcaatggaccaatcaaggaagaggtctatgttgagcaacctcccggctttgaagacagtgagtatcctaaccatgtttataggctctctaaggcgctttatgggctcaagcaagccccaagagcatggtatgaatgcctaagagatttccttattgctaatggcttcaaagtcggcaaggccgatcctacactctttactaaaactcttgaaaatgacttgtttgtatgccaaatttatgttgatgatattatatttgggtctactaacgagtctacatgtgaagagtttagtaggatcatgacacagaaattcgagatgtcgatgatgggggagttgaagtattttctaggattccaagtcaagcaactccaagagggcaccttcattagccaaacgaagtacactcaagacattctaaccaagtttgggatgaaggataccaaacccatcaagacacccatgggaacaaatgggcatctcgacctcgacacgggaggtaagtccgtggatcaaaaggtataccggtcgatgattggttcattgctttatttatgtgcatctcgaccggacattatgctttccgtttgcatgtgtgcaagattccaatccgaccctaaggaatcacaccttacggccgtaaaacggatcttgagatatttggcttatactcctaagtttgggctttggtaccctcggggatccacatttgatttgattggttattcggatgccgattgggcggggtgcaaaattaataggaagagcacatcggggacttgccagttcttgggaagatccttggtgtcttgggcttcaaagaagcaaaattcggtcgctctttccaccgccgaagccgagtacattgccgcaggacattgttgcgcgcaattgctttggatgaggcaaaccctgcgggactacggttacaaattaaccaaagtccctttgctatgtgataatgagagtgcaatcaaaatggccgacaatcccgtcgagcatagccgcactaagcacatagccattcggtatcattttcttagggatcaccaacaaaagggagatatcgagatttcttatgttaacactaaagatcaattagccgatatctttaccaagcctcttgatgaacaatcttttaccagacttaggcatgagctcaatattcttgattcacgcaatttcttttgctag

SEQ ID NO: 31145 - DNA, 132 bp, Zea mays
  Clone ID: MRT4577_128414C.1
ccggggttccggttccgacacacggccgaggacgtcgtggtgcagtacctccggacgcaggccatcggcgtgccgctccccgccgaacgtcatccccgtcttccgcgacctctacaaacgagacacctggga

SEQ ID NO: 31146 - DNA, 4947 bp, Zea mays
  Clone ID: MRT4577_128415C.1
atgtcgggagatcacgccaagaaggagatggtgaccggcgagaagcccgttacaagccacgggaaggctccatcgggagagtcccgcaacaaggggaaggagaaggaatccccttcacacaagtcacatcggagtggcgaaaagaaaaagaagatgaggaaggtggtctactacgagatcgactctttgtcgccatccacctccggctccgacgcgccgtccgtaacttctaagcgccatgagcgcaagaagtttagtaagattcccctacactaccctcgcatttccaaacgtactccattactttccgttccattaggcaaaccaccaatttttgacggtgaagattataacatgtggagtgataaaatgagacatcacctaacctcactctacactagtatttggaacgttgttgagtttggtgtacaggtaccatccgtaggggatgaggactatgattcagacgaagttgcccaaatccggcacttcaactcacaagccaccacaatactcctcgcctctctaagtcgagaggagtataacaaggtgcaagggttgaagagcgccaaagagatttgggatgtactcaaaacggcgcacgaaggtgatgaggtgaccaagatcaccaaaagggagacgatcgagggggagctcggtcgattcatgcttcaccaaggggaggagccacaagcgatgtacaaccggctcaagaccttggtgaaccaagcgcgcaacctcgggagcaccaaatgggatgaccatgaaatggtcaaggttattctaagatcactagtttttcttaatcctactcaagtacaattaattcgtggtgatcctagatacaaaataatgtctcccgaggaagtgataggtaaatttgtgagctttgagctaatgatcaaaggctccaaaaagatcatcgagcaaggcgcatcctcctccgtacccgaggcacaacccgttgcattcaaagcaacagaggagaagaaagaagattctactccaagtagaatccccatcgacgcctccaagctcgacaatgaggagatgacgctcatcatcaagagcttccgtcaaatcctcaaacaaaggaaggggaaagattacaagccccgttccaagaagtgggactccgacaagagctccaccgactcctcctccgacgaggacgccgccaacatcgccgtcaacaaagggctcctcttccccaacgtcggccacaaatgcctcatggcaaaggacgacaaaaagaagaaggtgaaatccaaatcctccactaaatatgcaacatctagtgatgaggctaattctagtgataatgaggatgacttgtttactctttttgctaacttaaacatgcaacaaaaggaaaaattaaatgaattaattagtgctattcatgataaggatgaactcttggatagcaaagaggacttcctaattaaagaaaacaagaagcatgttaaggtgaaaaatgcttatgctctagaagttaaaaaatgtgaaaaattaactagtgagctaagcacttgccatgatattatttccaaccttagaaatgagaatgcaaatttaattgctaaggttgggaagcttgatgcttgtgatgattcaattgttagtcttagaaatgataatgctaatttaattgctaagattgacaaattgaatgtttctctttctagccttaaaattgaaaatgaaaaattgtttgctaaggctaaggatttagatgtttgcaatgcttctatttccaatcttagagatgagaatgatattttgcatgctaagattgttgaatcaaatatttgcaaaccctctacatcctctgttgagcatgttactatttgtactagatgtagagatgttaatgtagatgctattcatgatcacctttctttaattaaacaacaaaatgatcacatagctacattaactgctaaaattaatgagcatgacttagaaaatgaaaattttaaatttgctagaagcatgctctataatgggagacgccctggcattaaggatgacattggtttccaacagggagacaatgtcaagcttaatgccccgcccaaaagattgtctaattttgttaaggtcaaggctcccatggttcaggataacgagggttacattttataccctgctggttatcccaaacacaaaattaggagaattcactctaggaagtctcactctggtcctaatcatgcttttatgtataagagtgaggcatctagttctaggcaatcaacccatgctaaattgtctaagaagaaaactcctaaagcatcaaatgatcataatgtttcatttagaacttttgatgcttcctatgtgctaactaacaaatcaggcaaggttgttgccaagtatgttgggggcaaacacaagggatcaaagacttgtgtttgggtacccaaagttcttgtatctaatgtcaaaggacccaaaactgtttgggtttatgcatcccggggctcaagttggatcatcgatagcgggtgcacaaaccatatgactggggagaaaagaatgttctcctcctacgagaaaaaccaagatccccaacgagctataacattcggggatggaaatcaaggtgtggaaaaatctcaaacccaagggaccttaaagggattcttgagacaggctcaaaatgagttcggcttgaggatcaagaaaatcagaagcgataatgggacggagttcaagaactcacaaatagaaggctttcttgtggaggagggcatcaagcatgagttctcttctccctacacgccacaacaaaatggtgtagtggagagaaagaatagaactctattggacatggcaaggaccatgcttgatgagtacaagacttcggatcggttttgggtcgaggtggtcaacaccgcatgctacgccatcaaccgattgtatctacaccgaatcctcaagaagacatcttacgaactcctcaccggtagaaaatccaaatttgctcctaaggctgtagaaggctttttactaggatatgattcaaacacaagggcatatagagtctttaacaagtccactggactagttgaagtttcttgtgacattgtgtttgatgagactaacggctctcaagtagagcaagttgatcttgatgaattagatgatgaagaggctccgtgcatcgcgctaaggaatatgtccattggggatgtgtgtcctaaggaatccgaagagcccattcaagcacaagatcaaccatcctcctccatgcaagcatctccaccaacacaagatgaggatgaggctcaagctgatgaaggagaagatcaagaagatgagccacctcaagaggaggacaaggatcaagggggagatgcaaatgatcaagacaaggaggatgaacaaaatccaagaccgccacacccaagaccacacagggtagaggaagcacttcaagattcggattgggtgatggcgatgcaagaggagctcaacaatttcaaaaggaatgaggtatgtcatttagttccacgtcctaaccaaaatgttgtaggaaccaagtgggtcttccgcaacaaacaagatgagcatggtgtggtgacaaggaacaaggcacgacttgtggccaaagggtattcacaagtcgaaggtttagatttcggtgaaacctatgcacccgtagctaggcttgagtcaattcgaatattacttacctatgctactcaccatgactttaagctctaccaaatggacgtgaagagtgccttcctcaatggacccatcaaggaagaggtctatgttgagcaacctcccggctttgaagatagtgagtatcctaaccatgtttacaaactctctaaggcgctttatgggctcaagcaagccccaagagcatggtatgaatgcctaagagattttcttatcactaatggcttcaaagtcggaaaggccgatcctactctattcactaaaactattgaaaatgatttgtttgtatgccaaatttatgttgatgatattatatttgggtctactaacaaatctatttgtgaagagtttagtaggatcatgattcaaaaattcgagatgtctatgatgggggatttgaagtatttcttaggatttcaagtcaagctactccaagagggcaccttcattagccaaacgatgtatattcaagatattcttacaaagtttggaatgaaggatgccaagcccatcaagacacccatgggaaccaatgggcatctcgacctcgacacgggaggtaaatccgtagatcaaaaggtatactggtcgatgataggttctttactctatttatgtgcatctcgaccggacattatgctttccgtatgcatgtgtggaaggttccaagccgaccctaaggaagttcaccttagggccgtgaaacgaatcttgagatatttagttcaaacacctaagtttggtctttggtaccccaagggatcctcatttgatttattaggatattccgatgctgattgggcagggtgtaagattaacagaaagagcacatcagggacttgtcagtttttgggaagatccctggtgtcttgggcttcaaagaagcaaatctcagtagctctttctactgccgaagccgagtacattgccgtaggccattgttgcgcgcaattgctttggatgaggcaaacccttagggactatggctacaagtttagcaaagtccctctcctatgtgacaatgagagtgcaatccgcatggcagataaacccgttgaacacagacgcactaagcacatagccattcggtatcactttttgagagatcaccaacaaaagggggatatcgagatagcctatataaacaccaaagatcaattggccgatatctttaccaagcctttagatgagcaatcctttactaaacttaggaatgagctaaatattcttgattctaggaattttgattga

SEQ ID NO: 31147 - DNA, 489 bp, Zea mays
  unsure (1)..(489): unsure at all n locations
  Clone ID: MRT4577_128416C.1
cggacgcgtgggtaatggaccaactcaccgagctcaccantaaaggttgtggttgtctgcttgtggttgatgaagagcatcatttgattgggaccttcactgatggtgatctccggcggacactgaaggcaagcgggccagctatcttcagtctcacagttggagagatgtgcaacaggaacccaaggacaatcactgcggaggcaatggcagttgaagccatggagaagatggaggcaccaccttcacccgtgcagttcttgcctgttgtcaacgagaacaacgtcgtgtgtggaatcatcacattgcatggattggtctctgccggattgtagacttgtgtggcaccattacctgttagctagctgttaccgctggagtatttatgtggagcctgaactcttcagtgtacccttatgtacagtatagtggtcgctaagaggaacatggtacactgcttataatgcttgtgtttttgtacttaatttt

SEQ ID NO: 31148 - DNA, 396 bp, Zea mays
  unsure (1)..(396): unsure at all n locations
  Clone ID: MRT4577_128417C.1
acaccncttattattaacaccaacccaaccccacccccaagggggactttttaacacacttttctttttttttcggggggcccgatccatttaaactttgggtcaaccccttttggaattgcaaactggggggcaaaatcaggggtgtcatctgactgggcactaaaaaacccctcagggtggtgaatttttcttaaccagggggggacccacttgccgcaggaaaaaaaaaaaaaaatgggaagaagcaagtttatgggggggaatcccccaaccagggctccaggattcctccaccaccatttttttttgagtgccccaaccgatgggttgctgggattttttggggaacccaccccgggggggggcttaaaacgggtgaaagaccctgatggg

SEQ ID NO: 31149 - DNA, 4734 bp, Zea mays
  Clone ID: MRT4577_128418C.1
atgtcgggagatcacaccaagagggagatggagaccggcgacaagcctactacgagtcacgggagcacttcatcggaagagtcccgcaccaagaggaaggagaagaagaaggactcctccaacaaagggaaggggaaggagaagaaatcttcttcccacaagtcgcatcggagaggcgacaagaacaagagaatgaggaaagtggtctactacgagaccgacacttcatcaacgtcgacctccgactccgacgtgccgtcggtaacttctaagcgccaagagcgcaagaagtatagtaagatccccctacgctacccccacatttcaaagcgtacttctttactctccgttccattaggcaaaccaccggtttttgacgatgaagattataatatgtggagtgacaaaatgaggcaccatctaacctcactccacacaagcatatggaatgttgttgagtttggtgtacaggtaccatccgtaggggatgaagactacgactcggacgaggtggcccaaattcaccactttaactcccaagcaaccactatactcctcgcctctctaagtcgagaggagtataataaggtgcaagggttaaaatgtgcgaaggaaatttgggacgtactcaagaccgcgcacgagggagacgaggtgacaaagatcaccaagtgggagacgatcgagggggagctcggtcgcttcatgcttcaccaaggggaggatccacaagctatgtacaaccgcttgaagaccttggtgaaccaagtgcgcaacctcgggagcgaaaaatgggatgaccatgagatggtcaaggttattcttagatctctcgtatttcttaaccctacacaagttcaattaattcgaggtgatcctagatataagctaatgtctcccgaggaagttataggcaaatttgtgagctttgagctaatgattaaaggctcaaagaaaatcatcgagcaaggcacctcctccacgcccgaggcacaaccggtcgcattcaaggcgacggaggagaagaaggaagagtctacatcaagtagacaactcatcgacgcctccaagctcgacaacgaggaaatgacgctcatcatcaagagtttccgccaaatcctcaagcaaaggagggggaaagactacaagccccgctccaagaaagtatgctacaaatgtggtaagcccggtcatttcattgctaaatgtccattatctagtgatagtgacagggacgatgacaagaaggggagaagaagggaaaagaagagatatcacaagaagaagggcggcgatgcccacgtatgccgcgagtgggactccgacgagagctccaccgattcctccttcgacgaggacgccaccaatatcgccatcaccaagggacttctcttccccaacgtcggccacaagtgcctcatggccaaggacagcaaaaggaagaaggttaaatccaaatcctccactaaatatgagtcctctagtgatgataatgctagtgatgaagaggataatctgcgtactctttttgtcgacctcaacatgcaacaaaaggaaaaactaaatgagctaattagtgtcatccatgagaaggatgatctcttagactcccaagaggacttcctaatcaaggaaaacaaaaagcatgttaaggtaaaaaatgcttatgctctagaagtagaaaaatgtgagaaattatctagtgagctaagcacatgccataacactattgccaaccttagaaatgaaaatgccaaattaattgctaaggttgattctcatgtttgtgatgtttcaattcccaatcttagaaatgataatgatgatttgcttgctaagattgaagaattaaacatctctcttgctagccttagggttgaaaatgaaaaattaattgctaaggctaaagaattagatgtttgcaatgttacaatttccgatcttagagataacaatgatattttgcgtgctaagattgttgaactcaattcttgcaaaccctctacatctaccattgagcatgtttctatttgcactagatgtagagacgttgatattgatgctattcatgatcacatggtcttaattaaacaacaaaatgatcatatagcaaaattagatgctaaaattgccgagcataacttagaaaatgaaaagtttaaatttgctagaagtatgctctataatgggagacgccctggcatcaaggatggcattgacttccaaaggggagacaatgtcaaacttagtgcccctcctaaaagattgtctaattttgttaagggcaaggctcccatgcctcaggataacgagggctacattttgtactctgccggctatcctgagagcaatattaggagaattcattctaggaagtctcactctggccctaaccatgcttttatgtataagggtgagacatctagctctaggcaaccaacccgtgctaagttgcctaagaagaaaactcctaacgcatcaaatgatcatgacatttcattcaaaacttttgatgcatcatatgtgcttactaacaaatccggcaaggtttatgcatccgggggctcaagttggatcatcgacagcgggtgcacaaaccacatgacaggggagaagaaaatgttctcctcctacgagaaaaaccaagatccccaacgagctatcacattcggggatggaaaccaaggtttggtcaaaggtgtcactgtctttagaagaagtgatgattcaatagcttttaagggagtgttagagggtcagctatacttggtagattttgatagagctgaactcgacacttgcttaattgctaagactaacatgggttggctctggaaccgccgactagcccatgttgggatgaagaatcttcataagcttctaaaggaagaacacattttaggactaacagatgttcattttgagaaagacaggatttgtagcgcatgccaagccgggaagcaagttggtgttcatcatccacacaagaacatcatgacgactgacaggccactggaactcctacacatggatttattcggcccgatcgcttacataagcatcggcgggatggagaggaagaatcgaactctattggacatggaaagaaccatgcttgatgagtacaagacaccggatcggttttgggccgaggcggtcaacaccgcctgctacgccatcaaccggttatatctgcaccaaatcctcaagaagacatcctatgaactcctaactggtaaaaagcccaatatttcatattttagagtttttggtagcaaatgctttattcttgttaaaagaggtagaaaatctaaatttgctcctaaaactgtagaaggctttttactaggatatgactcaaacacaagggcatatagagtctttaacaagtcctcaggacttgttgaagtttcttgtgacgttgtgtttgatgaaactaacggctctcaagtagagcaagttgatcttgatgagataggtgacgaagaggctccgtgcatcgcgctaaggaacatgtccattggggatgtgtgtcctaaggaatccaaagagcctccaaatgcacaagatcaaccatcttcctccacacaagcatctccaccaactcaaaatgaggatgaagctcaagttgatggaggagaagatcaaagtggtgagccacctcaagatgacgacaatgatcaaggggaagatgcaaatgatcaagacaaggaggatgatgaaccaaggccgccacacccaagagtccaccaagcaatccaacgagatcaccccgtcgacaccatcctcggcgacattcataagggggtaaccactagatctcgtgttgcacatttttgtgagcattactcttttgtttcctctattgagccacacagggtagaggaagcacttcaagattcggattgggtgatggcaatacaagaggagctcaacaacttcattaggaacgaggtatggcatttagttccacgtcctaaccaaaatgttgtaggaaccgaatgggtcttccgcaacaagcaagatgagcatggtgtggtgacaaggaacaaagctcgactcgtggccaaggggtattcacaagtcgaaggtttggatttcggtgaaacctatgcacctgtagctaggcttgagtcaattcgcattttacttgcctatgctacttaccatggctttaagctttaccaaatggacgtggaaagtgcctttctcaatggaccaatcaaggaagaggtctatgttgagcaacctcctggctttgaagatagtgagtaccctaactatgtctataaactctctaaggcgctttataggctcaagcaatccccaagagcatggtatgaatgcctaagagattttcttatcgctaatggcttcaaagtcggaaaagctgatcctactctctttactaaaacacttgctaatgatttgtttgtatgccaaatttatgttgatgatatcatatttgtgtctactaacgaatctacatgtgaagagtttagtaggatcatgactcaaaaattcgagatgtctatgatgggggagttgaagtatttcttaggatttcaagtaaagcaactccaagagggcaccttcattagtcaaacaaagtacgttcaagacatactcaccaagtttgggatgaaggatgccaagcccatcaagacacccatgggaacaaatgggcatctcgacctcgacacgggagttagagcaatggaatcaagtgagtag

SEQ ID NO: 31150 - DNA, 1465 bp, Zea mays
  Clone ID: MRT4577_128419C.1
cggagatatgataatggaccaactcaccgagctcaccagtaaaggttgtggttgtctgcttgtggttgatgaagagcatcacttgcatgcccgcgtgtttccagaccgcaaggaatcaaatccgcccgccgcccgacatctcgcctcgccgcggcatttcctcaaacgccccgctcacagcgcccatgggctcccttccggtgccggcctcaacggaatgcaccccgcaggggcgcgccacggtgtcggcgtcggacctggcgccgctcttctccgcgcagcgccggcacctggaccacttcttcgaccgcctcgacatgtcgcaggcggcggcgttcgcgcaggtgctgctcgacgcgccgggcgccgtcttcttcacgggcgtcggcaagtcgggcatcgtggcgcgcaagaccgcgcagacgctggcgtcgctgggcttcgcgcgcgccggcttcctcgcccccgtcgacgcgctccacggcgacatcggcgcgctcttccccggggacgtgctcgtgctcctctccaagtccggcgcctccgacgagctgctcgcgctcgtgccctgcgcgcgcgccaagggcgcctacctcgtctcggtcacctccgcggcctcgggggccgactgcccgctcgccgcggcctgcgacctcaacgtccacctcccgctgcagggggaggtgtgccccttcggcctcgcgcccgtcacctccaccgccatccagatggtgttcggggacaccgttatcgccgccatcatggaggcaaggcgactctccagggaccagtacgcctccaaccatcctgctggcaagatcggcaagaccctcattttcaaggttaaggatgtcatgaagaaacagaatgaacttcccctgtgcaaggagggagatatgataatggaccaactcaccgagctcaccagtaaaggttgtggttgtctgcttgtggttgatgaagagcatcatttgattgggaccttcactgatggtgatctccgccggacactgaaggcaagcgggccagctatctttagtctcacagttggagagatgtgcaacaggaatccaagaacaatcactgcagacgcaatggctgttgaagccatggagaagatggagtcaccaccttcacctgtgcagttcttgcctgttgtgaacgacaacaacgtcgtgtgtggaatcatcacactgcatggattggtctctgccggcctgtaaacttctgtggcaccatcaccttctgctggactgtaagctgacgtgccagcttacccagttcatacaacaagtggttctgtcgactcctcttcagtgtacgcttatgtatatagtggtcgataagaggaatatggtacactgcttataatgcttgtgttttgtactttaattttaaatgcccatcgccttggtttcaaaaaaaaaaaaaaaaaaaagggcggccactcgcgatctagaactag

SEQ ID NO: 31151 - DNA, 409 bp, Zea mays
  Clone ID: MRT4577_12841C.1
tcggcataacacacacagtttgattttgtctctttttctccaacatgttaccgctctcgccatgtcgattatcaagtcatctttcacgccctccccacctctccccatttctctcgatatttcccaactactttctccgaccaactttcccaaagtataccactctccctgtctcttcttaatcaacccctattccctcaaattactttacaattccgtcctgtccaccacattcatgtcatctccgattctctcaatgtgtccttcattctccgtctgaaccacctcaacgtgcttctccttcactaggtgctggcgactcgctccaatgtgtaccttttgaatgacctttccccttactttgacctcctttccctcttttcttttctttcttttctcagtcttccct

SEQ ID NO: 31152 - DNA, 346 bp, Zea mays
  Clone ID: MRT4577_128420C.1
attacaacatcctatagtgagtcgtattacagagctgctccgcgcccccgacgccggtcattaagagcaggaataatacgggttcggaatggccaagtctaagaatgatacggcgcataaccactcgtccaaggcgcacaagaacggcatcaagaagcccaagcaccaccgccagacctccaccaaggggatggaccccaagtatctgacgaactttaagtactcaatgaagggcagtagcagcagttgtgacggcgagtcagaagaatgagaagatgcccgattttatggcgacaaatccatcgcctgtgcccttaaggtccgaatcgtgaaattaattttcaga

SEQ ID NO: 31153 - DNA, 3960 bp, Zea mays
  Clone ID: MRT4577_128421C.1
atgccgggagcatccgccaagagggagatcgggaccggcgagaagcccgccacaagccacgggaaggctccattcggggagtccgccaacaaggtgaagggatccccttcacacaacaagtcgcgtcggagcggtgacaagaagaagaagataaagagggtggtctactacgagaccgactcttcgtcgccatccacctccggctccgacacgctgtccgtaacttctaagcgccatgagcgcaagaagtttagtaagatccccctacgctaccctcgcatttccaaacgtactccattactttctgtcccattaggcaaaccacctatgtttgatggtgaagattataatatgtggagtgacaaaatgaggcatcatctaacctcactccacactagcatttgggatgttgttgagattggagtacaggtaccatcaccgggggatgaagactatgattcggacgaggtcgcccaaatccgacacttcaactctcaagccaccactatactcctcgcctctctaagtcgagaggagtataacaaggtgcaaggattaaagagcgccaaggagatttgggatgtactcaagaccacgcacgaaggagatgaggtgactaaaatcaccaagcgggagacgatcgagggggagctcggtcgcttccggcttcgccaaggggaggagccacaagagatgtacaaccggctcaagaccttggtgaaccaagtgcgcaacctcgggagcaaaaaatgggatgaccatgaaatggtcaaggttattcttagatcactcgtttttcttaaccctactcaagtacaattaattcatggtgatcctagatataaactaatgtctcccgaggaagtgataggaaagtttgtgagctttgagttaatgatcaaatgctccaaacaaatcatcgagcgaggcgccacctccacacccgaggtgcaacccgtcgccttcaaagcgatggaggagaagaaggaagagtatacatcaagtaggctccccatcgacgcctccaagctcgacaatgaggagatggctttaattattaaaagctttcgccaaatactcaagcaaaggaaggagagagattacaagccccattccaagaaggtgtgctacaagtgtggtaagcccagtcatttcattgctaaatgtccattatcaagtgatagtgataggggcgacgacaagaagggaagaaggaaggagaagaagaagtattacaagaagaagggcggcgacgcccatgtttgccgggagtgggactccgatgagagctccaccgactcctcctttgacgaggacaccgcaaacatcgccttcaacaaaggtctcctcttccccaacgtcggccacaagtgcctcatggcaagggatgacaaaatgaagataaaatctagagcctccactaaatacgcgacatctagtgaggaggagaactctagtgatgatgaggataatttacttgccctttttaccaacctcaacatgcaacaaaaagaaaaactaaatgaattgatagcgggtgttactgtctttagaagaagtgatgattcagtagcatttaagggagtattagagggtcagctatacttagttgattttaatagagctgaactcgacacttgcttaattgctaagactaacatgggttggctctggcatcgccgactagctcacgttgggatgaagaatcttcataagcttctaaagggagagcacattttgggactaacaaatgttcattttgagaaagacaggatttgtagcgcatgtcaagcaggaaagcaagttggtgttcatcatccacacaagaacatcatgacgaccgacaggccgcttgagctactccacatggacctattcggcctgatcgcttacataagcatcggcgggagtaagtactgtctagttattgtggatgactattctcgcttcacttgggtgttctttttgcaggaaaaatctcaaacccaagagaccttaaagggattcttaagacggactcaaaacgagttcggtttaagaatcaagaaaataagaagcaacaatgggacggagttcaagaactcacaaatagaaggcttccttgaggatgagggcatcaagcatgagttctcttctccctacacaccacaacaaaatggtgtagtggagaggaagaatagaactctacttgacatggcgaggaccatgcttgatgagtacaagacctcggaccggttttgggcggaagcagtcaacatcgcttgctactccatcaaccgactctatcttcaccgaatcatcaagaagacatcatatgaactcctcaccggtaaaaagcccaatgtttcatattttagagtctttggtagcaaatgctttattcttgttaaaagaggtagaaaatctaaatttgctcctaaggctgtaaaaggctttttacttggttatgattcaaacacaagggcatatagagtctttaacaagtccactggactagttgaagtttcttgtgacattgtgtttgatgagactaacggctctcaagtagagcaagttgatcttgatgagctagatgatgaagaggctccgtgcatcgcgctaaggaacatgtccattggggatgtgtgtcctaaggaatccgaagagcctccacatgcacaagatcaaccatcatcttcaaatcaagcatctccaccaacccaagatgaggatcaagctcaagatgatgagaatgaggatcaagaagatgagccacctcaagaggagggcaatgatcaagggggagatgcccatgatcaagacaaggaagatgatgagggtccaagaccgccacacccaagagtccaccaagtgatacaacgagatcaccctgtgaactccatcctcagcaatattcataagggggtaaccactcgatcttgtgtcgctcatttttgtgaacattactcctttgtgtcttctattgagccatacagggtggaagatgcattatgggatttggattgggtgttggcaatgcaagaggagctcaacaacttcacgaggaatgaggtatggcatttagttccacgtcctaatcaaaatgttgtaggaaccaagtgggtcttccacaacaagcaagatgagcatggtgtggtgacaaggaacaaagcccaacttgtggccaaaggatattcacaagtcgaaggtttggatttcggtgaaacttatgcacccgtagctaggcttgagtcaattcgtatattacttgcctatgcttcttaccatggctttaagctttaccaaatggacgtgaaaagtgccttcctcaatggaccaatcaaggaggaggtctatgttgagcaacctcccggctttgaagataatgtctatgatgggggagttgaagtatttctaggatttcaagtgaagcaactccaagagggtaccttcattagccaaacgaagtacactcaagacatactcaccaagtttgggatgaaggatgtcaagcccatcaagacacccatgggaaccaatgggcatctcgacctcaacacgggaggatgcaaaattgatagaaagagcacatcaaggacttgtcagttcttgggaagatccctggtatcttgggcttcaaagaagcaaaattcagtagctctttctaccgccgaagccgagtatattgccgcaggccattgttgcgcgcaattactttggatgaggcaaacccttagggactatggttacaaattaaccaaagttcctctcctatgtgataatgagagtgcaatccgcatggcggataatcccgttgagcacagccgcactaaacacatagccattcagtatcactttttgcgggatcaccaacaaaggggggatatcgagattgcatatgttagcaccaaagaacaattagccgatatctttaccaagccactagatgagaaaacttttacaaacttaggcatgagctaa

SEQ ID NO: 31154 - DNA, 452 bp, Zea mays
  unsure (1)..(452): unsure at all n locations
  Clone ID: MRT4577_128422C.1
cagacatctacaaatgacgactcaatatgggactaggaaagacttgaaattaggagctaaaccgcaatcgaaatcaatcaacctcggcggcgagtagtaggactcttcccagccggtctgggtgagacaccagaagcttgagcagccgcaggggagtttgcgactgcctttttgttttgctttgctggaacggcagacttctttgcgggactgttccagtagtacaccatctggattgcgagaacagcattgagaacaaaggcagccacgatgctgtacaaaatgaggttgtcatcgacttcttgaagggtcgtgaagatgcgagacagggtaccaaggaggtaattgaagacctatcaataacaaattagccgaagttctcgaattgacaaaatggattctcgcaaaanaaaaaaaataaaaaaaaaacaaaaaaaaacttactgtaacac

SEQ ID NO: 31155 - DNA, 2697 bp, Zea mays
  Clone ID: MRT4577_128423C.1
atgtcgggagatcacgccaagaaagagatggagaccggcgacaagcccactacaagccaaggaagcacttcatcggaagagtcccgcaccaagaggaaggagaagaaaaaggactcctccaaacggaaggagaaaagattttcttcctcacatcacaaagagaagaaggaaaaatcttcttcccacaagtcgcatcggaaaggcgacaagcacaagaggatgaggaaagtggtctactacgagaccggcacttcatcaacatcgacctccgactccgatgcgccctccgtaacttctaaacgccaagagcgtaagaagtttagtaagatccccttacactatcctcgtacatctagacatactccattactttccgttccattaggcaaaccgccaacctttgacgatgaagattatgctaggtggagtgatttaatgaaatttcatctaacctcactccacaaaagtatatggaatgttgttgagtttggagcacaggtaccatccgtaggggatgaggattatgatgaggacgaggtggcccaaatcgagcacttcaactctcaagctacaaccatactcctcgcctctctaagcaaggaggagtacaacaaggtgcaagggttgaagaatgcaaaggagatttgggacctactcaagaccacgcacgaaggtgatgaactcaccaagatcaccaagcgggaaacgattgagggggagctcggtcgcttcagtcttcgccaaggggaggagccacaagatatgtacaaccggctcaaaaccttggtgaaccaagtgcgcaacctcgggagcaagaaatgggatgaccacgaggtggttaaggttattttgagatcacttattttccttaaccccactcaagttcaattaattcgtggtaatcctagatatactcaaatgacccccgaggaagttatcgggaattttgtgagctttgaatgtatgatcaagggctccaagaagatcaacgagcttgatgaaccctccacgtccgaagcacaaccggtggcatttaaggcgacggaggagaagaaggaggagtctacaccgagtagacaaccaattgacgcctccaagctcgacaatgaggagatggctttaatcatcaaaagctttcgccaaatcctcaagcaacggaaggggaaggattacaaatcccgttccaagaaggtttgctacaagtgtggtaagcccggtcactttatcgctaaatgtccattatcaagtgacagtgacagggataacgacaagaagggaaagaggaaagaaaagaagagataccacaagaggaggggcgatgcccacgtatgccgcgagtgggactccgacgagagctccaccgactcctcctcagacgaggacgccgccaacatcgccgtcaccaaggggcttctcttccccaacgtcggccacaagtgcctcatggcaaaggacggcaaaaggaagaaggtaaaatcaagatcctccactaaatatgaaacctctagtgatgaggatgatgctagcaatgaggaggataacttgcgcgttctttttgccaaccttaacatggaacaaaaagaaaaactaaatgagctaattagtgccatccatgagaaggatgatctcttgcactcacaagaagacttccttattaaggaaaacaaaaagcatgttaaggttaaaaatgcttatgctctagaggtagaaaaatgtgaaaaattgtctagtgagctaagtacttgccatgagaccattgacaaccttagaaatgaaaatactagattaaatgctaaggttgattctcatgtttgtgatgtttcaattcccaatcctagagataataatgatgatttgcttgccaggattgaagaattaaacatttctcttgctagccttaaaatcgttgaacttaactcatgcaaaccctctacatctagtgttgagcatgtttccatttgtactagatgtagagatgttgatattaatgctattcatgatcacatgactttgattaaacaacaaaatgatcatatagcaatattagatgcaaaaattgccgagcataacttagaaaatgaaaagtttaaatttgctagaagtatgctatataatgggagacaccctggcattaaggatggcattggctaccaaaggggagacaatgtcaaacttaatgcccctcctaaaaatttgtctaactttgttaagggcaaagctcccatgcctcaggataacgagggttacattttgtaccctgccggttatcccgagagcaaaattaggagaattcactctaggaagtctcactctggccctaatcatgcttttatgtataagggtgagacatctagttctaggcaaccaacccgtgctaagttgcctaagaagaagactcctaatgcatcaaatgatcatgacatttcatttaaaacttttgatgcatcttatgttttgactaataaatccggcaaggtttacgcatccgggggcacaagttggatcatcgatagcggatgcacaaaccacatgaccggggagaagaagatgttctcctcatatgagaaaaaccaagatccccaaagagcgatcacattcggggatggaaatcaaggtttggtcaaaggtgtcactgtctttagaagaagtgatgattcaatagcatttaagggagtgttagagggtcaactatacttg

SEQ ID NO: 31156 - DNA, 5491 bp, Zea mays
  Clone ID: MRT4577_128424C.1
atgtcggaagaacacgccaagaaggagatggaaaccggcgaaaagcccactacaagccacgggaaggcttcatcggaagagtcccgcaaaatgcgataatgtgagcagtagaaagactcaaatggagaacattctggtcactttaggtctccttatcctgttcggttaccaagaatgatggcatatttgttagtcccactgcttgcagcgacgaagcaggtaaaggagggtatatgtttccacaagatgggaaaccagatcatatatgcaggaactatgaaatactgaatgataaaaatgtctcatttaggtaccatccataggggatgaggattatgatgaggacaaggtggcccaaatcgagcacttcaactcccaagctacaaccatactcctcgcctctctaagtagggaggagtacaacaaggtgcaaggattaaaaagcgccaaggaagtttgggacgtgctcaagaccgcgcacgaaggtgatgaactaaccaagatcaccaagcgggaaacgatcgagggggagctcggtcactttcgtcttcgccaaggggaggagcctcaagacatgtacaaccggctcaaaaccttggtgaatcaagtgcgcaacctcgggagcaagaaatgggatgaccacgaggtggttaaggttattttaagatcacttattttccttaaccttactcaagtccaattaattcgtggcaatcctagatacacactaatgactcatgaggaagtaatcggaaattttgtgagctttgagtttatgattaaaggctcaaggaagatcaacgagcttgacggcccctccacgtccgaagcacaatcggtcgcatttaaggcgacggaggagaagaaggaggagtctacaccgagtagaacacccatcgacgcctccaagctcgacaacgaggaaatggcgcttgtcatcaaaagctttcgccaaatcctcaagcaaaggagggggaaagactacaaaccccgctccaagaaggtttgctacaagtgtggtaagcccggtcactttatagcaaaatgtcctatttctagtgacaggggcgacgacaagaaggggagaagaaaggagaagaagaaatactacaagaagaagggcggcaatgcccatgtttgtcgcgagtgggactccgacgaaagctctagcgactccttcgacgacgaggatgccgccaacatcgccatcaccaagggacttctcttccccaacgtcggccacaagtgcctcatggcaaaggacggcaaaaagaagaaggttaaatccaaatcctccactagatatgagtcttctagcgataataatgctagtgatgaggaagataatttgcgtactctttttgccaacttaaacatgcaacaaaaagagaaattaaatgaattgattagtgctatccatgagaaggatgatctcttggactcccaagaggacttccttattaaagaaaacaagaagcatgttaaggttaaaaatgcttattctctagaagtagaaaagtgcgaaaaattatctaggaaatgtgcccttgggtcatttctaagtattttggtgattgagtgccaacacaagtgcttaaatgtgaatctatgcccatggatgaacaaagtgcaaatcaagagtaaaggtgctctcacaattcccaatcttagaaatgataatgataatttgattgctaagattgaagaattaaacattactcttgctagccttaggaatgaaaatgaaaaattgcttgctaaggctaaagaacttgatgtttgcaatgctaccatttccgaccttagaagtaaaaatgacatgttacatgctaaggttgaagaattaaatgtttacaaaccctctacatctatcgttagtcatgtctctatttgcactagatgtagagatgttaatattgatgctatccatgatcacattgctatgattaaacaacaaaaagatcatatagcaaaattagatgctaaaattgccgagcatgaactagagaatgaaaaatttaaatttgctcgtagtatgctttatagtgggagacgtcctggcatcaaggatgtcattggcttccaacagggaggaaatgtcaagcttaatgcccctaaaagattgtctaattttgttaagggcaaggctcccatgcctcaggataacgagggctatattttatatcctgctggttatcctgaggataagattaggagaattcatgctaaaaagactcatcctatttctcaccatgcttttatttataagaatgaggcttctagctctaggcgttctacccatgttaaaatgcctaaaaagaaatctcctattgcatcaaataatcataacatttcatttaagacttttgatgcttcttatgtgcttactaacaaataaggcaaagtagttgccaaatatgttgggggcaaacacaaggggtcaaagacttgtgtttgggtacccaaagttcttgtttctaatgccaaaggacccaaaaccatttgggtttatgcatccgggggctcaagttggataatcgacagcgggtgcacaaaccacatgacaggggagaagaagatgttctcctcctacgagaaaaacgaagatccccaaagagcgatcacattcggggatggaaatcaaagtttggaaggattggataaaattgctatatctcctgaccattctatttctaatgtttttcttgtagattcattagattacaatttgctttccgtttctcaattatgtcaaatgggctacaactgtctttttactgatgtaggtgtcactgtctttagaagaagtgatgattcaatagcatttaagggagtgttagaaggtcagctatacttagtagattttgatagagctaaactcgacacttgcttaattgctaagactagtccatgttggctctggcaccgccgactagtccatgttgggatgaagaatcttcataagcttctaaagggagagcacattttaggattaacaaatgttcattttgagaaagacaggatctgtagcgcatgccaggcggggaagcaagttggagtccatcatccacacaagaacatcatgacgaccgacaggccgcttgagctactccacatggatctattcggcccgattgcttacataagcatcggcgggagtaagtattgtcttgtaatagtggatgattattctcgcttcacttgggtgttctttttgcaggaaaaatctcaaacccaagagaccttaaagggattcttgaaacgggctcaaaatgagttcggcttaaggatcaagaaaattagaagcgacaacgggacggagttcaagaactctcaaattgaaggcttccttgaggaggagggcatcaagcatgagttttcttctccctacactccacaacaaaatggtgtagtggagaggaagaatcgaactctattggacatggcaagaaccatgcttgatgagtacaagacttcggatcggttttgggccgaggcggtcaacaccgcttgctacgccatcaaccggttgtatctacaccgaatcctcaagaaaacatcctatgaactcctaaccggtaaaaagcccaacatttcatactttaaagtttttggtagcaaatgctttattcttgttaaaagaggaagaaaatctaaatttgctcctaaaactgtagaaggctttttactaggatatgactcaaacacaagggcatatagagtctttaacaagtcctcaggacttgttgaagtttcttgtgacgttgtgtttgatgagactaacggctctcaagtagagcaagctgatcttgatgagataggtgaagaacaggctccatgcacagcgctaaggaacatgtccattggggatgtgtgtcctaaggaatccgaagagcctccacatgcacaagatcaaccgtcctcctccacgcaagcatctccaccaactcaaattgaggatgaggctcaaggtgttgaacaagaagatgagccacctcaaaatgatggcaacgatcaagggggagatgcaaatgatgaagacaaggaggatgaacatccaagaccgccacacccaagagtccaccaagcaatccaacgagatcaccccgtcgacaccatcctcggcgacattcataagggggtaaccactcgatctcgggttgctcatttttgtgaacattactcttttgtttcctctattgagccacacagggtagaggaagctctccaagattcggattgggtggtggcgatgcaagaggagctcaacaatttcacgaggaacgaggtatggcattttgttccacgtcctaaccaaaatgttgtaggaaccaaatgggtcttccgcaacaagcaagatgagcatggtgtggtgacaaggaacaaagctcgactcgtggccaaagggtattcacaagtcgaaggtttggatttcggtgaaacctatgcacccgtagctaggcttgagtcaattcgaatattattagcctatgctacttaccatggctttaagctttatcaaatggacgtgaaaagtgccttcctcaacggaccaatcaaggaagaggtctatgttgagcaacctcccggctttgaagacagtgagtatcctaaccatgtttataggctctctaaggcgctttatgggctcaagcaagccccaagagcatggtatgaatgccttagagatttccttattgcaaatggcttcaaagtcggaaaggccgatcctactttattcactaaaactcttgacaatgatttgtttgtatgccaaatttatgttgatgatatcatatttgggtctactaacgaatctacttgtgaggaatttagtaggatcatgacacagaaatttgagatgtctatgatgggggagttgaaatattttctaggattccaagtcaagcaactccaagagggcaccttccttagccaaacaaaatacactcaagacattctaagcaagtttgggatgaaggatgccaaacccatcaagacacccatgggaaccaatgggcatctcgacctcgacacgggagggtgcaaaatcaataggaagagcacatcggggacttgccagttcttgggaagatccttggtgtcttgggcttcaaagaagcaaaattcggtcgctctctccaccgccgaagccgagtacattgccgcaggccattgttgcgcgcaattactttggatgaggcaaaccctgcaggactacggttacaaactaaccaaagtccctttgctatgtgataatgagagtgcaatcaaaatggccgacaatcctgtcgagcatagccgcactaaacacatagccattcggtatcattttcttagggatcaccaacaaaagggggatatcgagatttcatacattaacactaaagatcaattagccgatatatttaccaagcctcttgacgaacaaacttttaccaaacttaggcatgagctcaatattcttgattctcgcaacttcttttgctaa

SEQ ID NO: 31157 - DNA, 318 bp, Zea mays
  Clone ID: MRT4577_128425C.1
gacatgttaaattgggtaggggttttgttggagggtggaacatgaacaaaaaaaaaatgctacagggctgaacaaacggcaaactgaaacaggaacaggtttacaccaagtgaagctttgaaatgacacagcgttacaatgcaaaaaaaataaagggggttcccttaaaaaggaactcaggaacaaacaaggcacttataataggacaattccaacaaggaagggggccaaatgagacaaaggcaacgaattgaaccttagcgggacaaagggcaaacgaaattacatgcaatccccgatgcattaaggcggaccaag

SEQ ID NO: 31158 - DNA, 3264 bp, Zea mays
  Clone ID: MRT4577_128426C.1
atggcgcaccggacagtccggaaaaggtgtaagcctatttccctttcaaagaggtactacaagaagggcggcgatgcccatgtttgccgggagtgggactccgacgagagctccactgactcctcctccgacgaggacgccgccaacatcgtcgtcaacaagggtcttctctgccccaacgtcggccacaagtgcctcatggcaaaggacgacaaaaagaagaaggttgagaagttagatgtttgtgatgattcaattgttagtcttataaatgataatgctagtttgattactaagattgacaagttgaatgcatcactctctagtcttaaaattgagaatgaaaaattaattgctaaggctaaagatttaaatgtttgcaatgtttctatttccaatcttaagaataaaaatgctattttacatgctaagattgatgaattaaatgcatgcaaaccctctacatctagtgttgatcatgttactatttgtactagatgtagagacattaatgttgatgctattcatgatcacttagctttaattaaacaacaaaatgatcacatagctcaacttagtgctaagattaatgagcatgacttagaaaatgaaaagtttaaatttgctagaagcatgctctataatgggagacgccctgggattaaggatggcattggctttcaacagggagacaatgtcaagcttaaaacccctaaaagattgtctaattttgttaagggtaaggctcccatggctcaggataacgagggttacattttatatcctactggttatcccgaacacaaaattaggagaattcattctaggaagtctcactctggctctcatcatgcttttatatataagagtgaggcatctagctctaggcaatcaacccatgttaaattacctaaaaagaaatctcctattgcatcaaatgaaccaaatatttcatttaagacttttgatgcttcctatgttttaactaacaaatcaggcaaagtagttgccaaatatgttggggccaaacacaagggctcaaagacttgtgtttgggtacccaaggtttatgcatccgggggctcaagttggatcattgatagcgggtgcacaaacaacatgactggggagaaaaggatgttctcctcctatgagaaaaaccatgatccccaaagagctatcacattcggggatggaaatcaaggtttggaaaaatcacaaacccaagtgaccttaaagggattcttgagacgggctcaaaatgagttcaacttaaggataaaaaagattagaagcgataatgggacggagttcaagaactctcaaatagaaggctttcttgaggatgagggcatcaagcatgagatctcttctccctacacgcctcaacaaaatggtgtagtggagaggaaaaatagaactctacttgacatggcgaggaccatgcttgatgagtacaagacttcggaccggttttgggcggaagcaatcaataccgcttgctacgccatcaaccgtctctacctttaccgaatcctcaagaagacatcatatgaactcctcactggtaaaaagcccaatgtttcatattttagagtctttggtaggaaatgcttcattatttataaaagaggtaggaaatctaaatttgctcttaaggctgtagaaagctttttacttggttatggctcaaacacaagggcatatagagtctttaacaagtccactggactagttgaagtttcttgtgacattgtgtttgatgaaactaacgactctcaagtagagcaagttgatcttgatgagctagatgatgaagaggctccatgcgtcgcactaaggaacatgtccatcggggatgtgtgccctaaggaatccgaagagcctccacgagcacaagatcaaccatcatcttcaaatcaagcatctccaccaacccaagatgaggatcaagctcaagatgatgacaatgaggatcaagaagagccacctcaagaggaggacaatgatcaagggggagatgccaatgatcaagacaaggaagatgatgagggtccaaggccaccacatccaagagtccaccaagcaatacaacgagatcatcccgtgaactccatcctcggcgatatttataagggagtaaccactcgatctcatgttgctcatttttgtgaacattactcttttgtgtcttctattgagccatatagggtggaagacacattaagagattcggattgggtgttggcaatgcaagaggaactcaacaacttcacgaggaatgagctttaccaaatggacgtgaagagtgccttcctcaatggaccaatcaaggaagaggtctatgttgagcaacctctcggctttgaagatagtgagtatcctaaccatgtttataggctctctaaggcgctttatgggctcaagcaagccccaagagcatggtatgaatgccttcgagacttccttattgcaaatggcttcaaagtcggcaaggctgatcctactttattcactaaaactcttgacaatgatttgtttgtatgccaaatttatgttgatgatattatatttgggtctactaacgaatctacatgtgaagaatttagtaggatcatgacacagaaattcgagatgtcgatgatgggggagttgaagtatttcttaggatttcaagtgaagcaactccaagagggcaccttcattagccaaatgaagtacactcaagacattctaaccaagtttggaatgaaggatgccaaacccatcaagacacccatgggaaccaatgggcatctcgacctcgacacgggagggtgtaagattaatagaaagagcacatcggggacttgccagttcttgggaagatccttggtgtcttgggcttcaaagaagcaaaattcggtcgctctttctaccgccgaagccgagtatattgccgcaggccattgttgcgcgcaattgctttggatgaggcaaaccctgcgggataatggttacaaattaaccaaagttcctcttctatgtgataatgagagtgcaatccgcatggcggataatcccgttgagcatagccgcactaagcacatagccattcggtatcattttcttagggatcaccaacaaaaggaggatatcgagattgcatacattaatactaaagatcaattagccgatatctttaccaagcctcttgatgaacaaacttttaccaaacttaggcatgagctcaatattcttgattctaggaatttcttttgctaa

SEQ ID NO: 31159 - DNA, 8471 bp, Zea mays
  Clone ID: MRT4577_128427C.1
atgtcgggagaacacgccaagaaagagatggagaccggcgacaagcccgctacaagccacgggaaagcttcatcggaagagtcccacaaaaagggaaaggggaaggagaagaaagcctcttcccacaagtcgcatcggagtggggacaagaaaaagaagatgaggaaggtggtctactacgagaccgacacctcatcgccatctacctccggctccgacgcgcccttcgtaacttctaagcgccatgagcgcaagaagtttagtaagatccccttacattaccctcgcacttctagacatactccattactttccgttccattaggcaaaccgccaacctttgacggtgaagattatgctaggtggagtgaattaatgaaatttcatctaacctcactccacaaaagtatatggaatgttgttgagtttggagcacaggtaccatctgtaggggatgaggattatgatgaagacgaggtggcccaaatcgagcacttcaactcccaagctacaaccatactcctcgcctctttaagtagggaggagtacaacaaggtgcaaggattaaaaagagccaaggaagtttgggacgtgctcaagaccgcgcacgagggtgatgagctcaccaagatcaccaagcgggaaacgatcgagggggagctcggtcgcttccgtcttcgccaaggggaggagccacaagacatgtacaaccggctcaaaaccttggtgaatcaagtgcgcaacctcgggagcaaaaagtgggatgaccacgagatggttaaggttattttaagatcacttattttccttaaccctactcaagtacaattaattcgtggcaacccaagatatacactaatgacccccgaggaagtaatcgggaattttgtgagctttgaatttatgatcaagggctcacggaagatcaacgagcttgacggtccttctacgtccgaagctcaaccgatcgcattcaaagcgacggaagagaaggagtctacaccgagtagaacacccatcgacgcctccaaactcgacaacgagaaaatggcgcttgtcatcaaaagcttccgccaaatcctcaagcaaaggagggggaaagattacaagccccgctccaagaaggtttgctacaagtgtggtaagcccggtcactttatagcaaaatgtcctatttctagtgacaatgacaggggcgacgacaaaaaagggagaagaaaggaaaagaagaggtactacaagaagaagggcggcgatgcccatgtttgtcgggagtgggactccgacgaaagctctagcgactcctccgacgacgaggacgccgccaacatcgtcgtcaccaagggactcctcttccccaacgtcggccacaagtgcctcatggcgaaggacggcaaaaagaagaaggttaaatctaaatcctccactagatatgagtcctctagtgatgataatgctagtgacgaggaagataatttgcgtactctttttgccaacttaaacatgcaacaaaaagagaaattaaatgagttaattagtgtcatccatgagaaggatgatctcttggactcccaagaggacttcctaatcaaggaaaacaaaaagcatgttaaagttaaaaatgcttatgctctagaagttgaaaaatgtaaaaaattatctagtgagctaagcacttgccatgagactatagacaaccttagaaatgagaattctaatttgttagctaaggttgattctattgcttgtaatgtttcaattcccaatcttagaaatgataatgatgatttgcttgctaagattgaagaattaaacatgtctcttgctagccttaggattgaaaatgaaaaattgcttgctaaggctaaagaattagatgtttgcaatgctacaatttccgaccttagaactaaaaatgatatattgcatgctaaggttgtagaattgaaatcttgcaaaccctctacatctatcgttgagcacacttctatttgtactagatgtagagatgttaacattgatgctattcatgatcacatggctttaattaaacaacaaaatgatcatatagcaaaattagatgctaaaattgccgagcatgacttagagaatgaaaattttaaatttgctagaagcatgctctatagagggagacgtcctggcattaaggatggcattggctttcaacaggaaggcaatgtcaaaattaatgcccctcctaagaaattgtccaactttgtcaagggcaaagctcccatgtctcaggataacgagggttacattttgtaccctgtcggttatcctgagagtaaaattaggagaattcactctaggaagtctcactctggccctaaccatgcttttatgtataagggtgagacatctagttctaggcaaccaacccgtgctaagttgcctaaaaagaaaactcctagtgcatcaaatgatcatgacatttcatttaaaacttttgatgcatcatatgttttaactaacaaatccggcaaggtttatgcatccggggtctcaagttggataattgacagcaggtgcacaaaccatatgacaagggagaagaagatgttctcctcctacgagaaaaaccaagatccccaacgagctatcacattcggggatggaaatcaaggattggtcaaaggtgtcactgtctttagaagaagtgatgattcaatagcatttaagggtgtgttagagggtcagctatacttagtagattttgatagagctgaactcgacacatgcttaattgctaagactaacatgggttggctctggcaccgccgactagcctatgttgggatgaagaatcttcataagcttctaaagggagagcacattttaggactaaccaatgttcattttgagaaagacagggaaaaatctcaaacccaagagaccttaaagggattcttgagacggactcaaaatgagttcggcttaaggatcaagaaaataagaagcgacaatgggacggagttcaagaactctcaaatcgaaggcttccttgaggaggagggcatcaagcatgagttctcttctccctacatgccacaacaaaatggtgtagtggagagaaagaatagaactctattggacatgacaagaaccatgcttgatgagtacaaaacttcggatcagttttgggccgaggcggtcaacaccgcctgctacgccatcaaccggttatatctacaccgaatcctcaagaagacatcatatgaactcctaaccggtaaaaagcccaatatttcatattttagagtctttggtagcaaatgctttatacttgttaaaagaggtagaaaatctaaatttgctcctaagacagtagaaggctttttactaggatatgactcaaacacaagggcatatagagtctttaacaagtcctctggacaagttgaagtttcttgtgacgttgtgtttgatgagactaacggctctcaagtagagcaagttgatcttgatgagataggtaatgaagaggctccacgcatcgcgctaaggaacatgtccattggggatgtgtgtcctaaggaatccgaagagcctccaaatgcacaagatcaaccatcctcctccacgcaagcatctccaccgactcaaaatgaggatgaagctcaagttgatgaaatagaagatcaagcaaatgagccacctcaagataacggcaatgatcaagggggagatgcaaatgatcaagacaaggaggatgaagaacaaaggccgccacacccaagagtccaccaagcaatccaacgagatcaccccgtcgacaccatcctcggcgacattcataagggggtaaccactagatctcgtgttgcacatttttgtgagcattactcctttgtttcctctattgagccacacagggtagaggaagcacttcaagattcggattgggtggtggcgatgcaagagaagctcaacaacttcactaggaatgaggtatggcatttagttccacgtcctaatcaaaatgttgtaggaaccaaatgggtcttccgcaacaagcaagatgagcatggtgtggtgacaaggaacaaagctcgacttgtggccaagggatactcccaagtcgaaggtttggatttcggtgaaacctatgcacccgtagctaggcttgagtcaattcgtatattattggcctatgctacttaccatggctttaagcttttatcaaatggacgtgaaaagtgccttcctcaatggaccaatcaaggaagaggtctatgttgagcaacctcccgactttgaagatagtgagtaccctaaccatgtttataagctctctaaggcgctttatgggctcaagcaagccccaagagcatggtatgaatgccttagggattttcttatcactaatggattcaaagtcggaaaggccgatcctactttatttactaaaactctcgaaaatgacttgttcgtatgccaaatttatgttgatgatattatatttgggtctactaacgagtctacatgtgaagaatttagtaggatcatgacacaaaagttcgagatgtctatgatgggggagttcaagtatttcttaggatttcaagtgaagcaactccaagagggcaccttccttagccaaacaaagtacactcaagatattctaaacaagtttggaatgaaggatgccaaacccatcaagacacccatgggaaccaatgggcatctcgatctcgacgaaggaggtaaatccgtcgatcaaaagtttcgccctattcaccccccctctaggcgactatcagtaggggatgaggattatgatgaggacgaggtggcccaaatcgagcacttcaactcccaagccacaactatactcctcgcctctctaagtcgagaggagtataacaaggtgcaaggattaaagagcgccaaggaagtttgggacgtgctcaagaccgcgcacgaaggagatgagctaaccaagatcaccaagcgggagacgatcgagggggagctcggtcgcttccgtctccgccaaggagaggagcctcaagacatgtacaaccggctcaaaaccttggtgaatcaagtgcgcaacctcgggagcaagaaatgggatgaccacgaggtggttaaggttattttaagatcacttattttccttaaccctactcaagtccaattaattcgtggcaatcctagatacacactaatgactcccgaggaagtaatcgggaattttgtgagctttgagtttatgatcaaaggctcaagaaagatcaacgagcttgacgacccctccacgtccgaagcacaaccagtcgcatttaaggcgacggaggagaagaaggaggagtctacaccgagtagaacacccatcgacgcctccaagctcgacaacgaggaaatgacgcttgtcatcaaaagcttccgccaaatcctcaagcaaaggagggggaaagattacaagccccgctccaagaaagtgtgctacaaatgtggtaagcccggtcattttattgcaaaatgtccactatctagtgacagtgataggggcgacaacaagaagaggagaagaaaggaaaagaaaaaatactacaagaagaagggtggcgacgctcatgtatgccgcgagtgggactccgacgaaagctctagcgactcctccgacgacgaggacgccgccaacatcgccgtcaccaagggacttctcttccccaacgtcggccacaagtgcctcatggcaaaggacgacaaaaagaagaaggttaaatccaaatcctccactagatatgagtcctctagcgatgataatgctagtgatgaggaagataatttacgtactctttttgccaacttaaacatgcaacaaaaagaaaaattaaatgaattgattagtgctatccatgagaaggatgatctcttggactcccaagaggacttccttattaaagaaaacaaaaagcatgttaaggtgaaaaatgcttatgctctagaagtagaaaaatgtgaaaaactatctagtgagctacgcacttgccatgagactatagacaaccttagaaatgagaatgctaatttgttagctaaggttgattcaaatgtttgtgatgtttcaattcccaatcttagaaatgataatgataatttgcttgctaagattgaagaattaaacactagtactcttgctagccttaggattgaaaatgaaaaattgcttgctaaggctaaagaactagatgtttgcaatgttacaatttccgaccttagaacaaagttagatgctaaaattgccgagcatgacttagaaaacgaaaaatttaaatttgctagaagcatgctttatagagggagacgccctggcattaaggacgacattggtttccaacaaggaggcaatgtcaaacttaatgcccctcctaagaaattatctaactttgttaagggcaaggctcctatgcctcaggataatgagggttacattttataccctgccggttatcccaataacaaaattaggagaattcattctaggaagtctcactctggcccgaaccatgcttttatgtataagggtgagacatctagttctaggcaaccaacccgtgctaagttgcctaagaagaaaactcctagtgcatcaaatgatcatgacatttcatttaaaacttttgatgcatcatatgtgttaactaacaaatccggcaagttagttgccaaatatgttgggggcaagcacaaggggtcaaaaacttgtgtttgggtaaccaaagttcttgtgtctaatgccaaaggacccaaaaccatttgggaaaaatctcatacccaagaaaccttaaaaggattcttgagatgggctcaaaatgagttcggcttaaggatcaagaaaataagaagcgacaacgggacagagttcaagaactctcaaattgaaggtttccttgaggaggagggcatcaagcatgagttctcttctccctacacgccacaacaaaatggtgtagtggagaggaagaatagaactctattagacatggcaagaaccatgcttgatgagtacaagacttcggatcggttttgggccgaggcggtcaacaccgcttgctacgccatcaaccggttgtatctacaccgaatcctcaataagacatcatacgaactcctaaccgataaaaagcccaatatttcatattttagagtctttggtagcaaatgctttatacttgttaaaagaggtagaaaatctaaatttgctcctaaaactgtagaaggctttttactaggatatgattcaaacacaaaggcatatagagtctttaacaagtcctctggacaagttgaagtttcttgtgacgttgtgtttgatgagactaacggctctcaagtagagcaagttgatcttgatgagataggtgttgaagaggctccatgcatcgcgctaaggaacatgtccattggggatgtgtgtcctaaggaatccgaagagcctccaaatgcacaagataaaccatcctcctccacgccagcatctccaccgactcaaaatgaggatgaagctcaagttgatgaagtagaagatcaagcaaatgagccacctcaagatgacggcaatgatcaagggggagatgcaaatgatcaagacaaggaggatgaagaaccaagaccgccacacccaagagtccaccaagcaatccaacgagatcaccccgccgacaccatcctcggcgacattcataaagggggtagaggaagcactacaagattcggattgggtggtggcgatgcaagaggagctcaacaacttcactaggaatgaggtatggcatttagttccacgtcctaaccaaaatgttgtaggaaccaaatgggtcttccgcaacaagcaagatgagcatggtgtggtgacaagggatactcccaagtcgaagctttatcaaatggacgtgaaaagtgccttcctcaatggaccaatcaaggaagaggtctatgttgagcaacctctcggctttgaagacagtgagtatcctaaccatgtctataagctctctaaggcgctttatgggctcaagatcatgacacagaaattcgagatgcctatgatgggggagttgaagtatttcttaggatttcaagtgaagcaactccaagaaggcaccttcctaagccaaactaagtacactcaagatattctaagcaagtttggaatgaaggatgccaaacccatcaagacacccatgggaactaatgggcatctcgacctcgacacgggaggtaagtccgtggatcaaaaggaagagcacatcggggacttgccagttcttgggaagatccttggtgtcttgggcttcaaagaagcaaaattcggtcgctctttccaccgccgaagccgagtatattgccgcaggccattgttgcgcgcaattgctttggatgaggcaaaccctgcgggactacggttacaaattgaccaaagttcccttgctatgtga

SEQ ID NO: 31160 - DNA, 181 bp, Zea mays
  Clone ID: MRT4577_128428C.1
tcttccttttttacctgaagaagagaatggcctccacggtttctccaccggtggtggggaggtttaccaatatcctatccattgcctagtccggccgttttaaaacatttttattttaccactttggcgttctttataactttaataatcattacctcttctccattatttcattttataa

SEQ ID NO: 31161 - DNA, 7456 bp, Zea mays
  Clone ID: MRT4577_128429C.1
cttcgacttgggagtatcccttggccacgagtcgagctttgttcctagtcaccacaccatgctcgtcttgtttgttgcggaagacccacttggttcctacaacattttggttaggacgtggaactaaatgccatacctcgttcctcaagaagttgttgagctcttcttgcatcgccatcacccaatccgaatcttgaagtgcttcctctatcctgtgtggctcaatagaggaaacaaaagagtaatgctcacagaaatgtgcaacccgagatcgagtggttacccccttatgaatgtcgccgaggatggtgtcgacggggtgatctcgttggattgcttggtggactcttgggtgtggcggccttggttgttcatcctccttgtcttgatcacttgcatctcccccttgatcattgccattatcttgaggtggctcatctctttgatcttctccttcatcaacttgagcctcgtcctcattttgagttggtggagatgcttgcgtggaggaggatggttgatcttgtgtatttggaggctcttcgaattccttagggcacacatccccaatggacatgttccttagcgcgatgcacggagcctgttcttcacctatctcatcaagatcaacttgctctacttgagagccgttagtttcatcaaacacaacgttacaagaaacttcaactagtcctgaggacttgttaaagactctatatgcccttgtgtttgaatcatatcctagtaaaaagccttctacagttttaggagcaaatttagattttctacctctcgcctcggcccaaaaccgatccggtgtcttgtactcatcaagcatggttctagccatgtccaatagagttcgattcttcctctccactacaccattttgttgtggcgtgtagggagaagagaactcatgcttgatcccctcctcctcaaggaaaccttctatttgtgagttcttgaactccgtcccgttgtcgcttcttattttcttgatccttaagccgaactcattttgagcccgtctcaagaatccctttaaggtctcttgggtttgagatttttccaagtatagctgaccctctaacactcccttaaatgctattgaatcatcacttcttctaaagacagtgacaccttgatttccatccccgaatgtgatagctcgttgggaatcttggtttttctcataagaggagaacatcttcttttcccctgtcatgtggtttgtgcacccgctgtcgagtatccaacttgagcccccggatgcataaaccttgccggatttgttagttaaaacatatgatgcatcaaaagttttaaaagaaatgtcatgctcatttgatgcactaggagttttcttcttaggcaacttagcacgggttggttgcctagagctagatgtctcacccttatacataaaagcatggttagggccagagtgagacttcctagagtgaattttcctaattttgctctcaggataaccggcagggtataaaatgtaaccctcgttatcctgaggcatgggagccttgcccttaacaaaatttgacaatcttttaggaggggcactaagtttgacattgtctcccctttggtagccaatgccatccttaatgccagggtgtctcccattatagagcatacttctagcaaatttaaacttttcattttctaagttatgctcggcaatttttgcatctaatattgctatatgatcattttgttgtttaatcaaagtcatgtgatcatgaatagcattaatatcaacatctctacatctagtacaaatggaaacatgctcaacactagatgtagagggtttgcatgaattaagttcaacgatcttagcacgcaagatatcattattatctctaagatcggaaattgtaacattgcaaacatctagttctttagccttagcaattaaattttcattttctactctaaggctagcaagagaaatgtttaattcttcaatcttagcaagcaaatcatcattatcatttctaagattgggaattgaaacattacaaacatgtgagtcaaccttagcatttaaactagcattttcatttctaaggttggtaatagtatcatggcaagtacttagctcactagataatttctcacatttttctacatgctttttattttccttgattaggaagtcctcttgggagtccaagaggtcatccttttcatggatggcactaattagctcatttagtttttccttttgttccatgttaaggttggcaaaaagggtacgcaaattattctcctcatcactagcattatcatcactagaggattcatatttcgtggaggacttagatttaaccttcttccttttgccgtcctttgccatgaggcacttgtggccgacgttggggaagagaagtcccttggtgacggcgatgttggcggcgtcctcgtcggaagaggactcggtggagctctcgtcggagtcccattcccggcaaacatgggcatcgccgcccttcttcttgtagtacttcttcttttctctcctctttcccttcttgtcgtcgcccctgtcactgttgaaagtcgccttttgatccacggacttacctcccgtgttgaggtcgagatgcccatttgttcccatgggagtcttgatgggcttggcatccttcattccaaacttggttagaatgtcttgagtgtactttgtttgacaaatgaaggtgccctcttggagttgcttcacttgaaatcctaagaaatacttcaactcccccatcatagacatctcgaatttctgtgtcatgatcctactaaattcaaacaaatcattgtcaagagtcttagtgaatagagtaggatcggccttgccgactttgaagccattagcgataaggaaatctctaaggcattcataccatgctcttggggcttgcttgagcccataaagcgccttagagagcttatagacatggttagggtacttactatcttcaaagccgggaggttgctcaacatagacctcttccttgattggtccattgaggaaagcacttttcacgtccatttgataaagcttaaagccatggtaagtagcataggctaataatatgcgaattgactcaagcctagctacgggtgcataggtttcaccgaaatccaaaccttcgacttgggagtatcctttggccacaagtcgagctttgttccttgtcaccacaccatgctcatcttgcttgttgcggaagacccatttggttcctacaacattttggttaggacgtggaactaagtgccatacctcgttccttgtgaaattgttgagctcctcttgcatcgccaccacccaatccgaatcttgtagtgcttcctctaccctgtgtggctcaatagaggaaacaaaagagtaatgctcacaaaaatgtgcaacacgagatcgagtggttacccccttatgaatgtcaccgagaatggtgtcgacggggtgatctcgttggattgcttggtggactcttgggtgtggcggccttggttgttcgtcctccttgtcttcatcatttgcatctcccccttgatcgttgccgtcatcttgaggtggctcatccttttgatcctctccttcatcaacttgagcctcgtcctcatcatgggttggtggagatgcttgcgtggaggaggatggttgatcttgtgtatttggaggctcttcgaattccttagggcacacatccccaatggacatgtttcttagcgcgatgcacggagcctgttcttcacctatctcatcaagatcaacttgctctacttgagagccgttagtctcatcaaacacaacgtcacatgagacttcaactagtccagtggacttgttaaagactctatatgcccttgtgtttgagtcatagccaagtaaaaggccttctacagtcttaggagcaaatttagattttctacctcttttaacaagaataaagcatttgctaccaaaaactctaaaataggaaatgttgggctttttaccggttaggagttcataggatgtcttcttgaggattcggtgtagatataaccggttgatggcgtagcaagcggtgttgaccgcctcggcccaaaaccgatccggtgtcttgtactcatcaagcatggttctagccatgtccaagagagttcgattcttcctctccacttctatttgtgagttcttgaactccgtcccattgtcgcttctaattttcttgatccttaagccgaactcattttgagcccgtctcaagaatccctttaaggtctcttgggtatgagatttgtcctgcaaaaagaatacccaagtgaagcgagaataatcatccacaataactagacagtacttactcccgccgatgcttatgtaagcaatcgggccgaatagatccatgtgtaggagctccagtggcctgtcggtcgtcatgatgttcttgtgtggatgatgagctccaacttgcttccctgcctggcatgcgctacaaatcctgtctttctcaaaatgaacatttgttaatcctaaaatgtgttctccctttagaagcttatgaagattcttcattccaacatgggctagtcggcggtgccagagccaacccatgttagtcttagcagttaagcaagtgtcgagttcagctctatcaaaatctactaagtatagctgaccctctaacactcccttaaatgctattgaatcatcacttcttctaaagacagtgacaccttgatttccatccccgaatgtgatagctcgttggggatcttggtttttctcatatgaggagaacatctttttctcccctgtcatgtggtttgtgcacccgctgtcgagtatccaacttgagcccccggatgcataaaccttgccggatttgttagtaagcatataagaagcatcaaaagttttaaatgaaatggcatgatcatttgatgcattaggagttttctttctaggcaacttggcacgggttggttgcctagagctagatgtctcacccttatacataaaagcatgattagggccagagtgagacttcctagaatgaattttcctaattttgctctcaggatagccggcagggtacaaaatgtagccctcgttatcctgaggcatgggagccttgcccttaacaaagttagacaagttcttaggaggggcattaattttgacattgtctcccctttggaagccaatgccatccttaatgccagggcgtctcccattataaagcatgctacgagcaaatttaaatttctcattttctaagttgtgctcggcaattttagcatctagttttgctatatgatcattttgttgtttaattaaagccatatgatcatgaatagcattaacatcaacatctctacatctagtacaaatagatacatgctcaacaatagatgtagagggtttgcaagaattaagttcaacaatcttagcatgaagaatatcatttttatctctaagatcggaaattgtaactttgcaaacatcataatctttagccttagcaattaaaattttattttctactctaaggctagcaagagaaatattcaattcttcaatcctagcaagcaaatcatcattattatctttaggattggaagttgaaacaatgcaaacatgagaatcaaccttagcatttaaactagcattttcattcctaaggttgtcaatcatctcacggcaagtgcttagctcactagataatttttcacatttttctacttctagagcataagcctttttaaccttaacatgtttcttgttttctttaattagacaatcctcttgggagtccaaaaggtcatccttttcatgaatagcactaatcaattcatttaatttttctttttgctccatgttaagattggcaaagagaacacgcaaattatcctcctcatcactatcattatcatcactagaagactcatatttagtggaggagttagatttaaccttcttccgtttgccgtcctttgccatgaggcacttgtggccgacgttggggaagagaagtcccttggtgacggcgatgttggcggcgtcctcgtcgtcggaggagtcgcttgagctttcgtcggaatcccactcccgacaaacatgggcatcgccgcccttcttcttgtagtacttctttttctcctttcttctccccttcttgtcgtcgcctcggtcactgtcacttgatataggacatttagcaataaaatgaccgggcttaccacatttgtagcaaaccttcttggagcgggacttgtagtctttccctctcctttgcttgaggatttggcggaagctcttgatgacgagcgccatttcctcattgtcgagcttggaggcgtctataggttgtcgacttggtgtagcctcctccttcttttcctccgtcgccttgaatgcgacgggttgagcttcggatgtggatggatcatcaagctcgttgatcttcctcgagccttcgatcatgcactcaaaacttacaaaattcccgataacttcctcgggggtcattttagtatatctaggattaccacgaattaattgaacttgagtggggttaaggaaaatgagagatcttagaataaccttaaccatttcgtggtcgtcccacttcgtgctcccgaggttgcgcacttggttcaccaaagtcttgagccggttgtacatgtgttgtggctcctcccctttgcgaagtcggaaccgaccgagctccccctcgatcgtttcccgcttggtgatctttgtgagctcatctccctcgtgcgcggttttgagcacatcccaaacctcctttgcgctcttcaacccttgaactttgttatactcctctctacttaaagatgcgaggagtattgttgtcgcttgagagttgaagtgctcgatttgggccacctcatcctcatcatagtctttatcccctacggatggtacctgtgcaccaaactcaacaacatcccatatacttttgtggagtgaggttagatgaaatcgcattaaatcactccacctagcataatcttcaccatcaaaagttggtggtttgcctaatgggacggaaagtaaaggtgcatttttagaaatgcgagggtaatgtagggggatcttactaaacttcttacgctcttggcgtttagaagttacggagggcgcatcggagccggaggtcgatgttgatgaagtgtcggtctcatagtagaccactttcctcatccttttgtgcttgtcccctctccgatgtggcttgtgggaggaagatctctccttcttctccttgtggtgcgaagaagatttcttctccttccctttgttggaggagctctttttcttctccttcctcttggtgcgggactcttccgatgaagtgctcccgtggcttgtagtgggcttttcgccggtctccatctccttcttggcgtgatctcccgacat

SEQ ID NO: 31162 - DNA, 931 bp, Zea mays
  Clone ID: MRT4577_12842C.1
cctcgaggccggccgggccgggatttttttacgctgcggctaccaaagtagcccttaataaaccccaccgccccgccacctcgcaatccatccagaaactcgaatcgtagacacgaacgactacttgagagaggagaggcggcgggagagagaagagtcgacgacgacggtaaccggccgccatggaggtgagggtgccgcttcttccgcagcacatattgcggaacggcgacggacgggagaagaagtgcggtggcggcggcgtgaggcggtggagggagctgctagcgcgggaggccgggaaggtcggctgcgtggccctgccgatggcggccgtgagcgtgtcgcagtacgcggtgcaggtggcgtccaacatgatggtcggccacctccccggcgtcctcccgctctccgcctccgccatcgccacctccctcgccaccgtatccggtttcagcctcctcattgggatggcaagtggactggaaactctatgcggtcaagcctatggagcaaaacagtatgacaaactggggatgcacacctacagagctatagtcacactcattgctgtgagcattccaatctcacttctgtgggcattcataggcaaactcctgatcctcataggtcaggaccccttgatctcaagggaagctgggagatacatagtctggttgattccaggtctctatgcatacgccatcagccagcctctcacaaaatttctacagtctcagagcctgataattcctatgctttggtcctccattgcaactctgctcttgccattccctctttgttggttactagtgttcaagaccagtatggggtacattggagcttctttggcaatagcttgtcgtattgggttaacgtgatgatgcttgccgcttacatcagatactcggattcttgtaaggagaccgct

SEQ ID NO: 31163 - DNA, 2894 bp, Zea mays
  Clone ID: MRT4577_128430C.1
ctaagaacaaggcctaaacttgttttgtaggtttatgcatctgggggctcaagttggatcatcgatagcgggcacacaaaccacatgacaggggagaagaagagttctcctcctatgagaaaaaccaaaatccccaaagagctatcacattcggggatgaaaatcaaggtttggtcaaaggacttggtaaaattgctatatcacctgaccattccatttcaaatgtttttctcgtagattctttagattacaatttgcttttcgtttctcaattatgcaaaatgggttacatctgtctttttacggatataggtgttactgtctttagaagaagtgatgattcagtagcatttaagggagtgttagagggtcaactatacttagttgattttaatagagctgaactcgacacttgcttaattgctaagactaacatgggttggctctggcatcaccgactagtccacgttgggatgaagaatcttcataagcttctaaagggagaacacattttaggactaacaaatgttcattttgagaaagacaggatttgtagcgcatgccaggcagggaagcaagttggagcccatcatccacacaagaacatcatgacgaccgacaggccgcttgagctactccacatggatctgttcggcccgattgcttacataagcatcggcgggagtaagtattgtcttgtaatagtggatgattattctcgcttcacttgggtattctttttacaggaaaaatctcaaacccaagaaaccttaaaaggattcttgagacgggctcaaaatgagttcggcttaaggatcaagaaaataagaagcgacaacggaacggagttcaagaactctcaaatcgaaagctttcttgaggaggagggcatcaagcatgagttctcttctccctacacccctcaacaaaatggtgtagtggagaggaagaatcgaactctattggacatggcaaggaccatgcttgatgagtacaggacttcggatcggttttgggccgaggcggtcaacaccgcttgctacgccatcaaccggttatatcttcaccgaatcctcaagaagacatcatatgaactcctaaccggtaaaaagcccaatatttcttattttagagtctttggtagcaaatgttttattcttgttaaaagaggtagaaaatctaaatttgctcctaagactatagaaggctttttacttggttatgactcaaacacaagggcatatagagtctttaacaagtccactggactagttgaagtctcatgtgacgttgtgtttgatgagactaacgactctcaagtagagcaagttgatcttgatgagataggtgatgaagaggctccgtgcatcgcgctaaggaacatgtccatcggggatgtgtgtcctaaggaatccgaagagcctccaaaggaacaagatcaaccgtcctcctccacgcaagcatctccaccaactcaaaataaggatgaggctcaagttgatgaagggcaagatcaaaaagatgagccacctcaagatgatggcaatgatcaagggggagatgcaaatgatcaagaaaaggaggatgagcaagaaccaaggccgccacacccaagagtccaccaagcaatccaacgagatcaccccgtcgacaccatcctcggcgacattcataagggggtaaccactagatctcgtgttgcacatttttgtgagcattactcttttgtttcctctattgagccacacagggtagaggaagcacttcaagattcggattgggtggtggcgatgcaagaggaactcaacaacttcactaggaatgaggtatggcatttagttccacgtcctaaccaaaatgttgtaggaaccaaatgggtcttccgcaacaagcaagatgagcatggtgtggtgacaaggaacaaagcccgacttgtggccaagggatactcccaagtcgaaggtttggatttcggtgaaacctatgcacccgtagctaggcttgagtcaattcgcatattattggcctatgctacttaccatggctttaagctttatcaaatggacgtgaaaagtgccttcctcaatggaccaatcaaggaagaggtctatgttgagcaacctcccggctttgaagacagtgagtaccctaaccatgtctataagctctctaatgcgctttatgggctcaagcaagccccaagagcatggtatgaatgccttagagatttccttatcgctaatggcttcaaagtcggaaaagccgatcctactctattcactaaaactcttgacaatgatttgtttgtatgccaaatttatgttgatgatatcatatttgggtctactaacgaatctacttgtaaggaatttagtaggatcatgacacagaaattcgagatgtcgatgatgggggagttgaagtattttctaggattccaagtcaaacaactccaagagggcaccttcatcagccaaacaaagtacactcaagacattctaaccaagtttgggatgaaggatgccaagcccatcaagacacccatgggaaccaatgggcatctcgacctcgacacgggaggcgcattcaatgcgcgccagaagcgcgcagaagtcaggcacgcccatactggcgcaccggacattgaacagtacatgtccggtgtgcaccggacatccaggcgggcccagaagtcagaactccaacggtcagaatccaacggcattggtgacgtggctggcgccttgcaggtttatgcatccgagggttcaagctggattatcgacagcggatgcacaaaccatatgacgggggagaagaagatgttcacctcctacgtcaagaataaggattcccaagattcaatcatattcggtgatgggaaccaaggcaag

SEQ ID NO: 31164 - DNA, 325 bp, Zea mays
  unsure (1)..(325): unsure at all n locations
  Clone ID: MRT4577_128431C.1
aaaaggcgccgcgcgataaatttccacgaggaagaaagtacaaatcacaggctacaaaaggggaccaccacaacataccaatcaaatcagcccatccaccgttggcaaagccaaaagtaactgctcaccgcccgtcctaactggggcccacgcttaagtagcctaggtcccacagaaactacctaatccatcgcactggtaactgcgaccagggtcccacgccacgctaaggctcactggtcgccgaccccgncccaggcgagcccgaggcggccggcctgctgcngcgcgcgcagaaatttgacccccttgcgccccccccgcg

SEQ ID NO: 31165 - DNA, 1395 bp, Zea mays
  Clone ID: MRT4577_128432C.1
gccccgtttcaccacggctctcccccttccacacgcgcagagcagggagcgctgccacgcccccaccaccagacgccgcggccagcgcacagcgacgaccatggctgtggctatggcctcggcattgctcatgctcgcgctggcaacggcgtcggcagcggtcagcggcgccggcgcgccctggaggagcaggaggccgaggccggaggccgacctggtgaccgggctgcccgggcagccggcggtcgggttcagccactacgccggctacgtcgacgtcacctcgggcggcggcggcggcaaggctctcttctactggttcttcgaggcggagcgggagccggacaagaagccgctcctgctctggctcaacggagggcccgggtgctcgtcggtggcctacggagccgcccaggagctgggcccgttcctggtgaggagctacggcgcgaacctcacgcgcaacgcctacgcatggaacaaagccgcgaacctgctgttcctggaagcgccggtgggcgtggggttctcgtacgcgaaccggacgtcggacctgcggcggctgggcgaccgcgtcacggcgcaggactcgtacgccttcctcctcggctggctggacaggttccccgagttcaagggccgcgacttgtacatcgccggagagagctacgccgggcactacgtcccacagctcgcggagctcatctacgaagggaacaaaggggcgagcagggacagagccatcagcatcaaaggtttcatgatcgggaacgcggtgctgaacgacgcgacggaccagctgggcatggtggagtacgcgtggagccacgccatcatctcggacgagctctactcggcggtgcggcgggactgcgactccttcaaggaggaggccgacggcgggcggcccggcaagggctgctccccggcgctccgcgcgttcctgggcgcctacgacgacatcgacatctacagcatctacacgccgacgtgcctgctgagcaacctctcctccgctagcgccgcggccggcagcgctaggccgcggccggcgaggctcgtcgcggcgccgcgcctcctctccaagcatgaggagtggcataggctgatgaagcgtgtgccggcaggatacgacccgtgcacggaggcgtacgtgaccaagtacttcaaccgcggggacgtgcagcgcgcgctgcacgccaaccggacaggcctgccctacccgtactcgccctgcagcgaggtcataaggaaatggaacgactcgccggctaccgtgctgcccatcctcaagaagctcatgggcgccgggctgcgcgtctgggtctacagcggcgacacggacgggcgggtgccggtgacgtcgacgcggtacagcatcaacacgatggggct

SEQ ID NO: 31166 - DNA, 155 bp, Zea mays
  Clone ID: MRT4577_128433C.1
gtggtggcggagtctacggaagccgttttcgcttcacttttcctggctgtagagcgctttccccctggcgggtgagagtgcagagacgaaggtgcgagatgagcactatgttcgcggacactctcctcatcgtttttatctctgtgtgcacggct

SEQ ID NO: 31167 - DNA, 137 bp, Zea mays
  Clone ID: MRT4577_128434C.1
ttagttatgaagggtgttgccatcaactttgtgacccgcgacgacttacgtatggggtgtgacatacataagttctacaacgtgctgattgatgagctgcctgccaatgttgctgaccttctgtgatcaatttgaat

SEQ ID NO: 31168 - DNA, 189 bp, Zea mays
  unsure (1)..(189): unsure at all n locations
  Clone ID: MRT4577_128435C.1
ataaaaaaacagccgcgcccactcgtacnaactacacacaaaacaaccaattcttatttcatttctcaaaaaaactaacataactggtcttgctaatattcaaaaaccttgatgcccccaataaaattcaactttcatcattaactcctccacataaaatcaatttcccctaacctccattattacacc

SEQ ID NO: 31169 - DNA, 509 bp, Zea mays
  Clone ID: MRT4577_128436C.1
aaaccaaactaacaacttaaattctccaccccggaacatgaaacaacatgtcctaataggcccaagaatacacatagttcttgcttcagaacacaaaacgacccataagcaccctccaaggttgacataggactaaaaataagaagcgtctaataatttaccaaaagactgacagaaagacatcacaagcagacgcccgttccatgaactggcatgtatcagcctggacaaaatacctaaagacctagcttagaactggatggctctgattgaaacaacgcttgaaaatggaagtctgaacagggccaaaaaagggggcgataccaaaaaatccaatggtgattccagccttgaagacacgactagaagattccagcttcaaagatgctatctcgagagatcacccagccccataaggaggaagagaagaaggcgaaccacgaacaccaccaaccctattggccctgggaaataggtacgaacattggaggccctccaatttttcttat

SEQ ID NO: 31170 - DNA, 221 bp, Zea mays
  Clone ID: MRT4577_128437C.1
ctttctggacgtttaccctggctaggacaggccgatcatttggacagggtatatggagctgacacgcatcaccgacgtgctgccgatggagtgatgcggctagatgaactgggagcagcgtattcctgaccacgaacgagctctccaagcagaaccttagagggcgctgtgctcctccatggatcttggcgacagatggggacgaactcaggagtcttgtg

SEQ ID NO: 31171 - DNA, 1136 bp, Zea mays
  Clone ID: MRT4577_128438C.1
agcttgctcttttgtttcttattttagaaaggcacaaccagctgcaacatccatagttgataagcaagttagaaagaggaagctaaaagtgattacggggatgctccgttcctaatatgaaccaagatgatttaactttgctcattcgctgagaacctctcaaaatctgcaaatcctttatactcccatattttgaaaataaattcatcatttcagcatgtgtcctctttttgggagagcatttcaaaaaagagtttgtgctccaatctttccaactccatataggcatattttacttgcaatggacttcagacctatttaaaacagagaaaaaaataggaaaggaaaatgttaatttttggtcctctcttctttcttcttggcagagtccatgcccaatatttttcttatagcttccgcctgcaaaaatcaaacatagttgatgactcttgaaaacagaaacatgccaaatatttattgaaaaggtgagagaagatttctctcaatcttcactctctttagtggctttttccacttgcatcttgcgtccctgaacaacttcatccatcgttgcaatcatttcctctttagaaagcctgtcattcttgcttctcgaaggagctggaggtacaccatctgggaggtcaacagtactgttgctgctactgctaccatccatccacggttgaagggcacaacgacgtgttgtaagaggttcacttctaacattgacatgtggctcatttattgttttttgttcggtctcttcgaagtcaggctcactatccgtgatgcggtccatcaccatctgcatagagcccctgacgaagcagtaatcctcaatcctctgttgatttgggggtggcatgggacttggaagcgagggggcaggatcaccttacttgagtcggcgagggcgaaccactcagtgtagatcctctggtgctccttgcagcagaccatgctagcagtcgcttaagccggcggtgggagcaaagggctctctctctgcgacggtgatggtagtgcctgctcgggaattgggcctccgatgtaggcatacttggacgtgacgccgccaactccatggtttctccctacactacaggttttggtttgacacatgcgaggagcat

SEQ ID NO: 31172 - DNA, 244 bp, Zea mays
  Clone ID: MRT4577_128439C.1
gaccgggaaaaaatttttccaaatgggctaaagtatcaaaaatggagtgggaaaacacaattcacgaagggtagccctttacgggccatttcgaacccccacatgcaaataccttttgggcataacagttttagggcccatgacatggggctatccagacaaaaacaccgggtttgaaaaaaaaccttgcccccaaggtcccaagtttatccgaagggcatggttttcaagggaaggcgccctt

SEQ ID NO: 31173 - DNA, 383 bp, Zea mays
  Clone ID: MRT4577_12843C.1
aaaaaaaaatccccagacccgcataatgcaccaaagatgcctttttaaaattgagaacaacggacctgtatttccgggagctgcatctataagggttgctgcagggaatgtttatacattaccacaagaccacaacggagcgcctgagcgaaaaccaccagcatcgatcgaaaattaactgacccgaataatgtgttaataaggggaaaaaccaccccaaatctggggggaaaaaaacaaatcaagatgggtaaattaagtttcatgtggtggtccaccaacccgggggaaaaacgaatccctccgaaccatggcctgcagggagaccatcatccccaccagggaggcccacaagaggggcccagagcaaaaggcatatccaa

SEQ ID NO: 31174 - DNA, 938 bp, Zea mays
  Clone ID: MRT4577_128440C.1
ctcctcgctgtgtcaaaccaaaacctgtagtgtagggagaaaccatggagttggcggcgtcacgtccaagtatgcctacatcggaggcccaattcccgagcaggcactaccatcaccgtcgcagagagagagccctttgctcccaccgccggcttaagcgactgctagcatggtctgctgcaaggagcaccagaggatctacactgagtggttcgccctcgccgactcaagggctctatgcagatggtgatggaccgcatcacgggtactaacaccaccagttttatcatcaagtttgtgctttcatgcgtcgatctctagtagaaaactcagatagtgagcctgacttcgaagagaccgaacaaaaaacaataaatgagccacatgtcaatgttagaagtgaacctcttacaacacgtcgttgtgcccttcaaccgtggatggatggtagcagtagcagcaacagtactgttgacctcccagatggtgtacctccagctccttcgagaagcaagaatgacaggctttctaaagaggaaatgattgcaacgatggatgaagttgttcagggacgcaagatgcaagtggaaaaagcccctaaagagagtgaagattgagagaaatcttctctcaccttttcaataaatatttggcatgtttctgttttcaagagtcatcaactatgtttgatttttgcaggcggaagctataagaaaaatattgggcatggactctgacaagaagaaagaagagaggaacaaaaattaacattttcctttcctatttttttctctgttttaaataggtctgaagtccattgcaagtaaaatatgcctatatggagttggaaagattgggtatgaggctcctcaaaatcgtgtggtcatttttaatgcatttgcaggttgacgtttggctcggtttttagaatcttccct

SEQ ID NO: 31175 - DNA, 1909 bp, Zea mays
  Clone ID: MRT4577_128441C.1
ttgggaccctcgacgtcggccgggtctcgtttccaattaagaaaggatcgcaggccattaaacaagcacacacgggaggcctacaaagacgagagaggagaggagaacggtcaaggctgccgcgcgcatcgtcatcactagtcagtcgaggtcgaggggcggacgaggagctgaggagagagaagcttcacggagcttgcttgggagttggggacttgggggttgccgagctgtccgtctttcccctcccctccacccaccagctacctcgggagggcaaggcaaacatctgcggcctcctttcccgaacccgggttggatggagcgggacttcctggccgcgatcggcaaggagcagcagcacccgcgcaaggagaaggcaggcggaggcgcggaggaatcagcttacttcggggcagcagccgtcccggcgatggactggtccttcgcgagcaagccctgcgccgccccggcgctgatgtcgttccggtcggcggcgagggaggagccttcgttcccgcacttctccgccttcgacggcaccaagaacacagcccctcgtatgctcacgcaccagagatcgttcggccccgacagcacgcagtacgccgcgctgcaccgcgcgcagaacggggctagagtcgttccggtctcgtcgccgttcagccagagcaacccgatgttcagggtccagagctcgcccagccttccgaacagtaccgcgttcaagcagccgcctttcgccatcagcaacgccgtggccagttcgactgtgggttcctatggcggaacaagggatgcggtgaggccaaggacggcacaactgacgatcttctacgccggttccgtcaatgtgttcaacaacgtctcagctgagaaggctcaggagctcatgttcctagccagcagaggaagctcagcccccgtggcctgtaagccagaggctcctcctactctcgctccagcgaaggtcacagcgcctgaggttcttctgcctgcgaagcagatgctgtttcaaaaaccacagcatctctcgccgcctccatccagtgtccctggcatcttgcagtctgcagctctccccaggagcgcctcatctagctctaaccttgactccccagctccaaaatcttcggtcccgttagctgttcctcctgtaagccaggctccgccagcaacactgatcgccactacaactgcagcagcaataatgcctagagctgtccctcaagctaggaaggcgtcccttgctcgattcttggagaaaaggaaggaaagggtgacaactgccgcgccttacccatcagccaagagcccactggagagcagcgacacgttcggcagcgggagcgccagcgccaacgccaacgacaagtcctcgtgcacagacattgccctctccagcaaccatgaagagtccctgtgtttaggggggcagcccaggagcatcatcagcttcagcgaagagtcccccagcaccaagctacagatctgatcgtgccgtgcccagtgttcatagatttgtccaggctgaccgatgcagaaaaccataagaatacttttttccactcaagaggaagagattactatcgatgccgttgttgtttaccgtgatgctgttttgccgtgttaggttactgtactgctggtacagatggtagtgccccccacccacctaactaacaagagagctgtcacttgcagactcttgatttttttttgccatttctcttggaaatgaactcagatgtgttattctagcagtaatcaaattatacaggcatacaaattctgcgccatttgtatggccaaagtgtaatacacttgttcttgaattatgaacctctctcaagctgcagaatgcaattctcgatggtgttctcataaaaaaaaaaaaaaaaaagcggcc

SEQ ID NO: 31176 - DNA, 142 bp, Zea mays
  Clone ID: MRT4577_128442C.1
ctgccctgcctgcccatctcagagccataaggtcatctttgctagagctatttttacctatgtatttatcgttcttgatcataagccgcttatttatatcatgtatctctaaggacctaaaagcactttatgtagttttgaa

SEQ ID NO: 31177 - DNA, 910 bp, Zea mays
  Clone ID: MRT4577_128443C.1
ggtaccctcgaggccggccggggtccttctccctccagcccggcttatccgttcgtcgcgcgccccggccttcttctcttgcaagctagcgccaacgggaatgccgttccaattcaaaaactgcggttgaattccccaccagccctataagtcccccgcctccttgctcacctccataaaccaacccaaaagccccccaatttcacgctagataaaccataccccaaccctctgacgatgccttctacgccgacgctggtccctccgtgcgacgcggtggagccactgctggcggagtcctccgaccgcttctccatgttcccgatccgcttcccgcagatctgggagttctacaagaaggcggtggcgtccttctggacggccgaggaggttgacctctctgccgacgcccggcactgggacgaggcgctgtcccccgacgagcgccacttcatctctcacgtgctcgccttcttcgccgcctccgacggcatcgtgctcgagaacctcgcgtcccgcttcatgtccgacgtgcaggtcgccgaggcgcgggccttctacggcttccagatcgccatcgagaacatccactcggagatgtactcgctgctgctcgagacctacatccgcgacgacgtcgagaaggaccgcctcttccgcgccatcgatacggtgcccgcggtccggcgcaaggcggactgggccatgcgctggatcgacggcggggagcgcttcgccgagcgcctcgttgccttcgcctgcgtcgagggcatcttcttctcgggctccttctgcgccatcttttggctgaagaagcgcgggctcatgccgggcctcaccttctccacgagctcatctcccgcgacgaggcctgcactgcgatttcgcctgcctcctctacgatgtccta

SEQ ID NO: 31178 - DNA, 612 bp, Zea mays
  Clone ID: MRT4577_128444C.1
gttctgttatagaagttttgcaccaaaaatacagcgaaacttttctcatctaccagttacttgaaactaaaataattcaaaaaaataaactaggaggaatttgcacccttgattagttggttctatagaagtggttagcctataactttcatcaaaaacacagtgcaacgcaaagtaagtacaaatgttcagacaaagatattcaccaggcagtggaagtcagacaagctacatgaacaaaggtaacagaagctacaaacaaagcgaaatcacagatacatgggcacgggtaatggaagttcagcaaacttcacatgcactcgggtagaaatcccacctagcacccagccaactgtcgaatgctacaacctttacattctgaatccaagaggacttcacaatacatcaacgaggtcaggtatccttgtgctcctcagcggcgtcatgaatcatgatactcggcctcctcctcctccggcacggggtgcagcacatcctcagcaccaaccgcggtgggcaaaccacctgcctccccacactcggcagagccgtcatcagggaagcgcaccaccacaacggggcaaatacagtgatgcacgcagtagtcgctga

SEQ ID NO: 31179 - DNA, 117 bp, Zea mays
  Clone ID: MRT4577_128445C.1
gagatgaacactcgggataacagcgacaccgactggcaaccggcacgcgagcagcatttaaatcacgacatgctctagcgtactggtgcatgaaaaatgactgcaagggcatgctat

SEQ ID NO: 31180 - DNA, 1156 bp, Zea mays
  unsure (1)..(1156): unsure at all n locations
  Clone ID: MRT4577_128446C.1
ggtaccctcggagctcggccggggaaaagcttactctatcgccaaacgtacagcggcgcctcaacctctcttgtccttcctctcccgccgctcggctcgccgccgaaacatttccgccctgaattttcaaatcccccggcaaaatcgaaaattttcccaatcttccatagcacggcgcgccccctgttttctccctctgcccacccttatccgttcttcgcgcgctcgcgcctccttcccttgcaagcccgcgcggctgcgccaactccgtcccaattcaaaatctgcactctaattcccaccattcctataaatcccccgcctccctgctctcctccgtaaatcccacaactttcgcccaattccccagtagcaaccgtccccacaatcctccgacgatgcctgccgcgccgacgctgttgcccccgtgcgacgcggaggagccgctgctggcggagtcctccgaccgcttctccatgttcccgatccgtttcccgcagatctgggagttctacaagaaggcggtggcctccttctggacggcggaggaggttgacctctctgccgacgcccggcactgggacgaggcgctgtcccccgacgagcggcacttcatctcccacgtgctcgccttcttcgctgcctccgacggcatcgtgctcgagaacctcgcttcccgcttcatgaccgacgtgcaggtcgccgaggcgcgggccttctacggcttccagatcgccatcgagaacatccactcggagatgtattcgctgctgctcgagacctacatccgcgaccacgtcgagaaggaccgcctgttccgcgccatcgacaccgtgcccgcggtccgccgcaaggctgactgggccatgcgctggatcgacggcggggagcgcttcgctgagcgcatcgttgccttcgcctgcgtcgagggcatattcttctcggggtccttctgcgccatcttctggctcaagaagcgcgggctcatgccgggcctcaaccttctccaaagaagctcaactcccgcgatgagggcctccactgtgatttcgcctgcctcctctacgagcttctccgcaacaagctcgacgaggcccgcgtccgcgagatcgtcgcagacgctgntgacatcgagcgcgagttcgtctgcgacgcc

SEQ ID NO: 31181 - DNA, 320 bp, Zea mays
  Clone ID: MRT4577_128447C.1
tttgtactgaaagacaaaatgagccgcagtcaatatctacagaaagaacgtgtcaacaccgagtgaaagcttgtgatgcaagtccagagaaacactcaagggctgaaacactaaaccaggagggaatcatttttgagagaggaacagattgaaccacgtgcagagaaattttctttgactagagaacgatttcaaggaaggttggaacagagtacatcctacagaaacatatattggggaaggaaacttcacaacgacgaataactgacctctgatctatatccttagaacgatgctatgaggacaaaaaaacattgata

SEQ ID NO: 31182 - DNA, 2992 bp, Zea mays
  unsure (1)..(2992): unsure at all n locations
  Clone ID: MRT4577_128448C.1
ccggccgggacgaataaagcatcgatcacgacaagatggcgtgcacatacaatgcgatgagagccttgttcctcgtggtcctcttctgcatcgtgcatggtgagaaggaagagtcaaagggcatcgatgcgaaagcgtccgggcctggtgggtccttcgacatcaccaagntgggcgcctccggcaatggcaatatagaagagcgacgtcgcatgcacgcgtacgtaagctcggaattcggctcgaggatgtgtcgccgtcccgttccgtccgcccctgcggtgcgggtgctttctccagcgacagcgacagcgagaggggaggggaaccagcaagctcctcctcctctacccctcgcctcggcggtgccaacaggcaggcaggcaggtcgtccgcgccagatctatctgtcccttcctcttgtagttgcaggcagacgcgccatgcggatgcgggtgcttcccgcgtcctggtcatcttcctccgccaagcatagcagcggcagctccgagtcgcaggagcacccttcttcctcctctgctacggccgcggtgtacctcaacatctacgacatctcccccctcaaccactacctctactggttcggactcggcatcttccactccgggatccaagtccatggcatggagtatggctttggagctcatgaataccccaccagcggagtcttccaagtagaacccaaaagctgccccgggtttatcttcaggcgctctgtgtgtgtgggtgtaactcacatgtcccgttcccaagtccgcacttccatagaggatctcgccgaggattatcatggggacacttatcatttgattctcaagaactgcaatcatttcacagcagatgtctgcgagcgtttgaccgggaagccagtacctggatgggtgaatcgactcgccagattaggttccttcttcaattgtgtattgcctgacagtatcaaggtttcagcagtcagagatgtaaatgcacatccagatttttctgatgatggcttggggtccaatgcctcgatccttgagggaagtgatgacgatgatttagaccacacaatttcaccgaaatcctcctaccccaccctacgaatcttcgcgggaaatcccacaactttcgcccaattccccactagcaaccgtccccacaatcctccgacgatgcctgccgcgccgacgctgttgcccccgtgcgacgcggaggagccgctgctggcggagtcctccgaccgcttctccatgttcccgatccgtttcccgcagatctgggagttctacaagaaggcggtggcctccttctggacggcggaggaggttgacctctctgccgacgcccggcactgggacgaggcgctgtcccccgacgagcggcacttcatctcccacgtgctcgccttcttcgctgcctccgacggcatcgtgctcgagaacctcgcttcccgcttcatgaccgacgtgcaggtcgccgaggcgcgggccttctacggcttccagatcgccatcgagaacatccactcggagatgtattcgctgctgctcgagacctacatccgcgaccacgtcgagaaggaccgcctgttccgcgccatcgacaccgtgcccgcggtccgccgcaaggctgactgggccatgcgctggatcgacggcggggagcgcttcgctgagcgcatcgttgccttcgcctgcgtcgagggcatattcttctcggggtccttctgcgccatcttctggctcaagaagcgcgggctcatgccgggcctcaccttctccaacgagctcatctcccgcgatgagggcctccactgtgatttcgcctgcctcctctacgagcttctccgcaacaagctcgacgaggcccgcgtccgcgagatcgtcgcagacgctgtcgacatcgagcgcgagttcgtctgcgacgccctccctgtcgcgctcgtcggcatgaacggggatctcatgagccagtacattgaattcgtggccgaccgcctgctcatggcgctcgggtgcaagaagatgtacaacgtgaccaatcccttcgactggatggagctcatctcgctgatggggaagaccaacttcttcgagaagcgcgtgggtgactaccagaaggcatccgtcatgaacagcctcaacggcggcggcgctgccgaccacgtcttcagcatcgatgaggacttctgagttggcacgcgtaatctatggtgtcggtttaatgttagtatttgcttgtagtttgtaagtgtgatacatgtactctgagccgcttgatgcaatgatgctgtttcattttctgtgttaactcctaagaacacctaacagcgacactgtgtcttcaagggacaagacattaactcctggcagggatagtctctaattgttctcctttgatagcaaaatagaggcaagtgctttgatgttcacgtctcatggtggtatggggttggcctgatcatatcatcatctgctgtcaaaatttggtggcgcgctagtctggggtgatgaaggattgtttgatattgttgctattatcagttgttgaggttgatatagctgcctatagtgttaatgtgatcatactttgttgtggtattatcatgtggcgaaggccaagttaaccagcatgtcatggttgtttgtgtgcgccagtgtttgtagtgtggcatattgtctgagtaagtagagggtttggctagtcatctcacgtgacctttcctttgaaacgatgatggtgtgtataagtgatttcttctgtacaaaaattattgacagagtttgaaattcccatatcatttcacaataggttccttcttcaattgtgtattgcctgacagcatcaagggttcagcagtcagagatgtaaatgcacatccagatttttctggtactctacctacacccagtttaactacttgtaccctcacattcacatcacatggntggaatttgaccttacagaatcctgtaccactttattaaagatt

SEQ ID NO: 31183 - DNA, 1660 bp, Zea mays
  Clone ID: MRT4577_128449C.1
gcggtgcgggtgctttctccagcgacagcgacagcgagaggggaggggaaccagcaagctcctcctcctctacccctcgcctcgtccgcgccagatctatctgtcccttcctcttgtagttgcagggagacgcgcggtgcggatgcgggtgcttcccgcgtcctggtcatcttcctccgccaagcatagcagcggcagctccgagtcgcaggagcacccttcttcctcctctgctacggccgcggtgtacctcaacatctacgacatctcccccctcaaccactacctctactggttcggactcggcatcttccactccgggatccaagtccatggcatggagtatggctttggagctcatgaataccccaccagcggagtcttccaagtagaacccaaaagctgccccgggtttatcttcaggcgctctgtgtgtgtgggtgtaactcacatgtcccgttcccaagtccgcacttccatagaggatctcgccgaggattatcatggggacacttatcatttgattctcaagaactgcaatcatttcacagcagatgtctgcgagcgtttgaccgggaagccagtacctggatgggtgaatcgactcgccagattaggttccttcttcaattgtgtattgcctgacagtatcaaggtttcagcagtcagagatgtaaatgcacatccagatttttctgatgatggcttggggtccaatgcctcgatccttgagggaagtgatgacgatgatttagaccaactcctaagaacacctaacagcgacactgtgtcttcaagggacaagacattactcctggcagggatagtctctaattgttctcctttgatagcaaaatagaggcaagtgctttgatgttcacgtctcatggtggtatggggttggcctgatcatatcatcatctgctgtcaaaatttggtggcgcgctagtctggggtgatgaaggattgtttgatattgttgctattatcagttgttgaggttgatatagctgcctatagtgttaatgtgatcatactttgttgtggtattatcatgtggcgaaggccaagttaaccagcatgtcatggttgtttgtgtgcgccagtgtttgtagtgtggcatattgtctgagtaagtagagggtttggctagtcatctcacgtgacctttcctttgaaacgatgatggtgtgtataagtgatttcttctgtacaaaaattattgacagagtttgaaaaaaaaaaaaaaaaaaaaaaaaaaaaaaaaaaaaaaaaaaaaaaaaaaaaaaaaaaaaaaaaattcctacaactttcgcccagttccccactagcaaccgtccccacaatcctccgacgatgcctgccgcaccgacgctgttgcccccctgcgacgcggaggagccgctgctggcggagtcctccgaccgcttttccatgttcccgatccgtttcccgcaaatctgggagttctacaagaaggcgggggcctccttctggacggcggaggaggttgacctctctgccgacgcccggcactgggacgaggcgctgtcccccgacgagcggcacttaatctcccacgtgctcgccttcttcgctgcctccgacggcatcgtgctcgagaacctcgcttcccgcttcatgaccgacgtttaggtcg

SEQ ID NO: 31184 - DNA, 514 bp, Zea mays
  unsure (1)..(514): unsure at all n locations
  Clone ID: MRT4577_12844C.1
cccgaatctcaacgcacaccatctatgcttgtgcctcttggccagcgggcttgtccgatgggccactgttttgctccggcttcatggtggggaaagccaggacctctctaatgctgtagttgtcggtcaagaacatcatcattcggtcaatacccatgccccagccaccggtgggagggagaccgtgctcgagggccttgcagaaggtctcatcgacgccctgtgcctcgtcgtcgccctgcgccttctgtcgggcctgctcctcgaatcgctcgcgctgttcaagggcaacgttcaactccgtgtaggcattgcaaatctccttcttgcagacgaaagcctcgaaccgctcgcaaagaccaggaacgctgcgagagctcttggcgagaggagacatcatcttggggtggccagtgatgaaagtagggttaatgcattgngactccaaaaactctncaacaagggcatncagcatacgggcgttggtcagaggagcgctgcactcaacgccagt

SEQ ID NO: 31185 - DNA, 583 bp, Zea mays
  Clone ID: MRT4577_128450C.1
atcctccgcctctccttccagaggccgacgtaccgccgcttgatacctctctccctctacgcctctgccgacagaagacgagaccaacagcccaccaggatgaaccacgacgatgcctaccagcttgaatcgcctcgctgaaatgtctcggcccctctgcccaggactccactgccattccgccacctgcacgcctgtcacctcgaccctcaagaaatacgaactccttctgccacaactgctacgacccctacttacctatgtccttgctgctggcactcagaaggctgcttaagtaccatgtcgacgcccgcatgcggctgctctagcatgtcgtcctgctcttgatgaagctcctgaccttacggagaaactcaagacacagcggaggacattcaaaagagatatgactacacttgtcttcattctcttcgactaaaactgtccatagtcaagactagttgattccttaccctataccacagaacgcttacctatcgtagctgtgtatacacgttcactagtgattcatgctctataccacttatcagacttcttctgtgaaatgtctagcataaactgc

SEQ ID NO: 31186 - DNA, 369 bp, Zea mays
  Clone ID: MRT4577_128451C.1
ttcccgaattgacgcatgcatccacgcgtgcgaacacgcgtccggaagatgctcatgcatctagttccgtggctacgcagtctggggcaagctcgtgaaagtcaaggtttcgtacaagctctcggacgccgacaagaaggcattcctcaagaccaaggctaagccggcaaatgccgccgctgccaagaccaccgcccccaagccggccaaggccgccgccgacaagtcaaagaatgcagcggctgccaagccaaagaaggccgctgctgctgggaccaagcgcaaagtgcccgagaagaatgtcgtggcgaagcctaagaagtcccccgccgtcaaggccaatgccaagccgaagaccgtgaagtcccc

SEQ ID NO: 31187 - DNA, 130 bp, Zea mays
  unsure (1)..(130): unsure at all n locations
  Clone ID: MRT4577_128452C.1
ccctgtgttgaaccagcgctcgggatcaacttcgccagggacggcatgaggcgtcgctgactgtctttcgcccgacgccgaacactcagacgctnggctcgactacaacgcaaacaaaaaagccaacaaa

SEQ ID NO: 31188 - DNA, 251 bp, Zea mays
  Clone ID: MRT4577_128453C.1
ctctacctgctcgctactcggctcctcggttgaaagatactcctcagccctcaccagattccctcgggcccaccttccacgcggaggagccaccactaggacatcgtggcacacgctaagcatctagtgcatctaggtgtacacagggcgggcactcagtcggtacagtttgcccctgacccccatcctcctagtaaacggatgatcaccgacggcgccgcctagatggggcgcgcagcgactacagcccc

SEQ ID NO: 31189 - DNA, 329 bp, Zea mays
  Clone ID: MRT4577_128454C.1
caacaccttcgaagggcgtcccatttacgtgctgaagttcagcacggggggcagtaagcgtccagccatctggatcgacacgggcatccattcccgggagtgggtcacccaggccagtggggtctggtttgcaaagaagatcactcaagactacgggcaggatgcagctttcaccgccattctcgacaccttggacatcttcctggagatcgtcaccaaccctgatggctttgccttcacgcacagcacgaatcgcatgtggcgcaagactcggtcccacacagcaggctccctctgtattggcgtggaccccaacaggaactgggacg

SEQ ID NO: 31190 - DNA, 449 bp, Zea mays
  unsure (1)..(449): unsure at all n locations
  Clone ID: MRT4577_128455C.1
agaaaggggcgccannngnnnaaaaaaaacacagcgcnncganangngagcgcaagnccgcagaagcggcagccccgngggacaggnnnnanacaagagggggggggagcngngcaggaanngagnggacgagcgagcagcnnccanngcagcngacagnggagncgcaggccagcaaacggaggaggaacgccnggcagcgcggccgnagcncaggcccggcccagcaagcggcaangaacccgccgagaggncccgcaggaacncgaagccgggaaccggcngagcaacggcggacaccacgggaacgggggagangcgcggggacgggcgacggagggggcgcaggggggacacgagaacaccggggggggaggagaggacaggggnggggggaagggggagnccgcccgacgcgaggggggcggcaggcggcggcgcggggggcg

SEQ ID NO: 31191 - DNA, 2952 bp, Zea mays
  Clone ID: MRT4577_128456C.1
atgtcgggagatcacgccaagaaggagatggtgaccggcgagaagcccaccacaagccacgggaaggctccatcaagggagtccggcaacaaaaagaaggaaggatccccttcacgcattaggacgcacaagagtggcgagaagaagaagaaaatgaagaaagtggtctactacgagactgactcttcatcgtcctctacatcgggatccgacgccgtgtccgtcacttctaagcgccaagagcgcaagaagtatagtaagatccccctacgctaccctcgcattcctagacatactccattactttcggtcccattaggcaaaccactgacgtttgacagtgaagattattctaggtggagtgatatgatgagatatcacctaacctcactccacaaaagtatatgggatgttgttgagtttggagtacaggtaccatccgtaggggatgaagattatgatgaggacgaggtggcccaaatcgagcacttcaactctcaagcaactactatactcctcacctctctaagtcgagaggagtataataaggtgcaagggttgaagagtgcaaaggagatttgggacgtactcaaaaccgcgcacgaaggagacgaggtgaccaagatcaccaagagggaaacgatcaagggggagctcggtcgcttcatgcttcaccaaggggaggagccacaagcaatgtacaaccggctcaaaacattggtgaaccaagtgcacaacctcgggagcaccaaatgggatgaccatgagatggtcaaggaagtaataggaaaatttgtgagctttgaattgatgatcaaaggctccaagaaaatcatcgagcaaggcgcctcctccacacccaatgtgcaacccgttgcattcaaggcaacggaggagaagaaagaagactctacacccagtagggttcccatcaacgcctccaagctcgacaatgaggatatgacgcttatcatcaagagcttccgccaaatcctcaagcaaaggagggggaaggactacaagccccgctccaagaaagtttgctacaagtgtggtaagcacgatcattttattgcaaaatgtccattatctagtgatagtgacaggggcgacgacaagaagggaaagagaagagaaaagaagaggtactacaagaagaagggtggtgatgcccatgtttgcccggagtgggactccgacgagagctccaccgactcctcctccgacgaggacgccgcaaacatcgccatcaccaaagggcttctcttccccaacgtcggccacaagcgcctcatggcaaaggacggcaagaaaaagaaggtaaaatcaagatcctccactaaatatgcaacctctagtgatgaggataactctagtgatgatgaggataacttgcttactctttttgccagcttaaacatgcaacaaaaagaaaaattaaatgaattaattagtgccattcatgagaaggatgaactcttggatagccaagaggacttcctaattaaagaaaacaaaaagcatgttaaagttaaaaatgcctatgctctagaagttgaaaaatatgaaaaaataactaatgagctaagcacttgccatgatgttatctcaaaccttaaaaatgaaaatgctagattaattgctaaggttgagagttcaatgttgggcgatgtggatgctcctccgaggtcgaggtcgagtctgtctttcgtggccgtggtcgagtccgagcctctgggtcgggcgaggcggagactgtcagttgaggctagggctgagtccgagccctggggtcgggcgaagcggagttcgtcgtcttctggggctgagcccaagtccgagccctgggtcgggcggagcggagttcgccatcttcaggggcttagcccgagtccgagccctgggtcgggcggagcggagttcgccgtcttcaggggcttagcccgagtccgagccctgggtcgggcggagcggagttcgccgtcttcaggggctgagcccaagtccgagccctgggtcgggcggagcggagtttcctatgaaaatgagaaatttaaatttgctcatagcatgctttatagtgggaggcgccctagtattaaggatggcattggcttccaacggggagacaatgtcaagcttaatgcccctcctaaaagattgtcaaactttgttaagggcaaggctcccatggctcaggataacgagggttacattttataccctgccggttatcccgagcacaaaattaggagaattcactctaggaagtctcactctggctctaatcatgcttttatgtataagagtgaggcatctagctctaggcaatcaacccgtgctaaattgcctaagaaaactcctattgcatcaaatgaacataatatttcatttaagacttttgatgcatcctatgttcttactaacaaatcaggcaaaatagttgccaaatatgttgggggcaaacacaaggggtcaaagacttgtgtttgggtacccaaggtgcttgtttctaatgtgaaaggacccaagactgtttgggtttatgcatccgggggctcaagttgtatcatcgatagcgggtgcacaaaccacatgactggggagaaaaggatgttctcctcctatgagaaaaaccaagatccccaacgagctattacattcagggatggaaatcaaggtgttactgtctttagaagaagtgatgattcagtagcatttaagggagtgttagagggtcagttatacttagttgattttaatagagctgaactcgacacttgcttaattgctaagactaacatgggttggctctggcaccgccgactagctcatgttgggatgaagaatcttcataagcttctaaagggagagcacattttgggactaaccaatgttcattttgagaaagaaagggatgttggggacttgttctcaaatgctaagagttaa

SEQ ID NO: 31192 - DNA, 4914 bp, Zea mays
  Clone ID: MRT4577_128457C.1
atgtcgggaggatccgccaagagggagatggaaacggacacaagccacgggaaagctccatcgaaggagtccgacgccaaaggaagggaggaatcacctccccgcgtcaagtcgcatcggagtggcgacaagaagaagaagatgaagaaagtggtctactacgagaccgactcttcgtcaccatccacctccggctccgacgcgccatccgtcacttctaagcgccataagcacaagaagtttagggatgaaggatatgattcagacgaagttgcccaaatccggcacttcaactcccaagccactactatactcctcgcctctctaagtcgagaagagtataataaggtgcaagggttgaagagtgccaaagaaatttgggacatgctcaagaccgtgcacgaaggagatgaggtgacaaaaaacaccaaccgggagacgatcaagggggagctcggtcggttcatcctcaaccaaggagaggagccacaagccatgtacaaccggctcaagaccttggtgaatcaagtgcacaacctcaggagcacaaaatgggatgaccatgaaatggtcaaggttattctaagatcacttgtttttcttaatcctacacaagttcaattaattcgtggtgatcctagatacaagctaatgtctcccgagaaggttataggaaagtttgtgagctttgaattgatgatcaaaggctccaaacaaatcatcgagagaggcgccacttccacacccgaggtgcaacccgtcacatttaaagcgatggaggagaagaaagaagagtctacgtcaagtaggctccccatcgacgcctccaagctcgacaacgaggaaatgacgctcattattaagagctttcgccaaatcctcaagcaaaggaagggagagactacaaaccccgttccaagaaggggcaacgacaagaaggaaaaaaggaaggaaaagaagagatactacaagaagaagggcgacgatgcccatgtgtgtcgggaatgggattctgacgaaagcatcactgactcctcctccgacgaggacaccgccaacatcaccgtcaccaaaggcctccttttccccaacgtcggccacaagtgcctcatggcaaaggatggcaagaaaaagaaggtacaagctagaaccacccccaagtatactacatctagtgatgagggtagttctagtgatgatgaagataacttgcttgccctttttgccaacctaaacatgcaacaaaaagaaaaattgaatgaattgataggtgctattcatgagaaggatgaactcttggatagccaagaggaattccttattaaagaaaacaaaaagcatgttaaggttgagaaattaaatgtttgtgatgattctcatgtcaaccttaaaaatgataatgctaatttgattgctaagattgacaaattgaatgaatcaatttctagccttaagattgagaatgataaactattttctaaggctaaagttataaatgtttgcaatgtttctatttccaatcttagaaataagaatgccatgttacatgctaagattgatgaattaaatgcatgcaaaccctctacatctactgttgatcatgtttctatttgcatgagatgtagagatattaatgttgatgctatccatgatcaccaagctttaattaaagaacaaaatgatcacatagctcaactaactgctaaaattaatgagcatgagatagagaatgaaaattttaaatttgctagaagcatgctctataataggagacgccctggcattaaggatggcattggctttcaacagggagacaatgtcaagcttaatgcccctaagagattgtccaattttgttaagggcaaggctcccatggcacaggataacgagggttatattttatatcctgccggttatcctgagcacaaaattaggagaattcattttaggaagtctcattctggttctcatcatgcttttatgtataagaatgagacatctagttctaggcactctacacatgctaaaatgcctaaaaagaaatctcctactgcatcaaatgatcataacatttcatttaagacttttgatgcttcttatgttttaactaacaaatcaggcaaagtagttgccaaatatgttggggccaaacacaagggctcaaagacttgtgtttgggtacccaaagtgcttgtctctaatgtgaaaggacccaagacagtttgggtttatgcatccgggggcgtaagttggatcattgatagcgggtgcacaaatcacatgacaggggagaaaaggatgttcttctcctacgagaaaaacgatgatccccaaagagctatcacattcggggatggaaatcaaggtgttactgtctttagaagaagtgatgattcagtagcgtttaagggagtactcgagggtcagctatacttagttgatttcaatagagctaaactcgatacttgcttaattgctaagactaatatgggttggctctggcatcgccaactagcccatgttgggatgaagaatcttcaaaagcttctaaagggagaagacattttaggactaacaaatgttcattttgagaaagacagggtttgtagtgcatatcaagaaggaaagcaagttggtgtccatcattcacacaagaacatcatgacaactgacatgccacttgagctactccacatggatctattcggcctgatagcttacataagcatcggtgggagaaaatcacaaacccaagaaactttaaagggattctggagatgggctcaaaatgagttcgtattaaggatcaagaaaataagaagcgacaacgggacagagttgaagaactcacaaatagaaggtttttttgaggatgagggcatcaagcatgagttctcttctccctacacaccacaacaaaatggtgtagtgcagaggaaaaatagaactctacttgacatggcaaggaccatgcttgatgagtacaagacttcggaccgagtctttagtagcaaatgctttattcttgttaaaagaggtagaaaatctaaatttgctcctaaggctgtagaaggctttttactcggttatgactcaaacacaaaagcgtatagagtctttaacaagtccactagactagttgaagtctcttgtgacattgtgtttgatgagactaatggctctcaagtagagcaagttgatcttgatgagctagatgatgaagaggctccatgcgtcgtgctaaggaacatgtccatcgaggatgtgtttcctaaggaatccgaagagcatacacaagcacaagatcaaccatcatcttccatgcaagcatctccaccaactcaagatgaggatcaagctcaagatcatgaaaatgaagatcaagaagagccacctcaagaggaggacaatgatcaagggggagatgccaatgatcaagataagaaagatgatcagggtccaagaccgccacaccaaagagtccaccaagcgatacaacgagatcaccccgtgaactccatcctcggcaatattcataagggggtaaccactcgatctcgtgtcgctcacttttgtgaacattactcttttgtgtcttctattgagccatacagggtggaagacgcattaagagattcggattgggtgttggcaatgcaagaggaactcaacaacttcacgaggaatgaggtatgtcatttagttccacgtcctaatcaaaatgttgtaggaaccaagtgggtcttccgcaacaagcaagatgagcatggtgtggtgataaggaacaaagcccaacttgtagccaaaggatattcacaagtcaaaggtttggatttcgttgaaacctatgcacccgtagctaggcttgagtcaatttgcatattacttgcctatgctacttaccatggctttatgctttatcaaatggacgtgaaaagtgccttcctcaatggaccaatcaaggaagaggtctatgttgagcaacctcccggctttgaagatagtgagtacactaatcatgtctataaactctctaagccgctttatgggctcaagcaagccccaagagcatggtatgaatgcctaagagatttccttatcactaatggcttcaaagtaggaaaagccgatcctacactctttactaacactattgcaaatgatctgtttgtatgccaaatttacgttgatgatatcatatttgggtctactaacaaatctacttgtgaagagtttagtaggatcatggtacaaaaattcgagatgtctatgatgggggagttgaagtatttcttaggatttcaagtgaagcaactccaagagggcaccttcatcagccaatctaagtacattcaagacatactcaccaagtttggaataaaggatgccaagcccatcaagacacccataggaaccaatgggcatctcgacctcgacacgggaggttattcagatgctgattgggcagggtgtaaaattgatagaaagagcacatcaatgacttgccagttcttgggaagatccctggtgtcttgggcttcaaagaaacaaaattcagtagctctttctaccgccgaagctgagtacattgccgcaggtcattgttgcgcacaactgctttggatgaggcagacccttagggactatggctacaaatttagcaaagtccctctcctatgtgataatgagagtgcaatccgcatggcggataatcccgttgagcacaaccgcactaagcacatagccattcggtatcactttttgaggaatcaccaacaaaggggggatatcgagattgcttatgttagcaccaaagaacaattagtcgatatctttaccaaaccaatagatgagaaaacctttaccaaacttaggaatgagctaaacattcttgattctaggaactttgattga

SEQ ID NO: 31193 - DNA, 238 bp, Zea mays
  Clone ID: MRT4577_128458C.1
gctttcggcaagaaagaagttcctaccaccgagtatgtagtgtggcttctctaatgttggatctgttgcgcatttagcgaataggattagatgattagtggattactcactcagacaagcatcttctgcaacaggcatccttctgtctcataatcagctgggtctgatatggctcatgccaactaatggtcgtgagagtatcatgtaggcttatctatgttctccagaagatgtgtcg

SEQ ID NO: 31194 - DNA, 4608 bp, Zea mays
  Clone ID: MRT4577_128459C.1
agcctaaccgctcgaagtgatgtcgggagcatccgccaagagggagatcgggaccggcgagaagcccgctacaagccatgggaaggctccatccggggagtccaccaacaaggtgaagggatccccttcacacgacaagtcgctcggagcggtgacaagaagaagaagatgaggaaggtggtctactacgagaccgactcctcgtcaccatccacctccggttccgacacgccgtccgtaacttctaagcgccatgagcgcaagaagtttagtaagattcccctacgctaccctcgcatttccaaacgtactccattactttccgtcccattaggcaaaccacctatgtttgatggtgaagattataatatgtggagtgataaaatgaggcatcaactaacctcactccacactagcatttgggatattgttgagattggagtacaggagtataataaggtgcaaggattaaagagcgccaaggagatttgggacgtgcttaaaaccgcacacgaaggagatgcggtgaccaaaatcaccaagcgggagacgatcgagggggagctcggtcgcttccggcttcgccaaggggaggagccacaagacatgtacaaccgcttgaagaccttggtgaaccaagtgcgcaacctcaggagcaccaaatgggatgaccatgagatggacaaggaagtaataggcaatttcgtgagctttgagttgatgatcaaaggctcaaagaaaatcatcgagctagatggcccctccacgcccgaagcacaaccggtcgcattcaaggcaacggaggagaaaaaggaggagtctacatcaagtagacaacccatcgacgcctctaagctcgacaatgaggagatggcgctcatcatcaaaagcttccgccaaatcctcaagcaaaggagggggaaggactacaaatcccgctccaagaaagttgatagtgagaggggtgacgacaagaagggaaagaggagagaaaagaagagatactacaagaagaagggcggcgatgcccatgtgtgtcgcgagtgggactccgacgagagctcctccgactcctcctccgacgaggacgccgccaacatcgccgtcaccaagggactcctcttccccaacgtcggccacaagtgtctcatggcaaaggacggcaaaaggaacaaggtaaaatcaagatcctccactaaatatgtttcctctggtgatgaagataattctagtgaaaatgaggaggataacttgcgcaccctttttgccaacctaaacatgcaacaaaaggaaaaattaaatgaattaattagtgctattcatgagaaggatgaactcttggacacccaagaggacttcctaattaaggaaaataagaagcatgttaaattgttaagtgagctaagcacttgccatgatgttattaccaaccttagaaatgagaatgctagtttaattgctaaggttgattcaaatgctaaagaattagatgtttgcaatgcttccatatccgatcttagagataagaatgatattttatgtgctaagattgttgaacttaattcttgcaaaccttctacatctaccattgagcatattactatttgcattagatgtagatatattaatgttgatgctatccatgatcacctagctttaattaagaaacaaaatgatcacatagctcaacttaacgcaaaaattaatgagcatgacttagaaaatgaaaaatttaaatttgctcgaagcatgctctatagtgggagacgccctgacatcaaggatgacattggcttccaaaagggggacaatgtcaaacttaatgcccctcctaaaagattgtctaactttgttaagggcaaggctcccatgcctcgggataacgagggttacatcttgtaccctgccggttatcccgagagcaaaattaggagaattcattatatgaagtctcactctggccctaatcatgcttttatatataagggtgagacatctagttctaggcaatcaacccatgctagattgcctaaaaagaaaactcctgctgcatcaaatgatcataacatttcatttaaaacttttgatgcatcttatatgctaaccaacaaatcaggcaaggtttatgcatccgggggctcaagttggatcatcgatagcgggtgcacaaaccatatgacaggggagaagaaaatgttctcctcctatgagaaaaaccaagatccccaaagagcgatcacattcggggatggaaaccaaggtgttactgtctttagaagaagtgatgattcaatagcatttaagggagtgttagagggtcaactatacttagaaaaatctcatacccaagagactttaaagggattcttgagacgggctcaaaacgagttcggcttaaggatcaagaaaattagaagcgacaacgggacagagttcaagaactctcaaattgaaggcttccttgaggaggagggaatcaagcatgagttctcttctccctacacgccacaacaaaatggtgtagtggagaggaagaatagaactctattggacatggcaaggaccatgcttgatgagtacaaaacttcagatcagttttgggcggaggcggtcaacatcgcttgctacgccatcaactggttgtatctacaccgaatcctcaagaagacatcatacgaactcctaaccggtaaaaagcccaatgtttcatattttagagtctttggtagcaaatgctttattcttgttaaaagaggtagaaaatccaaatttgcttctaaggctgtagaaggctttttactaggatatgattcaaacacaagggcatatagagtcttgaacaagtcctctggactagttgaagtttcttgtgacattgtgtttgatgagactaacggctctcaagtagagcaagttgatcttgatgagataggtgatgaagaggctccgtgcgtcgcgctaaggaacatgtccattggggatgtatgtcctaaggaatacgaagagcctcaacatgcacaagatcaaccatcttcctccatgcaagcatctccaccaacccaagatgaggatcaagctcaagatgatgaaaatgaagatcaagaggagccacctcaagaggaggacaatgatcaagggggagatgcaaatgatcaagacaaggaagatgatgaggatccaagaccgccacacccaagagtccaccaagcaatacaacaagatcaccctgtgaactccatcctcggcgacattcataagggggtaaccactcgatctcgtgttgctcatttttgtgaacattactcctttgtgtcgtctattgagccatacagggtagaagatgcattaagggattcagattgggtgttggcaatgcaagaggaactcaacaaattcacgaggaatgaggtatggcatcttgttccacgtcctaaccaaaattttgtaggaaccaagtgggtcttccgcaacaaacaagatgagcatggtgtggtgacaaggaacaaagcccgacttgtggccaagggatattcacaagtcaaaggtttggatttcagtgaaacctatgcacccgtagctaggcttgagtcaatttgtatattacttgcctatgctacttaccatggctttaagctttaccaaatggatgtgaaaagtgtcttcctcaatggaccaatcaaggaagaggtctatgttgagcaacctcccagctttgaagatagtgagtaccctaaccatgtgtataaactctctaaggcgctttatgggctcaagcaagccccaagagcatggtatgaatggctaagagattttctcatcgctaatggcttcaaagtcggaaaagccaatcctactctctttactaaaacaattgcaaatgatttgtttgtatgccaaatttatgttgatgatatcatatttgggtctactaacaaatctacttgtgaagagttttgtaggattatgattcaaaaattcgagatgtctatgatgggggagttcaagtattttctaggatttcaagtcaagcaactccaagagggcactttcatcagccaaacgaagtacattcaagacatactcaccaagtttggaatgaaggatgccaaacccatcaagacacccatgggaactaatgggcatctcgacctcgacacgggagggtgtaaaattgatagaaagagcacatcagggacttgtcagttcttgggaagatccctggtgtcttgggcttcaaagaagcaaaattctgtagctctttctaccgccgaagccgagtatattgccgcaggccattgttgcgagcaattactttggatgaggcaaacccttagggactatggttacaaattaaccaaagttcctatcctatgtgataatgagagtgcaatccgcatggcggataatcccgttgagcacagccgcactaaacacatagccattcggtatcactttttgagggatcaccaacaacggggggatatcgagattgcttatattaacaccaaagatcaattagccgatatctttaccaagccactagatgagaaaacttttaccaaacttaggcatgagctaaatattcttgattctaggaattttgattga

SEQ ID NO: 31195 - DNA, 415 bp, Zea mays
  Clone ID: MRT4577_12845C.1
gggccaacaggctggatcacttgaataggataaaatggaggcatcggtaccataaatcttataacagggtagcacaagttcaacacaagcctcgaatccattggaggaaatatttggaacacttgcataaaccatattttaaactaacttcaaataaaactttcaggaagcacggggcaaaaaggacaatggaccatccaccatgcagctcctaaacccttaacataaaatttccacctttaaaggcacttgtagaatgtaaagcataaaaaatcaaaaattttccaagggaaaaataccccataaattcccttgggctgggtggctttcctgattggggggcgctggatccttggggtcctaaattttgactgccatggcccggggcacggggatgtcattgggggggaggggg

SEQ ID NO: 31196 - DNA, 5025 bp, Zea mays
  Clone ID: MRT4577_128460C.1
atgtcgggagatcacgccaagaaggagatggtgaccggcgagaagcccgttacaagccacgggaaggctccatcgggagagtcccgcaacaaggggaaggagaaggaatccccttcacacaagtcacatcggagtggcgaaaagaaaaagaagatgaggaaggtggtctactacgagatcgactctttgtcgccatccacctccggctccgacgcgccgtccgtaacttctaagcgccatgagcgcaagaagtttagtaagattcccctacactaccctcgcatttccaaacgtactccattactttccgttccattaggcaaaccaccaatttttgacggtgaagattataacatgtggagtgataaaatgagacatcacctaacctcactctacactagtatttggaacgttgttgagtttggtgtacaggagtataacaaggtgcaaggattgaagagcgccaaggagatttgggacgtcctcaaaacggcgcacgaaggagacgaggtgacaaagatcaccaagagggaaacgatcgagggggagctcggtcacttcatgctcaaccaaggagaagacccacaagccatgtacaaccggctaaaaaccttggtggaccaaatcacggggcaaggggcgagtccgagcttggccgacctggtcccgaggtccgtgcccgtcggcttgaatctcgcggcattcggttgggggatcgccaggattccgcgcaatacctggcgacaaatgcaacgtgcaggagaaggaggagctgacgacgtggccccaccacgcggtgtgaggaaggcagtagctgacgcacgggcccatttgtcagcgccagaagggcagtgccaagcgcgcggccacgcccaggcgatgcagggggaaaatgggccgcaggatgacacttttggcccaccaggctccaaaaagatcatcgagcaaggcgcatcctcctccgtacccgaagcacaacccgttgcattcaaggcaacggagaataagaaagaagactctacaccgagtagggtccccatcgacgcctccaagctcgacaatgaggagatggcgctcatcatcaagagctttcgccaaatcctcaaacaaaggaaggggaaagattacaagccccgttccaagaaggtttgctacaagtgtggtaagcccggtcatttcattgctaaatgttcattatctagtgatagtgacaggggcgacgacaagaagggaaagagaagagaaaagaagaggtactacaagaagaagggcggcgatgcccatgtttgccgggagtgggactccgacgagagctccaccgactcctcctccgacgaggacgccgccagcatcgccgtcaacaaagggctcctcttccccaacgtcggccacaaatgcctcatggcaaaggacggcaaaaagaagaaggtaaaatccaaatcctccactaagtatgcaacatctagtgatgaagctaattctagtgatgatgaggatgatttatttactctctttgccaacttaaacatgcaacaaaaggaaaaattaaatgaattaattagagctattcatgataaggatgaactcttggatagccaagaggatttcctaattaaagaaaacaaaaggcatgttaaagttaaaaatgcttatgctcaggaggtagagaaaaatgaaaaattaactagtgagctaagcacttgccatgacattgtttccaaccttagaaatgagaatgctaaattaattgctaaggttgagaatttaaatgtttgtgatgattctcttattaatcttagaaatgataacgccaacttaattgctaagattgataagttaaatgcctctcttactagccttagaaatgagaatgaaaaattgattgctaaggctaaagaactagatgtttgcaatatttctatttccaatcttagaaatgagaataacattttacatgctaagattgttgaattaaaagattgcaaaccctctacatctacagttgaacatgtttctatttgcactagatgtagagatgttaatgtagatgctattcatgatcaccttgctttaatcaaacaacaaaacgatcacatagctacattaactgctaaaatcaatgagcatgacttggaaaatgagaaatttaaatttgctagaagtatgctctatagtgggagacgccctggcattaaggatggcattggcttccaaaagggagacaatgtcaagcttaatgccccgcctaaaagattgtctaattttgttaagggcaaggctctcatggttcaggataacgagggttacattttataccctgccggttatcccgaacacaaaattaggagaattcactctaggaagtctcactctggccctaatcatgcttttatgtataagagtgagacatctagttctaggcaatcaacccatgctaaattgcctaagaagaaaactcctgctgcatcaaatgatcacaatgtttcattcaaaacttttgatgcctcttatgtgctaactaacaaatcaggcaagttagttgccaagtatgttgggggcaaacacaagggatcaaaaacttgtgtttgggtacccaaagttcttgtatctaatgtcaaaggacccaaaactatttgggtttatgcatctgggggctcaagttggatcatcgacagcgggtgcacaaaccacatgactagggagaaaagaatgttctcctcctatgagaaaaaccaagatccccaacgagctatcacattcggggatggaatcaaggataaatatcaaacccaagagactttgaaaggattcttgagacgggctcaaaatgagttcagcttgaggattaagaagataagaagcgacaacgggacggagttcaagaactcacaaatagaaggctttcttgaggaggaaggcatcaagcatgagttctcttctccctacacgccacaacaaaatggtatagtggagaggaagaatagaactctattggacatggcaaggaccatgcttgatgaatacaagactttggatcggttttgggccgaggcggtcaacaccgcttgctatgccatcaaccggttgtatctacaccgaatcctcaagaagacatcttatgaactcctcaccggtaaaaagcctaatgtttcatattttagagtctttggtagcaaatgctttattcttgttaaaagaggtagaaaatctaaatttgctcctaaggctgtagaaggctttttactaggatatgattcaaacacaagggcatatagagtctttaacaagtccactggactagttgaagtttcttgtgacattgtgtttgatgagactaacggctcccaagtggagcaagttgatcttgatgaattagatgatgaagaggctccgtgcatcgcgctaaggaacatgtccattggggatgtgtgccctaaggaatccgaagagcctccacaagcacaagatcaaccatcctcctccatgcaagcatctccaccaactcaagacgaggatgaggctcaagatgatgaaggagaagatcaagaagatgagccacctcaagaagacagcaatgatcaagggggagatgcaaatgatcaagacaaggaggatgaacaagatgcaaaaccgccacacccaagagtccaccaagcaattcaacgagatcaccccgtgaacaccatcttaggagatattcataagggggtaaccactcgatctcgtgttgctcatttttgtgaacattactcttttgtctcctctattgagccatacagggtagaggatgcactaagagattcggattgggtgctggcgatgcaagaggagctcaacaacttcacgaggaatgaggtatggcatttagttccacgtcctaaccaaaatgttgtaggtaccaagtgggtattccgcaataagcaagatgagcatggtgtggtcataaggaacaaagcacgacttgtggccaaagggtattcacaagtcgaaggtttggattttggagaaacttatgcacccgtagctaggcttgagtcaattcgtatattacttgcctatgctactcaccatggctttaagctttaccaaatggacgtgaagagtgccttcctcaatggaccaatcaaggaagaggtatatgttgagcaacctcccggctttgaagatagtgagtatcctaactatgtttataagctctctaaggcgctttatgggctcaaacaagccccaagagcatggtatgaatgcctaagagatttccttatcactaatggcttcaaagtcggaaaggtcgatcctactttattcactaaaaccattgaaaatgatttgtttgtttgccaaatttatgttaatgatatcatatttgggtctactaacaaatctatttgtgaagagtttagtaggatcatgattaaaaaaatcgagatgtctatgatgggggagttgaagtattttctaggatttcaagtgaagcaactccaagatggcaccttcatcagccaaacaaagtacattcaagatattctcaccaagtttggaatgaaggatgtcaagcccatcaagacacccatgggaaccaatgggcatctcgacctcgacacgggaggtaaatccatagatcaaaaggtatatcggtcgatgataggatctctactttatctatgtgcatctcgaccggacattatgctttctgtatgcatgtgtgcaaggttccaagccgaccctaaggaagttcaccttagggtcgtgaagcaaatcatgagatatttagtttacacacctaagtttggtctttggtaccccaaggggtcctcatttgatttattaggatattcagatgccgattgggcagggtgtaagcttgatagaaagagcacatcggggacttgccagttcttgggaagatccctggtgtcttgggcttctaaaaaacaaaattttgtagctctttctaccgccgaagccgagtatattgccgcaggccagttgcgcgcaattgctttggatgaggcaaacccttag

SEQ ID NO: 31197 - DNA, 4509 bp, Zea mays
  Clone ID: MRT4577_128461C.1
atgtcgggagatcacgccaagaaggagatggagaccggcgaaaagcccactacaagccacgggagcacttcatcggaagagtcccgcaccaagagaaaggagaagaagaagagctcctccaacaaagggaaggagaagaaatcttcttctcaccacaaagagaagaaggaaaaatcctcttcccacaagtcgcatcggaaaggtgacaagcacaagaggatgaggaaggtggtctactacgagaccgacacttcatcaacatcaacctccgactccgatgcgccctccgtaacttctaaacgccaagagcgtaagaagtttagtaagatccccctacactaccctcgcatttccaaacatgcacctttactttccgtcccattaggcaaaccaccaacttttgatggtgaagattatgctaggtggagtgatttaatgcgattccatctaacctcactccacaaaagtatatgggatgttgttgagtttggtgcacaggtaccatccgtaggggatgaagactatgatgaggatgaggtggcccaaatcgagcacttcaactctcaagcgacaacaatactcctcgcctctttaagtagagaggagtataacaaagttcaagggttgaagagcgctaaggaggtttgggatgtgctcaaaaccgcgcacgagggagacgagctaacaaagatcaccaagcgggaaacgatcgagggggagctcggtcggttccggcttcgcaaaggtgaagagccacaacacatgtacaaccggctcaagaccttggtgaaccaagtgcgcaacctcgggagcaagaagtgggacgaccatgaaatggttaaggttattctaagatctctcattttccttaaccccactcaagttcaattaattcgtggtaatcctagatatactaaaatgacccccgaggaagttatcgggaactctgtaagttttgagtgcatgatcgaaggctcgaggaagatcaatgagcttgacgaacccaccacgtccgaagcacaacccgtcgcgttcaaggcgacgaaggaaaagaaggaggagtctacaccaagtagacaaccaatcgacgcctccaagctcgacaatgaggaaatggcgctcgtcatcaagagcttccgccaaatcctcaagcaatggaaggggaaggattacaagtcccgttccaagaaggtttgctacaaatgtggtaagcccggtcattttattgctaaatgtcccatatctagtgacagtgaccgaggcgacgacaagaaggggagaagaaaggagaagaaaaagtactacaagaagaagggcggcgatgcccatgtttgtcgggagtgggactccgacgaaagctcaagtgactcctccgacgacgaggacgccgccaacatcgccgtcaccaagggactcctcttccccaacgtcggccacaagtgcctcatggcaaaggacggcaaacggaagaaggttaaatctaactcctccactaaatatgagtcttctagtgatgataatgctagtgatgaggaggataatttgtgtaccctttttgtcaacctcaacatgcaacaaaaggaaaaattaaatgaattaattagtgccatccatgagaaggatgatctcttggactcccaagaggacttcctaatcaaggaaaataaaaagcatgttaaggttaaaaatgcttatgctctagaagttgagaaatgtcaaaaattatctattgagctaagcacttgccatgaaacaatagacaaccttagaaatgaaaatgctaatttgttagctaaggttgattctcatgtttgcaatgtttcaattcccaaccctagagataataatgatgatttgcttgctaggattgaagaattgaacatttctcttgctagtcttagattagaaaatgaaaatttgattgctaaggctaaagattttgatgtttgcaaaattacaatttccgatcttagagataaaaatgatattctacatgctaagattgttgaacttaattcttgcaaaccctctacatctaccgttgagcacacttctatttgtactagatgtagagatgttaacattgatgctatacatgatcacatgactttaattaaacaacaaaatgatcatatagctaaattagatgctaaaattgccgagcataacttagaaaatgaaaattttaaatttgctagaagtatgctctataatgggagacgaccgggcatcaaggatggcattggcttccaaaggggagacaatgttaaacttagtgcccctcctaaaagattgtcaaattttgttaagggcaaggctcccatgcctcaggataacgagggttacattttataccctgccggttatcccgaggacaaaattaggagaattcattctagaaagtctcactctggccctaatcatgctttcatgtataagggtgagacatctagctctaggcaaccaacccgtgctaagttgcctagaaagaaaactcctagtgcatcaaatgatcatgatatttcattcaaaacttttgatgcatcttatgttttaactaacaaatccggcaaggtttatgcatccgggggctcaagttggatactcgacagcgggtgcacaaaccacatgacaggggagaagaaaatgttctcctcctatgagaaaaaccaagatccccaacgagctatcacattcggggatggaaatcaaggtgtcactgtctttagaagaagtgatgattcaatagcatttaagggagtgttagagggtcagctatacttggaaaaatctcaaacccaagagaccttaaaaggattcttgagacgagctcaaaatgagttcggcttaaggatcaagaaaattagaagcgacaacgggacggagttcaagaactctcaaatcgaaggcttccttgaggaggagggcatcaagcatgagttctcctctccctacacccctcaacaaaatggtgtagtggaaaggaagaatcgaactctattggacatggctagaaccatgcttgatgaatacaagacttcggatcggttttgggccgaggcggtcaacaccgcttgctacgccatcaaccggttatatctacaccgaatcctcaagaagacatcatatgaactcctaaccgagcaagttgatcttgatgagataggtgaagaagaggctccatgcatcgcgctaaggaacatgtccattggggatgtgtgtcctaaggaatccgaagagcctccaaatgcacaagatcaaccatcctcctccacgcaagcatctccaccaactcaaaatgaggatgaggctcaagttgatgaagtagaggatcaagcaaatgagccacctcaagatgacgacaatgatcaagggggagatgcaaatgatcaagacaaggaggatgaagaaccaaggccgccacacccaagagtccaccaagcaatccaacgagatcaccccgtcgacaccatcctcggcgacattcataagggggtaactactagatctcgtgttgcacatttttgtgaacattactcgtttgtttcctctattgagccacacagggtagaggaagcactgcaagattcggattgggtggtggcgatgcaagaggagctcaacaacttcactaggaatgagcaagatgagcatggtgtggtgacaaggaacaaagctcgacttgtggccaagggatactctcaagtcgaaggtttggatttcggtgaaacctatgcacccgtagctaggcttgagtcaattcgcatattattggcctatgctacttaccatggatttaagctttatcaaatggacgtgaaaagtgctttcctcaatggaccaatcaaggaagaggtctatgttgagcaacctcccggctttgaagacagtgagtatcctaaccatgtctataagctctctaaggcgctttatgggctcaagcaagccctaagagcgtggtatgaatgccttagagatttccttattgctaatggcttcaaagtcggaaaggccgatcctacactctttactaaaacacttgaaaatgatttgtttgtatgccaaatctatgttgatgatattatatttgggtctactaacgagtctacatgtgaagagtttagtaggattatggcacagaaattcgagatgtctatgatgggggagttgaagtatttcttaggatttcaagtgaagcaactccaagagggcaccttcattagccaaacgaagtacactcaagacattctaaacaagtttgggatgaaggatgccaagcccatcaagacacccatgggaactaatgggcatctcgacctcgacacaggaggtgtaaaaggttcacacttgaccaataaaaagatcgaaggcacctctggtctggaggcaccagactgtccgatgtacaccggacagtgtccgatgcaccaccggacagtgtccggtgcaccagaggacttcaactcaaacttgccaccttcaggaatttccagaggcactccgctataa

SEQ ID NO: 31198 - DNA, 420 bp, Zea mays
  Clone ID: MRT4577_128462C.1
ggcttcaaagatttggaaggaggggtccttaaacgggccaggcgggacttattcggtaaccttaaccgggccgggaacttacggtttttactgcaagccgaacaaaggagcaggattggtcggaaggataacagtaaattaaagttggttatcaattcaatgcatttgaatttgattgtactccgcccgtcaatggatgatgcatcaatttttactggttttcttaacatgtccaacaattaatgcaccaaattaagtccttacttgggggaaaaaaaaaaaaaaaaaaaaaaaaaaaaaaaaaaaaaaaaaaaaaaaaaggggggggccgttttaaaggatcaaagttaacttccccgggattgcaacgtaaaagttttttattggggtaactaaaattaaattaattggccgtggttt

SEQ ID NO: 31199 - DNA, 5187 bp, Zea mays
  Clone ID: MRT4577_128463C.1
atgtcaggagatcacgccaagaagatggtgatcgacggtgagaagtccgctacaagccatgggaaggctccatcaagggagtccgccaacaagaagaaggatggatccccttcacgcattcgatcacacaagagtggcgagaagaagaagaaaatgaagaaagtggtctactacgagaccgaatcttcctcgccctctacatccggatccgacgccacgtccgtcacttctaagcgccaagagcgcaagaagtatagggatgaagattatgatgaggacgaggtggcccaaatcgtgcatttcaactcccaagccaccactatactcctcacctctctaagtagagaggagtataacaaggtgcaaggattgaagagcgccaaggagatttgggacgtactcaagaccgcgcacaaaggagacgaggtgaccaagatcaccaagcgggagacgatcgagggggagctcagtcgcttccggctttgccaaggggaggagccacaagagatgtacaactggctcaagaccttggtgaaccaagtgcgcaacctcgggagcaaaaaatgggatgaccatgaaatggtcaaggttattcttagatcactcatttttcttaaccctacgcaagttcaattaatacgtggtgatcctagatacacactaatgtctcccgaggaagtaataggaaaatttgtgagctttgagttgatgatgaaaggctcaaagaaaatcatcgagcaagatggaccctccacgcccgaagcacaaccggttgcattcaaggcgacggaggagaagaaggaagagtctacatcaagtagactccccattgacgcatccaagctcgacaatgaggagatggcgctcatcatcaagagcttccgtcaaatcctcaagcaaaggagggggaaggactacaattcccgctccaagaaagtgtgctacaagtgtggtaagcacgatcactttattgcaaaatgtccattatcaagtgacagtgacaggggcgacgacaagaagggcaagaggaaagaaaagaagagatactacaagaagaagggtggcgatgcccatgtgtgccgtgagtgggactccgacgaggacgccgccaacatcgccgtcaccaaagggctcctcttccccaacgtcggccacaagtgcctcatggcaaaggacggcaaaagtaagaaggtaaaatcaagatcctccactaaatatgcatcctctagtgatgaagactattctagtaatgaggaggataacttgcgcaccctttttgccaacctaaacatgcaacaaaaagaaaagttaaatgaattaattagtgctattcatgagaaggatgaactcttggattcacaagaggacttcctaattaaggaaaacaagaagcatgttaaggttaaaaatgcttatgctctagaagtagaaaaatgtgaaaaaatatctagtgagctaaacacttgccatgatattattgccaaccttaaaaatgagaatgctagattaactcctaaggttgattcaaatgtttgtgatgattcaatttccaatcttagagatgataatgttagtttacttgctaagattgaagaattgaatgtttctcttgctagccttagaaacgaaaatgaaaaattaattgctaaggctaaggacttagatgtttgcaatgttaccatatccaatcttagaagtgaaaatggcattttacatgctaagattgttgaactaaaaacttgcaaaccctctacatctaccgttgagcatgtttccatttgtactagatgtagagatattaatgttgatgctattcatgatcacctagccttaattaagaaacaaaatgatcacatagctcaactcaatgctaagattaatgagcatgacttagaaaatgaaaaatttaaatttgctagaagcatgctctatagtgggagacgccctggcatcaaggatggcattggcttccaaaagggagacaatgtcaaacttaatgcccctcctaaaagattgtctaattttgttaagggcaaggctccatgcctcaggataacgagggttacattttgtatcctgtcggttaccccgagcacaaaattaggagaattcactctaggaagtctcactctggccctaatcatgcttttatgtataagggtttatgcatccgggggttcaagttggataattgatagcggatgcacaaaccacatgacaggggagaagagaatgttctcctcctacgagaaaaaccaagatcaccaacgagctatcacattcggggatggaaatcaagatataggtgttactgtctttagaagaagtgacgattcaatagcatttaagggagtgttggaggctgaactcaacacttgtttaattgctaagactaatatgggttggctctgccatcgccgactagcccatattggaatgaagaatcttcacaagcttctaaagggagaatacattttgggactaacaaatgtttattttgagaaagacagggaaaaatcacaaacccaagagaccttaaaaggactcttaagacgggctcaaaacaagttcggattaaggatcaaaaagataagaagcgacaatggaacggagttcaagaactctcaaatagaaggctttctagaggacgagggcatcaagcatgagttctcttctccctacacacttcaacaaaatggtgtagtagagaggaagaatagaactctattggacatggaaagggccatgcttgatgagtacaagacactggaccggttttgggctgcggcgattaacaccgcctgctactccatcaaccgactctaccttcaccgaatcctcaagaagacatcatatgaactcctcaccggttgtagaaggcttttactaggttatgactcaaacacaagggcatatagagtcttcaacaaatccactggattagttgaggtttcttgtgacattgtgtttgatgaaactaacggctcccaagtggagcaaattgatcttcatgagctagatgatgaagaggctccatgcgtcgtgctaaggaacatgtccattggggatgtgtgtcctaaggaatccgaagagcctccacaagagatcaatcgtcatcttccaatcaagcatctccaccaattcaagatgaggatcaggctcaagatgatgaaaatgaagatcaagaggatgagccacctcaaaaggaggacaatgatcaaggggggagatgataatgataagaaaaatgatcaagaaattcaaggacaaagagcgccacacccaagagtccaccaagcaattcaacgagatcaccctgtcaactccatcctcggtgacattcataagggggtaaccactagatctcgagttgcacatttctgtgaacattactcttttgtgtcctctattgagccatacagggtggaggatgcactaagagattcgggttgggtgctggctatgcaagaggagctcaacaacttcacgaggaatgaggtatggcatttagttccacgtcctaaccaaaatgttgtaggtaccaagtgggtattccgcaacaagaaacatgagcatggtgtggtgacaaggaataaagcccgacttgtggccaaaggttattcacaagtcgaaggtttggactttggtgaaacttatgcacccatagttaggcttgagtcaattcgtatattacttgcctatgctacttactatgtctttaagctttatcaaatggacgtgaaaagtgccttcctcaatggaccaatcaaggaagaggtctatgttgagcaacctcccggctttgaagacagtgagtaccctaaccatgtgtataaactctcaaaggcactttatgggctcaagcaagctccaagagcatggtatgaatgcctgcgatatttccttatcactaatggcttcagagtcggaaaagccgatcctacactctttactaaaactattgtaaaagttttgtttgtatgccaaatttatgttgatgatatcatatttgtgtctactaacaaatctacttgtgaagaatttagtaggatcatgatacaaaaattcgagatgtctatgatgggggagttgaagtatttcctaggatttcaagtcaagcaactccaagatggcaccttcatcagccaaacaaagtacattcaagacatacttaacaagtttggaatgaaggatgccaagcccatcaagacacccatgggcatctcgacctcgacacgggagggatctacttttgatttaataggatattccgatgccgattgggcagggtgtaaaattgataggaagagcacatcagggacttgtcagtttttggggagatccctggtgtcttgggcttcaaagaaacaaaactcagtagctctttccatcgccgaagccaagtacattgccgcaggccattgctgtgtgcaactactttggatgaggcaatccctcagggactatggctacaaattgagcaaagtccctctcctatgtgacaatgagagtgcaatccgcatggcggataatcccgttgagcgtagccgcactaagcacatagccattcggtatcactttttgagggatcatcaacaaaggggggatatcgagattgcatatgttagcaccaaagaacaattaaccgatatctttaccaaaccattagatgagaaaacctttaccaaacttaggcatgagctaaacattcttgattctaggaattttgattgatattttgcacacatagctcatttatatacctttgatcatatctctttcatgtgttatgactaatgtggttttcaagtgtatttcatgctaagtcatagattgaaagggaaatggagtcttcggcgaagacaaggcttccactccactccatcatattgctcttcactttggtataattcttccctcctatattgtttgccaaagggggagagaatttaaaaagggctcatatttcactcacaaagtatctgtttttggcgattcatgccaaagggggagaaagtattagcccaaagcaaaaggatcgcaccaccaccaatttcaaaaaaaatgtttaaatgcagtctttcaacttgttttaaagaagctttttaattggtatcttatttttgatataatttcaaagtggtatgacatctttcaaaattaatatctaaaaccctcttgaacact

SEQ ID NO: 31200 - DNA, 5804 bp, Zea mays
  Clone ID: MRT4577_128464C.1
tcaatcaaagttcctataatcaagaatgtttagctcattcctaagtttggtaaaggttttctcatctaatggtttggtaaagatatcgactaattgttctttggtactaacataggcaatctcgatatcccccctttgttggtgatccctcaaaaagtgataccgaatggctacatgcttagtgcgactgtgttcaacgagattatctgccatgcggattgcactctcattatcacataggagagggactttgctcaatttgtagccatagtccctaagggtttgcctcatccaaagtaattgcgcgcaacaatggcctgcggcaatatactcggcttcggcggtagaaagagctacaaaattttgtttcttcggagcccaagacaccagggatcttcccaagaactgacaagtctgtgatgtgctcttcctatcaattttacaccctgcccaatcagcatctgaataacctcccatgttgaggtcgagatgcccattagttcccatgggtgtcttgatgggcttggcatccttcattccaaacttggtaagtatatcttgaatgtacttggtttggctgatgaatgtgccttcttggagttgtttgacttgaaatcctaagaaatacttcaactcccccatcatagacatctcgaatttttgaatcattatcctgctaaactcttcacaagtagatttgttagtagacccaaatatgatatcatcaacataaaattggcatacaaacaaatcatttccaatagttttagtaaagagagtaggatcggctttaccaactttgaagccattagtgataaggaaatctcttaggcattcataccatggtcttggggcttgcttgagcccataaagcgcctttgagagtttataaacatgattagggtactcactatcttcaaagccgggaggttgctcaacatagacctcttccttgattggtccattgaggaaggcactcttcacgtccatttgatagagcttaaagccatggtaagtagcataggcaagtaatatgcgaattgactcaagcctagctacgggtgcataggtttcaccaaaatccaaaccttcgacttgtgaataccccttggccacaagtcgagctttgttccttgtcaccacaccatgctcatcttgcttgttgcggaatacccactttgtacttacaacattttgattaggacgtgggacaagatgccatacctcattcctcgtgaagttgttgagctcctcttgcattgccaacacccaatctgaatctcttaatgcatcttccaccccaatggacatgttccttagcgcgacgcactgagcctcttcatcatctagctcatcaagatcaacttgctctacttgagagccattagtcttatcaaacacaatgtcacaagaaacttcaactagtccagtggatttgttgaagactctatatgcccatgtgtttgagtcataaccaagtaaaaatccttctacagccttaggagcaaatttagattttctacctcttttaacaagaataaaacatttgctaccaaagactctaaaatatgaaacattgggctttttaccggtgaggagttcatatgatgtcttcttgaggatccggtgaagatataaccggttgatggagtaacaggcggtgttaatcgccttagcccaaaaccggtccgaagtcttatactcatcaagcatggtcctcgccatatccaatagagttctattcttcctctccactacaccattttgttgaggtgtgtagggagaagagaactcatgcttgatgccctcatcctcaagaaagccttctatctgagagttcttgaactccgtcccgttgttgcttcttattttcttgacccttaatccgaactcattttgaactcgtctcaagaatccctttaaggtctcttgggtttgagatttttccctgtctttctcaaaatgaacattggttagtcccaaaatgtgttctccctttagaagtttgtgaatattcttcatcccaacatgggctagtcggcgatgccagagccaacccatattagtcttagcaattaagcaagtatcgagtttagctctattaaaatcaactaagtatagccgaccctcgagtacttccttaaatgctactgaatcatcacttcttctaaagacagtaacacctatatcttgatttccatccccgaatgtgatagctctttggggatcttcgtttttctcgtaggaggagaacatccttttctccccaggtatgtggtttgtgcatccgctatcaataatccaacttatgccccggatgcataaacttcgtgctttctttgtgatcaatcttgtaagggcgagaggctccaacttgtggagattcctcgcaaacgggaaagagtaaagtaaagaagaacaccgtgagctccaccgactcctcctccgacgaggacgccgccaacatcgccgtcaccaaaggactcctcttccccaatgtcggccacaagtgcctcatggcaaaggacggcaagaagaagaaggtaaaatcaagatcctccactaagtatgcaacttctagtgatgaagataattctagtaatgatggggataacttgctcactctttttgccaacttaaacatgcaacaaaaggaaaaattaaatgaattaattagtgccattcatgagaaggatgaactcttggatagccaagaggacttccatattaaagaaaataagaagcatgttaaagttaaaaatgcttatgctctagagatagaaaaatgtgagaaactaactagtgagctaagcacttgccatgacactatttccaaccttagaattgagaatgctaatttaattgctaaggttgagaagtcaaatatttgtgattattcaattatcaatctaagaaatgataatgctagtttaattgctaagattgaaaaattgaatgcctctcttgctagccttagaaatgagaatgaaaagctaattgctaaggctaaggaattagatgtttgcaatgtttctatttccaatcttagagatgagaatgacattttacatgctaagattgttgaactaaattcttgcaaaccctctacatctaccgttgagcatagtgggagacgccctgacattaaggatggcattggcttccaacagggaggcaatgtcaaactcaatgcccctcctaaaagattatctaactttgttaagggcaaggctcccatgcctcaggataacgagggctgcattttgtaccatgccggttatctcgagcacaaaattaggagaattcactctaggaagtctcactctggctctaatcatgcttttatgtataagagtggggcatctagttctaggcaatcaacccgtgctaaattgcctaagaaaagaactcctattgcatcaaatgatcataacatttcattgaagacttttgatgcatcttatgtgctaactaataaatcaggcaaagtagttgccaaatatgttgggggcaaacacaaggggtcaaagacttgtgtttgggtacccaaggtttatgcatccaggggctcaagttggatcatcgacagcgggtgcacaaaccacatgacaggggagaagaagatgttctcctcctatgagaaaaaccaagatccccaacgagctatcacattcggggatggaaatcaaggtgttactgtctttagaagaagtgatgattcggtagcatttaagggattgttagagggtcagctatacttggtagattttgatagagctgaactcgacacttgcttaattgctaagactaacatgggttggctctggcaccgccgactagctcatgttgggatgaagaatcttcataagcttctaaagggagagcacattttgggactaaccaatgttcattttgaaaaagacagggaaaaatctcaaacccaagagactttaaagggattcttgatatgggctcaaaatgagttcggcttaaggatcaaaaagattagaagcgacaacgagacggagttcaagaactcacaaatcgaaggcttccttgaggaggagggcatcaagcatgagaagaacataactctattagacatggcaaggaccatgcttgatgagtacaagacttcggatcggttttgggccgaggcggtcaacaccgcttgctacgccatcaaccggttatatcttcaccgaatcctcaagaagacatcttatgaactcctaaccggtaaaaagctcaatgtttcatattttagagtctttggtagcaaatgctttattcttgttaaaagaggtagaaaatctaaatttgctcctaaggctgtagaaggctttttacttggttataattcaaacacaagggcatatagagtctttaacaagtccactggactagttgaagtttcttgtgacattgtatttgatgagactaacgactctcaagtagagcaagttgaacttgatgagctagatgatgaagaggctccatgcgtcgcgctaaggaacatgtccattggggatgtgtgccctaaggaatccgaagagcctccacatgcacaagatgaaccatcttcctccatgcaagcatctccaccaactcaagatgaggatgaggctcaaaatgatgaagaagaagatcaagaagatgagccacctcaagaggagagcaatgatcaagggggagatgcccatgatcaagacaaggaagatgaacaagatcaaagaccaccacacccaagagtccatcaagcaatccaacgagatcaccccgtgaacaccatcctcagcgacattcataagggggtaaccactcaatctcatgttgctcacttttgtgaacactactcttttgtttcctctattgagccacacagggtagaggaagcacttcaagattcggattgggtgttggcgatgcaagaggagctcaacaacttcacgaggaatgagctttatcaaatggacgtgaagagtgccttcctcaatggaccaatcaaggaggaggtctatgttgagcaacctcccggctttgaagatagtgagtaccctaaccatgtctataaactctctaaggcgctttatgggctcaagcaagccccaagagcatggtctactaacgaatctacatgtgaagagtttagtaggatcatgactcaaaaatttgagatgtctatgatgggagagttgaagtatttcttaggatttcaagtgaagcaactccaagagggcaccttcattagccaaacgaagtacattcaagacatactcacaaagtttgggatgaaggatgccaagcccatcaagacacccatgggaactaatgggcatctcgacctcgacatgggagggtgtaaaattaatagaaagagcacattagggacttgccagttcttgggaagatctctggtgtcttgggcttcaaagaagcaaaattctgtggctctttctaccgccgaagccgagtatattgccgcaggccattgttgcgcgcaattgctttggatgaggcaaaccctcagggactatggttacaaattaaccaaagttcctcttctatgtgataatgagagtgcaatccgcatggcggataatctcgttgaacatagccgcactaaacacatagccattcggtatcactttttaagggatcaccaacaaaagggggatatcgagattgcatatgttaacacaaaagaacaattagccgatatctttaccaagccattagatgagcaaacttttaccaaacttaggcatgagctaaatattcttgattttagaaattttgattga

SEQ ID NO: 31201 - DNA, 193 bp, Zea mays
  unsure (1)..(193): unsure at all n locations
  Clone ID: MRT4577_128465C.1
cctggggtttttttttgggggggcttgntccaccatggggaccgggcccaaaancttgccgcccaggatccaacatttggcctaaacagggagcaggggcgcacctcagggcacgaacaagagcggggcaaaggcgggggcgtgggggagcttgggcgcttgacctaaacagggagcaggggcgcacctcggg

SEQ ID NO: 31202 - DNA, 4943 bp, Zea mays
  unsure (1)..(4943): unsure at all n locations
  Clone ID: MRT4577_128466C.1
atgtcgggagcatccgccaagagggagatcgggaccgacgacaagtccgcaagctcggggagaacacactcaagggagtccgcccacaagcacaaggaggaatcctcttcctccatcaagtcccaacgaaagggtgacaagaagaagaagatgaagaaggtggtctactacgagaccgactcttcgtcaccctcaacctccggctcggaatcggcattcgccacttctaagcgccatgagcgcaagaagtatagtaagatgccccttcgctattctcgtatttcaaaacgcactccattactttccgttccattaggcaaaccacctatgcttgaaggtgaagattattcaatatggagtgataaaatgaggcatcacctaacctcactccacaaaagcatatgggatattgttgagtatggaccgcaggtaccaaagaagggagacaaggattacgactcggaggaggtcgaacaaatccaacacttcaactcccaagccactactatactcctcgcctctctaagtcgagaggagtataataaggtgcaaggattgaagagcgcaaaggagatttgggacgtactcaagaccgcgcacgaaagagacgaggtgaccaagatcaccaagcgggagacgatcgagggggagctcggtcgcttcatgcttcaccaaggagaggagccacaagcgatgtacaaccggctcaagaccttggtgaaccaagtgcgcaacctcgggagcaccaaatgggatgaccatgaaatagtcaaggttattcttagatcactcgttttccttaaccctacgcaagttcaattaattcgtggtgattctagatacacactaatgtctcccgaggaagtaataggaaaatttgtgagctttgagttgatgatcaaaggctccaagaaaatcatcgagcaaggcacctcctccacacccgatgtgcaacccgtggcattcaaggcaacagaggagaagaaagaaaaccctacacctagtagggtccccatcgacgcctccaagctcgataatgaggaaatgacgctcatcatcaagagctttcgccaaatcctcaagcaaaggagggggaaggactacaagccccgctccaataaagtttgctacaagtgtggtaagcccggtcattttattgcaaaatgtccattatcaagtgatagtgacaggggcgacgacaagaagggaaagagaagagaaaagaagaggtactacaagaagaagggcggcgatgcccacgtttgccgggagtgggactccgacgagagctctaccgactcctcctccgacgaggacgccaccaacatcgtcgtcaccaaaggcctcctcttccccaacgtcggccacaagtgcctcatggcaaaggacgacaaaaggaagaaggtaaaatctaaatcctccactaagtacgcaacatctagtgatgaggctagctctagtgataatgaggatgatttattaacactttttgcccacctaaacatgcaacaaaaggagaaattaaatgagttaattagtgctattcatgagaaggatgaacacttggacacccaagaggacttcctaattaaagaaaacaaaaaacatgttaaggttaaaaatgcttatgctctagaggtagaaaaatgtgaaaaattatctagtgagctaagcacttgccatgatgttatttccaaccttagaaatgaaaatgccaaattaattgctaaggttgagaaatcaaatgtctgtaatgattcaattgacaatcttagaaatgataatgctagttcacatgctaaggttgaaaaattaaatgcctctcttgctagccttagaaatgagaatgaaaaattaattgctaaggctaaggaattaaatgcttgcaatgtttccatttccagtcttagagatgaaaatgccatattacatgctaagattgttgaattaaattcttgcaaaccctctacatctaccattgagcatgttactatttgcactagatgtagagatgttaacattgatgctattcatgatcacatggctatgattaaacaacaaaatgatcatatagtaaaattagatgctaaaattaccgagcatgaattagaaaatgaaaaaattaaatttgctcgtagtatgctctatagtgggagacgccctggcattaaggatggcattggcttccaacagggaggaaatgtcaaactcaatgcccctcctaaaagattatctaactttgttaagggcaagactcccatggctcaggataacgagggttacattttataccctgccggttatcccgagcacaaaattaggaaaattcactctaggaagtctcactctggctctaattatgcttttatgtataagagtgaggcatctagttctaggcaatcaacccatgctaaattgcctaagaagaaaactcctattgcatcaaatgatcataacatttcatttaagacttttgatgcatcttatgttttgactaacaaatcaggcaaagtagttgccaaatatgttggaggcaaacacaaggggtcaaagacttgtgtttgggtacccaaggcttatgcattcgggggctcaagttggatcattgatagcgggtgcacaaaccacatgacaggggagaaaaggatgttctcctcctatgagaaaaaccaagatccccaacgagccatcacattcggggatggaaatcaagattcattagattacaatttgctttctgtttctcaattatgcaaaatgggctacaattgtctttttacggatgaaaaatctcaaacccaagagactttaaagggattcctgagacgggctcaaaatgagttcggcttgaggatcaagaaaataagaagcgacaacgggacggagttcaagaactctcaaattgaaggcttccttgaggatgagggcatcaagcatgagttctcttctccctacacgccacaacaaaatggtgtagtggagaggaagaatagaactctattggacatggcaagaaccatgcttgatgagtacaagactttggatcggttttgggccgaggcggtcaacaccgcttgctacgccatcaaccggttatatcttcaccgaatcctcaagaagacatcatatgaactcctcaccggtaaaaagcccaatgtctcatattttagagtctttggtagcaaatgctttattcttgttaaaagaggtagaaaatctaaatttgctcctaaggctgtagaaggctttttacttggttatgattcaaacacaagggcatatagagtctttaacaagtccactggactagttgaagtttcttgtgacattgtgtttgatgaaactaacggctctcaagtagagcaagttgatcttgatgagctagatgatgaagaggctccatgcgtcgcactaaggaacatgtccattggggatgtgtgtcctaaggaatccgaagagcctccacatgcacaagatcaaccatcttcctccatgcaagcatctacaccaactcaagatgaggatcaagctcaagatgatgaagatgacgatcaagaggagccacctcaggaggagaacaatgatcgaggaggagatgcaaatgatcaagacaaggaagatgatgacggtccaagaccgccacacccaagagtccaccaagcaatacaacgagatcaccccgtgaactccatcctcggcgatattcataagggggtaactactcgatctcgtgttgctcatttctgtgaacattactcttttgtgtcttctattgagccatacagggtggaagacgcattaagggattaaattaggtgttggcaatgcaagaggaactcaacaacttcatgaggaataaggtatggcatcttgttccacgtcctaatcaaaatgttgtaggaaccaagtgggtcttccgcaacaagcaagatgatgcatggtgtggtgacaaggaacaaagcccgacttgtggccaagggttattcacaagtcaaaggtttggatttcggtgaaaccctatgcacccgtagctaggcttgagtcaattcgcatattacttgcctatgctacttaccatggctttaagctttaccaatggacgtgaaaagtgccttcctcaatggaccaatcaagaagggaggtctatgttgagcaacctcccagctttgaagatnagtgagtaccctaaccatgtttacaaactctctaaggcgctttatgggctcaagcaagccccaagagcatggtatgaatgcctaagagattttcttatcgctaatggcttcaaagtcggaaaagttgatcctacactctttactaaaacaattgcaaatgatttgtttgtctgccaaatttatgttgatgatatcatatttgggtctactaacaaatctacttgtgaagagtttagtaggatcatggtacaaaaattcgagatgtcaatgatgggggagttgaagtatttcttaggatttcaagtcaagcaactccaagagggcaccttcattagccaaatgaagtacattcaagatattcttgccaagtttgggatgaaggatgccaagcccatcaagacacccatgggaaccaatgggcatctcgacctcgacacgggagataaatccgtagatcaaaagggtgtaagattgataaaaagagcacatcagggacttgccagttcttgggaagattctgtagctctttctaccgccgaagccgagtacattgccgcaggccattgctgcgcgcaattgctttggatgaggcaaacccttagggattatggttacaaattaaccaaagtccctctccgatgtgataatgagagtgcaatccgcatggcggataatcccgttgagcacagccgcactaaacacagccattcggtatcactttttgagggatcaccaacaacggggagatatcgagattgcttaaattaa

SEQ ID NO: 31203 - DNA, 2097 bp, Zea mays
  Clone ID: MRT4577_128467C.1
atgagtaaagttatgaagaaaatatttgtagggacttcaaaaatgattctgaaggatttgaatttttgggatgctacacaagagaccttaaaaggatccttaagatgggctcaaaacaagttcggattaaggatcaaaaagataagaagcgataatgggacggagttcaagaattcacaaattgaaggttttcttgaggaagagggcatcaagcatgagttctcttctccctacacacctcaacaaaatggtgtggtagagaggaagaatagaactctactggatttggcaagaaccatgcttgatgagtacaagacaccggaccggttttgggccgaggcgattaacaccgtctgctactccatcaaccggttatatcttcaccgaatcctcaagaagacatcatatgaactcctcactgctgtagaatgctttttacttggttatgactcaaacacaagggcatatagggtcttcaacaaatccactggattggttgaggttacttgtgacattgtgtttgatgagactaatggctcccaagtggagcaaattgatcttgatgaattagatgatgaagaggctccatgcgtcgcgctaagtaacatgtccattggtgatatgatgatcaggctcaagataatgaagatgaagatcaagaggatgagccaccttaagaggagaacaatgatcaagggggagatgaagatgatgaagacaaggaagatgatcaagaaatttagggtcaaagaccgccacacccaagagtccactaagcaattcaatgagatcaccccgtcaactccatccttgccatacatggtagaggatgcactaagagatgcggattgggtgttgtttatgcaagaggagctcaacaacttcacgaggaatgaggtatggcatttagttccacgtcctaatcaaaatattgtaggtaccaagtgggtattccgcaacaagcaagatgagcatggtgtggtgacaagaaacaaagctcgacttgtggccaaaggttattcacaagtcgaaggtttggactttgatgaaacttatgcaccagtagctaggcttgagtcaattcgtatattacttgcctatgctacttaccatggctttaagctctatcaaatggacgtgaaaagtgccttcctcaatggccctatcaaggaagaggtctatgttgagcaacctcccgactttgaagatagtgagtaccctaaccatgtgtataaactctcaaaggcgctttatatgctcaagcaagctccaagagcatggtatgaatgcctgcaagattttcttatcactaatgacttcaaagtcagaaaagtcgatcctactctctttactaagactattgcaaaagatttgtttgtatgccaaatttatgttgatgatattatatttttgtctactaacaagtcaacttgtgaagagtttagtaggatcatgatacagaaattcgagatgtctatgatgggggagctgaagtatttccttggattccaaatcaagcaactccaagatggcaccttcatcaaccaaaccaaatacattcaagatatacttaagaagtttgggatgaaggatggcaaacccatcaagacacccatgggaactaatgaacatctcgacctcgacacgggagggtgtaaaattgataggaagagcacatcagggacttgtcagtttctggggagatccctggtgtcttgggcttcaaagaaacaaaattcagtagctctttctaccgccgaagctgagtatattgtcgcaggccattgttgcatgcaattgctttggatgaggcaaacccttaggaactatggctacaaattgagcaaagtccctctcctatgtgataatgagagtgcaatccgtatggcggataatcccgttgaacacagccgcactaagcacatagccattcggtatcactttttgagggatcaccaacaaaggggggatatcgagattgcttatgttaacacaaaagcacaattagctgatatctttaccaagccattagatgagaaaacctttaccaaacttaggaatgagctaaacattcttgattctcggaactttgattga

SEQ ID NO: 31204 - DNA, 231 bp, Zea mays
  Clone ID: MRT4577_128468C.1
gggcgggcgtccaaggccaagccctacttcctcttcgacggctacgcgcacctctcctccggactcgcctgcagcctcgctggcctcgctgccgccatggccatcggaatcgaccgacacgcccgatttagggcgaatgcacagcctccaaagctgggggggggcatcattctgaaccttatcttcgcagacactcttgctctgcacggcctcatcgacggcatcattctc

SEQ ID NO: 31205 - DNA, 5112 bp, Zea mays
  Clone ID: MRT4577_128469C.1
atgtcgggagatcacgccaagaaggagatggagaccggcgacaagcccactacaagccacgggaaggcttcatcggaagagtcccgcaacaaagggaaggggaaggagaagaaatcctcttcccacaagtcgcatcggagtggcaacaacaaaaagaagatgaggaagatggtctactacgagaccgatacttcatcaccttccacctccggctcgaacgcgccatccattacttctaagcgccatgagcgcaagaagtttagtaagacccccctacactatcctcgcattcctaaacatacgcctttactttccgtctcattaggcaaaccaccaacgtttgatggtgaagattatgctaggtggagtgatttaatgcgatttcacctaacctcactccacaaaagtatatgggacattgttgagtttggtgtacaggtaccatctgtaggggatgaagattatgatgaggacgaagtggcccaaattcaacacttcaactcccaagcctcaactatactcctcgcctctctaagtcgagaggagtataataaggtgcaagggttgaaaggtgctaagaagatttgggacacgctaaagacctcgcacgaaggagacgaggtgaccaaaatcaccaagcgggagacgatcgagggggagcttgatcgcttccgacttcgccaaggggaggagccacaagacatgtacaaccggctcaaaaccttggtgaaccaagtgcgcaacctcaggagcaaaaaatgggatgaccacgagatagttaaggttattctaagatcacttgttttccttaaccctactcaagttcaattaattcgtggcaatcctcgatatacactaaggactcccgaggaagtaatcgggaattttgtgagctttgaattgatgatcaaaggctcaaagaagatcaacgagcttgacggcccctccacgtccgaagcacaaccggtcgcatttaaggcgacagaggagaagaaggaggagtctacatcgagcagaacacccatcgacgcctccaagctcgataacgaggaaatggcgctcatcatcaagagcttccgtcaaatcctcaagcaaaggagggggaagaactacaaaccctgctccaagaaagtttgctacaagtgtggtaagcccggtcactttattgcaaaatgtcctatttctaatgacagtgacaggggcgacgacaagaagggaagaagaaaggagaagaaaaagtactacaagaagaagggcgacgatgcccatgtatgtcgcgagtgggactccgacgaaagctctagtgactcctcctccgacgaggacgccgccaacatcgctgtcaccaagggtcttctcttccccaacgtcagccacaagtgcctcatggcaaaggacggcaaaaagaagaaggtaaaatcaagatcctccaccaaatatgaaacctctagcgatgaggataatgctagtaatgaggaggataacttacgcattctttttgccaacctaaacatgcaacaaaaagaaaaattaaatgaattgattagtgttattcatgagaaggatgatctcttggacacccaagaggacttccttattaaagaaaataagaagcatgttaaggttaaaaatgcttatgctctagaagtagaaaaatatgaaaaactatctagtgagctaagcacttgccatgagactattgacaaccttagaaacaacaatgctaaacttattgctaaggttgattcaaatgcttgtaatgtttcaattcccaatcctagaaatgataatgttgatttgcttgctaagattgaagaattgaacatttctcttgctagccttagggatgaaaataaaaaattgcttgctaaggctaaagaattagatgtttgcaatgcctccatttccgaccttagaagtaaaaatgatatattgcatgctaaggttgtagaattaaaatcttgcaaaccctctacatctatcgttgagcacacttccatatgtactagatgtagagacattaatgttgatgctatccatgatcacctagctttaattaaaaaacaaaatgatcacatagctcaactaaatgctaagattagtgagcatgacctagaaaacgaaaaatttaaatttgctagaagcatgctctatagcgggagacgccctagcatcaaggatggcattggcttccaaaagggggacaatgtcaaacttaatgcccctcctaaaagattgtctaattttgtaaagggcaaggctcccatgcctcaggataacgagggttatattttgtatcctgccggttatcccgagagcaaaattaggagaattcattctaggaagtctcactctggccctaaccatgcttttatgtataagggtgagacatctagttctaggcaaccaacccgtgctaagttgcctaagaagaaaactcctagtgcatcaaatgaccatagcatttcatttaaaacttttgatgcatcttatgtgttaactaacaaatccggcaaggtttacgcatccgggggctcaagttggatcatcgatagcgggtgcacaaaccacatgacaggggagaagaaaatgttctcctcctacgagaaaaaccaagatccccaacgagctatcacattcggggatggaaaccaaggtttagtcaaaggtgccactgtctttagaagaagtgatgattcaatagcatttaagggagtgttagagggtcagctatacttggtagattttgatagagctgaactcgacacttgcttaattactaagactaacatgggttggctctggcatcgccgactagcccatgttgggatgaagaatcttcataagcttctaaagggagagcacattttaggattaacaaatgttcattttgagaaagacaggatttgtagtgcatgccaagcagggaagcaagttggtgttcatcatccacacaagaacatcatgacgactgacaggccactggagatcctacacatggacctattcggcccgatagcttatataagcatcggcgggagtaagtattgtctagttattgtggatgattattctcgcttcacttgggtattctttttgcaggaaaaatctcatacccaagaaaccttaaagggattcttgagacaggctcaaaacgagttcggcttaaggatcaagaaaattagaagcgacaacggaacggagttcaagaactctcaaattgaaggcttccttgaggaggagggcatcaagcatgagttctcttccccctacacccctcaacaaaatggtgtagtggagaggaagaatagaactctattggacatggcaagaaccatgcttgatgagtacaagacttcggatcggttttgggccgaggcggttaacaccgcttgctacgccatcaaccgagtctttggtagcaaatgctttattcttgttaaaagaggtagaaaatctaaatttgctcctaagactgtagaaggctttttactaggatatgattcaaacacaagggcatatagagtctttaacaagtcctctggacaagttgaagtttcttgtgacgttgtgtttgatgagactaacggctctcaagtagagcaagttgatcttgatgagataggtgatgaagaggctccgtgcatcgcgcttaggaacatgtccattggggatgtgtgtcctaaggaatccgaagagcctccaaatgcacaagatcaaccatccttctccacgcaagcatctccaccgactcaaaatgaggatggggctcaagttgatgaagaaagagatcaaaatgatgagccacctcaagatgacgacaatgatcaagggggagatgcaaatgatcaagacaaggaggatgaagaaccaaggccgccacacccaagagtccaccaagcaatccaacgagatcaccccgtcgacaccattctcggcgacattcataagggggtaacaactagatcttgtgttgcacatttttgtgagcactactcttttgtttcctctattgagccacccagggtagaggaggcacttcaagattcgaattgggtggtggcgatgcaagaggagctcaacaacttcactagcaacgaggtatggcatttggttccacgtcctaatcaaaatgttgtaggaaccaagtgggttttccacaacaagcaagacgagcatggtgtggtgacaaggaacaaagcccgacttgtggccaaaggatactcccaagtcgaaggtttggatttcggtgaaacctatgcacccgtagctaggcttgagtcaattcacatattattagcttatgctacttaccatggcttcaagccttaccaaatggacgtgaagagtgccttcctcagtggaccaatcaaggaaaaggtctatgttgagcaacctcccggctttgaagatagtgagtaccctaaccatgtttacaaactctctaaggcgctttatgggctcaagcaagccccaagagcatggtatgaatgccttagagatttccttatcactaatggattcaaagtcggaaaagccgatcctactttatttactaaaacacttgacaatgatttattcgtatgccaaatttatgttgatgatattatatttgggtctactaatgaatctacatgtgaggaatttagtaggatcatgacacaaaaattcgagatgtctatgatgggggagttgaagtatttcttgggatttcaagtaaagcaactccaagagggcaccttcattagccaaacaaagtatactcaagatattctaagcaagtttgggatgaaggatgccaagcccatcaagacacccatgggaaccaatgggcatctcgacctcgacacggaaggtgccaaaggttcacaaaaagccaataaaaagaccaagaaaagggttcaacaaaaaggagcaagggataaccgaagtgctccctggtctggcgcaccggactgtccggtgtgccaccggacagtgtccggtgcaccaccggacaatgaccggtgcaccagggaactccaagttgaattcaacaccttcgagaattctcagaggcactccgctataattcaccggactgtccggtgccctaggggagagcgactctga

SEQ ID NO: 31206 - DNA, 909 bp, Zea mays
  Clone ID: MRT4577_12846C.1
cccacgcgtccgcagctggcgttcggaccggggctggtggtagccggggatctactacttcgacgacaagatgctgcagtgccgggtgttcgcgtacgccgacacgcagcgctacaggctggggcccaactacctgatgctcccggtgaacgcgccgcgatgcgcgcaccataacaaccactacgactgcgccatgaacttcatgcaccgggactaggaggtggactactacccgtccatgcacgcgccgctccggcaggcgccgccggtgccgatcccggcgaggccggtggtggggaagaggcagaaggagaccatacagaagccgaatgatttcaagcagcctggggagaggtaccggagctgggacgccaatcggcaggagaggtttgtgcggcggtttgctgactcgctggggcatccaaaggttagccaggagctcaggtccatctggatcgacctcctctcaaagtgcgacgcatcgctggggatgaagattgccacacggctcaacatgaagccaaacatgtgagtgatatgatggcgaggatggagctgcagctggctgctactgctactgctagtagtgaacgaagtgaatatgaataagagtgtggttgagtgaggcgtgtccgagttgttcttcagtactaatcgtccaccgccgttcgtctttcgtcctttccttaccttgtcattgtcgtcaagtcaagaatcaagaaataagaagagcagcatgagcatgagacatacgtatacatgtcaagagctagtagactacgacaaaactgcacatgcgcatcagatggatgcatatcctcagcccaaactatagtccgtgtacgcgtgtccggatttgtctgtaacaatgcaagccaagcgaaatggctctctgttttcgttatcatt

SEQ ID NO: 31207 - DNA, 894 bp, Zea mays
  Clone ID: MRT4577_128470C.1
aattcggcacgaggacaggacattgatgagccgcttcctactcctacatagacactacgaaaagcccactgggcagcagtaaagtatggcaatgtacaacgtgcaataatagaacaggtggtgtttgttaggaaagacctaatttcacggcagttggcagtgtggaaggactatctcgtggtgatgccaacatgcaagtacccaatcaggcttccacaagataagtatttgtgtgcttgctgttgctgctatgtttactgggtgtagaaaaaaataatattaggcggtgaaagcctggtggagaactgttttcagtcgtggccacatgtgcgcacgacattcatggtgaaaactattcactctagcaaagggctgctgagcaacagtggaatatcagatcgaaagatgaacaggggagcagcagctctcaccgctggtaacaagaaatcatgctctattattgatactttatgtgtactgtggcatgctctttgggaataggtctgtattcgggacaagtacaggtgcgtggtaccttatttcatctttttttccttactttatttgctactggcgctgcagtatgatgttctctttgaagatagcgaattgcgttcatctcttcatgagtactctgtctttttgaacagcccaatcatttgcctctgccccacccattcattttcaggaattatgctaactcattaagcgatattggccttgtaccaaatgatttatgcactgcatccgagagtgtttttttttgcctgctccatatcttgcttagtcttgtcttcagagaaaagggacaagcaccagcatcgcttgagcctttcttggccgaaatttgcttctccgggatcctggtgattcttacatcgtcatgctatagaa

SEQ ID NO: 31208 - DNA, 352 bp, Zea mays
  unsure (1)..(352): unsure at all n locations
  Clone ID: MRT4577_128471C.1
gcggaggcttggcagccccagcacaacacgacggggaanaacagcgccgggggggggaaccaagcacacaaagcccgagaggagaggcgcgacaacggcagggaaaggcgggccgaccaaccnggagaaggagcagaggcaagggaaggcggagaaggagacggaggacaggggcgaacnnaacaacaggcgcacaaagaccngagaagagaaangcgaagaaaaaaggcacaaagaagcggagcccaaaaagggggagaacagaggcacggagcgaagaggaacaaaggaaaggcaggcgaccaacgcaaaaggacagaagcgcgggaaccagccccagaagagaaccgag

SEQ ID NO: 31209 - DNA, 554 bp, Zea mays
  Clone ID: MRT4577_128472C.1
ggcatggaaagtttgaaagtttaggagctcttggaatttcaagtatgctgttggttacttcagggagttatgtcttctgctcctgatataattggcaatacattgcatgtacaccatgaccatggtagcagtgggcatcatcatggaatagatttggaacatccagttcttgcattgagcatgacaactttagcaatatctatcaaagaagggtaagtgggagctttgtgtaccatgatattgttatgttagatgctctcttctaccgtattccattttgcagtcaaaactcagaacctatgtatcactgctatggggtatgggtatggcgggttatttttccaaaatcaaggatacacatacaccaatcattgaatatataaaaaatataattaaagtaacagcattggcatattgaagcaaggtttaagttttcaacaagacaaatgaaggaagatctaaatgaacaagtaggcacgggactgacaggtcgctatagctagagtattttgacctctggacctccagcagcagtgccatgcaggctctgtagt

SEQ ID NO: 31210 - DNA, 755 bp, Zea mays
  Clone ID: MRT4577_128473C.1
tcacgcctcttcaccagctcagctttgcatatacgtacctaaaactaagaaggataaaccctgacagaccgttccgactcaatatgtttaaggattgtgagaggcgatcgatagcgaagctattccatcatcgatcagaagagagtcacagtggtgcacaactaacaagatgacacatccttcttggtgatggggggcagaagagggagagatcagggattgtattttttatacagctcagcagtcagctatgcacaagatccattgaaatttatacccctgtcgaagagttcatactttatataatgcaagtcatctttacccttgttactctctagtgctgcagaccagttcccgcctttcatgttttgcagttgacaaaggcagattaggaggttctagctgtttggtttttctttattctccgtaaagctctgtttattctttggataatatgggaaagttgtggctgggcatggacttcccagatgtattattattgccacaccactgtaggactgtagtgaggccatgattctcctgcaattctctgtggtcttacagaaaatgtaccatacaatcaatagggaactgcagtatgtacttctctccatgacagtaaccgattttggcctttttttaaaaaaaaaaaaaaaaaattctcgtgtaggatgtaaatggtacatactatatgttcgtatttgaatcgatctgtttaaaaagttgagatcaaaaaaaaaaaaaaaaaagcggcc

SEQ ID NO: 31211 - DNA, 2146 bp, Zea mays
  Clone ID: MRT4577_128474C.1
gtaccctcgggttcgccggggcgtcgcctagaaacgggctcgcgcgggcgccgtgcctccgcggtttggccatctctatatacagcgagggatcaggcaataatcgcaaatcccacaccaccgcaatcatccacaaccagagccaccctgccgtcgtaggcgcacgcgccgtagataggaagcttattaagctagcgcgtgtcgctgcgccatcctgccatggaggatcaggcgctggcgccgctgctgcagccgctcccgctcggcgaaacgggggccatcaaggggcgcgcgaggcgggcggcgctggagtggtgggtggagtcgaagaagctatggcacatcgtgggcccggccatcttccaacggatcgcgctgtacggggtcaacgtcgtcacgcagtccttcatcggccacctcggcgacctcgagctcgccgccttctccattgctgccaccgtcgtcgggggcttcaacttcggtttcctgctgggaatggcgagcgcgctggagacgctgtgcgggcaggcgttcggcgccaagaagcaccacatgctgggggtgtacctgcagcgctcctggatcgtgctcctcatcttcgccgccgcgctgacgccgacgtacatcttcatggaggacctgctgctgctgatcgggcagtccccggagctgtcgcggctggcggggcagatgagcgtgtggctgctcccgcagcacttcgccatggcgatgctgctcccgctcacgcggttcctgcagagccagctgaagaactgggtgaccgcgatcaccgcggccgtcgcgctcgccatccacgtcgtcgccacctacgtgctagtgcgtctcctcgacttcggcatcgtcggggccgtcgcctccgcggacatgggcgtggtggctggtcgtgctgggccagtacgtctacgtcgtcggcggctggtgcccgctgtcgtggaaggggttcaccatggaggcgttcgccgacttctgggagttcatcaagctctcctcggcctccggagtgatgctctgcttggagaactggtactaccgagtgttggtgttgctgacagggtacctggacaacgctgaaatcgctgtggggcaaataaaatgcagtcagacgatcaacggatgggagatgatgatcccgttcggcttcttagcagcaaccggggtgcgagtcgcaaatgagctcggcgcagggagcggcaaaggtgcgcgcttcgccatcgtggtgtccatcacgacgtccgtggtgatcggcctcgtcttctggtgcctcatcctctacttcgacgacaagatcgcgcttctcttcacgtccagcgcggtcgtgctcgacgccgtgcaccacctgtccgtgctgctcgcattcaccatcctgctcaacagtgtgcagcccgtcctctcaggggtggccgttggttcaggatggcaagcactggtcgcctacgtcaacgtcggcagctactacctcatcggagttcccttgggtatcgtactcggttggccgctgcacttcggagtagggggaatctggtccgggatgattggagggaccgccgttcaaacgctcatactggcatacctcactgccaaatgtgattggcacgaagaggcgaagttagctagtatgagaatgaagaagtgggccgacgagtcgaaataaacccactccactgctgcgctttgtttgttagccaggcacacaggggaacccctgaagctaagataacttctgatacagcgctatgcatattccggccttcagacgccgtcagcttgctgcggcagtttgctacaggaaaatgaagccgcaggtttctgacgatggtgtacggaaacctcccatagtggaattgcgtaccgcgcgtgtcaaaatattgttccactatagctaatatgggacaggacattcatcgtttttttttcttctcatcatcattgttgtttgggcgcgtttggtttgcttccgaggcgcccaggcatgcctggctctcattaggtcaacaaggctacacttgtcctaattgagtacatacaacacaaaatatttggttgttgtaaggataattttaaagtacaaaaaaggtgtcaaaaagcggccctactatagctaatattgtacaggtcaaaaaattta

SEQ ID NO: 31212 - DNA, 275 bp, Zea mays
  Clone ID: MRT4577_128475C.1
ggagcgtgcgggacaagtggaagggcctggactacgacatcttggacgaccagcaggacatcaccaggggcaagggcctcgtagaccacctcttgcaagcagcctatgggggactgaacccacgtcggcgagctgagatcctacgtcctactatccagggggaaaagtcttacaacttctacatacatgacgaatggattctacataggcgagggcgtggtggacaagctagtcgtgcacctcttcaagaactctatgaccctgccaaacatcaa

SEQ ID NO: 31213 - DNA, 588 bp, Zea mays
  Clone ID: MRT4577_128476C.1
agcttatcgataccgtcgacctcgagaacagtaatcatgatggcgcttgcgaaactgcctgatggctcccaggatttcgatgctgactacattgtgctcacaacactctgtgattggagggcgtgccttacgcacatgactatgagccaaatgatagcgctggaacatgccacatctgtcatgggatgagagaccgattcatgactcatattcagctctgtagctgttggtgtgtaaatagcaagatgagggactttcatcacgctgaaaagagggatcttcatcattatctgagcatgactgttgcttgtgatgctctggctacagtctgccagtctctcgatatgctaatatgattctgagacctcatggaaactgacacaatatttaacaattagtggcagaaagcgggatatcacaccaagaatgagactgctgtgctgacatctactagcattgtgtcgtatacttggtcatgtacgaggttacccggaacaccgaagaagagacccgttacaaggacatacagcatgttgaacaagactggacctagcacagatcatgtgaccaccactaccttgacttgat

SEQ ID NO: 31214 - DNA, 251 bp, Zea mays
  unsure (1)..(251): unsure at all n locations
  Clone ID: MRT4577_128477C.1
gactagctctagaatactccggctccggcagctggagcannnacaagccagctcccnaccaccatgaacgggctnnccacnctcnacacggccaatgccaccgtcggggagccagaaggccatggccaacgcaccaacgggaatccaagggaggcagctgaagaagagacgcagcagctgaccatcttctacagcgggaaagaggtcgtcctccacaaattcccctccgccaaggtcaaggacctgctgca

SEQ ID NO: 31215 - DNA, 543 bp, Zea mays
  Clone ID: MRT4577_128478C.1
gtctagaactagtggatcccgccttttttatagggaggtttttgcccgagaacactcccaaatgtgtgcttctgaagtgcctttcaccctcccttggtgtgtgtcttatggtgtgtgcttgtgacttcagtgaccttcccctgttccatagcgatgccttgagtcgtctcgagctcatgcgatggcgggtgttttttttttttttttgacatatgcacggtcacccggaatggggtgcgggtcgagtggactacacaactgctatctagccttacactggcaagcagcgttcagcaaactgtgcctggtccacgttccagcagccgaggttccttactcgcaagcctggttgcgccttcactcactccctcctcgtatcacgaaaccgcactatggtacccactcactgggtctagaagcggactgggcctccacaggggtaccccactattcttcttactaagggcatggcttcctccttgtgcagggcccacctctcaggaagccagcggcaagcttggagcaactgggcacggggcacca

SEQ ID NO: 31216 - DNA, 289 bp, Zea mays
  Clone ID: MRT4577_128479C.1
tatagagtctgcaaatcacggcatgttctccattttttctcatccttgcattccttgcttgttatatacctaaaatgttaaccatatagtttttgggttttgtggccctctagctaaagcctcagcagaaagcactaaaactgcataaatctggagaaatcaaaagaaagagaaccaaaaaacaatgcttaaaatgtttaataactttatgtttaatattataccaggacctacctttgttttcaattttaagatgattatttctaaaatctatttagcctgtaaatca

SEQ ID NO: 31217 - DNA, 494 bp, Zea mays
  Clone ID: MRT4577_12847C.1
ccagcagggagatcgcttttaaccaaaggcatacgtacaaacaaaacgcagaatcattacacgatgcatgcctgccgggcacgcagaccgcagacgcgcgtttcgatcaggcgacggtcgggagcgtgagagtgccgacaaaggggaagttgagctgcggcagcgtgaccagctgccgccggcccggggcggcggcggacccggcgcccgcgaccatttccatcagcgccttcctgatgggccgaagcagctccgcgacgagccgccaccgaaccagccgcgacacggccagccgcccgcagctcctgcgccgccccagccacaccgtgccgccgttgtgctgccgcccccgccggcgcagcagcagcagtttctgccgccgcgccctccacccgccgcaccaccgcgccaccgagcccagcctacccatgggtaaggtacctcctgcctgccactatcgtccccggcctgtgcgcggagctcaagctacactc

SEQ ID NO: 31218 - DNA, 406 bp, Zea mays
  Clone ID: MRT4577_128480C.1
gggttttgtttggggggtttttttttttttttttttttttttttttttttttttttttttcgaccctaaaacagggctcgacccaatcttattgggcttcataaaaaaacagaaaacgaaccctttttaaattgctccaaaacaacaggcaacgggggggggggggggggaaaaaaaggttcacccgccaacccccttttgggcattgggtgggaggattttcccgggaaggatgagctggggcgggatctcccggcccaccccaagcatcgagtcgtactcctcgtttttgggcgcgtcctttttccttagctttttctcgggctcaatctcggcgaagctcttggcgttctcggcttcctggccctgggctgggttgatatagttgcggcccccgggccggccc

SEQ ID NO: 31219 - DNA, 432 bp, Zea mays
  Clone ID: MRT4577_128481C.1
agagtgccaatctaagggatggcacaaatctctcactccagcagctgatgtagaaagagagattcatgaatcacagaaagcaggattttttgaagaaataaattttccttacccgatcgtctcggtgattggtgggggtaaaagagagatcgatctttatgcatattattttggcgccgacttggcagttttcttccttgttgcaatgttctatcaatctatcctaaaaaataagagtgaattcttggaagtttaccagctggaggatcagttcccaaaagaatttgttttcatccttatggttctctttatcttgatagtggttgaccgcattatatatctttggtcctttgctaccggcaaagttgttttctatctttttaaccttgtgcttttcacgtattctgtcactgaatatgcttggggaacgga

SEQ ID NO: 31220 - DNA, 241 bp, Zea mays
  Clone ID: MRT4577_128482C.1
ttttgttgttggttggtggagtacaggacttttcaaaggtctagttttacaaaagttagcacgaagaaatcatcagtctgtctttggtagttgcctacaatctatgcgatccagcgtcccgtcaagagccgcgcaattccgacgttggccgcagcgaggactaccctgctcagagcatatgtccatgcatacctactccggccaccatccgcacagctgtcatcatgtgccatctaaattt

SEQ ID NO: 31221 - DNA, 697 bp, Zea mays
  Clone ID: MRT4577_128483C.1
cctcgaggccggccggggaagtgcttatcacactacgactacacataccacgctcctcctactctgcaagtacgtgatcaacctagagaacgcaagacatccgccgatctcaaatgcacggcacaacttcgcctgcgaacagggccttggccacgaccgtgatcatgaccgtcgcatctcctctgctgtgactactcttcaacggcgaagcgtatgccatagctttacgaagcaacgccgcacacgtgctgacagggcatatgctcatggcacgtgctgatctagtggagcaactagtcaactacgctgccacacactaaagaaagacaacttcagctgcctctgcatgatctactgaaactactgcaagaacacatcctacaccttatgcaccatgccatctcttccctatgaaacctcccgaactgcgagtgccaacatatgtatacacgtaatgattgacccactacatcatgcgacacagcttggaccacacataagaaatcctgttcaatacgtaaacagacaccatgagtgactttgaccgaacgttaccctgtgtcttcccacaactgagagagctagctcttatgctcctgagttcttatcctcttaattgatcggaacggtctatatatgtctttgctgctcataagtgtaacgggggagaaattgggtcctctagctacagcttttg

SEQ ID NO: 31222 - DNA, 243 bp, Zea mays
  Clone ID: MRT4577_128484C.1
gcggaaagacggcgtacgacaacttgcttatcttcaaggacggcaagggctgcggctcatgctactaggagcgatgcatggaaaaacctgcatgctagggcactgctgtcacggggttcatcacaaacatgaactacgagcctatcgctccctaccacttatgctagagcggaatggcctgtcggatacatggcaaactcgggtatacaacgacaagcttatgcactgcggcattacagacaa

SEQ ID NO: 31223 - DNA, 980 bp, Zea mays
  Clone ID: MRT4577_128485C.1
ttttttttttggcttgggcaataagttgtgttttgtaccggtgggtaatatagtattcatatatatataaaaattcatatatggcacacgacattgaactgcatgcatacagtgctccgtagtagaaacataccaaacacacgctcatcaaggggaattattacaaggaaacaaatccggaagaatctcgtgcctggaacagctagctgtttgtacgtgaattaacgaactagtaccataatgcacaaacatgtgtgtgctgtaagaagaatgatgacgaagaaatcacaaagtctaagacgaccggtagatgctctagaacatgatcccggccgcgacggcgacgggtagcgcggcgagggcgacgaggcctccggcggcggtgacgcgtcccgcgggggacttggctgagcccgtcggcgtgttggcaggcacatctgggccgatagaagatggagagaggcctgccatgggcgccgcagtaggcaccaatccctcggggatagggaatccgaaagctgcgcaggcgctaacgggcggcgcggtgaggcggcagatccccgggagcgcgagcgcgcgcttgtagtcgacgctgacgccgtaggactcggcggcgccgcccagcagctggcagaggcagacggggtgggactcgagcaacccggccagctccgggcagcagggcgtgtccgggtgccgcgccttgctgcccgccgtcacgtacgtcaggcagtccgacatgttgagcaccgcgttgaagcactcgtcgctgatcccgggcgccgggcccggcgcgggcgcggcggccggcccctgcgccgacgccatcccgagcaccagcgccgccgccaccaccaccgctgcgacgagcgctgttggacgcggcagcattgccatggggatcactgctagtgtacgtgttagctagccgaggcggcggtggtttggtttccggcgctttgctgccacgtgtcggatta

SEQ ID NO: 31224 - DNA, 202 bp, Zea mays
  unsure (1)..(202): unsure at all n locations
  Clone ID: MRT4577_128486C.1
agctcacgagagtcgatcgctcagcgcgcgctacttgctcacagctctgcaaatagnctcgactctgcgatcgtgcgtcgtcgatcatcgacgcactgcgtacgaactccgctctcatctcgctgtagagagagcgctgangcgcgtacatcgcaacgacatcgcagacatcgtcatcggctcggtggatctggtcgcactt

SEQ ID NO: 31225 - DNA, 376 bp, Zea mays
  Clone ID: MRT4577_128487C.1
gcgagtacaagctttttttttttttttttttttttttttttttttttttttttttttttttttttttttttttttttttttttttttttttttttttttttttttttttatattattttttttggtgtttacgatcaaaattatgtttgtgggggaggagtattttttttttaatagaatgtctattgagtgactgatattgatagatattatttaaggcacttatggtgatttaataatgtgacttgtaaaatggaataattagagtattttacatgatacaaacatttctaatatcatgtttttaaataatgagtgcaaaataatgctactgttgataatgattatgtgcaattcttgcataatgctgcctgaa

SEQ ID NO: 31226 - DNA, 971 bp, Zea mays
  Clone ID: MRT4577_128488C.1
ttgggtccctcgaggccggccgggccgttctcccggcctagctccgtccagttggccaacggccggagcaaaaagcttgtgtgtctggctgtctccggccggccgggcttgtcgtacgtcctccaatccgttgacggtcaggccctctagcttttgctcggcgttctggagacagagcgagagagagagagagagagagaggtagacggagatggagtgcctgctggggctgctcaaggtgcgggtggtgcgaggagtgcacctggccatctgcgacccgctcacccacagcagcgacccctacgtcgtcctccgccacggaaagcagaaagtgaaatcaagtataaaataccgcacgatcaacccagaatggaacgaggagctcaccctgtccatcacgaacatgatgaacccggtcaagattggactcttcgaccacgacacgttcaccaaggacgacagcatgggcaacgccgagttctgcatcctcaacttcgtggagatcgcgaagcaggacctgagcgacgtccccgacggcacggtgataaagacgatccgcccggagaagggcagctgcctcgccaccgagagccacatcacgtggaaggacggcaaggtctcccaggacatggtgctcaagctcagggacaccgagaccggagagctcgtcctgcacctcacttgggtcaacatcccaggcgtcgcgatgtgaatcccctgctgcatgaggcggcgacgcctgcccagctggttttactacactaaatatatacgattatacgatatgaagtctgtaaatgtggctccgtacgtttaccaggtattggcaaacaaggagacccttgcatgcgtgtcttgcttgtttgcagttagcttagctcacgctactgggactgggagcaatgcctgtgctcagcttttgtttatacgggaaccggcccttgttctcaacatctgtgaagctataccat

SEQ ID NO: 31227 - DNA, 352 bp, Zea mays
  Clone ID: MRT4577_128489C.1
tggtcggagtagaaaacttggctatctgcacacgaccctgctctgccaacacatattcctgccgcccggtccaatctcaagccattcccgtcggatcttgtacgtcattcatctaggtatcccagcattgcggttccaacccaatccgtttctaccccgcttgccacacgactacatgaacctagcatttgacattcatcagggcaaggtaccaagagaacgatataggtacagggtgtttcaagctgttcttactatactgccaccacgatcagtcaaaatgagtagccctaagaggagaattgaggcggatgtcatgaaccgcgtatactgtactgtgattaagaactct

SEQ ID NO: 31228 - DNA, 329 bp, Zea mays
  unsure (1)..(329): unsure at all n locations
  Clone ID: MRT4577_12848C.1
gtgcctacccaaagaagagctgatttgtaacgtatctacaggccaacatcgtttctaggtgctagagccaggatgcccaccattacattggctgtgggtcaaatacacattgatttacatatgatgtggtgccagccaactaaccttacgtactacatgcatgcgtcganccaaattcttgtatttacgtacgctaagtttgctacactgtacgtcttttatcaacggacctaactggaataacctggccgttacctatacttaatcgccttgtgggaaatccctgttgctacacatgttatactagtggcaaggcatccccctttcgc

SEQ ID NO: 31229 - DNA, 1445 bp, Zea mays
  Clone ID: MRT4577_128490C.1
atttcggcacgaggctcgctaccccgaccgatgaaggcgtcgatcaagttccgcgacgacgagcggccgctggtgcgcgccaaggtgccgatcgtcgtgctggggctgccgttccagtcggggctcgcggcgggaagggacctgcgggagctccgcttcgacgtgtccacggcgttcgcatcgggcccggcgctccggctctcgtaccgccccaacgacccggcgctccccttcgcgctcgccgtgcgcgcggggctcggcccgctggggtccccggcacgcgcgcccttcgcgctcgccgccgagttcaacctcgtcgcccacgacccctcctcgtcgcccgccttcttcctccgcctcaagccgcggctcggcgacttctcgctctcccacacgctgcgctcccctgcggcggcgccagcgccacggaaggccggggagccgagctccgacggccggcgggaggtgaagcctctggactacatgccgccgttcacgttcaccgggagcgggctcgcggccgacgtggcggcggcggggaccggcagcggggtcggcacgctgctgtccggcatgcggctcacgaccaggagcgtgctcccgctgtggggccgggcgagcctgcggttcaactggggcctgcgcgtgccgccggagctgctcgccgccgacggcaagggcgcttgcgcgcccgtcagcaagatgccgctgctggtcatgagcaaggtctgcatcgagcagtccccgcgctccgtcacgggcaccaaggccggcggccgagcacctgcacccgccctggcctccacggacgcggcgtcggacggcgacgcggcgttctcgctggtgaggcggcagctggagtcgctgagcgtggacaacatgctgctccggcgcgccgtggaggacctccgcgcggaggtccgcagcagcaacagcagggccgcgccgcccgctgcttctgctgcggggcgtggcttgggcagggtggcggcgaccgcgccacaaatgcagacgcagacgcagccttaccacgtgacgaagccggaccaccgaccccggggcgccgcgagggaggctgcggccgcgccggacgacgtcggcgaggagctgaagaaggcgttggaggcccgcctgcgctgagcagccagccttggctgccaggccgcgtcgcgtgcgagcccggcagctcaccggcaccgctcgagtgaaggtgaagtgctagtgtcgctgttaggcgttgtaatctgttggtgtcagcagcaatttggagctgctgatttgatcgctgagaagaaggggatcggatttgtcttgccattccattctgtgctggatcaaggacttgatcaactaagaagcgcaaaagaaccaactttattacagctaaaaaaaaaaaaaaaaaaaaaaaaaaaaaaaaaaaaaaaaaactcgagggggggcgccgg

SEQ ID NO: 31230 - DNA, 1164 bp, Zea mays
  Clone ID: MRT4577_128491C.1
ccggccgggatgagcttattaattatggactaggtatatagaatagaaaaggcgacacagacagcgacgagacagtttgggagccgcatgtatttgagcatgcgtagagccggccgctccccgcgtttgtcgtccagcctctgcatactcttgcctccctccctagctccgtccagttggccaagccagatcgggcaagcaaaacttttatgacatctcccgttgttgacgcggccgggcttgtcggacgtacgtcctccgatccgttgacggtcaggcccttctgctgggtcgtcctgctgcatgcgtcgccgtggtcggggacacagaggaggagatcgagggagatggagtgcctgctggggctgctcaaggttagggtggtgcgaggagtgcacctggccatctgcgaccccctcacccacagcagcgacccctacgtcgtcctccgccacggacagcagaaagtcaagtcaagtataaaataccgcacgatcaatccggaatggaacgaggaactcaccctgtccatcacaaacatgatgaacccggtcaagattgaactcttcgaccatgacacgttcaccaaggacgacagcatgggcaacgccgagttctccatcctcaacttcgtggagatcgccaagcaggacctgagcgacgtccccgacggcacggtgatgaagacgatccacacggagaagggcagctgcctcgccaccgacagccacatcacgtgcaaggacggcaaggtctcccaggacatcctgctcaggctcagggacaccgagaccggcgacctcgtcctgcgcctgacctgggtcaacatccccggcgtcgcgcggtgaatcatcccctcgatcggcggggacggggccagggcatgaggcggcggcgacccgaccgacgcctgcccagctgattatacatccgtttacctggtattggcataaggagacccttggatgcgtgtaatgtttgtttgcagttctgataaggtgtgcaagaaggctcatgctactgggagcaatgcttgtatctcagttttgcttctgcgggttttttatccacaaattacatttgttctcgttgatcacatttccataaaaccatttatcagtaggtcaccatgtagagcaaaagaagaaaagaaaaagttgcttc

SEQ ID NO: 31231 - DNA, 377 bp, Zea mays
  Clone ID: MRT4577_128492C.1
aaataaaaataaataaaaaaaaaaaaaatataaaaaaaaaaaaaaaaaaaaacacaaacatgcgggaaaataactaggggatagactcacctaatttctattctactgcccttctttttacaacttcttttctcttcaaaaccctttctttacctaacttattcgcctttcataacatccccttttctccattctacgtacttccttcaaaaccccctcttttcccccttcccaatatcttctcatcctaaatcccttttctctctctctctgtttctacacattattccccaattcttctttccctacgcgcatttttacctcttcacttgtttaccccctatttccccctccctttaatcacttcccttactttc

SEQ ID NO: 31232 - DNA, 387 bp, Zea mays
  unsure (1)..(387): unsure at all n locations
  Clone ID: MRT4577_128493C.1
ccgggacacagcatccgcagttccccgacacaccgttcctccgagcccaggagcagccccgcgccaggaggaagtttgttcttttaacaatatgtcgagggaggagaatgtttacatggccaagttggctgagcaggctgaaaggtatgaggagatggttgagtatatggagaaggtggctaagactgtnnatgnggnagagnntattgtggtgggggggaggcttatattggtggtgtactggacgctcgatctggttccttgccgtgtttgatgtcgtaagtgtctcgcaggattctgacgtcttggctcctcttcatgccctggcctttagtggcgcggagagggggatgatgtgtgctgtgcgatatctttgggtgctgatcc

SEQ ID NO: 31233 - DNA, 422 bp, Zea mays
  Clone ID: MRT4577_128494C.1
gaaaacaagtctttttcatcttttttgagtcgccatcgaaaaactgtgaagcggagctgccccaactttacatataaccagcccggtaaaataattcaacaaagcaagaccttgctacgacaaaagcgtgaatggtaaagtatgcattagccaaagcagcgccgggtggtacttagggcacgggagggagggcctcgccaattgttttataacccgacagaatgtggtggggacaaaaagacaacatctgacctcagagaaataactccatccagggccagggcgcgtgaaaccaaacctgtgattccaaaacgttggcctgcatgtgaaacacctggtccctataaaagagtgatagagcaggtcggagccctcactggcctatagatgtgtactgagagaaagagcaatccggtcacaaa

SEQ ID NO: 31234 - DNA, 1340 bp, Zea mays
  unsure (1)..(1340): unsure at all n locations
  Clone ID: MRT4577_128495C.1
cccacgagtccgcggacgcgtgggtggggagcaccggcgacacgacgacggccgaggcggaggcgccggcgccggtgggtgactacgagctgctggagcgcctgggggggcgtcccccgtacacgtccgtgtggcgagcggtctcccggtccaccggcgcgcccgtggctgtgaagcaggtgcggctcaccggcgtccccgcgcgcctccgcgacagcctcgactgcgaggtccgcttcctcgccgccgtcagccaccccaacatcatccgcctcatcgacgtcgtccagacccagagctgcctttacctcgtcctggagctctgcgagggcggggacctggcggccttcatccggcgcaatgggagcgtagacgagcgcgtggccagaaattttatgaaacagatcggagctggcttacaagtgctgcaccggcaccatgtcgtccaccgggacttgaaacctcagaatatcctgctctcttctccgagaagcagcgatgcgatcctcaagatatctgattttggtcttgcaagggttcttggacccggggagtacgcagacacatcttgtggttcttgtttgtacatggccccagaagtgatgctgtttcaaaagtacaatgacaaggtagacatgtggagcatcggcgcgatcctatttgagctcttgaatggctacccgccattccatggcagaagcaacgtctgcttcagtgcatcaacagaagcacgtctctcccgttctcagaaccactggcgtctaccttaggccccgattgtgtcgatatatgcaccaggctactatgcactaatccagtgaagcgtctgtccttccaagagttcttggaccaccgcttcttcagagtatgagtacccaagccatggggaccaccgggcagcgacatgatctgaagaacatcaagaagtttcttgtccttcaagtgctgactgactctgttgtaaagcgttcagaaattgatgcccagtgctcgtcgtcttggttttctgttcgcgtccatttccttctccaaagagccatgtggccaacgtttcaatctgttgtgatctggtctgtactgtttcaatctgctaacagtaggagttttaaagatatttagtccaaaacagaactccatcttttattcaaagcggcataaactatcccattttattgagcanaaaaaaaaaaaaaaaaaaaaaaaaaaaaaaaaaaaaaaaaaaaaaaaaaaaaaaaaaaaaaaaaaaaaaaaaaaaaaaaaaaaaaaaaaaaaaaaaaaggggggggccgttttaaaggacccaagttttcttccccgtgcttgcgacgtaatagcttttt

SEQ ID NO: 31235 - DNA, 286 bp, Zea mays
  Clone ID: MRT4577_128496C.1
gttctagatcgcgacggccgacctttttttgggtttttttttttttttttttttttttttttttttttttttttttttattttttttttttttttattttttttattttttttagggaaaaaaaaaaatttccctgggggagctaaaaaatattattttaagcaaaaaagttaattattttaattccctgggatggtaacataacttatgaaccttgaaacactggacatcctactgaacaaggtcatttaaaaaatgtttttctactttaacaatctgatccacc

SEQ ID NO: 31236 - DNA, 1318 bp, Zea mays
  Clone ID: MRT4577_128497C.1
gggtacctcgaggccggccggggtcttctcgcgatggggagcaccggcgacacgacgatggccgaggcggaggcgccggcgccggtgggtgactacgagctgctggagcgcctgggggggcgtcccccgtacacgtccgtgtggcgagcggtctcccggtccaccggcacgcccgtggctgtgaagcaggtgcggctcaccggcctccccgcgcgcctccgcgacagcctcgactgcgaggtccgcttcctcgccgccgtcagccaccccaacatcatccgcctcatcgacgtcgtccagacccagagctgcctttacctcgtcctggagctctgcgagggcggggacctggcggccttcatccggcgcaatgggagcgtagacgagcgcgtggccagaaattttatgagacagatcggtaatcaagttgttgatccatgattgtttgactcaattgtgtcgtccaccgtctggggatgtgatctgtgagaaatggcccctgtggcaggagctggcttacaagtgctgcaccggcaccatgtcgtccaccgggacttgaaacctcaggtttcttggacccggggagtacgcagacacatcttggtggttcttgtttgtacatggccccagaagtgatgctgtttcaaaagtacaatgacaaggtagacatgtggagcatcggcgcgatcctatttgagctcttgaatggctacccgccattctatggcagaagcaacgtgcagctgcttcagtgcatcaacagaagcacgtctctcccgttctcggaaccactggcgtctacttaggccccgattgtgtcgatatatgcaccaggctactatgcactaatccagtgaagcgtctgtccttccaagagttcttggaccaccgcttcttcagagtatgagtgcccaagccatgagcgagagcgacatgatctgaagaacatcgagatgcctcaagaagtttcttgtccttggagtgctgactgactctgttgtaaagcgttcagaaattgatgcccagtgctcgtcgtcttggttttctgttcgcgtccatttccttctccaaagagccatgtggccaacgtttcaatctgttgtgatctggtctgtactgtttcaatctgctaacagtaggagttttaaagatatttagtccaaaacagaactccatcttttattcaaagcggcataaactatcccattttattgagcaaaaaaaaaaaaaaaaaaaaaaaaaaaaaaaaaaaaaaaaaaaaaaaaaaaaaaaaaaaaaaaaaaaaaaaaaaaaaaaaaagggggcgggccgttttaaa

SEQ ID NO: 31237 - DNA, 429 bp, Zea mays
  Clone ID: MRT4577_128498C.1
ttttatttaaaatataatacatgttcgtccatggattgtgaaggaagccttccctattgatggccaatacaagttgtatggtcactctcaaccctctccatcattaaaattacagaagaactagttgatagctcatctcttgtctaggtaactacctggttgctgctcaccatggttgcctctagtgatattgcttaaggcaacttgttgttcatcaaatccatagtagtttgtgttgtaagcattgccagtgaaggaaagcacatcccagctatgagaagtattctgcaccatcgttggagctgcagaagagctagttgtttgttgacctctagtccaagtggccacttggttattgctcgcttggttagcacatctgaggttgtttatagaatcatgttgccaatcaaaatcataattgtttgtgtt

SEQ ID NO: 31238 - DNA, 786 bp, Zea mays
  Clone ID: MRT4577_128499C.1
atgcgcatcggccacgcagagcctattacaatgggccggatcacacgtgggcctccatgttggacgaggccgcgagatgagacgacctcgtcacaagtcttcgtccggcgacgcgtgggacgaagggttggcgaaggcatcgagcgaagggtggcgtcttcgccttcgccccaacagaaacctctccagttcgaggtgggagattttgtttatataaaagtatcacccaccaagggagtgcagaggtttgggatcaaaggcaagctagcccctcgctacattggaccttatgagatcatagagtcatgtggacccgtggcatacaagttgaagttacctccaaaaatgtctgccatccacagtgtattccatgtatctcaactaaagaagtgtgttctattaccgactgagatcttagcggaaccagaattggaaatagagccagatctatcataccaagagtacccttccaagattctggattgcaaagaaagttcaactcgggcaaaatcgatcaagatgtataagatccaatggagtaatcactcagaggaagaggctacttgggagactgaagaatttctgcgttccaattttcctgattatctgcctaaggaaattgtgagtaggccggattcctcgccgccgacgagcatctccgcctgcacacgtagaccgaccgactccgaccatccccgacggcgacccgcacatcgccgtgatccccaagacctctcctacgtcatcgaccacctcaccggagcagccttgccgccgaagacttag

SEQ ID NO: 31239 - DNA, 319 bp, Zea mays
  unsure (1)..(319): unsure at all n locations
  Clone ID: MRT4577_12849C.1
aggatttcggccgaggagacagactgttgctggtgggtctctttgcttggagctgatgatcgacccaatcctcgacttggtggactgcgtaagaccatgcaggcgctttgcgtggtggcgtatatggggtgggtaacaagaaaagaaaaaagatcggtcgcgttgngcggccactatgttgtggggggggggtgattctctatgctgttgggctcctttgacgggctggggggggggtgtttttccccccggtgaagcggctgatgcgccctcggggagggcggggggcggttggcctgggggggctgggtccgggggg

SEQ ID NO: 31240 - DNA, 1239 bp, Zea mays
  Clone ID: MRT4577_1284C.1
gggtacctcgaggccggccggtcgacccttcccagaagcaagaaaaaaatctctcagaaaccaccaaaactgggtgctttctacgtgcttctgcagctaacctcacgccggcggactctagcaagagcacgaacgagggccaagcgctcgaaacccagcgacgtggaagcgcctgcgccgcgagcatccttccagagcgcggggccaaggccaagcagagaagcagtgcaagcatatggcgcgccgtgccagcctgctcctcgccgcggcgctgctcgtcgccgtcgctgccgcggcggtgccgccgacgtgcgagcgcatcgagtgcccggcgtacgaggtggtggacagcgccaacgggttcgagatccggcggtacacggacgccatgtggatcaccacggcgcccatcgaggacatctccttcgtcgccgccacgcgcaccggcttcctccagctgttcgactacatccagggcaagaacgcgtacaacgagacgatcgagatgacggcgccggtgctgacgcgggtgtcgcccagcgacgggcccttctgcgcctccgccttcgccgtgagcttctacgtgccggccaagaaccaggcggacccgccgccggccgagggcctgcgcgtggaccgctgggccggggccaggtacgcggccgtgcgccgcttcgggggcttcgtggcggacgccgacgtcggggagcaggcggcgcgcctcgaggccagcctccagggcacccggtgggccgccgccgtcaacgacgcgcgcagggccgacccggcctcgccctacaccgtcgcgcagtacaactcgcccttcgagttcaccggcagggtcaacgagatctggatgctcttcgacgccgccgacgcggacgacgacgccagtatgtgatgcgattccaagcgtgctctcggggcactgaggcgtttagggaaggacgcgcatgcacctgtgcagtgcagctgtgctaccatgaagtatttcgtgctcttgtgcgctagcttcgtttactttcgccttttcgagtaaggaataaggtgcctcttgttgcaataatgataaagctaatcctgcttgtaattacatttcgtggcatggccattccgacaacatgtccagtaaaaaaaaaactttttagtttcatctctcctggtttcatctcaactccctgggtgcccctaagagtcaggttcggcccctataaaaaaaaaaaaaaaaaaaaaaaatat

SEQ ID NO: 31241 - DNA, 429 bp, Zea mays
  Clone ID: MRT4577_128500C.1
aacctttgggctgatttatgtgcttgtaaagtcccataataaagatttacccttacaaagaatattaaacaaacaagataccacttatataaaaaaccataaacaaacacgcagggctaattaaaagttcgtactctagcctcgccatgtacgcacatctcgtatcctaaaggatacgccctagagccaagatcatatcgaaaaatcgtcgcggagcactacaatactgccccgcttcacctgacgtaggcgatgaccgtactcttacttagataggacgtagtaatacaaacacatacaatgcgaaccgcggattaagttacggaactagtacaggcggatcaggttgagataatataaaagtacgtgcactaaacgccatagcaagagacgctaatacgcctagaattacgaacggcgctagaacta

SEQ ID NO: 31242 - DNA, 227 bp, Zea mays
  Clone ID: MRT4577_128501C.1
cccacgcgttcgtccttcgttcgctttttacactttttaggctggggcaggggtttttttaagcgtaatccatatcatcatcaacccggtgaattccaccgtgccaatttcatctgaggctcttaagcatataggtgtctacaatcccattaagctattctgggttaccaccctgtatgttgtcacgtccaacacatttatggctcacaagaagaaccttaatctca

SEQ ID NO: 31243 - DNA, 2623 bp, Zea mays
  unsure (1)..(2623): unsure at all n locations
  Clone ID: MRT4577_128502C.1
ggttctggttgcacaattcttctatttgtgcatactttgtccttagctgaaagctctgtcctctcaagtgttggtggcttcggaaatgctggtagtggtggaggtggagggggaaggattcatttncattggtctaacattcctactggagatgagtatgtgcctgttgcagctgttaagggatcaatacttacaagtggaggagtcagcaaagggttaggatattccggtggcaatggaacggccacaggaaaagcttgcccaaagggtctttatggtacattttgcaaggaatgccctttgggaacatacaaaaatgttactggatcttctaaatctttatgctttccatgccctccgggtgaactccctcatcgtgctatatacacaaatgttcgaggaggtgctgctgaaactccatgtccatacagatgcgtgtctgacagatatcgcatgcctcactgttatacagctctggaggagttaatatatacttttgggggaccttggctatttggtctttttctttcaggcctccttatcttgttagctcttgttttaagtgttgctcgtatgaaatttgttggcactgatgagttacctgggccagcaccaactcagcaagggtcccaaattgatcattcctttcccttcctagaatcactaaatgaggtcattgaaactaatagggctgaagagtcacacggtcatgtacacaggatgtatttcatgggtcccaacaccttcagtgaaccttggcatctcccacacagtccgccagaacaaataacagagatcgtatatgaagatgcatttaatagatttgtcgatgagataaacacccttgcagcttatcaatggtgggaaggatctatttacagtattctttgtatacttgcgtaccccctggcttggtcatggcagcagtggcgtaggagaaagaaattacagagacttcgtgaatttgttcgctctgaatatgatcattcatgcttacggtcttgccgttcacgtgcactctatgaaggcctcaaggtgactgcaaccccagatttaatgctagggtatttagatttcttccttgggggagatgaaaagaggcctgatcttccacctcgtcttcgtcaaaggtttccaatgtctcttatctttggaggcgatggaagttacatgactccgttttcacttaatagtgacagtgtgcttactagtcttatgagccaggctgttccctcatggatatggcaccgtcttgtagctggattgaatgcacagctgcgtttggttcgctgtggaaatctgaaagtaacgtgtcttccggtcatcaactggcttgaaactcacgcgaatccttctttagctgagaatggtatccgcgttgatcttgcctggtttcaagctacagcactagggtactgccaatttggtcttcttgtttatgctgttgaaggagatgctgcacttactgaacctgatgggagccctagaataaaaacagagcaacagacaccaacacaaaacatgctcgctgatactcaactaagtcagtccaggattaaggatgctctaatgcgcaaaaggatcactggtggagttctcaatagtaatagcttaaggacactaaacgacaggagagatttgttttacccattttctcatatcttgcacaattcgaaaccagttgggcatcaggatcttgttggtttggtaatctcaatactgcttcttgcagatttcagcttagttttgcttacttttctccagctgtattcatattctatggtcgatgttctcttggttttgttcattctacctcttgggattttgtcgccttttcctgctggtataaatgctctatttagtcatggaccgaggcggtcagcaggccttgctcgtgtatatgcattgtggaacataacttcactggtcaatgtcgttgtggctttcatatgtggttttgtacattataagtcatcaaccaaaacacacccaagcgtgcagccctggaacctgggaacggatgaaagcagttggtggctcttcccaactggactcatggtgttgaaatgcattcaagcaaggcttgttgattggcacgttgctaatttagagattcaagaccgtgcggtatatagcaacgacccaaacatattttggcagtcatgacacctggtgtaactgaggtccttctggaaagctttttacaactcgattttttgtgagttgataaaaggaaagagtgcgggcagcaaggcctttctttattgaccagaccaaagaagcagctacagaggttatatagacgcatacttccgcatcccccgctgataatgtgcagttgcaaccggtgttctgttgtatatataaaaggtgttcttgatccattctttgtaggatttagacaccatagagtttataaacaatgtcaaaagctaacctaagagagacatcggagggatgtggatttgttgttctattgctaccgtgccctggcccttgatgtttgttgagatgggcagaggggggcaactaaaagtcagggagatgcaaaagcctcttgttgtatgtgatcagatgggtaaaacaagtattatattattaacatgttccagggttttcactc

SEQ ID NO: 31244 - DNA, 395 bp, Zea mays
  unsure (1)..(395): unsure at all n locations
  Clone ID: MRT4577_128503C.1
cgttctggttggacgttctcctccccnctccggtctcgggtgtccgggttcgtgaaggattctcacgggggtatacgcgtttcgtgggttgggccggnnatcgagnatggccggccgtcggtatgtatgagtacccgcntagcttcgtcggcgggcctctgccctgggccacggnacgactcactctctctccactaacgccccttcagcacactacgtggggaggtgcggngagtcacaagtatcaatgcctcgatcgcggagactgcaagaggtccccgcgtgcttcgtgctttcgtcacccttcttccacgggaggtagggcgtatgcgtgaacgacacatcgagggtcattgaacggacaaggtagctgggacggccgctaacattcaccg

SEQ ID NO: 31245 - DNA, 678 bp, Zea mays
  Clone ID: MRT4577_128504C.1
cattgggtacctcgaggccggccgggtgtaaaaccgtccgacgcgagccccacctccgcgctcgcacgcggaaggagagggacgagggagccaccgtcaccgagcgcggttacaagaaaatccaatctctcccccacgctcgtttcgactcgcgccatggaggcgcaggcgcaggacaacagggcggaggatggggacggcgcgcggcaacacgtagccggcggcgtcgcggcgacggggatggctatgggcgcgatccccatgcacgggttcatggtcccgaagccagagccggtggagttcttcggcgggatggccgtggtgcgaagcaagccgccgccgcggaaccgcgaccggcacaccaaggtggagggccgggggcggcggatccgcatgcccgcggcgtgcgcggccaggatcttccagctgacgcgggagctagggcacaagtccgacggcgagaccatccggtggctgctgcagcagtcggagcccgccatcatcgccgccaccggcaccggcacggtcccggcgatcgcgaccacggtcgacggcgtgctccgcatccccacgcagtcctcgtcgtcctccagcccctcgtccctcaccaccgtggtcgacggcgacgaggcgtccgccaagcgccgccggaagctgcagccgacgcgagcggccctc

SEQ ID NO: 31246 - DNA, 156 bp, Zea mays
  Clone ID: MRT4577_128505C.1
ggagagaaaaatgtttgcccgtggttttcttgctttgcattgcgaacacgcaaattggctcatggctagcgcacactgcacaggcaaaccggctaggtcctactactaccaaacccgattgccctaactattaacaccccaatccgttttggctgg

SEQ ID NO: 31247 - DNA, 444 bp, Zea mays
  Clone ID: MRT4577_128506C.1
agggcaagaggcattgtgcttataccaataaccttcagaagttcattatcggatgtgacttggttaaggaattaatgggtaccgatctcatagctgtgcatttgggatggggggggggcgacaaagataaccttgcatccacaagggcagagatgggtgaggtaagagaagagaacaagaggctaaagacaatgctgtcacgcatcggagaggactaccgggccctccaattacaggtccacgacgtttttcaaaaaggagaacccatggagaagaagcttgctgaccaccggcccttgaccattacgccacccaccgggattgaggaggccgaattcgtctcgctgagccttgggacgggcacaggcacgcacaagaaggaagagaagagcgtcatcattagtgctgccgaaggaaaatggggggaagactacttgatgatgg

SEQ ID NO: 31248 - DNA, 255 bp, Zea mays
  Clone ID: MRT4577_128507C.1
aggagctgcccttgtggccatgtgatgaataaaagcacgtaaagcaagcagactagcagagggttacgatgtgcagcagttaggaggagcaggtccggcgacggcgaggcagatgaaacaactcctctgttcctccctctccatcttgttgctagtagtatatatatttggttgctcttgcattgcagcaagcagtacttgatctgactgaggcacccatttccccaagccacaaaagagacgagcatgacaagc

SEQ ID NO: 31249 - DNA, 549 bp, Zea mays
  unsure (1)..(549): unsure at all n locations
  Clone ID: MRT4577_128508C.1
atgtttatattatgtatatgttgttggccttgtgtagagcggttacaattgtgaagtgttaaaggaaaattagtattttccctgaggctcaagcttgacagattcttcccgtttgtgtgcatcagtcaggctgatggtctgtcccatggagcagtcagtacaaactcctcttgcatcagatagttcatgtctcgtgtatgcatacgcagtagcttgccacagcccacaggcacatttttttggacgtggaaggcgccgaacaccttagacaacctggaaagcggctcgacggcggttctcgcggaggcgccgggcaaaaaggtgatcgccgtcgggtccgtctcgctgtgccgctcaccaagtctcgaccctcggtccatgtngagtgacgccaggcgatgcatggcgtggctggacgccaaggacctcaagtccgtggttagtgagcttcggcagtgccgagcgcatgccacccgctcagctcatgcagcttggcatggcgcttngttgctgggacgttggccagaggagggatttataaggggtaaa

SEQ ID NO: 31250 - DNA, 595 bp, Zea mays
  Clone ID: MRT4577_128509C.1
agggaccgatcagccgccggcgcttatagtcggcttatcacgatcttctatctggcgacgagctcctgtcggattcattcacctccaaggagctcgacaacggcgtgctgtgggaggtcgaggcgaaagtgggtcacccaagggcctgttgatgtatacattggggccaattcatgcgccgcgggtggtgaagacgaacgcgtttattacacacccgtgaaggtcgtagatattggtgacacatttcggatacaggagcaaccttcttttgacaagagatcattggattcttacattaaaacatacatcaagaatctcactggtgggaaccagccaaagaaagcggatgagttcaaaatagggtgtcgagggtgccaccaatgttctccttaccaagctgaatgaccttcaatttttcgttggagaaagcatgaaggatgatgcgtccgttgtattcgactattacaaggatggtgccactaatccgacattactctatttctctcatggccttaaggagatcaagtgctaggcttgcggcaagattaggtacccatgaaggctactatctatgaactattgctatatgcacaac

SEQ ID NO: 31251 - DNA, 1421 bp, Zea mays
  unsure (1)..(1421): unsure at all n locations
  Clone ID: MRT4577_12850C.1
catcctccccagccaatcgttggcccacgtgggcccanctagctctgtggggcagagtcttaagacacagtttccccgttccagcacagatgatctagttgtgtgctgtagatggtgttttanaatgctgaacaatcaaaccttaatttgtatattaatagtcaatgccatatctctgagctcacaattgcttaaattgttcatccctcagatactattaattctcaaatttacaattgcttatgcatatttctagttaataaataaattatgcacatgtgactcttaataactttacaagccttctagttacaactgctccttaagaaaattgattaaaagtgcaattagtcactgcccctttacagccaagtatttaaaatgttttgtcaactagttattaattcaaaagtttaggtattgtaaaattttaaaactttaacttcttaaaagacaaaaaagagagaaattgtatccccgtgcatgctatttagtgcattcccatgcacactattaaagtcttacctttattttcaaaatctaatattttaatgtcaaagagtttaataaatgctttatagtatcttaaagggatctacttattggcttatagattaatcctaaaacagctaccttattagaaaagggaaaaacaggttttctccacagaacgctgcagaagcatattagtaaattcgtgtgacgagctggtaggtaagttgactcatgtcctgattaaattgactaaaaaactaaattaaattcatgttttagatccatccttacttgtcatttttccagtttagactagcttctagccttttaactttatgacaatagtacatcagagactgtatattcagacttagtaaaattagtcatttaatagagtcataatgatttttctcctttcttcagtgtgaccagccattctaactcaatcttagactggtcctaatattcagtccaatgttagagattcctatattctaaattacctagcaagttaattcagagcacatcctccacttcccctagatccctaacctcagaaggattactggccttacagctagtggaaaaggctattaaagaacagttcgtcacttacatagattactccctgccgctgcacctgttaatttttaatacgactcatgtgcctacgggattgctatggcaaaaatttcctataatgtggatacattcgaggatttctcccaaacgtaatatcttgccatatacgnaagcagtggctcagatgattatcactggaagaaggcaggcattggcttattttggaaaggagccagatatcattgtccagccttacagcgtgagtcaggacacttggctgaacagcatagacaagattggttgcttgcgcattagggttttgaaggaactctagatagccacta

SEQ ID NO: 31252 - DNA, 564 bp, Zea mays
  Clone ID: MRT4577_128510C.1
ggtaccctcggggtaccccgcccctcaagacaagataatatctttcgtagccgccgcccgccttccgttcctcagtccctcatcttctttccttcgtatccaccgcccggcgaccacactaggccccagcctcctgcgcacttctgtcgcacgcccagaccctgccgtgtgccgtcccaccgcacacttgtgctgcacgccgaagactgccatggcgccgcgcaaggtttgggtggcgcttcgaccgcgaccatcagcgaattcacagatgatttttgcgtatcaataacactagctgtacagctttgtcttccacgcccacgagctccaacctagcatcacgacaaggaagggtgagaaatagagtttggcttgtggtagtggcgttgtacagctgttgtgttgaaaatagcttagatttgattgccttgattattaaactatgctatacggtggtgatgtaacatttgcggacttagtttttttattcgacttgtttattccaacacacttttagcaaaagacacctaaaaaaaaaggaaaaaaaaaaaaaaaaaagcggcc

SEQ ID NO: 31253 - DNA, 1647 bp, Zea mays
  unsure (1)..(1647): unsure at all n locations
  Clone ID: MRT4577_128511C.1
taccgtctacctgccggccgggccggggtacccgattgcccaacgcttcgctttctcgctgactcgctcccactcccagacgaccggccgccagcgccgccgcgttgatggccgccgcaccggaggagcgcctcgacgtcctcaacgccgctggggacaagatcggcgtctccaagcccaggtcggaggtgcacagggacggcgactatcaccgggcggtgcacgtgtggatctacagcgagagcaccggggagctgctgctgcagcgccgcgctgactgcaaggactcgtggcctggacagtgggacatctccagcgccggtcacatctccgccggcgaatcctcgctcttctcggcacagagggagcttgaggaagaactaggcatcaaccttccagtcgatgctttcgagcttatatttgtatttcttcaggaatgcgttatcaacaatgggacatacacaaacaatgagtacaatgatgtttaccttgtgactactttaactccaattccacttgaggcattcactctccaagaaagtgaagtatctgcagttaggtatatgcgttgtgatgagtacaaaagctgccttgcaaaagaaagtagagaatatgttccttatgatgtgaacgggcaatatggtcaactgtttagcattattgaagaaaggtacaaagagaatacagagtcacagagtttaactttgcaaaagcaaatgaaccgttatgttcccatccatttggaaccagatttgactagtctctctgaaggagacagggaggccttgggatatatccttaaagccgcaatagttattgatgacatattctatgaacaggtatggaatagtaacaaaatgcttagagactggctgaaaggacattctgaattctcaccattcgataaattgaagtgggcatattattctattaataagagtacctggtcctgccttgatgaaaataaggcttttctatcgaccgcagattctgctgtgcaattactcacagaagccaccaaaccagtttcaggatggaaggggattgagtatcgagcagcatttcctctacataagcctcccggtgctaacttctatcctcctgacatggacaaagcggagtttgaactttggaagagtaaactgacagataaagaacaaaatgatgccactgggtttttcaccgtcataaaacgacatgactctctgtcttcatcgtcattaacacaatcagatggatcggatcagaccaagactaaagatgatctttttattgttccatactccaaggagtatagaccattcctagagaaagcagctgagcttcttgagaaagcatcagcgtgctctgattctccaagcctcaagaatttgctgagaaccaaagcgaatgctttcctttcaaatgattactatgaatccgatatagcttggatggaattggactccaacttatatctcacaattggcccatatgaaacatatgaagatagcctttctagttataaggcaactcttgaagcatttgtcggaatacgtgatgacacagcaactgctcaagctaaactctgtggtgatcagctccaggatttggagaaaaaccttccaatggacantattttcaaatcagatagtatatctgctgctc

SEQ ID NO: 31254 - DNA, 421 bp, Zea mays
  unsure (1)..(421): unsure at all n locations
  Clone ID: MRT4577_128512C.1
taattcggcacgatgcaccagaccaccctggtcttacgagctcctccactctgttcttccccgccgctccactgcgcccttcctcccgccggggtcctaaaccctcncccctanggagcggccgaggctgctgctgctgctggctccgtttttttgccggncgggctgggctccgggggagacgggngcacggcggccccggcgctgccgctcgaggcgctgctggcgctcggcctccgccagcgcaccgccgngnccgcgctcgtcaacgccgagggcnccgccaacctcgcctccggcatagccgcggctggcctctaggaatgcgacaaggcagtcggcnctcttctgtgtgccgtcgcctccnagtgcccaactaatgcacttgttcaccggcctgtgcttcttacctgtgtcttgg

SEQ ID NO: 31255 - DNA, 312 bp, Zea mays
  unsure (1)..(312): unsure at all n locations
  Clone ID: MRT4577_128513C.1
cggacgcgngggcggacgcgngggcgcagcagggccaanancnngcnaggngcnnnaacgagaggaaggangcngaagaaaacccngaangcccaanccgcancaggggagaaggccgccancgcgnccgccccnncagggaccggcagcggggccaanncgccccacnaggaggggagcaaacagcngcacagcngcccggggaccggaacnccannggccacagcncccagaggcgcnggnaccccgngnacgcaaccaaacaaancagcnggcgcacgaggaagcaggnggnaacagaccggacacgcc

SEQ ID NO: 31256 - DNA, 1939 bp, Zea mays
  Clone ID: MRT4577_128514C.1
ccacgcgtccgatactgacaatacaggccaagggcgataagccttctgcccaatctcttctccagtcccgtgcaacattgacacaaccattgagaatggcattggagaggatagagcacatgcaggtacctgttgacatagccccggtattcagcacggcaaacaagctatttgcagacatttaactatttgggctcagaatcgttgtgctttagtaccgcccccaatacctggacgaaaccaggaattgctcaagaatacaacggcactaggaattgttcaagaataaggaagcgccccatgtatagcccattcctagagaaagcggcgaagtgtcttgagaaagcttcagcgagctctgattctccaagcctcaagaatttgctgagaaccaaggcgaatgctttcctttcaaatgattactatgaatccgatatagcttggatggaattggactccaacttagatctcacaattggcccatatgaaacatatgaagatagcctttttagttataaggcaacttttgaagcatttgtcggaatacgtgatgacacagcaacttctcaagttaaactctttggtgatcagctccaggatttggagaaaaaccttccaatggacaatattttcaaatcagatagtatatctgctgctcctattcgtgtgatcaatcttctctacaatgctggggatgtgaagggtccacaaaccattgctttcaatttgcccaatgatgaaaggattgtgaatgaacgaggaacttccatggttatgctcaaaaacatttcagaagccaagttcaagcatatcttaaagcctatagctgatgcctgcatcagagaggaacaaaaggaatatgttgatttcgagccatattatacacatatagtctgtcatgaatgctgccatggaattggacctcattctatcacccttccaagtggtaaaaaaacaacagttagaagggaacttcaagaattccattcagcattggaggaggcaaaagctgatatagttggtctctgggcactgaatttccttattaagaagggattgcttcctaagagcctgtcacaatctatgtatgtctctttcctggctggctgcttccggtcaatccgctttgggctggaagaagctcacggaaaaggacaagctctgcagtttaactggttgtatgagaaaggggcttttgtgttgcagtctgacggaaaattctcagttgattttacaatggttgaggatgctgtagaaagcctgagcagggagatactgacaatacaggcaaagggcgataagccttctgcccaatctcttctccagtcccgtgcaacattgacacaaccattgagaatggcattggagaggatagagcacatgcaggtacctgttgacatagccccggtattcagcacggcaaacaagctatttgcagacatttaactatttgggctcagaatcgttgtgctttagtaccgcccacaatacctggacgaaaccaggaattgctcaagaataaggcggcactaggaattgctcaagaataaggaagcgccccatgttaagcaaagctgataaaaccatggcgatatgtgagtgacctttttatcggaaggaaaattgtttgcatgcttatgtattgacctcaatttttacgtattggagtgatttgatgtgaaatttaaccaaattccacgtccagtacatggccatccaaacatggcctaaagtggtgtttgatcagtgagaattggaataaacccagctttgcctgaacagttgcgaagtactgagttacatcaatgcatattttgtaacaccaaaaaaagatgtattatcctaatggatgattgaacgaaggcattgtatatcgatccccaatggcccaatctttatgcacatactgacttgatcaaaactcgagatttcctcgtgc

SEQ ID NO: 31257 - DNA, 155 bp, Zea mays
  Clone ID: MRT4577_128515C.1
gctggctcgtctggccgtggatccatgctgtgttggcgccgacctcgattctgtcagcgtgtttaatgcgggcctttttgtggcggtggtggccggcagcaatatgctgctcaatggtgggcggccgggagagccataggacccatgccatgccg

SEQ ID NO: 31258 - DNA, 271 bp, Zea mays
  Clone ID: MRT4577_128516C.1
gggaaaattatagtcatagctaagcttatggtatctttcaggtaggctaacagcactttcttagttggggaagtgacagagtcttagatatatttaaatagtttgcaaaaattctttgagcttaagagatgagaatatgcgaaaatatgaacaagtagtttttcaatgaataataaacaggtgtatgtttgcaaataaacaggatcaacatgggtgagcctaaaatgtagagtgttatatgcagagagggttgcccaggagaaagagaata

SEQ ID NO: 31259 - DNA, 307 bp, Zea mays
  Clone ID: MRT4577_128517C.1
atgtacttgtctcctccacagttattaagccgcccatccttgtagcggttatatcaggtgagaaacacacccacactgtcaccagaggacagacagcgggcggcgtacgcagtcgcgatcacgagcacggacgagcggtcacgcgaaacatcacagtcaaaagagaaacccagccaacagactggaggcgcccatgcgcgccttcattacaaacacagaaaagaccgaccccacgccagatcagagagtccggcgcgcgcgcgctcgcgtcgctcagaccccagagagagaccagagcagagcgcgc

SEQ ID NO: 31260 - DNA, 1116 bp, Zea mays
  Clone ID: MRT4577_128518C.1
atgacctcgtctgcctgtgagccgtctcctgtcctgcctggactctctccctctcattcgtcaggtcaggatgtcgcgcacgaagaatgtgtcggtgccaggggaggagatgacgaggaccctcctcgccccttcaggcaggagcgagatgagactgaggtgcgaccactagctgtggatcccaggttgtttgatcttcagcgtgctacagcggcacgggtacgtcggttcagacatgtacccgtggagacttggctaccggctcagatagaccctgctacagtcgatctcttcagtacccggatacaggagaccttctttcgagctcagatgtctgcccagattgctctgcgagtgcaccggcttttggatcttcctacgtttctgctagccgtcgatgctgactctgaggtacacctctcatatctgcctggacttctcactcttttgactaccagtggcagatatgttgaggaatgggtccgatttttctatgcttttgtatggatcgaccctaatcaccagtggatgaggttccgctttgagcgagaggatgttacacttcatgccagccagattcaccagctgtttggattcaacgaatcatcgactcgtcttcacagcttgtgctacagcacctctaatcctcctcgtcgccctcatggcggagttgctcctgagtttgatgttgttgacttcctcatttgtgagatcgaggacaccgtactggatggtcttcgtgcccggcgacagctaccatatgctcactatctctgccacatcttcgctcagctgattcgaccaccaaagttccaaggcactcttgaggcctctcgcctcctctttggctcctaccgtcccacccctgaggacctagtgtcggcacctgctccagtgattgacactcaagccgaggataccacttttcatcagttcgagactcagggcgcagcagctcctgacgatgatgatgatgatgatgatgatgatgactttgggattccacctccgcgtccccactcacatgatcatgaggtcgggagttccagtgttgttcctgctgcccctcctgcggttgtccctgctctggctgctatccttcagactcttacatag

SEQ ID NO: 31261 - DNA, 340 bp, Zea mays
  Clone ID: MRT4577_128519C.1
ctgcaggtaccggtgccataatttcctggggcgggggacgcgtacgtatcttcttcctctcaactatctcctccttcctgcatgcatcacacatacaccccatgtgcgacggaacggatcggggggcatttatccatttaccattgcgtgcggtgtgtgccattgccttggttaattatggggcgcccggtccgggtgtgctctaaactggtaaccgactctcccgcgcgcgactcaagggggacacggcgttcttcatcgaggactgcagggaccagcataaggacatggactatgctcttcacgcgggggggcggggccaccggctacttcgctcttc

SEQ ID NO: 31262 - DNA, 352 bp, Zea mays
  Clone ID: MRT4577_12851C.1
cttctctggcttaaagcgaccgacttcaattccaaatgccaattcttaaaccattcatcaagggttgatgggaggaaacccccaaacatttccccggacacaaacaaaggttttttaaaaccacaaccttgctttgaccagccaacaaatttttgtcagcccattagtttttctttttctcgcggccgtaattattttcccccttttcggggaccctcttgcaattcttttccaaggccggcaattcctcttgtgccttggaaaaccccccttcttttttcccttccccccgcccaattcacaaaacccccctttggttttattagggcccactttttttttgtgcgtgaaa

SEQ ID NO: 31263 - DNA, 445 bp, Zea mays
  Clone ID: MRT4577_128520C.1
aggatcggcgcggccgtcgggctcattcgtggcggccgtaacatcaatgttggtaacaaaccattctggtgcaacacaccaaaatctatctattcttcatgcatcactctccaacagtagctactgctatactcaacactcaagacctggctgtacttggccggtgttcataaataatagtttaagaacggtttgatggggctgactttggagttgcaagacaatggcgcataatgccttaaatcactgagaggtcttcttttggaaaaaagcccaaaaataataagggacgtctttctttatgacagatccctccagcttgttgttttggaaggcgaactggacctgggacacgtcttcctccggatggaaggcatccttcaatggtgggatgatcttctgctgaatgatctccccgcgtacctgcccgggcgggcgatagaat

SEQ ID NO: 31264 - DNA, 209 bp, Zea mays
  unsure (1)..(209): unsure at all n locations
  Clone ID: MRT4577_128521C.1
ctctctctctctctctctctctctctaaatagtactctctcactttttatgactctctcnncccccnaccctccactacattcaacacaaactccataacactcactctcttctactacactctcctatacattctcaacaactccaccaacacccacttacacaaccacttacccataacataactataaattaactcccttaaccca

SEQ ID NO: 31265 - DNA, 1890 bp, Zea mays
  Clone ID: MRT4577_128522C.1
gcgacccctgcgacgcgcatttgttgagaggcggcctactacgaactaccgtcgatggcgttcctcgcgcctccgcagttcaagtggcccctttccacccgtgcggcggcggtgttcagggagccctccggcggcgcaggctcccgccccagtcggataaactgttctttctcctccacggcagtcgtcgatgcagagtgcttatccgtcgggccgccaccttctcctcaccgaacccttccgggctgtttcggtgaggcacttcttaacaaggaggcagtggtggcggccgcggccgcggaagccgtcgctctggctcgcgcagcggccgaggtcgccggagaagtcgcccggatggcgcagaatgatcacccggcggccttaccgccgcgcgatgacacggtggatagcttcctgtcaagagaggtcctccgctccgaggtggggctggatgccaggcgcgccgggctcgtcgaaatgctggagggcgaagagcacagcagcattttcagcgacgaatccgaggatgacgatgatggcgggcatagcatagccgtaacggtgaagtcggcgcggcggtccgagagaagggctcggagagtgagggcagcgatgaagacggccaagtgttccagcagcatgaagcccgttggagcgtcctccacaaggaggaaacggttgaagggttgcctgactcctctcgggtgcttgtacaagatgaccggcccgaggcttctgacggcggaacaagaagtcgaattctcagaaggcattcaggaccttctgaaactggaagccatccaaaaggaggttgcgcagtataatgctggtgaaccaacgttttcccagtgggcggcagcagccggaaccgatgagaacactctgcggagacgcctgaatcatggagtctactgcaagaacaggatggtgaaatctaacgtgcggcttgtaatctcgattgcaaaagaacacgaaggccccgggatggagttctctgatcttattcaggatggaatgcaaggcctgataagaggcgcggaaaagttcgacgcttccaagggttttagattctccacttactctcactggtggattaaacaagcaatacgcaagtccgttttagaacaaacccagataatccgcctgccggcacacatggctgaagcgagttcccgagtgaaggaatgctgccggcgactcggccgtgagctgaaacggctccccagcaacgaagagatcgcggtggacactggcatgacgatccggcgggtggaggcggccatgagcctcccgaaatacagcgtgtccttcacgagcaaggtcgggtgcacggacgtcacgtaccaggagatcatgccggacacgagcgccgagacggcggaggagacgctgcaccggtggctgatgaagaaggacgtgaacacggcgctggacagcctgagcccgcgcaagaagcaggtgatgcggtaccggttcggcatcgagggcgggcgggccaggaccctgcacgacatcgggcagctcatgggggtcagccgggagcggatccggcagatcgagctgggcgcgttccggaagctgcggagcaagaacaggttgcagtcgctgcagcactacctgcggccggcggagagctggtagccatgtcaggtgctgcgctacgactacgatacgacttcgacgagaccataacccgcatcgttgcacatggctttccatgatgtatgtatgtacgccgttcctatttacaggatttaaagtatacgcgttcgatccattttcttgtctatgttatatagcactatgtgtataaagaagacgaaacaacatttttttaacgcaaaaaaaacaagaattatggagatagactataaaaaaaaaaaaaaaaaa

SEQ ID NO: 31266 - DNA, 2498 bp, Zea mays
  Clone ID: MRT4577_128523C.1
cggcccagggtgccccaccaggtcgggacaaaacttcatcctcaattatcctatggcgtcgtcgtcctgacgcgggggcggcgaggaggccggaggcaataaacaatcgcgccagcaaggggctctcccgtccaatcgcatcgcctgcacgagccttatcagtccacgaccatcatcatcaccactcactgcagcggcccgcactcggccgcgactgcgagcgagccgtcgccgcgagatccagcgccgtcgtcgcgcctccgccactgccgccgccgccgccgctgcccaagatgccgagcccgacgatccggaggctagacgtggcatcgccggtgccggcggacatcgacatcgccaactccgtcgagccgctcccaatcgccgacatcgcagcagagctcgggctccggcccgagcactacgacctctacggcaagtacaaggccaaggtcttgctgtcggttcttgatgagctcaaggcgcaacaggacgggtactacgtcgtggtgggcggcatcacgccaacgcccctcggggaggggaagtcaaccaccaccgtcgggctgtgtcaggctctcggcgctttccttgataaaaaggttgtcacttgcctccgtcaaccatcacaagggcctacctttggaatcaagggaggtgcagctggaggtgggtacagccaagttatacccatggatgagttcaatcttcatctgacaggcgatatccatgcaattacggccgcaaacaatcttcttgctgctgctattgatacgaggatattccatgaaaattctcagtcagataaagcactgttcaacagattgtgtccggcaaacaaggaaggcaagaggcactttgctgacataatgttccgacgtctgacaaagttgggagtttcaaagacagaccccaatgagcttacaccagatgaaatcaggcgttttgcaaggcttgatatcgaccctgagtccattacatggagacgggtgatggatgtcaatgatcgtttcctgagaaaaattactgttggacagggccctgaagaaaaaggtatggtgagagaaacaggctttgacatatcagtagctagtgagataatggctgtattagctcttacaacttcccttgctgacatgagagaaaggcttggaagaatggtgatagggaacagcaagtcaggtgagccgataactgctgatgatcttggtgttggaggtgcattgactgtcttaatgaaagatgctattcatcccaccctcatgcaaactcttgaaggcacaccagttttagtacatgctggaccatttgctaacattgctcatggaaactcttcaattgttgctgataagattgctttgaagttggttgggaagggtggctttgttgttactgaggcaggttttggtgctgatattggaactgagaagttcatggacatcaaatgtaggtatagtggattggtgccgcagtgtgctattatcgtggccacaattagagctcttaaaatgcatggaggggggcctgaagtggtggctggaaagcctctggatcatgcatatgtgagcgaaaatgtggcccttgttgaagctggatgtattaatcttgctaaacatatatcaaacacgaggagttatggagttaatgttgtagttgcaatcaacaaatttgcatcagatactgaggcagaaatgaaggcagtgcacagtgcagctatggctgctggtgcttttgacgctgttgtctgcacacaccatgcccatggtggtaaaggagcggttgagcttggacttgctgttcaacgagcatgcgaaagccaggcagaacctctgaagtttttgtatcccttggaatctagcataaaggagaagattgagtcaattgctaagttctatggtgctagtggcgttgaatattccgagcaggctgagaagcagattgagatgtacaccaagcaagggttctccagcctccccatttgcatggcgaagacccagtactcattctcacatgtcccgtccatgaagggcgccccgaccggctttgttctgccgataagagacgtgagggccagcatcggcgctgggttcatctacccgctcgtgggcaccatgagcacgatgcctggccttcccaccagaccctgcttctaccagatcgacgtcgacactgccaccgggaaggtcatggggctgtcatgaattgaagtccctgatggtatcattcagagaacgtaaattcggggcattcctggatcgagttaaataagagccgttcctggcatcctgcaagttcagtgccgcttcctttttttacttgattttgtaaaccggagactgtaaatgtgcttgaaccgtgcttttagacccatgcctcaaatcctgcatccaataagtgtctttgaagcagcctgaggctgctgagactgttgaccaatcggattctatgggccagaactatgagttaggactctgcctgaagtgcggcccataacaata

SEQ ID NO: 31267 - DNA, 681 bp, Zea mays
  Clone ID: MRT4577_128524C.1
attgggtacctcgaggccggccggggacactacttccagtaccacccactccgtgctagctgaggacggtacagcgcgcacagtagcagacgactgacgacacaggctgccacacatgggatcccagctctccgccgtcgtgccccgagttccacggcctccagggctacaccgtgcccaggtccgcgatggcggcgctgccgtccgcgagggtgggcaggtaagaggtcgtagtcgcaggtgatccgctgctactacatcggctccgccaccaacctgatcatggtgaccaccaccacgctgatgctgctcgcgggacggttcgggctgacggcgtcggcgtaccgcaaggcgacggtggtgctgaaactgtaggcccgcgagtccggcctgcagacgcttgaccccgtcgagctcaccctcatcgacacgctgtcctgcggcgtcgtctggcacatgctctgcgtcggaatcgtggtcaccctcaagaacagcggcgccctctaccggatcattggctagatccctgcctcggctgtggtaagaacagaatcggcatcctcgatcgcgcctacggacggcacctgactgcaggaggggactttgaaacgtgtagctgcggacgccgagtacatatgcatccatcttggatccgctggacatatagatcctgctgctcct

SEQ ID NO: 31268 - DNA, 590 bp, Zea mays
  unsure (1)..(590): unsure at all n locations
  Clone ID: MRT4577_128525C.1
agcagtggtaacaaggggggggggcgcggggcaaactcataccaattgctaatgatttaagagaaaggccacttaattcaaataatgcataccaccccttcccttaagcaaatagaggccaaacttcagaatgattgctcttgcacaaaataataaccaagaaaaataagaactggtgggggtgatgtctttcaaatatagtggtagtagaaagcacccatttggctagaaacttgagaaaaccatagaaaaataattaaaaggtattaatgattagaagtttgtatcaagtcatgttataacacttaaaagccagcaaaaacaagttttggggaattgcccactgttaagtaatagttgtagttcaaagcaccccttctgccctagaatttaataattttgtccagagaaaactactcactttctgatccccaaattttgagacagagaaacatataccagtacccagtcactgtaatgtttgcagaatttttagaattttataaaagcaacttgtagttcaaacctactccaaannanacnnnnncaaaaaacaaaaaaagtactctgcgttcgtaccactggttaag

SEQ ID NO: 31269 - DNA, 255 bp, Zea mays
  Clone ID: MRT4577_128526C.1
cccgtgtgcacccaagagtcgtcgacccgtaagagaaagccgcgcggctgcgtgcgacagcgggaagaggggaagcggatacggcggccgagcacgccgccgtgagggacgaaggacagggcactcatggccatcgagcgcgcccagcgatgcctagagaggatccgcgccgtcaaacagagtttgcttgccgcctggatccactgatggggggaatgcaatcaagggtggagagacgagagcaggaagaaggaa

SEQ ID NO: 31270 - DNA, 153 bp, Zea mays
  Clone ID: MRT4577_128527C.1
cgactatagctagggagcccttaatggcgaactgggtggcaagggccggccgagatataagcatgggataacaaaataggggatatttgatcaggggatgatgataatagggtaatcctacatatgagcagcaaactagaatcgcctaagggg

SEQ ID NO: 31271 - DNA, 428 bp, Zea mays
  Clone ID: MRT4577_128528C.1
caaaaaacatgtttggtttcaaaatcagtggcagggtaaaaactttggcctttagtccacacttgcttgcggggtggggttcctttttcccatccatgtccatgggcccagaaaaacggttcggtagacgagctgaaaaaagctaagctgcagcagcttgctaaagctaactaaagcaggacacaaacttccaggttgggctaaacgtacgtttgcctgcttcactgcttgcatggaatggatggatcaaaacccctgggtctgggtttaattttttccagctcccggggggcgggcggacggtcaccattggggtaatacctaccacaccatgttgggctttcacccgacgaggacttaaacggggtaaatgatgcccgggatgtttcccaggatggggagcagcaggcaaatccagaactcaaccc

SEQ ID NO: 31272 - DNA, 130 bp, Zea mays
  Clone ID: MRT4577_128529C.1
gaggcggttaagctcctccccggcaacgtattcaaacctggccacctgatccatatcccgggcgtttttaccatattcgaagcggacatcaaagagcacgcacgtcacgacttttactttacgctcaagg

SEQ ID NO: 31273 - DNA, 341 bp, Zea mays
  Clone ID: MRT4577_12852C.1
gacaactgttgaatctactgtgcgactccgtccagtttaaatatgactgaagaagagctgacgtagctccagatgcaaactaacaaaaccatctttgttcgcttgcgctaacttaaccaaaaatgcctgtagtgcgactactggccaggcataattgccatagcgcacatgctgctcgccgcataagatatgactactctacatgggaccaaactttactctatgatcctcattgctcaccatatgagccgaccgaagagctaccttgtttgcaccttatcgggatactgggcttgctctgctcgtacgcgaggatcactggggccgagcctctacgtgct

SEQ ID NO: 31274 - DNA, 1106 bp, Zea mays
  Clone ID: MRT4577_128530C.1
ttcccattgcagcattgtaccctatgttcatgccaccatggaagggcttcgtattggagcaccgattatgcaggtttatcatgagaaatcttttatcttacctgatgtttcaagggtgcttgcttgcctttatgagaaggatgtcaagtttgagactcacacagcctcatacaggagcctactcggattgcaggcatcatctcatgctccagttccattctatgaaggccctacttttctagaagaatccagagaaatctgccgttatatagcagaaaagtatgaaaatcaaggatatccgttcctccttggaaaggatgcccttgagagggcttcaattgaacaatggctccacaacgaggagcatgctttcaaccctccgagccgggccttgttctttcatttggcctttcccctgggtgaaggagaagatgatgatattgatgttcatacaaggaagctagaagaggttctggaagtttatgagcaaaggctcagtgacagcgaattccttgttggaaacaagttcactcttgccgaccttgttcacctgccaaattcccactatatcaaagcatctaacaagtttctttacctttatgattcgaggaaaaatgtaaggaggtggtgggatgctatttctgaccggagttcttggaagaaagtgctgaggtatatgaagagcgtggaggagaagaacaaacaagaagaactcaagaagcagcagcagcagcaggaagaggctcctagaacctccaccgacccaactcgggtagactcgagaaagcagagcagaacagagcctcggacaatattggttcctcctgctgataacgagtcatcagcttcgatagttcctcgaacaaagaagcctcttcctggtgatcacttagtgtctactcaacaaattgatggtgttggtatgccagccacaaattgatggtgatggtcgtcttagtggtgtttgtcttgtcttttattgtttggttctttaacaagagttatatttttaccttctgaccaaaaaaaaaaaaaaaaaaataaaaaaaaaaaaaaaaaaaaaaaaaaaaaaaaaaaaaaaaaaaaaaaaaaaaaaaaaaaaaaaa

SEQ ID NO: 31275 - DNA, 287 bp, Zea mays
  unsure (1)..(287): unsure at all n locations
  Clone ID: MRT4577_128531C.1
ggggcgaccagcgncgaaagcggagaaagcgcccaaaacaaagagacaacgaaaggaccggcgggaaaaaagaggaagcatgagaggaggaggagccacaccagagaggcacaaaagaagacgaacaccaacgagagacagggggcccagagaaggaagggacgaaagcggtaaggaaanggggacggaccagaagagagggggaggagcagaccgcgcgcgaagagaaggcccaaaaacaacaggcggggagacggacccgcaacacgaaaaaaagggaaaagaag

SEQ ID NO: 31276 - DNA, 476 bp, Zea mays
  Clone ID: MRT4577_128532C.1
aaaacccaatcaatatattgattatttctaggaaacacccctcggtatgagggcccccttatcgagtccctctcatatgtaatctaaaaaatggcccccccaaccatgggttgctgcccccacaagacaggattcatcaaaaaaaactggttgtatggcaacaattgttgctgctgtaaaaaggcggccaccaatgggttaccccccccccatggattaagtaaccgttgcccctgttgtagggcccccccaaaattccacaaaatcaattggttgaatggaaacaactgttgcaagtaggcaacagggtttgccacaactagttgagtcaaaactggtacaatctgttgcaacaattgttgttgcaggtatttaggggcattgcccacaacgagcgggctaaataaaagcaattgttgttgttgtacctaagcggcagggttcaccacggctagttgactgaaccttggcaaaaa

SEQ ID NO: 31277 - DNA, 370 bp, Zea mays
  Clone ID: MRT4577_128533C.1
ctgaaaccttctgtctcggaataaactcctacagaatgtgaaaagcatggtcagtacaaaggttcaaccagttccgaagctacgcgcacggaagcttcggcttaacggctgagaaaggaaccaacttaaaggggaataggctatgtatttctagctgtattatctgtaagtcaatattagacatagagggaatgaatgtaattctacacaggctgtgccgtgtgcttttaaatagtttaacagcaccccccttctgttcacgttggcttgtacttcctattgcgtaacgattgtacttgcaccttctgtcaggcccaaggtacaaatgaaatcctatgtggccgttattcattcgcgattatattttaaa

SEQ ID NO: 31278 - DNA, 248 bp, Zea mays
  Clone ID: MRT4577_128534C.1
gcggattgaacaggtttacagtttcgctcccgaacaccccgcgggggcttttctcgagacgctggagcagctactcagaaaaccattccatcaccaggcaccagccgatcttcatacttatgattgttactgtaactaaaccgagtgcggtcagcgccgttctcggctagatggaagttgaggcataccgttgccttttactagtggcctttcttgagcgccacctgagcgagtccgttcgtatcgat

SEQ ID NO: 31279 - DNA, 539 bp, Zea mays
  Clone ID: MRT4577_128535C.1
ggctcccggtataacaaattataaacaataaagaacatgggggagaagtacttaaacatagttggttagctcaaagcacaagaacacacacatatacacatatatcctgatttacatatgtattctgaaactcaaaattttcttagaaacaaacattaaattaggtaccctggcccctgggctcctcaatttcactcgtcatctgttctacttgacttgtaacgctgagagcttgcctttgagtttgtatgcatctgtggtgttgaggatgatttactgtcatcttcatacatctcacattgatcaggttcatctgatgcttccaaatgcagatgagttggaatcaatagctctgtcaccctcatccactgccatggcatccactgacagctaaggtgcttacacttaaggagtcaagttccaaatcaaaatctgaatatgaagtcccatctttgtgtaattcttttgcacaagaactatcctgaataagattatatacaaagtcatttacattaaactaacattcttagatgagggaa

SEQ ID NO: 31280 - DNA, 390 bp, Zea mays
  Clone ID: MRT4577_128536C.1
agaggaccagggttgtatatgcattatactagaaaacttagattcacacagaaggggagccacctttggagaaaccgtgaaaaaggcaaagcttttcccgccaaaaagtcataccaagcttaggtactatgctaagggggcgagaacatcgagcgccaggacaaaacccgaaaaaagaatcgatatgtgcaaccaaggagaggaaaactggagactacggcaacaaaacctatctgaaactcacaacgctggcaggggaaatttaaggccatggggagaaaaggggatcgaaacgcttatatagggcccagacattataaaggccagagcctaaatgggacccatgcttcttcatgcagattcccaagcacaaggggcctcagatatttt

SEQ ID NO: 31281 - DNA, 741 bp, Zea mays
  Clone ID: MRT4577_128537C.1
gggtacctcgaggccggccgggccgggaacaacagccaatccggaccgcccgcctcctctctcgcgttgtcctcgttccgccctgctccggttccccaatccttcgccgccttcgttgcctaccgtctcctccgagccagatcgatacaatcggagccgtgatccggtcaacgcgcggagcgtgttagccggattctctcgccgtcgcctcccctcccctcccgccgccgtcaccgccgtttctggttgaccgggatcagccgagttggatctcgaggcgtgaagcgttgcgggcgcccggcgaggatacgatgcctgcggtgctcgccgcattcgcttgcctccgactccgagcggccgctgccatcgccttcggggactcctccttcctctgctcccatcgccttaagcatcattttagtagtaattttagtattagtaattgtctttgaactttgcgttccctccgtcacccgcacccccctcggtccttagcttcgctcccggtttcgttctggttgtgttcgatccgtggcttctttggctctgtcgcaagatcgaaaggaggcaaggtgttttgacgtgttcattaccacctacaagataacagaaacttgtatttgtaatttgatatcaagcttgtggatgggcgaaccctcagcggacttcagtgctgaagatgttagtagcatctcaggtccttgccacaacacttgtttaaagccctgttgcgagcatggt

SEQ ID NO: 31282 - DNA, 1540 bp, Zea mays
  Clone ID: MRT4577_128538C.1
tgccatcgccttcggggactcctccttcctctgctcccatcgtcttaagcatcattttagtagtaattttagtattagtaattgtctttgacctttacgtttcctccgtcacccacacccccctccggtttcgttctggttgtgttcgattcgtggcttctttggctctgtcgcaggatcgaaaggaggcaaggtgttttaacgtggttattactacctacaagataacagaaacttgtatttgtaatttgagatcaagcttgtggatgggcgaaccctcagcggacttcagtgctgaagatgttagtagcatctcaggtccttgccacaacacttgtttaaagccttgttgcgagcatggttgtgcctgttgggaagatgaatatgttgaagcagtaatatcttgtgtgcaagatgatttggcggttgaggaaattggaatcgctcttacagaagtgacgacgatcgatctgttggcggttgacgaagggtcaggtctgcatgaagattctgatgacgattacatcgatgatccaattctttctctggaatctgattcaactgatgatttagtgaacgttgattttatatcacctgcctttcctattggtggtgtaacagaatcatcaattagcaattcagttgctgggaattcttcaattaatggcactccaaggttagtttctgcaatgaaaggaactcgtgccaagaagggaatcaaaacaaagttgagcgtttcatgggccactgatgtatatgacccacctattacttcagactcgcacactgtgaaagggcaccgtaagagttcaactaagggtaactacaaatacaagtgttccaagagcagcagtagcagtaaccacagtaccactggaagcaaaaaggacaagaagcattctaggcaccgtagcagcagtgagggtggcagcaaaagggacaggaaacattcttactgcagtagtgctagcagcaacagtagcagagttgttaccaacggttctctatatggtaacacatgcagtggcggtgggatcagcagcagcagcagaactacgacatgtgttcctgaatctgccaaggtatctacattgatggtagctgaaaatgcgacaccacaagagagagttcctgtattgaagacaccggaaccaatcaaatgtactaccagctacggcaaagagaagccatttgccttgctgtcgcgccagtttccccctgcaagatacaaggggatgttctccttctggagccaaaaccagctggcttcttgataatctgctatacagaaagctgctatacagaaagctcacctggaagtcttggttgctaattaaattgcactgcatctgtgattgttttttggtgtccttctcttcgttgccatgtttcttttgcctgcgtctgaaacttcagagatcacgttttcgaaaattgctcagcgaagtgcttgtatatttgagtttatgttgttactatttcctcatcgaatcgtgtaattcgcttatcaatttcatcatgtgttttgtattaaaaaaaa

SEQ ID NO: 31283 - DNA, 228 bp, Zea mays
  Clone ID: MRT4577_128539C.1
aagagggggagcttgtacgagcggtgatacatacgcaaacctacatcaaggtacaaaaattttgggcgccaaaaaacataatcccacaataaaacgtcaacatgttaaatcactttaaacaccaaacatggccagtgctactaaaccttttgaacaagtacagcgaagcgtgtacatggattaaatctgcttaaagaaacatccagctgtggtacacccatccaaaca

SEQ ID NO: 31284 - DNA, 511 bp, Zea mays
  unsure (1)..(511): unsure at all n locations
  Clone ID: MRT4577_12853C.1
gggcccccttaaatttcctccccatggtccaaaggcccccctaaaggcctaaaactttaaccttcccatttttgggcccccaaacctttaaaaatttggggggaacctcccttaaccttctaaaattattgcgcgggtaaaaggggggtccacttttttaaaaaaaacttcccttttaaaccccccaatccccaaaggccggggaccctttgggaaccttttttccccccaaattggcccaattcctttagaaaacctgggccccccaaaaaaaaagttacccaaagggccctttcctgaaccttttacccgttttggcacccccccccccccaaaattttcctggttaaatttcccgggcgaaaccttttttaatcccgctagcaaaaaaaacaaacggnttaacctggccaatccgnnggggaaacccgaaacaccaaaaagggttccgcggtaaccccttgttcaccaacccttgggcaacgaaccccaaaatttttttttttggccc

SEQ ID NO: 31285 - DNA, 829 bp, Zea mays
  Clone ID: MRT4577_128540C.1
gatcgaccacagcacagcactggccagtccaaaatgtggcaaccaaaatacctcatcctcgtcgcggtctcgctctctgtccttgcatgcgcggtggtgggagacggtggcggcaggccactggtgacggccgtcaccaaggacgcggccacctccctctacaccatccccgtcaagtccggccgcccgctggtcctcgacctctccggccccatcgtctggtccacgtgcgccgatggcgccccccatgacacgctcgagtgcaacaacatcgactgcatgcgcgcgcaccgcttccacccgcccggctgcccgcacaccggctacggcatgcccgacgtccacaaccccttccggtgcaagtgcacggcgcacccgcacaaccccgtctccggcgacaccgcgtcggggaacatgacgcgcgtggcgctctccgccaacgccaccgacggcatgaacccgttgggcccggtgtcgttcaccgccgtgacgtcctgcgcgccgaacaccctgctacaggggctgccggcgggggccgtgggcgtggtggggctcgcgcgcttcagcctcgcgttcccagcgcaggtcgcgggcacgcagggcgtcgctaactcgttcgcgctctgcctccctagcaacccaggcaacggcgtcgccatcttcggcggtggcccgctcttcgtcctgagggcagcccatctcggagatgctgggcggcagcacccccctccgcaagcacggggactcccccggctactacatcagggccagcaagggcatcaccgtggacggactgcggatactgccgggcgatcacgcaacgctcacc

SEQ ID NO: 31286 - DNA, 959 bp, Zea mays
  Clone ID: MRT4577_128541C.1
cgctagggaggaaaacagagggatggttgggcgtcgaacagaaaggaatacctagggaaatcgccatgggaaacaggggcatcgacgacaggacgccaggaatcgcgagctacaggaggagaaactcggcacagcggctatggccgagcagagggccattccgtcgagctggaagccgcggcgccgagcagagcgagaggagcagatggccgtgctaaagcaccacggcaagacagggagagaagcaagggggcagctgggctcggcaagcaggctgagacgctgcgcaggggaggaagacgccagaagtttgggcgtggtggccatggcgagcagggatggcgcgcacagctgaggaggaaaattggagcacgcgacactggaggatagcgccacgggagcagccaaagggcgagcaggggcgcgcgcgtgccgtggttctagtcgcggcggaaaaaaatggagcgcgcaggcagccggacttgcgcaggggcgcgagatccatgagctgggaagaaaaaggaccagctggggagagctcagcgcagtggagcagggaggaaggagaggggtgcacgcccgggctgagagctgggcgacctgcgcagggaagaacgccatggaggggcgcggctgggggcgggtccaagcttgacgacggcagccatggggagcagggccgagatccgagcaggacgcggcagagagctggggctggaaatccgagccacggcagaggactagcgcattggagagctgagggagagggagaaggggagctcgcggcagccatcatcggcagagcaagctccgacgagggagaaagacaggcgcggcagggaataagccggacgcgacgagcttggggaatctcgagcgcgccatggagggaccgagctgggaatcgcgcgcaaacttggaggagaccgcggtccgagcgccgcgacgaacgtatttta

SEQ ID NO: 31287 - DNA, 258 bp, Zea mays
  Clone ID: MRT4577_128542C.1
gacgcgttcccttcgtcttctctggtgtcaacacccacagagcggcttggattctagccggcgggcgccccttcctcctctcatcagtgtgctccgcaaccaatcgaatcgccttgccccaaaccacaatccgtcttgaagctacagaaggaagtgaggggagtgcagacgcaggagtcaggtgctggaggagctgctgcggaccctggcctatcttccacctgcgtgcagaggctaccgcctgccggtgtcaagtct

SEQ ID NO: 31288 - DNA, 367 bp, Zea mays
  unsure (1)..(367): unsure at all n locations
  Clone ID: MRT4577_128543C.1
aaacacaaccaccaacacaaaaaggganaggtttttttgtacaatcaaaataaacccttcccctctcgaccacgcaacgcgaatacattcctggatacgttaaatacagcgcgcgttgctcaaatacaatacactatagaattaataacgtaccacccaaactaaaacgcacctgactaacagattctatttattataacaaagaataaataaataaagcccagaagccggaacatgacctcgtgcccaaacggtgtgcaaccgcatcaaccacccttactgctgttgcttgctgccggtcatgccctatcaaaccttttttcaataacacttgcccatgacccccttccattttgcactccccgcc

SEQ ID NO: 31289 - DNA, 154 bp, Zea mays
  Clone ID: MRT4577_128544C.1
aaaaaaccgggggcttttgtgtgaatcggttgcagctagagatgctattttttcttattcttcttgtgactgcagtaagaccacacactaaacttagttcattcgtatttgtattggccaagtaagcataaaatatacaaccatagttggtctt

SEQ ID NO: 31290 - DNA, 277 bp, Zea mays
  Clone ID: MRT4577_128545C.1
cgatactccgcacgcggcattgtttctgttttgcgttttggcccctcgctttcccccctctatactcgggaatcattctctttttcccacctacctggagggatgtgggaagcactttgggcggctcgcttatctcaatgcgaccctagcttatgttgggctttggatgaaactctcaaaagaggaggcgaaaatggacaggctgatctcagtggtgatcgctgatggattttccctccctcacttttgacaactaatgccccgtcatgcatgtcga

SEQ ID NO: 31291 - DNA, 291 bp, Zea mays
  Clone ID: MRT4577_128546C.1
gaaagtttgtgagggcggcggcaaagcttcgcaggagacgctcaatcctggttctcgaggctgagcagggatttacacgacaccatgtcgagcacaacacgcgcgaccaacgacatcgagaagcgcgctcacgcgcaacgtccaagcttcgcatgttgaccagttcagatccacgagttcaaagaggccttcaacatgatcgaccagaaccgggacggcttcatcgacaaggaggacctgcacgatatgctggattcaatggtctataatccaactgatgaatacctggac

SEQ ID NO: 31292 - DNA, 548 bp, Zea mays
  Clone ID: MRT4577_128547C.1
gggtacctcgaggccggccgggcgcgcctcctcagccatacttactggcatactgggctctggtcccgagcctgccttggaggtcgccatcgccgcgccggagagccctggcggcatggatccaccgtccccacggcgcccggtttggatccttcactaacgtcaacttgtgagtcctctggaagctctgtgtgcgcccgcacagttagttgccatggcgccgtggatctgtcgtcgctcatggcggctgccttgcatccttccccggccatcgttccccacagttcgccgtcggtgatgaacccccagcacctttcatctctttgtcctcttcaggttgtttgatgctgctccttttgtatgccaccaatgcttcgaagactattatatgtagtatgctggtttgaagactatatgtagtatgctgtgctttggagcctccttttgtatggcgactttatgtatgccaccagtgactgtatggaaattaagctgtggcttgtttcaaaaaaaaaacaaaaaaaaaaaaaaaaaaggcccctagggcc

SEQ ID NO: 31293 - DNA, 389 bp, Zea mays
  unsure (1)..(389): unsure at all n locations
  Clone ID: MRT4577_128548C.1
ctctcacaagtcacgagccagtgaagcgagcgagcgagcgagaagccctggccaggcgtaactggtggtcagggttccagtccaaagtcgccagcgctgactctgactccagcatctgacccaagtcagctcagcagtcagtgaagtctttagaccatcacaacgcagaaaagtccaatctgttcgtgaggcgcccaattatgcatgggggggccagtcaaaagaagaagacgaagaatccaagnccatccagatccaggcacgtttataaaggacagtgtaagcctcgctggtcgtcatcgtcactcgcgcctcggtgagctgcttcaattgaaggctgcacaccgctgcaggctatatagctagtctgcagagatgctngngaggag

SEQ ID NO: 31294 - DNA, 407 bp, Zea mays
  Clone ID: MRT4577_128549C.1
acggaccgggaggcgcccgatcggcatgctaagaattttttgttttttctcgcgcttggctgctgcactggggcgccgggcattgctgcagcacaggaacgtcagacagtcgaggactacatcaaggcgttagggttctgactacgatggcagaaccttgcggatgctcagaaggcccgacaacaccgacgatgatagcgctcgagacactgccggcgatctatctgcagggggcaaacccagatgggcattgactgtggcttcattcagtccggctcaacatactatccactattgggaacatggtgcctgtaccattcataagactctacactgaagaaactagcaacgtttttgtgtcagaacagaccattctaaacttaaattatagaccacctctttgagcg

SEQ ID NO: 31295 - DNA, 297 bp, Zea mays
  Clone ID: MRT4577_12854C.1
gggaccagagcaagagcaaaaaccacccaattttttttggcaaacacctgattgacattgcaattttaatatggttccctgcgaacaactaccaaatgaaaacctgggaggcgaccaaaccggggggcggggggcaattgtgagcctatcctgctgacattgtagacaaaatccataacccattattattatcgtaagggggggggaaatgcaaggccatggcaccctgcgccaccacaaggaaagacattggtccaggaggacctttccgcgcatgaaaaaggcatatccactcct

SEQ ID NO: 31296 - DNA, 497 bp, Zea mays
  Clone ID: MRT4577_128550C.1
acgcgccatcagattgcaccgtctgctcgcgcagatgtaagccacctcccacaagcgcttctccttactcaggctccatctccggccgacgcaccgcctgctaagccgcaaagccggcgcgctcaggccgcgctactggatcgggtatggactccacgagcagaggcgcttgtatagcggctgctaggagcgcaaaacggctgcatatgattagtactcggggcctacctagcgttttaagcgcgttcagagctccacgacgatggtgcgctcttgttcttagtcacccgctcgggcgttgccgacggtttgcgtgcggcgccgcgaggcgttgaccgaacaggagatgcactgcatggtggcagcctacctcaagaacaggctcgtggagcggggggacagcgtgaacgacgccgagagcttgttcaccgggaggaaggagaacgtcatgcaccacctccggaaccccaggtatcgagctgctccgtcacgatgaa

SEQ ID NO: 31297 - DNA, 511 bp, Zea mays
  Clone ID: MRT4577_128551C.1
cgggatataatgcccacaaaattccttccaaacagaaacagcaccagactcctttcctttcgctggtcctcattggctgtatctcccgtaccacgaccgcctccaccgctgccgttgccttattacgccaggtgcactgctgcatgcttaggaggcttgcttgttcctaccacaggccttgtttgtttcttctccggtaacgagcacccgccaaatgcccaatgttgatgttgttgaccataggcttgatcagctaaatgctggagataagactgcacggatgcctgctccatgattgactaccttctggcagcacgtatgagacagctttactgaaactgggggggctacaccatcagactacgaagcacggaggaagaagacattggtggccaccaccatgctttgcttggacgaacaggaggcggacactacaggtgctttaatcaggactaaactgttcgggcgggaagaggaaagcgaactgtgcgattatccaaacagccggtgc

SEQ ID NO: 31298 - DNA, 202 bp, Zea mays
  Clone ID: MRT4577_128552C.1
aatcccttccacgggtacggaaccgctgagagagaagaagagatggccgacaaaggcgatggcccggccctcggcatagatctcggcacgacatactcttgcgcacggcgtgctggcatgcaccagcgcgcggagatcattgccaatgaccagagctaccgcaccacgccctggtacggagtgttcaccgactgcttgcgct

SEQ ID NO: 31299 - DNA, 176 bp, Zea mays
  Clone ID: MRT4577_128553C.1
ttttttattcttattttattagtggctgcctttatcttcatgcttgtggggtgaaataggaggaggcaagcattaatgtattgggtgttcttaggcccactgttactataccgttgttaataaccattgtgtaaccagcaatagatactgcatatgtggatatctaatccgatact

SEQ ID NO: 31300 - DNA, 950 bp, Zea mays
  Clone ID: MRT4577_128554C.1
ccggggggttgatgctggtttcccctctgtgcaagtccccgtcgtggagcgagtggctgtataataaagtgttgttaaatttgctttattactacgggaatcgaggcctggtcaaggagtgcttgcttcaacggtacttcagcaagaagctgcgtggggatgcacagtgtcctgaatccgacatagtgcgagccagtagaagtttacttgatgacaagcagggcgaaaatatctggcggtttcttcactcaataaacgagaggcatgacttaacagattcgttaaagaagctgcaatgccgcacgctgatcttcgtcggggagagctcacagttccacgaggatgctatccacatggccacaaaactggaccgcagatactgcgcgttagttgaggtgcaggactgtggctcccttgtgaccgaggagcagccccacgcgatggtgatgccaatggagtacttcctcatgggatacgggctctacaggccgtatcagctaagcagcagccctcgcagtccactgagcccatgctgtatatcgcctgagctgctgtctcctgagagtatgggtgtgaagctgaagccgataaagacccgggttggtatcagtttgtagcactggcaagcaagccttttgaaccagaatgaaaggcaggctacctgtcttagaatcctcttgcagttgtataacatggcaaatggccattcctgttggagataacctatatatcatgtacatcacaaaaaaaagggtataagagggaccctgtagtggaggtaacgggtaaccaggatgtgtctttgttcaattagtttgtgtagtcgccggctttcagcacaaatgtaaatctcaaagtactttgacaggaacaataagaatccatctccagggtttcagatgttcaaatttcatggcgaaaaaacttgtcgtcgataaaaaaaaaaaaaa

SEQ ID NO: 31301 - DNA, 2058 bp, Zea mays
  Clone ID: MRT4577_128555C.1
acggtatcgataagcttgatacccaattcgcggccggccgggactcgcgcacccatcacaccccctaaccactccacctccctcagcagccctcacggccactacccactgcggctgtaccacctgtacggctgcactgtccgtcgatcggctttgcaccacacgtccgcgcgctcgctccgtcggtgtcggtagccatggcgctggcggggacgggggtgttcgcggagatcctggacagcgaggtgtacaggtactacgccgacggggagtggcgcagctccgcctccggcaagtccgtcgccatcgtcaaccccaccacccgcaagacgcagtacagggtgcaagcatgcacgcaggaggaggtgaacaaggcgatggacgcggccaaggtcgcgcagaaggcatgggcccggacgccgctgtggaagcgtgcggagctcctccacaaggcggccgcgatcctgaaggagcacaaggcccccatcgccgagtgccttgtcaaggagatagccaagccggccaaggatgccgtttctgaggttgtccggtctggggatttggtgtcgtacacagctgaggagggtgtgcggatactcggggagggcaagctgcttgtttcggatagcttccctggtaatgaacgaaacaagtactgtctgagctccaagataccccttggagtagttttggcaatcccgccgttcaactatcctgtcaacttagcagtttctaagattggcccagcactaattgcaggcaatgctcttgtgctaaagcctccaactcagggcgctgtggctgcacttcatatggtacactgcttccacctggctggtttcccgaaaggtttgatcagttgtgtgactgggaagggttctgaaataggagattttcttacaatgcatcctggagtcaactgcataagttttactggtggcgatactggtatagccatttcaaagaaggctggaatggtccctcttcagatggagcttgggggaaaagatgcttgcattgtgctagaggatgcagatctggatttggtttccgcaaatatagtaaagggtggcttctcatacagtggccagaggtgcactgctgtcaaagtagtgctgatcatggaatcgattgctgatgctgtggtacagaaggttaatgccaagttggcgaaactgaaagttggcccacctgaggacgactctgatatcaccccggttgtaacagaatcctcagccaacttcatcgagggtctggtgatggatgcaaaggagaaaggagcaactttctgccaggagtacaggagagaaggcaaccttatctggccgttgctgctggatcatgtccgccctgacatgaggatcgcatgggaggagccttttgggcctgtcttgcctgtgattaggattaactcagttgaggaaggcatccaccattgcaatgccagtaatttcggcctacagggatgcatttttacaagagacatcaacaaggcaatcctgatcagtgatgcaatggagactggaactgtgcagatcaactctgcaccggctcgtgggcctgatcatttccccttccagggactgaaagacagtggcattgggtcccaggggataacaaacagcattaacatgatgaccaaggtgaagagcactgtcataaacctgccgtcaccatcctacaccatgggctgagatattcttgttaagtgttctatagctccatgagcaatgtagagagttaaatgtttcatagccacgtgagatttggacgctatttacacctcagttcttcctgcagaagatcttttgcagtttaaagaataaagtgcgttgaaagtatgaagacgatgcttttatatccttattactgttggcggtcaaatcctactaggttatatattatgttatgtctagatacatagtaaaagcgatacatctaaacaatcaaaatgtcttataatttaactttgaacaggagtacttagatgttagataccatcgctggacttgtgcagtgtatgcctaatatttcacctagaaagagttttgcttcgat

SEQ ID NO: 31302 - DNA, 445 bp, Zea mays
  Clone ID: MRT4577_128556C.1
tttgggctgctttatgtgcttggcccgaggcagatacaaaggaatcgttcgcgtaaaccgatattctgattcatacgttactacaaacgggaaggataatcgagaagagaggaggacaggggagcgagtagttgctcggagacggccattcccgaatcacttgactcggaggacccgacccgttcttcccgcgcatcccaaaaagggtagttaggacgacgactcgcaccccaagataacgtcgctcgcccgggcccaggaccccgtcccgctgaaaatcagtatatccaccgcatcatcgagtagtacacccgcccctactttcgggccaaacgacgtgctcaaatatcctcgtcggttcgaaaagagtattattgctccggctctttagtagtaggtagtaccgatctgtcaaaaagccataacctctagacgtggacgagtt

SEQ ID NO: 31303 - DNA, 626 bp, Zea mays
  unsure (1)..(626): unsure at all n locations
  Clone ID: MRT4577_128557C.1
gggtacctcgaggccggccggggttgttggttgccctgtaagatgaagtgccgaggctagctcagctagtttgaaataattcatgtttncaaaaaaaaaaaaaaaaaaaaaaaaaaaaaaaaaaaaaaaaaaaaaaaaaaaaaaaaaaaaaaaaaaaaaaaaaaaaaacctggcatatgcaggcataagtttttccccaccagaatgcacaagttgacaagaatcggggaaatcggggaccgctcttgacttgtaagctccccgctcccacggaagcaaaagtaagcaagggggggggaagaacccccagggcctcgccaaagaattcccatcgccataatcggggggggggaacaaaaaatcttcggccgttggcgctgcggcgggcaatgctgaattcgggcgggggcttcctggggggtctcgggaccggcctggccccttccaactgaacgaacgccccctcgcgcgcggccgggaacgcaaacggggcggccacggggaaggggttccgcgcgctgcacgccatgaaccaaacgggggcggggggggaactgggccagttgttggcgctgcaacactaccagcaacacccaggggtggaaaaggaaaaggaaaaggaaaaa

SEQ ID NO: 31304 - DNA, 212 bp, Zea mays
  Clone ID: MRT4577_128558C.1
agcagagggaacaacgcagagcacgcgggctcattttttcagcatgataaattgcaaaaaaacctaggattctcttgggcgtgagcgcgttgctgcaaacaaatgcacacatgcccgacggcgctggatatgagggacaaacagaagtgctaaaatgagtgccaaacagaagcacatgacctcatggaacctggatatagggtccctgacca

SEQ ID NO: 31305 - DNA, 155 bp, Zea mays
  Clone ID: MRT4577_128559C.1
cccaaaaaattttcattttgcaaagaaaaattagttcatttttccttaaaaaggtagggttcctttgaaaaattggggttttaaacctacccctaaatgtttttttcaataaccaaaacctccggccttaaaaaaaccttaccaggttctttaag

SEQ ID NO: 31306 - DNA, 323 bp, Zea mays
  Clone ID: MRT4577_12855C.1
attcccgttcgacccactcatccggtcatttcgaaactgcttccatatacatctatacactcacactatcttctactccacacgctgctttacgaacacatatatccattcatggcacacaatctagccgcatgactacacactgaattcccaaccctatacatcactaacctatgcatacattccaagcacatgacaccatcaacatcctctacaactgccacaactacaaaattcataatcagcatcactcccagatatcaatcccccacaatccttacattttctattgctcttataattttaaacaaccttcaacttct

SEQ ID NO: 31307 - DNA, 356 bp, Zea mays
  Clone ID: MRT4577_128560C.1
ggggggtcaacacaccatacttgcaggggggggccttcccttcacaaaacggaaaggcaaaaaacaaaattttaaaatcccttttggtaaaaccccaaagggccccaactccatttttaaaaaaaggggttggggccaaaatctttttggtttcccgccttcacaaatggggaccattgccctcaaaacttctttgggcaactgcaaaccaggtttgcccccctttccaaatacattattcatggcccaaaacaaaggcagcaaccatgatgcttttccattccattttattccgctccacccgaaccataaaattttttttatttggaagtccggcaaataaacataattttttt

SEQ ID NO: 31308 - DNA, 355 bp, Zea mays
  unsure (1)..(355): unsure at all n locations
  Clone ID: MRT4577_128561C.1
cggcagtttaagcatccatggggggggcgtgcgttctccacctcatccaatgctctgccctggtcttggctgcgcaggggggttcacccaacacagtcaagacgccatgcagctgctgccatttcagatccttttttttttgttggcccgatgaaactccaaatcccggggggggggggcggaagttctgacaacttttatattcaaaaaagagaatcatgagcgcaatatatccatgacaagttagttgttaagagatgttcacgtgggaactttgtgtagtttctacaatacgacactcaccagtgattcacttcggcgcngtggggctcttgtgtatttgttacaggaaggg

SEQ ID NO: 31309 - DNA, 284 bp, Zea mays
  Clone ID: MRT4577_128562C.1
tctcagcgcagttttagtcctgaggatggaagaccaggctcgtgtgtcttgtgttgtcttcgtctgtgccgtttgtcttcgtggctatcctgcagatgagcaccgtgtccagtgccacagcacaaggcgcctccccgccccaccgccccacacctctcccctttgggctggacgggaacacacgtgtgtggctcaggaggaaaagctcagcctggactgtggcagccacggcagaaggtggatcttgggatcaatttttataaaaatcgagacagttctgtggt

SEQ ID NO: 31310 - DNA, 1190 bp, Zea mays
  Clone ID: MRT4577_128563C.1
tcgaggccggccgggccggggctagccgcaccgcgctcacttccgcaccctcttcccgccgcgccgccgccgccgccgcttcctccccgccgccgggcaagatgggtcgcgtgatccgcgcgcagcgtaagggtgcgggatccgtgttcaagtcccacacccaccaccgcaagggccccgcccggttccgctccctcgacttcggcgagcgcaacgggtacctcaagggcgtagtcaccgacgtgatccacgaccccggacgcggcgccccgctcgccaaggtcaccttccgccaccccttcaggtacaagcaccagaaggagctcttcgtcgccgccgagggcatgtacaccggccagttcgtttactgcggccgccgcgccacgctctccatcggcaacgtcctgccgctccgcgggatccccgagggtgccgtcgtctgcaacgtcgagcaccacgttggtgaccgcggtgtcttcgccagggcctctggggactacgccatcgtgatcagccacaaccctgacaacggaacctcgaggatcaagctgccatctggtgccaagaaaattgtccccagcagctgccgtgccatgattgggcaggttgccggtggtggcaggactgagaagccgatgctgaaggctggcaacgcctaccacaagtaccgtgtgaagaggaacagctggcccaaggtccgtggtgtggccatgaaccccgtggagcatccccacggaggaggtaaccaccaacatatcggtcacgcctctactgtccgccgcgatgctccccctggccagaaggtcggtctcattgcggctaggaggactggaaggctcagaggccaggctgctgccacagcctccaaggctgacaaggccacctagagtattgttgttcttgttttatctatccctctgctgtgatttattagatggttaaaaaggacgtgttccgctatggatggtactatggtgaaacattgtgtcagtttttgtggtatctgtatggattttcaagtatgcctaaagaagtttttggtgctcaatgatatatgcctcttttctcagtttgcattttggtttgttgttgtagaattgttgaacggttgtctccgatcgtgtaatttctgagttcaataacgttggttgtgcatggtttgtcaaaaaaaaaaaaaaaaaaaaaaaaaa

SEQ ID NO: 31311 - DNA, 1438 bp, Zea mays
  Clone ID: MRT4577_128564C.1
cgcctgcggtgtaccgggccgctaattacacggcgggccggcgcagttcgcacacagcagcagcagcccttctttttggagcagcaccacaggggagatcgatcaatcaatcagcaagcaaagcgcgcacggcacaggtgggtagctagcaatggcgacgccgccgaaccctcctcctccgagcactcccatagctgcggcggcgcccttattgccagcagagttcaccagattcaccttccgggccttgtacgtccgccggaccggcccaagcagcagggagatgattcagccggggagaccttacgatgagctgggcagaagactcaccagtgactacccggtgtacgatggccgtggctccgacgccgcccttgtcgctcgcatgcaggggatcaccgtcctcgtcggtaacgcgcaccagctgttcaccatcgtgttcgagaccgggaggttcaagggctccacgctcctcatcaacgggatggtgacggaagggtccgacgagtgggcggtctacggcgggactggagcgtttgcgatggccaccggcgtcatcagaaggaagaacctttttgccggtggcggtgacagtggcgggaactccgacgagcttagcatggaagtgttctgcccggtgttcggctcaccgcagcagccgccaaaggacgacgaggatggctccgccgtcaccaagattggactatggggtgggccgggaggatcggcacaggacatcacgacgacagaggcaccaaggcgtctgaacagcgtcaccattcgcgccggtattgccgtcgactcgatcgagttcacttacactggcaaggacaggcagaggcgcacagctgggcgatggggtggacttggcggcaatgttcgaacgatcgatcttggcgacaacgaacacatcagggaggtgtcaggaacgtacggcacatttgaaggtgctactaccctaacctcgctcaggttcatcaccagcaccagagcctggggcccatggggcaccgagaacgggacacgcttctgcatcaccgcgcccatcggcagcagcgtcgtgggattctacggacgcgcgggaaccaggctcgtcgacgctatcggtgtctacctgcgtcaactttgatttcaacggcatgatgcttgatttcaaatagatatattaattagttcctcgtcacagtcgatcctgtgtcaaataataaagaagctcttgtatgcatgtgtatatgttagtccttcgttctgtatgtgtcaaataaaggttgatcaaaaagacctagaataagtacatgtcaggagtatttatatatatagatgtagtcgcctttataattacctctaaaataaaatacccccgttttttttactataaaaccatctagattaagattgacacctcccaatcccgaaccaggtaaaggtagtcgcacct

SEQ ID NO: 31312 - DNA, 1505 bp, Zea mays
  Clone ID: MRT4577_128565C.1
gccggccgggtcgggaaaaaaaaaaatagccgcaccgcgctcacttccgcaccctcttcccgccgccgccgccgccgccgctgcctccccgccgccgggcaagatgggtcgcgtgatccgcgcgcagcgtaagggtgcgggatccgtgttcaagtcccacacccaccaccgcaagggccccgcccggttccgctccctcgacttcggcgagcgcaacgggtacctcaagggcgtagtcaccgacgtgatccacgaccccggccgcggcgccccgctcgccaaggtcaccttccgccaccccttcaggtacaagcaccagaaggagctcttcgtcgccgccgagggcatgtacactggccagttcgtctactgcggccgccgcgccacgctctccatcggcaacgtcctgccgctccgcggtatccccgagggtgccgtcgtatgcaacgtcgagcaccacgtcggtgaccgcggtgtcttcgccagggcctctggggactacgccatcgtgatcagccacaaccctgacaacggcacctcgaggatcaagctaccatctggtgctaagaaaattgtccccagcagctgccgtgccatgattgggcaggttgccggtggtggcaggactgagaagccgatgctgaaggctggcaacgcctaccacaagtaccgtgtgaagaggaacagctggcccaaggtccgtggtgtggccatgaaccccgtggagcatccccacggaggaggtaaccaccagcatatcggtcacgcctctactgtccgccgcgatgctccccctggccagaaggtcggtctcattgcggctaggaggactggaaggctcagaggccaggctgctgccacagcctccaaggctgacaaggccacctagagtattgttgttcttgttttatctatccctctgctgtgatttattagatggttaaaaggacgtgttccggtatggatggtactatggtgaaacattgtgtcagtttttgtggtctctgtatggattttcaagtatgcctaaagaagtttttggtgctcaatgataaaaaaaaaaaaaaaaaaaaaaaaaaaaaaaaaaaaaaaaaaaaaaaaaaaaaaaaaaaaaggaaaaaaaaaaaaaaaagaaaaaaaaaaaaaaaaaagcggccgcagtagacgaactggccagtgtacatgccctcggcggcgacgaagagctccttctggtgcttgtacctgaaggggtggcggaaggtgaccttggcgagcggggcgccgcggccggggtcgtggatcacgtcggtgactacgcccttgaggtacccgttgcgctcgccgaagtcgagggagcggaaccgggcggggcccttgcggtggtgggtgtgggacttgaacacggatcccgcacccttacgctgtgcaaggataacgcgacccatcttgcccggcggcggggaggcagcggcggcggcggcgcgaagggaagagggtgcggaagcgagtgctgcacggctagc

SEQ ID NO: 31313 - DNA, 448 bp, Zea mays
  Clone ID: MRT4577_128566C.1
ccaagaaggtggaactccctaatttttaaggttttaaaaagggggattaaattaaaaaaggggggggggcaaacggaaaataaggggggggtcctgggtaaagagggagaaaaagggggggtaggggcaccatccaaaagggaaataaagggttaagggtgggatttacctcaatttaaaaaggcaaaaatgggtttagaactaataattttggaggagcgggggggggaaaaggggaaaattttaaggggaagaaattggggaagggggttttggggccgaagaaaataaagcttgaatgagggtcgggagaaagggaattttaaaacggggggggggatttggaacgggttaagtattgggggacgggggggtggaccggggaattcgggacggggacctggaggggtacaagttttccctatagggggggggattaaaggtgggg

SEQ ID NO: 31314 - DNA, 225 bp, Zea mays
  Clone ID: MRT4577_128567C.1
agtgagtcgtattaaacgatgcgacggagtaaggggagtcgtgtgcccaaggagcaggcagaggggagggcgcgtcgtcccgtcgatgcgcggctcgccgagcctcaggtaggactgcgagaagaagagggctgccgtggatacgatcgtggctgatgcgggcgacgccgatgacagcgtcgggatcagagtgacggcgcgacagctaagcaatgggagcgaagt

SEQ ID NO: 31315 - DNA, 180 bp, Zea mays
  Clone ID: MRT4577_128568C.1
gattgggtacctcaagccggccgcgtctcttaccttccacacaccttctcgaccgtacgtgacctaattgtgataggcagccagccagcaccgccctccacctatgatggcgcgaagaacagggtccccgccgatcgtcctcgcgctgcggaccatcatcggcatcgcgcccaccgaggg

SEQ ID NO: 31316 - DNA, 458 bp, Zea mays
  unsure (1)..(458): unsure at all n locations
  Clone ID: MRT4577_128569C.1
gctcgagtncgccgccagnntgtgatggatactctgcagaacttcgccccttagcgtgcgtccgcggcgcgagcgtacatcttctttgtttttatttgtttcttttttcctttcttttgttttgttttttttgtacttgtttatccgtcgtctcgattgtttcgtatttgaatacctgattccaaattttggaatcgaataatttcatgtcgggccaataatgttgttgtgttcattgaaacaaactctttttttggaatcgaataattattacatgtcaaaaaaaaaaaaacaaatttaaaaagtgggacaaaacacgcggcaaccgggggatccttttgcccgtgccgttcgttaatcccctccgccccccccttatacacatactactttaaatttaccttggccccgctccccccttggggtttattccggccccttggtgccccctttttgtt

SEQ ID NO: 31317 - DNA, 577 bp, Zea mays
  Clone ID: MRT4577_12856C.1
aacccaatttcttgttcctttctcccacccggactcgcccccttccctcagcgcgctcctttcactgccccccccccccccgctctttgcccctccacccccctctaccaccccccccctgatcgtcaccgcgggcgggtctctccctcgcatccggtcatgcctccagacaattggggatgtcatcatggctatcatcagtggaattggtagaatcttgaccgccatcgtcaacggagtggtcagcttctgcgctattctggtccgattcttgacctgcggctattgcggttcgaagggaggcagagcgaagcgccggggaggctctcatatgaggacgacaagggtttagacgatgaaacaccagaacgaacttgtttgtgataccaatttgataaaggataatgaggtcgggagagctatgttagtttgcggaggagtttgctacggccgtttgggatttcttttctgatttctttgacgtttatctgtcagcattaggatacccaatccttacgatttttagcaaaaccttcaatcttgtacattccgttaggcggctaaaaaaaaaaaaaaa

SEQ ID NO: 31318 - DNA, 1200 bp, Zea mays
  Clone ID: MRT4577_128570C.1
attgggtaccctcgaggccggccgggcgggataggcccgtccggatagtgccaggactgccagcccgatctcgcgtcgaacgatgtgaaagaactcctttcttctacgcggacggattcctctcgtctcgatcagctcgcttcgtgacttctctctcctctcgatcgattgcttcctccaccgaggcgggggaaagcgccgcccagatcgccgtaggcaagcggcgatcactccagctctgagcataagtttctgcagggaggctcgtgaagtcagtagtcgtatctggcagtggcagcacagcgcaccatggaatggctgagctggagaacggtgtgttgtttatcagtgctgtgcaccgtgctgttcttgcgcccggtcgagggcattcgcttcgtgatcgatagagaagagtgcttctcgcataacgtggagtatgagggggatactgtccatgtatccttcgtcgtcatcaaggctgacaccccgtggcattacagcgaagaaggcgttgatcttgtggttaaggatcctaatggcgctcaagtccgtgattctcgagataagactagtgataagtttgagttcatagttcagaagagaggcgtccatcgcttctgcttcacgaataaatccccgtaccacgaaactatagacttcgacgtgcatgttggccatttttcatacttcgagcagcatgccaaagatgagcattttgcaccacttttcgagcaaatagccaagttagatgaggcactttacaatatccagtttgaacagcactggctagaggcccaaactgaccgtcaagcaatattgaacgagaacatgagcaggagggcagtccacaaggcactcttcgagtcggcggcgctgatcgccgccagcgtcatccaggtctatctcctgcgccggctcttcgagcgcaagctggggacgtctagggtttaaggctccactggtatccaactctcccttgtagtagccaccatgatcgtaccgacataaccgttaatggtcgctagatcagctaatactgcttgcttgtgggctttagttacatgtaatcttttgtggtgccacagatgagaactcttcggatttaaaccgtcaatctttcagccttcattttgtctctcgtgaacattcttttcacccgagaacaacaaggctacgggtacagaataggagattttcttc

SEQ ID NO: 31319 - DNA, 1039 bp, Zea mays
  Clone ID: MRT4577_128571C.1
ggcaattgggttcctcgaggccggccgagagctcgcttcgtgacttctctctcctctcgatcgattgcttcctccaccgaggcgggggaaagcgccgcccagatcgccgtaggcaagcggcgatcactccagctctgagcataaggttaaggatcctaatggcgctcaagtccgtgattctcgagataagactagtgataagtttgagttcatagttcagaagagaggcgtccatcgcttctgcttcacgaataaatccccgtatcacgaaactatagacttcgacgtgcatgttggccatttttcatacttcgagcagcatgccaaagatgagcattttgcaccacttttcgagcaaatagccaagttagatgaggcactttacaatatccagtttgaacagcactggctagaggcccaaactgaccgtcaagcaatattgaacgagaacatgagcaggagggcagtccacaaggcacttttcgagtcggcggcactgatcgcggccagcgtcatccaggtctatctcctgcgccggctcttcgagcgcaagctggggacgtctagggtataaggctccactggtatccaactctcccttgtagtagccaccatgatcgtaccgacataaccgttagtgatcgctagatcagctaatactgcttgctttctgcctttagttaccgctgatccttgccagcgtcatccatgtctacctcctgcgccggctcttcgagcgcaagctggggacgtctcgggtttaaaaggcaccagtagccaacttgcccttcgcagccaccatgatcataccgacataaccgttacgtcgaatcgaattcgaatggttgctagatcagctaaataccacatgtttgtggacttcagttacatgtaatatttttttgtgattccacagatgagaactcttcagagtttaaaccgtcgatttagccttcattttgcctcaactttttatcgccttgtttctgtagtagcaaccagtaacaacaagcctgcctgtagtatgtacaagatagta

SEQ ID NO: 31320 - DNA, 249 bp, Zea mays
  Clone ID: MRT4577_128572C.1
ggaaaacccggcgcgacccacgcgtccgaaaaaaaaaaaaaaaaaaccaccaatttatattaaacgaaccaagcaaacagacgcgggcaaccaacaaaaacgcgcgggccaccccgacacctgaatccaacatacgggcgcacgttacacacccccggcaccgggaaaaccagggccgtacccagctgagtcaacaagcaccacatgccccttgcctaagcagacgagacagcaaagaagcccccaccg

SEQ ID NO: 31321 - DNA, 278 bp, Zea mays
  Clone ID: MRT4577_128573C.1
gagcgctccagtcggcggccgcccttcttttattgggggtttttttaaaatttttggggttttataccctcccccttacaatttcaaataatacccccaccaacatcaacatgaaggcttaccccagcccgcacaaaagggcgagataaaaaggaaaacgaccccggccataaaccaaaccgaaaaccctccctagaaataccaaaacacaaagccccaaacccaaacaccaagtacaagacacaacgagcctttacagagaccccaaccaataaaac

SEQ ID NO: 31322 - DNA, 758 bp, Zea mays
  Clone ID: MRT4577_128574C.1
ccggccgggcgcccacacaattgaggggaagtgtgttgtccactctttcaagaactataccaggcttgacaatgttgggcctgaggacttcttctgccgattcgagtacaaggcggccaccggttcgttcacccctgaccgcgtggcagtgaattgcaaatgtgagatgccgtacaaccccgaatgacctcatggtgcagtgcgatgcttgcaagcactggttccatccatcttgtgtggctatgaccattgaacaggccaaaaagctagatcactttgtttgctcagactgtttcaaagaaaatggttcaaagagactttcaaatgcatatgccacttcaccaaattttgagcctaaggctgaaccaaaaaggcagaggaggtaacaaactgtgagtggtaacatccatatgggtaaggggagatgtgctgcttctgtggtgaatcagcccttgccctttgctgtggtgagagcagaggtgtacagtgtactagaccagtgtttgctgttaggggaacgggttttgttcgatgtgtagaccgtgtggcatggcatgcagttgttggtagaggtcaaaagaacagtcgttgtgttcacttggtcagcttagcgccttagcccttgttaatgtgttaatgcactgtgttaactcagcgagccccccttgtggctgataatgcaagtcatgcagttgttgatacaaaaaaaaaaaaaaaaaaaaaaaaaaaaaaaaaaaaaagggcggccggacgcgtgg

SEQ ID NO: 31323 - DNA, 1443 bp, Zea mays
  Clone ID: MRT4577_128575C.1
cgggtccggatagtgccaggactgccagcccgatctcgcgtcgaacggtgtgaaagaactcctttcttctacgcggacggattcctctcgtctcgatcagctcgcttcgtgacttctctctcctctcgatcgattgcttcctccaccgaggcgggggaaagcgccgcccagatcgccgtaggcaagcggcgatcactccagctttgagcataaggtaacgggccgccgcccctcttcctctccgtcccaacccgattggcgatttcttccgtaggacttgcggccccggtcagatcttgctccggtactcgctgctggcccgatcgaaacctggagttgcagggtgggagcgaacgccatccaatagagtcttcccctacggcgacggttggcggggcgctttacccgtccagactatcccgttcctcccccgattcagcccttccgaaccgtgtttcgcccctgatccacctgatccgctcgctctgttcctatgaccctgctgacagcttggggatttagtttctgcagggaggctcgtgaagtcagtagtcgtatctggcagtggcagcacagcgcaccatggaatggctgagctggagaacggtgtgttgtttatcagtgctgtgcaccgtgctgttcttgcgcccggtcgagggcattcgcttcgtgatcgatagagaagagtgcttctcgcataacgtggagtatgagggggatactgtccatgtatccttcgtcgtcatcaaggctgacaccccgtggcattacagcgaagaaggcgttgatcttgtggttaaggatcctaatggcgctcaagtccgtgattctcgagataagactagtgataagtttgagttcatagttcagaagagaggcgtccatcgcttctgcttcacgaataaatccccgtaccacgaaactatagacttcgacgtgcatgttggccatttttcatacttcgagcagcatgccaaagatgagcattttgcaccacttttcgagcaaatagccaagttagatgaggcactttacaatatccagtttgaacagcactggctagaggcccaaactgaccgtcaagcaatattgaacgagaacatgagcaggagggcagtccacaaggcactcttcgagtcggcggcactgatcgtggccagcgtcatccaggtctatctcctgcgccggctcttcgagcgcaagctggggacgtctagggtataaggctccactggtatccaactctcccttgtagtagccaccatgatcgtatcgacataaccgttaatggtcgctagatcagctaatactgcttccttgtgggctttagttacatgtaatcttttgtggtgccacagatgagaactcttcggatttaaaccgtcaatctttcagccttcaaaaaaaaaaaaaaaaaaaactcgagactagttctcctcgtgc

SEQ ID NO: 31324 - DNA, 494 bp, Zea mays
  Clone ID: MRT4577_128576C.1
cattctgtagaccgcagcaacctgtccttcggcgtcgacgacgctatcactgagggcggcggcgctgctccctcgtcccccatccatggtgtgagactggatgtacagcgcctcggaggacgcgacgaaacgcaccctggcgaaggtgacgagctggatcctcaacacggtgggcgtgttaccgctatcttctcatagccgcagtcactcttgaaatctgctctcgccgatctgccgcctgcagccccggaatgtgatcgcgaggccaggcgactcgcgtggaagactaccccggggctcgcacatctccactaggatatctccctgtggaattggaaccaacacgtgagaacgctttgcgattacgcttcacacgaggtcgatcgatgtcttcacaacaaccaaatctgtcaaggatataatgtcgcttccattgactcagggacatcgtctaggtgagatcaacgagtttccctgggacgctgatgcttaca

SEQ ID NO: 31325 - DNA, 523 bp, Zea mays
  Clone ID: MRT4577_128577C.1
aacaatgggaacaacccaaagcccctttttttttttttttttttttttttttttggttttttttttttttttttttttttttttttttttttttttttttttttttttttttttttttttttttttttatccgtctacggcaagtcattcacggttgtgtcgtacaaccagcacagaaaaaaaaaatctctactatcttgtacagactacaggcagccttgttgttactggttgctactacagaaacaaggcgataaaatgctgaggcaaaatgaaggctaaatcgacggtttaaactttgaagagttctcatctgtggaatcacaaaaaaatattacatgtaactcaagtccacaaacatgtggtattagctgatctagcaaccattcgaatttgattcgacgtaacggttatctctgcaagttggctactggtgccttaaacccgagacgtccccagcttgcgctcgaagagccggcgcaggaggtagacttggatgacgctggcggcgatcagcgccgct

SEQ ID NO: 31326 - DNA, 165 bp, Zea mays
  Clone ID: MRT4577_128578C.1
ctcacgtttttgtattttcaagacaaaaagctcaaccacctccagggcaggatggtggtgctctagaggggaccctcgctgatgacgaggactcccggcggctccacagcggacatgcacaccacactactaaacatcgtcgtccccgctcgacacaaacttctg

SEQ ID NO: 31327 - DNA, 1655 bp, Zea mays
  Clone ID: MRT4577_128579C.1
actcctatgggcgattgggtccgcgctcgaggccggccggggactccttccttgccagttcacgcggacggatatctcgtctcggtcagttcgcttcgtgagttatctttatctcctctcgatcgatcgcttcctccatcgaggcggtaaagcgccgcccagatcgccggaagcaagcggcgacctcaccagctccgagcagcagcagggaggctcgtggaaccattagtcgttttctggcagcggcatggaggggctgagctggagaacggtgtgttgtttatcggtgctctgtgccgtgctgttcttgcgcccggccgagggcatccgcttcgtgatcgatagggaagagtgcttctcgcataacgtggaatacgagggggatactgtccatgtatccttcgtcgtcatcaaggctgacaccccgtggcattacagcgaggagggcgtcgatcttgtggttaaggatcctaatggcgctcaagtccgtgattcccgagataagactagtgacaagtttgagttcatagttcagaagagaggcgtccatcgcttctgcttcacgaacaaatccccatatcacgaaacgatagacttcgatgttcatgttggccatttttcatatttcgagcagcatgccaaagatgagcattttgcaccactttttgagcaaataggcaagttggatgaggcactttacaatattcagttcgaacagcactggctagaggcccagactgaccgtcaagcaatattgaacgagaacatgagcaggagggcagtccataaggcgctcttcgagtcagcggcgctgatcgccgccagcgtcatccaagtctacctcctgcgccggctcttcgagcgcaagctggggacgtctcgggtttaaggcaacagtagccaacttgcccttcgcagccaccatgatcacaccgacataaccgttacgaattcgaatggttgctagatcagctaaataccacatgtttgtggacttcagttacatgtaatattttttttgtgattccacagatgagaactcttcaaagtttaaaccgtcgatttagcccacaaaaaaaaaaaaaaaaaagcggccgcccgtttcccttcctgcgccggccggtcgagcgcaagctggggacgtctcgggtttaaggcaacagtagccaacttgcccttcgcagccaccatgatcacaccgacataaccgttacgaattcgaatggttgctagatcagctaaataccacatgtttgtggacttcagttacatgtaatattttttttgtgattccacagatgagaactcttcaaagtttaaaccgtcgatttagccttcattttgcctcagcattttatcgccttgtttctgtagtagcaaccagtaacaacaaggttgcctgtagtctgtacaagatagtagaggtttttttttctgtgctggttgtacgacacaaccgtgaatgacttgccgtagacggatactatactgtacgctcgatgcgcccattgttttcagagaataaatggctgtgcagaattgaagacggcgaggagaatctccagcttcagctgccggctctctagatggaggtctgtagtgtgggcacaaccacaccacatgtgtgtcgtgtcggtgcactttgagccgagggc

SEQ ID NO: 31328 - DNA, 193 bp, Zea mays
  Clone ID: MRT4577_12857C.1
gtctacttctagatcgggagcgcccgagcaggaagaggctattgataagcatgctgctcagctcaacatgctcactgacgactgcaacctgcctaattttgtaagctggctaagattttttactctgaacacaactttaacctgattactgtgcctaacactaaaactcttgataaataggctgagctttgca

SEQ ID NO: 31329 - DNA, 376 bp, Zea mays
  Clone ID: MRT4577_128580C.1
gcggctgcttccgcgactcgcccgtctcgaccgactcctccgaccgctggtcccgtgccgcgccgagcaatgaccagcgtgagaggcctcgcatcgtgcttgatccgcccaaacgtgacgcctcggccacccctacccctcctgctgaggcaggacgcagccggccgagcccatttggagccgcgaggccacgggaggacgtgctggccgataaggggctggactggaaaaagatggaaactgagattgatcagaagaggactagccgacccactagctcgcagtcgagtaggacagagagtgctcaaccatcacgtcctgggagccccgggtcacagatatcagccaccggtagtgaagccgcacccacggcgcg

SEQ ID NO: 31330 - DNA, 354 bp, Zea mays
  Clone ID: MRT4577_128581C.1
gacttgtttcattgattcttgaagatatcgagctgcggttggcgccacaaggtctaggatgtcttgcaactgcggatcaagctgctgctgcggctcaagctgcaagtgcgggtaatatatatgataatagtgcactggaccgtgcatgaggaatttctccagccttcttcttgtctagttaatttccatttatttattttttccattgcaaaacacacacacaaacagacaataacaaacttaatttggatcgaatagttcaatccatttgcgcgctgtccttttcagcaagaagtaccctgacctgtaggagacgagcaccgccgcgcaggccaccgtcgtcctcggtgtggc

SEQ ID NO: 31331 - DNA, 554 bp, Zea mays
  Clone ID: MRT4577_128582C.1
ttccggcgtttgccaggcctacacgctgaatcgcatcagggaccctggcttccaggtgaagccgcggccccacctgtcgaaggacatcatggacatgggcaagccggcgtcggagctcgtgaagctgaacaccaccagcgagtacgccccggggctggaggacaccctcatcctgaccatgaagggcatcgctgccgggatgcagaacacgggctgaagccagtgtgcctgtcttctttctgtaggggatctcatatcatggactaccccagttggttttctgtttggacccagcttaagctttctccggccagataaaaaccctgcaggaggatggagataccatgcctcgcagtcacagcacggagctccattggcccgccaccatgaaatgcccacagcgcacgtactgctctgtctccactctctaaagtccagtaatcaatgtcactgcccatgcagatcgctggtcgggctacgaataacaacgtttaatgttctaaacagtatcatcagtacacgactgttcctgtatacatacatagatttcagcg

SEQ ID NO: 31332 - DNA, 392 bp, Zea mays
  Clone ID: MRT4577_128583C.1
gagctcactattcggcggccgcccttttgatcttttttgacaggaccgaggcatcagtgccgcgagagcatactataggccaatgatcgtctacacaggcctcattgatgggggagtacgcctagcggatcctgaactcgcctgcgaccgcgggcagacaacaacaagtctccgagagtgagcttatgcgactattgacaccgggtgccgtcctgtgcaccttgtcatggatgcggctcctactgcggccggagcctccgtggaggctccaaacaagctgtagatctaacgggctgacagaggaggaggctgacagcagagcaactgtgctgctgtgcaatgcatggagtgctcaacacgccagtgatctttctacaccggcacggaagggg

SEQ ID NO: 31333 - DNA, 514 bp, Zea mays
  unsure (1)..(514): unsure at all n locations
  Clone ID: MRT4577_128584C.1
attcccgggctcgactccacgccgtctcgctgctcacgctctctctaatattcgttcaacgttggctccacnnttccaattattagtcagatgacaaaatgtggataggagggtgaaaagtagcgtattagaaaatgggatattttnnatggttgtanngtggggtatttaggggaagggggatttagggggtaaaccgcctgtnnacagagtggcagatatttaggggggaagaagaacccgctgacgtgtgcacgtnngagtgggatattagggagaagaaatcttaggggtaaccccgcttaagaccagtctaaaaggctcatnnctgtgtgtatatctgtcanntgtcatgtcnnatgtcatgtgtgtctggtattatgnaatggcttgcgtcgtcgtaaatgtaatggtcgtggaccaatataatattgcgggtgttgcacctttcaacgtaaccttactaagtaccttgctatttgcgatataatatgtacctttagttataataatt

SEQ ID NO: 31334 - DNA, 563 bp, Zea mays
  Clone ID: MRT4577_128585C.1
ggggttctcggttctcgtctcgaggcgtcgaccacctcttcatttctcttatcaaaagacgatttggttgggcggggagaaggttgtaccggtaccggtaccggtagtagatcttaagtagtcgtcatgagccggtcagggcagcctccggatctgaagaagtacatggacaagaagctccaaatcaagctgaatgcaaaccgtgttgtcattggcacacttcgtggatttgatcagttcatgaatctggtcattgacaacacagttgaggtcaatggaaacgaaaagaatgacatcgggatggtggttatcaggggaaacagtgttgtcatgattgaagcacttgaaccagttgccaaggctcagtgaactttcagtggatctagaagtggttcagtcgttaagctagtaatattaattcaaaggcaaaattggacataggacattgaaaatgacctctctttgccacaggacatggagcgtgatttgctgccggacactttgtttttttgtcgaatttgcttgtgagcactgtctgataacttattcatttctctttttgg

SEQ ID NO: 31335 - DNA, 534 bp, Zea mays
  Clone ID: MRT4577_128586C.1
gggacatgcgatacgttaacttagaatcgcccgtcttgtccttctctctctctcctagccgaagtttcgcaccccaatcaagtccacaactaacagagatgtaacgaagttcttggatcgggaaactggaaatgcaaggcaaccacaaaagagaggatgaagatcgcgaaaaccctgaatgaaggacagtgaccccctttacatgatgctaaggtggaagtcagacatccttatgtgttacttgctgcgcacaagaatcacattcaacaacagcaacatgttgctgttcagaactgatgcgtgaacaaggtaggtgctttaaatgcctagaggaaatctgagatgctaggatccttgtgggtacctgggtcattctagcacactctgaaatgacagctatgatggtagaataaaatgaatgggtgggacacaaaggggcgtatgctctgtctcaagcactaaaggacattgcatgtgttggggagacccttgagacgaggcaggctgggtgtaccatggatgttgaaggttaac

SEQ ID NO: 31336 - DNA, 429 bp, Zea mays
  Clone ID: MRT4577_128587C.1
ccgctggcatccacgacgagccgaaggcggatgttgatgcgtgctaatcacgctgccgctatgaggaggtgcggatccactgggccgacaccatgctgctcgcccaacgccacgcacctcctggagggaacccggcggtgctcctctccctacaccacgcgctacgacgaccctgtcggcgcggcgaaaaacacggccccgcaatgatgaccgcgggaaggcctaccccctcctaggagcgcagcacctgcagcctccatagaccccgccgaagcgcgccggcgaatacaaggagctccggctgctccgcccaaggaaggatcaccgcaaggcgcccctacgacgacgccaagaaggccgcccgcgccccgccacctgagcgggacggccctccgctgcccggtcgagaccctgccaggccgccatgcg

SEQ ID NO: 31337 - DNA, 381 bp, Zea mays
  Clone ID: MRT4577_128588C.1
aaatgaacaagggggggggggattctagcaccacaggcttgttcaaattaccataatcatgctaaccctacaaaggttggaagatctacacattgacattcgtcaaaatcatgaatagaggcacgtctctgttactaaataaaattcagtataggtggctggcctgaggacgagttcgaatgatgtggcctggatcctcaaaagagtgcaatatagatcttgattgcataccacgccttctttcatctgcagtacgtagaggaggggcaagtctgggtggactatttgccaaattattggtcaacatgggcagtgattcaaggctcatgttttcgttgcatcatactgaggcttgtactgaatctgtatggattggagcgg

SEQ ID NO: 31338 - DNA, 285 bp, Zea mays
  Clone ID: MRT4577_128589C.1
atgacaaaaaaatctcccgcttggtgtataagaaccttggggaatgctgaggaaacatttccggcggatcgatacaatgggatcagatgatgtgtagaacaaagcaaagggtcaaaccacctagatggggtggccaaagaagaagaaaagggcggatggccacctacaatgtttttctagaatggcttggccttgtgcggatatgctcacagctgggaatgctccggattgattgtgccgaaatttgaggatcttttggacgctggcgagatggatgacctagtt

SEQ ID NO: 31339 - DNA, 348 bp, Zea mays
  Clone ID: MRT4577_12858C.1
acccgtgcttttctactttcctccggcttcaaaacgctgatgcagcacccgtacgcaactctgaatattgcggacttgcttgactgagccttatttcacatattgcggcttctgatctactactttatgagctagttttcaggtgggctgccacggtgctggggaacagcgtaaaagccctgcctcacagacgaaaggatggaggactgcacaaccatggtgcacattcttgacaacagccaagctgcttcgatcgggatcgaccgatggctagaccagacagctggctccaatgctggggatcgttaccacagccttcaaccaaaggaatgggcgtcagactgacga

SEQ ID NO: 31340 - DNA, 589 bp, Zea mays
  unsure (1)..(589): unsure at all n locations
  Clone ID: MRT4577_128590C.1
gaggagcaggaggttagagcagttggggttcctgctctgcttcatcgcggcgatcacatgcaggctacacgcacaagcccaggcccaaacgactctgcaacgccccaaaagctcagctcacaatggagcagtgcgtagggatttgtcagagatgggaaacggatcggagagcgtgctgtcaaggagaacgaggagggtcgatcctcttgatggactgaggaaatacgagggaggctacaacatcactgacaggcactactggagttcggccatatttacaggtagatttggatatctgatgtcaggactatggattaccggtggcatcgctttcgctgctggccttctcggctccaagatcttcttcccgagaaagaaagaaagatacactgacctcgactatttcctcgagagatatcaagttttgaccgtggnactctgtgtcctcctcacagcactcgccatgggttcttcagcgggggcgcttcgcggtacggtacagctccactcagcggctgaatccgtgaaggaaaagatcgggacgaccgcactcgaggctacagcggtaatctacaacgtaacaggtgcc

SEQ ID NO: 31341 - DNA, 651 bp, Zea mays
  Clone ID: MRT4577_128591C.1
ccggccggggatctcctacagacgcccatgatggcgtgctctcttggacaccggatgtctaccgcgatcaagatcccagtggccttgctgagagggcgcctagtgcgactgctactctgtgacctcgccacacacggcgctccgcccaccagacaaacatacacggcctctctaccgtcaacggctacggctactccaccgtgcccgaacgcaattgctactgccccctacgcggacagctccgtgcctgagacaaaatgcgatgcttcgacgccatcgccatctccagcagctatgctggactcgacaacaccgcgcacagccatcctcggtgtctgaaaccgacacactaaataagaaatcgactcgtgcccggctactatctgatcttgcgatactatgtatatatacgctgaatgcgggcaattctacccccatgcatgctatcgactgcctccgctgatatatatattatacgactagatcccggcaccatggctggtcgaccgcatgcatactagtattacgtcccattaacttcctgcacacttcgctcaatgatgttcgagaaacatatatgtgcaccaatgtaccgttgtacatgcatgctacataatccgtgtgtctcccaatcggatcattctaaatttg

SEQ ID NO: 31342 - DNA, 148 bp, Zea mays
  Clone ID: MRT4577_128592C.1
cgtcatttgtactggagaagcccatgttttgacaagtgaagttatcaaagttattccattaaataggggccaccatgtgcaactcaagcctggtgtttcggaacctagatttggatggcgcggtcaatcacgggatagcattgggaca

SEQ ID NO: 31343 - DNA, 271 bp, Zea mays
  Clone ID: MRT4577_128593C.1
cagcctttgttcagcccaagaagctgtaggcgctatgcttgagataccgaactctggaagagatcctcagggacagcgttcaatcctacaatgcggcatgtgtcctagtggattcatcatagcaagcagcgcgctattcctggatgacctgcgcattttctaaaccgaacttgctgatcaagacaagtgcatcgcgacgtcctcggataatgtaatcgaaaaagcactaagcgacaaagtttgccgtgtattatagcggcatggtactgaa

SEQ ID NO: 31344 - DNA, 1278 bp, Zea mays
  Clone ID: MRT4577_128594C.1
cgcaagcgtgcgaaacgaatcaatcctgacgctgatgcagacttgttagagggaggtgaagatgatggtgttgctgaaatggatcaagattttgatgaagaccaagatcttgatgaacatcaagatcaggagaccaatccccttctgttagctctagatgaacagaggccaactaaagagcagattgtaaagcaatggtatagtcaggacgtgttcacagaagcagcaactggcattactgagcagagtgacactgaagatgaaagggagagtttgcaaaggaatatgaagaagatggttactggcaaaacggaaaaagtggctaaagcacagcgtttgcaacgagatgatattgagattgtaccagcagaacctgtccgagatgaagaggatacgtcttcatcttctggtgaatcagatgtttcggaggatgaactcgatgattacagaaaggctgaagtactagcctatgctaagaagatgctgaggaagaaacagagagagcagatacttgatgatgcttacaacaagtacatgtttgatgatgaagggttacccaactggtttgttgaggatgaaaaaaggcataggcagcccatgaagcctgttacacgtgaggaagtagctgcaatgagggctcagtttaaggagatcgatgcccgcccatccaagaaggttgcagaggccaaggcccggaagaagcgtgttgccatgaagaaactggacaaggctcgccaaaaggcagatgctatagctgaccagaatgacataaacgagctatcgaagaggaagatgattgaccggatttacaggaaggcgatgccaacgaagcctcagaaggagtatgtcgttgcaaagaagggggttcaggtgaggactggcaaagggaaggtgttggtggatccacgtatgaagaaggacaagcgggccagcggaacttgtaagaaagggaagaagggcggcaaaggcggcaaggggaagggtggtcagaaaggcatgagagggaaaactgggaagaaggccgggaaagccccgagttaaggaagatgaggagctaagcacggctgggatgctggatgccttcctcccagctaattttttgtctcgtcctactacagctactctcagtaggcagatgctttgaagtcgtgtgatgataaaatttatgtgttaagttttgtagcgtgagttatcatggctacaatttgttctgaaactagtggtcactaattgttggggacttgttctcaagtgctaagagttaagaacaaggccaac

SEQ ID NO: 31345 - DNA, 2255 bp, Zea mays
  Clone ID: MRT4577_128595C.1
cggccgggaatattcatatcccctgcatgcgtccacccgggtcgaactgggaccgttcacattaatagcttttcctcttctttccccatccaccctcgcaccctcaccgaaaggagaaggcttcagccttcaagcgcacacaggcacgcaaatcccctcttcatcaacctcgactcgagtccgcgcgcgtccccgaatcgagaggagatgagtcgtccgcatgacggtcacaggtccttctttcccatggggaatcccttcaggatgattctcccaagaggagcccgcctgtcaccgaagctcactgagctgctcacttcgtatgaggatggcctggcctcgagcttgaggaaggtcaagccagaggccacctcagaggtgttcacactatcatggatgaagctcgcagtggagtgcttatcagagctgcacaccaatatagccaccctgattactgagcttgagctgcccttatcagactgggatgagaagtgggtggacatttacctgaacagcagtgtgaagctgctggacatctgcattgccctgagctcggagctctctcggttggatcaagggcagctgcttgtgcgatatctcctgaatgtgttgaactctgggagcgacatgccatcccaggagcagctcaggagagctgaggtgtctcttaaggaatggatagagcgagcaagtgaaaggtctcccaggcttgatagttgcttggcagcgctacaggagctttctggaaaccttagcctgatgaaggttaggcattctgctaaggggaaagtgctcatgcgagcattgtatggaatcgaggctgttaccgtcttaatctgcagcgtacttgtagctgtactgtcgggtaccttcaagccactggtggactttgatgtccctgagaaatttggttggtctacggccttcattgatcttcagaaggccataagcggtgaacttagcaggcaactgtccagaggtagtgttgcagctgtaaaagagctggaggatgttgatgtatgtgctaaacagctgcatacattgacttgcactgttcagcttgaagaggagaatgccagcctggctcattcatttagccgttcaaaggaagtggtcctggcagatactacagcccagggaagaggccatgcggataatctcaagttggctgatgatagtagctgtcagcatgaagtgatcatgctgcaaagtattactacagaaggaggaatggatacagctgatatcaaggaggataccgagaccattggccatacaaaggaagtgatggcgcctgagaaaataattgacagaggacaccaagatgataacacaaagcaggacactggtgttgtcactgatatcagttgcttggaaaggagagaggaactgctgaactgcatctcccggatgtcgaaaagtgctgaaaggctccagttggggttggactcgctgtcgaagcgggtggatgacttcttccatattgtgcttacagggcgtgatgcactactttgtaatctcaggttttcaaacggcggcaaggttgctgcagaggtcaggtcttaatatgccatctcatgtttgtgccatgttatgcatgtatagtcagctcagcggcccatcgtgatgtgtggtgcttctgacttctggcccctgctcagctccaccaacactaagccggggccagatctcagaagcattgtgcatgatatgtgcctctagctgtgctgtgcaaaagcttatatagcttctctttttggttaagtatgaactagagttctgctgagtaaatagtgctgttaagttggtgtcgggtggaatgtacaccatctagagtagagcagctgtatgtatgctcatgtgtccttgtaagttgtaatggagatgaaaaatgagttgcaaaatgttgatccctgtttgtctgttggataacctaaactggtaatgtacaaatttcaatgtatttgtacatcatgttggcatcataagttcgacctagagtgctgttggtataagtaggaactacataccctttttgtgagtagggactggaatgttcgcgagttggtgtcggtggaatgtataacctctagactctagagtagagtaactgtatgtatgctcgtgtgtgctggtaatggagatgaaaatgagttgcagacagcaaaatgttggtccttgtctctctgttggataacttaaactggtatgtacaactttctttgtacttgtacatgatgttgccgtcttgtttt

SEQ ID NO: 31346 - DNA, 518 bp, Zea mays
  Clone ID: MRT4577_128596C.1
cattgggtacctcgaagccggccggggctttcgttacgatacacggacgcgtcatcgctcctcttacgatggcggcgtcacacacgcagaccgtcatgacctgacgcccgacatcattggcacatgacacgtagccttacactcaatttgccacctcgctcctgctctttacgcgatcgctaaagactcttcgagcgccacctctgcgagggcgagcgccggcgtccacagataactcggatgagattccaccaacacatcaaccgcgccctcacctcctcctatggaagagtctcttacgaccaggagtgatcaagacaaggtccataaggatgtgatgggcctcactggcggatacgctgggagtgaggacggactaaaggtttctctggcgaataacccgactcctcctgaaaaatcagaaagcgatccccagagccacgagtctccgcggagagacgagcctcaagctccaggtgttggtccactgtatcgacgaggaattgctcgctagagag

SEQ ID NO: 31347 - DNA, 295 bp, Zea mays
  Clone ID: MRT4577_128597C.1
cagggtgggtttttttttttatatatttaatttaaaatttttaaaaaatccttaaaaaatacttcaaaagcactaactccaaaaacaaaaaggacccggcaaataagccttacaaaacccaaaaactcccaaaaaagcttaacaaacaaacgtgcactactcgacatccaatttctgattaaaataccgtgaagccaacttcacataggccttgaaagacaacttcagaaaacactgggaggtctagggctaaaaggccccagctttctgctatttctatttcccccgaaggctg

SEQ ID NO: 31348 - DNA, 598 bp, Zea mays
  Clone ID: MRT4577_128598C.1
cccccctcgagtttttttttttctttttttttttttttttttttttttttttttttttttttttttttgggtatatataatccaattccccccaatatttactaacacacggggccctggaccttaaaaaacctattaaatttccccccccctttttttttttggactgaattaaaaaaaaaaaaatggaaaacggcccccgggggggttaaacgggggaaaaaacaaacttgattttttgggggtccccccccccatttgggggggtgtgggaacctttccccttaactttccatcctttaattaccggtcggcacccttaaggagacaacgaacgggggaacggccctgggtacaattttaaccttgccgctccaccccccccaaataagggcaggcgttgtctgtacatgcgtccaccattctgatttctaaccccttcacgcccataggtagcagggaaaagaacttcttgccttgtttgggcgccgtcccgggaaagccttccaatccccccgcggtccttggccttggccctttccaatttttggaacttttccacaccccttggcaattagaaaaaacttgaagccccccc

SEQ ID NO: 31349 - DNA, 239 bp, Zea mays
  Clone ID: MRT4577_128599C.1
ctaactctaaccctatctgggcagaacactatgattaatcagggcctgggtcatggtgccgggcgcttaacatcgagtgtgggtagcatgtccagaggggcttccatgcacatcgtggacaaagggtcaagggctggttcgacttcaagggcatctatgaccttgaaaaggggagcgcgcccaactagctgatactgctggtccagtctatctaccgacaccgagcacctattatgggg

SEQ ID NO: 31350 - DNA, 347 bp, Zea mays
  Clone ID: MRT4577_12859C.1
aaggtgttctacacataattataggataaacataaacctgtggaatcataaatctactaggctaatacccaaaaacaggcacagcaccacgtttctataaaaccactaaagactctattttttatcacagcgaaacccatgccaatcttttatcattaagccacccctcctaatactcaacttaacaacagacctcatatctcttccaaatcaccaaagttaacaaactgattgagaaagagctgcaatgacacaccacaatcacccttttgaaaaaacaccaactcaacatctaccaccctgtcacattaccacaccatcttagctcattaatacaccaaaacatt

SEQ ID NO: 31351 - DNA, 692 bp, Zea mays
  Clone ID: MRT4577_1285C.1
ccggccagccagccgccgtcctttcctcggtggttgcgcaaacagaagctggggatcatgggcgtccgcgtccccaggccggcagcccgctccctccgcaacaagcgaattcgctcacacgcgcagtccatgtccatccagggtaccgcgttgtgagtccgaccgatcggctggcggatcacgtcgcgtcctcgcgccccccatctcgcgctgcgcctgtgcctgcgcgcgcgacccgaacggaacgatcccaattattgcccggtcgctgtcgatcgcctcgtcaggcacggacgcgtgcatctgttgggcgtccgtcccgtccgcgaacccaacatttcacgaggcggcctgcggtgtccgtggtcgtcgctctgctactcacaactgcagatcggtatcggcacgcaccggcgcacgtggacggcagcgtgggggagtggagaaccggagatcaaccctgtgtttgtggcgccgaaagtggtgctgccatttgagtgagattaggaactaaggaagctgtaggctgtagctggtgagtggtgaggcatccggttccggtgcggccgtgccgtgcccgtgcgtgcgagcccagttcggctcgccggttccgtcaaaagccgctttgtttcagtttccaggagtaactgatcgctttgctcctccgctttccgttcggtctttctttccag

SEQ ID NO: 31352 - DNA, 515 bp, Zea mays
  Clone ID: MRT4577_128600C.1
gggcgtggctccgcgctctgttgcggcgtcagtccgccgactcaacatcagccgccgcgcgcccctgctctccacactccaaagcggaccatcacgcgcgccgcgtcacatgaacggcgcgccttgggcttcgcgccatacgtaccgcaaccttgcactatacatcggcagagacagagaggcccttatctctggaagaaacatggccagacctctcatggtcagaagcgagatccgtactagttgtggccatggacagaaatgaaagccgttgatgtccaccagatactcatgatctaggcaggacttgtgtgaggcaccattaacaagagctgggggaggatgaagacctggaaggtcggggcacacaactgacctagacgcagtgacagacgccttgcatggtcactggaaggagagggactggatgatccaatgaggaaacacattggtcacagaacacggagaggagggagaaggtacatgacagaacgcgacacactgaattaagacta

SEQ ID NO: 31353 - DNA, 367 bp, Zea mays
  Clone ID: MRT4577_128601C.1
catgcacgctcgcggaagctcgcaattcgtctcgagcgagcttcttaacctacctgttcttttcacaccaacaactgattatataggggggcattttaaccaagtttttgggagaaaaactaactgaaagaagacagggagcggtcttagggatctgtttttaacagtcaggaaacattatgcaacggaactcgctgaaggtccatataaaggcattcagttggatagcgtccttctcacaaagtttcttgagaatggaacttgttgatacgcatggacgatcatgaatgtgatccttcaacatataataacaccacacgggaaatatgatgcaacagcggtaactgaagctaaagctctcaagaaa

SEQ ID NO: 31354 - DNA, 568 bp, Zea mays
  unsure (1)..(568): unsure at all n locations
  Clone ID: MRT4577_128602C.1
gcgttcgcggtcgcgtgggctccgctcccgcgcgtgctgtgtctgttgcggcacttccttggcggtcggcggtttgccggcacctccgcccccatgagcgctgttgcgtgtgcctctgccggccacgcgcccccacctggcggctgtgcgcaatcttgcagcttccggacactcctcttgttgggcttcccccctctttctctgggttttgaggctgttgctgggagcctatccggcatggtgcctcagacctcctcctggccggcgcgcccaagatccttttaatactcctcacttgaatgcatgtccctcttggtctcttcacccggtaagaactcgagaaattccctccctcgcggaaacatggtgttagctgaaaaccaggcgtctgaaattccgcctttgtcttgttcgtttttcccggacgtccggatcgtgctgcatctacctcagatgactcttgcaacggctttcatgctttgccatcgcttctgtttacaccagtcccttgccttcnatggttggcgggcaattgtctcagtgtgtgtatttctagcgttcaaagttg

SEQ ID NO: 31355 - DNA, 477 bp, Zea mays
  Clone ID: MRT4577_128603C.1
ggtggggggtgtttttttttttttttttttttttttttttttttttttttttttttttttttttttttttttttttttttttttaaacaggggtcaggaatcaatcgttttggccggggtttcaagaatcaagaaccccctttttttccctttaggggggggggggggcatatctctcccaattttttacaagcccacaattgctcatgggccatttgacaaccctttttttcctgggatggggcaatgtccccataatgataacccatttaacgaatagcccctaccggcagagcagtgaagttaaaaaccgcctgattgtctaaagtcactagcagcacaccttgtttccattgaagcaattgaaattaaaagggggggtactgttggtggtcaaatcattaacacccaattattttggttttttgagggccaaacaacctttgccgcacaccaagggacttaagtattggtggt

SEQ ID NO: 31356 - DNA, 387 bp, Zea mays
  Clone ID: MRT4577_128604C.1
gtgatagagtgagctctagataatcctgctcgagatactatagtatataaggtttggtcgttctccgacgcggtgattaacatgagaacacttgtgtgggtggcaatagacaagtacttgatgcttaaaggctcgattggcacctacattcacagtcgggtaatactattgcgtcggcgtttgcgtgccttgtgccgttactggcttactacagctatctgcgaccaaaggactacaggtgcacaatgatcaagaacgtatccatatagcccttactaggtctataatgtttccagcaagacgctctagactagcatggcttttctcttgtcttcaaaggtggactggaacagacagcacgcgaggtgtcattgtacactgcagaca

SEQ ID NO: 31357 - DNA, 460 bp, Zea mays
  Clone ID: MRT4577_128605C.1
gccgcacgaatcgatccgccgaaaaggctgcaggcgaagccagctggcgtagagaaaacggacgggatccccaccgcctcgcgcgcagcggcgtcgttcctgtcattgtacttcacatcctccacatatcattccggactcacctttaacttttctaaatgatgctttattctccgtaactgtctcttgtatgcattatagcactatgtgcttacaatatcctgtcatgtctatgcctctcttgcctagcttttccatggctacatctggatctgatactttctgtacatgaattactgtggtcttgttacatgtgtcatctaacagctcgtacctttggctctttaaccattcactacatgcttactttgctgtcctgctggtctatcgatacattcttcatctcccctacttcttattcctaccttctacatgagctttggatcttttattcttagca

SEQ ID NO: 31358 - DNA, 406 bp, Zea mays
  Clone ID: MRT4577_128606C.1
ccgcggaccggccggaataatttcttggcacgttgttctccccggcggccgtcctttattatggggggttttttgaacgaatagtgtggggtacccacgaagaacacatacaccagtaactttcggagcaagctgctgctggatttgtgaaaacaaacgagctttcccccctttggtactgacaaaccataacaaaacagcttgggatcagaacactctcagtagccggacattattcaccggccctagacgccgctgagctgggagaacaccttgctgtaaactgcgcccacacccgtgacgggcgagtagcacgggccggccgtggacatgaagctggtcgaccacagcacccagcgcggaaggacgacgtgctcggggaactgcacgctcacagtgccggtga

SEQ ID NO: 31359 - DNA, 405 bp, Zea mays
  Clone ID: MRT4577_128607C.1
agtttctgctgttttgtttaatcaaatgcgtgtcatggtctctacctgagctgggaccttgtacagacttgaacttgtgttaagttcaaagcaagagtccttgactacaaaaagacttacataaataaataagtcaaaacaagaatggaaagggtctaaatactcattagtaatgttttaagacaaagtcttgctttcagcttccaggggttaattttattttttgttttaaattgataattggatatggttgatttatattgggtttaaactgtggagctttcatgtttactgtaattagtcttaaaatattttttacttagtaaccagtacttttgataatgtggtggcaacaaaccagcaactatttagaagtgttacaagacttcgttcttgagtattggg

SEQ ID NO: 31360 - DNA, 364 bp, Zea mays
  Clone ID: MRT4577_128608C.1
gcgtccgatccaagcccttctccaatcgctccgccaggacatccccgacgcccgggatgcggtgcaaccacccactccaacgcaaacgcacggcgggtccgacccaacgaccgaccgttccgggtaacataccacgcatatacactctatgaccgccgcacacttcatcaacctcatcagcttgaatgagcacctacacatccagtgctggagaacatcctccagagatacaaaatcatccactcctccgcgagactcaactctcgtgggcgctttcgtaacccgtcgaatgacgtacaaagccgcccctactgttggcaactcagtatccgagtttccgtcgggcatcagcggcgggaacaca

SEQ ID NO: 31361 - DNA, 444 bp, Zea mays
  Clone ID: MRT4577_128609C.1
atcttctgctcttttctttaatttaatgcgtgtcatggcctctacctgagctgcgaccttgtacagacttgaacttgtgttaggctcaaagcaagagtccttgactacaaaaagacttacataaataaataagtcaaaacaagaatggatagggtctaaatactcattagtaatgtattaagacaaagtcttgctttcagcttacaggggttaattttattttttgttttaaatcgataattggatatggttgatttatatcgagtctaaactgtgtagctttcatgtttactgcaattagtattaaaatattttttacttattaaccagtacttttaataatgtggtggcaacataccagtaactatttataagtgttacacgacttcgttcttaattattgtaagctcattcataccccaattaaagcatttgcacatataa

SEQ ID NO: 31362 - DNA, 215 bp, Zea mays
  Clone ID: MRT4577_12860C.1
agatttaatcaatgccacttgcaattggagcgcgaacgccttaacgctattcacctcgtgcactgatcagaatcaccgcatgcacactggaatcttgacttagaagcgtgcatgcgtaccccttgacacaagaactcctaccgattggcttttcaacaaatcacaatgaccacttgaggcaatcaactgttgctctaggactaggtggatttact

SEQ ID NO: 31363 - DNA, 830 bp, Zea mays
  Clone ID: MRT4577_128610C.1
cattgggtacctcgaggccggccgggatccacatcctctccttctcccgctcggcaaagcacggtctagctatgaagatgagcacgagaggccagccagcagagggtcacctgtggctggtcttcaccatgctgttcgtcacttctgcggtgcgcagcgtgggggcgagcagctttgctcctccaccgtctgtctccgtatcatccccagcgtacgatcctgttatcaaggtggtagggaaggtgtactgctacagatgcttcgatgaggcgcacccagatgaatcgcatgggaagaagcacctgcaaggagccatggtgaaggttacttgccaggcagatgaccaagcgctagtggcattcggctacaccagaagcaacggcaaatacagcgtgatcctcaagggactgccgattagcagcagcagcaactacggggctgctgactcgtgtaaggtcgagctacacggagcgccaggaggatcggactgcaacgtgccgatcgagctaaacctgtcagggctcagcgtctactcccgatcaagcgaggaggtggtcttcaaagcgaaccagataatggcgttcgcgtccaagaacgcgtttggctgttcatcgaaaccacagacgcagtcgtcatcatcaccggttcatccctactacagctccccgccactcatccctcaccagtacccctcgcctccggtgccggcggctacccacaggtctccaccaccaccaccacctgctgctaaccagcttccatccccagcgtaccagtacatttcgccaccgctttacagcagcagcagtccatgcttcccattggctacc

SEQ ID NO: 31364 - DNA, 252 bp, Zea mays
  Clone ID: MRT4577_128611C.1
gtcgccgccagtccagctccaggcgtcgagcgaggccgcagcaaacgcagcatcggccatggcggccacccgcctcagccgatccgagacattcctgtctgggtgagggtgaggccaaccaaccgcttcgctcctctcggtaaatcggcgatccatccaccggagccgcaaccaaaaagcacagcaacgcccaaattaaaaacagggcaggggagaaaaaaagctcgcagaagtgagctccctcctcccccc

SEQ ID NO: 31365 - DNA, 415 bp, Zea mays
  Clone ID: MRT4577_128612C.1
attcgcccgattgccggttgggtactgatgaactccaatatatctcctaactctatataggtagctacactgctgtgtggagcttcgctcccccgggagacgtagcgatatgtagatcaacctgacctcattgtggccgatggtctctctcagaccaccgcctcaaggacgatatatggggatggcctcggtatggtgctcgactcgattacgtttccaactcaggcgcttcttctctacagtcggttaatctgctgatgctgcctggtaacaaggcgagactgcttactctgtgccgaccgctgggttgttcgccaccatatccgacttcttcaggcctgatggtatgcccatccctacaccggagtctgctctaataattcgacactgagagagagagttggaacccatacaa

SEQ ID NO: 31366 - DNA, 231 bp, Zea mays
  Clone ID: MRT4577_128613C.1
ctgcagtactccactccgttcctctatgtgcttagctttcttgtagacactcctagagtgaggtaggtggggcgggggtagtcgggagccaggagacgagagtctctcttcctcctcctacctcccagtcgcacctttctttctttcttttttctttctttttgggtttctctttctcctggtccggtccgggagacctgctggaccagacggtgccgactcactgcaggc

SEQ ID NO: 31367 - DNA, 662 bp, Zea mays
  Clone ID: MRT4577_128614C.1
gttccccaaccgtatcgtgaacccgccgccgactacacacgacggagacgcatgcaagacatacttccaaggacgacaatataatgcaccacctgaaaaaaaactgcatgactagggtgaaaactaaccgccgaaaaacgaatctaacataaaagcagcttgatgctgcatacgactatgatggcgaccacaagctcgcgaaacaatactcctacgagtgagagctcatagtacagatgctacattctaccacgtggtcaccattagccatgtgtccaataacacctcttgaaaaactgcacttcatgacgagcatctatcgagacgttcgtagaatatatacagatactatgagctacaaacaaatcatgctgtcaccattagagaactacgtatgatgcagctttacttgctattaatatcaacactacctatgatgtcaacactatgtaccaaaaggacccgattcaaccgctagcatcgaatttggatcaccataccgacgaacaacagcgcgcacgacgtaaacatgtacagaaatgaccaccacgtccaactgatatccgataacgataacttccaacatattgagaatgaccacaaaaagacatcactggctggcctaatgaatgagctagacaagataattgatcagtgatcac

SEQ ID NO: 31368 - DNA, 200 bp, Zea mays
  Clone ID: MRT4577_128615C.1
cttatgtttatgataagaagctagcaccatttcttgagatggaaaccttggttggtttcaatagggaaccacctttagaagtctcaaaaacctaaacaatttaaaaaaagttctcctttgatcttttaaaagtaaaggtttgttaaattctaataccttcccgttgtgaaccgattctatttgtgcactgaaatttttcc

SEQ ID NO: 31369 - DNA, 297 bp, Zea mays
  Clone ID: MRT4577_128616C.1
acttgtcttacattgcaggggaatattgatgactctcctctgttacctgatgcctggtgggaaaaccagacaggactacctatacgagggggaattccactctggagctgaaggggacctactgatgcttacaagtttagatacgagcggtgggggggagtctatacttaactttcaacagccggccatccttgcaggaaacgaatactcagatttgacatagctctcgagaccatttatttctagaggacctctttcagcactcactgttacgttgaactccactatagtgagaga

SEQ ID NO: 31370 - DNA, 213 bp, Zea mays
  Clone ID: MRT4577_128617C.1
accttgaaactgccctaaatttattcttgaacacgatctgcagtgtatagtgtggattgggtcattccattctatttatttgtgtcaatgacgcccaactcttcatgccctcaccatatatcacacgcatgagctgtgcatgccccatatggccactttcctgtccaggcttttcttcaaaaactctcaactgcccccccagttctgctctta

SEQ ID NO: 31371 - DNA, 838 bp, Zea mays
  unsure (1)..(838): unsure at all n locations
  Clone ID: MRT4577_128618C.1
tttttttttttttttccggctcgagagtaccaataatgatgtcttataaacagtagtaacttatattttataaatatttaatgttctttcttgatgaaagttgaataccaaggataattaagaagggtcggggagagtatatattatatatattatatatatatatatatattattataattattacagcacgcaccgttgcctgcatatcgatctacccgatcgagctgagcctgagactgcgagggcgacgacaaaaaggctgcagctgtagctgcaggagatgaattgtgggattcacgaggagtactggacgatggatctgtagaatgtgtttggcctccagttgagtgggatgacgtcgcgtgcgacgagcgtcttgccggagtcggtgcgggtgcggatggagaagggtggctgcaggcggtggttggagtcgaggcgccagatggatccccatgactggctcatgggcgtccagcggcgggcgcgcttctccatgaggtcgacctggacgacgtcgccgtcgccgttctcgtactcgaccagcacggcgaagtagacctgggtggagccttcctcgacgtggaagccgaccttgaggcctgggaactcgcagggtaccctggcgaactggatgtcgatgatgccggcgcggcgcaggtcgtcgttgcggccgggcttggccagcctgccgaaggcggtgccgctgaggtcgaagtggtagggcgcgacgcccggggtgtagttcatgtcggtgatgacgacggtctcggtgcggccggagcaggcggcgtnnnnnnnnnnnnnnnnnnnnnnnnnnnnnnnnnnnnnatcc

SEQ ID NO: 31372 - DNA, 308 bp, Zea mays
  unsure (1)..(308): unsure at all n locations
  Clone ID: MRT4577_128619C.1
atttcggcacnagggttggggctcccatcgtgccatacattttatggatcacccattaactctctctgggcacttatcctgctgttactcattcttttcatatggcgaaacaaatcgtgttgaccacaataggcgccgggatatcaaccggtgaaatcctagctggtagatcctgggggggcgttactaccactcattgttggcgcatcctagattcccatacggggagaggggcctgcacgaatatcgagcaatatcatgcgctatgtaaagtgagctacgctttgtacgtgggcatctcaaacagg

SEQ ID NO: 31373 - DNA, 419 bp, Zea mays
  unsure (1)..(419): unsure at all n locations
  Clone ID: MRT4577_12861C.1
cggacccgaagggcggggcaggcccacgcccacgcgaacgctagcaacaaaaaaaggacaaaaacgaaccaacaaaggcagggaaaggagccaggcagcgaaggcccccaggaccaacagcaagggcagcaacggcgaccaaaaacccgcaaggcacacaagccccgagaggaacacacagaccaccgagccgaacaacagaggagacggcaggaggggaaaacccaaacccacaaccccacagganccaacaagcaaaaggaacaggcaggagacctacaacacccgcgggccaccaacaaacaacaaccaaaagagagggagaaccgacgaagcacaaaaaggaacaaaacaaaagggaacaacagcaagggcaagcaaacgcagggggctagttttaaaaacaaaaagaaaccttg

SEQ ID NO: 31374 - DNA, 409 bp, Zea mays
  unsure (1)..(409): unsure at all n locations
  Clone ID: MRT4577_128620C.1
attctcacaccatcaatnncgacagatagatttacaaaaanctgcccttcaaacaaanagatatacattgtcatttaaaccatgaaaaacatacatgcttcgtatcatcaatgctgcactgaatgaaaaactgttttttatgattgccggccatcaactcactgtcgtcgaagttgatgccacatacgtgaaaccttttaaaacagacaccatcgttatatccccagggcagaccacaaatttccacgtaacaacccatcttctttcctgaaagtacttgattcccccctctcctttcatgtacgcacccaattcattctacaacctgacccccacttctaccttacattacgccagtttctcttacgaatttccttcactacttttcttatcacccccttcctaaaaa

SEQ ID NO: 31375 - DNA, 483 bp, Zea mays
  Clone ID: MRT4577_128621C.1
gacttaaaactaacagcattgatcttacatgatgaacaagtttattgggcagatggcatgcttatagctgatttgtctcaacaaaatactagtgctgcagaagttggtgctcaagaaagtccaagttgattggaagaaaaacaaaggaaaagggacttaggagttgctatttaggtgtagcgaaccccaacaggaaaatgtatggtctcggaaatttggctaaaattcatcggatcatgcacaatactgggtccggtggcgccctagacctatgagttcaacagctagttggcgtgcaacggtcggctaaaggctaactgacgaggcgatcgatccaatgccacttaaagaaagaaggtgcccaaccaaatcatggaggagctgctacaaccgagggttcgggggggcctccatcttttcttggttcacccacacaaattgtggtttaaacataattcatatatgttttttaaaccctattta

SEQ ID NO: 31376 - DNA, 557 bp, Zea mays
  Clone ID: MRT4577_128622C.1
ctccatagggcgattgggttcctcgaggccggccgggacactgcgctgcacagcacagcacaggtggtccgcgttttggtgagtcgttggagttagtttgcagaccacagagagacacagtcacggccacacggacagacacgcgtacctttccattcaggagggacgtcgagctttgttatctctgctccccattgatgtgaggattggctactcttccaaggttcccttccctcattccctgtgctacacaacaagacacttctgtcctccacatatctactaagtaatgaagtgcttagtaatgttaacctgtcggtttgtctcgtcttgcaacagagagaaatattacctttcactagggcagaactctatggaggaaactgggaagccaagatgaaccttcttgctccagtgagcaacctccatcttctttacttccacggcgcaaaagtcaccatcacggtttcctctaaaaaagggtgaaaactgtatcatatttaatggcatggcacctcagattgaggaaaaccaaaaaaaaaaaaaaaaaagcggcc

SEQ ID NO: 31377 - DNA, 235 bp, Zea mays
  Clone ID: MRT4577_128623C.1
cggcgcatattcccagcgaccactttttattgatagccaagtgcatgcaaccagccagcctgtccgggaagacggcagtggacgcaacaaaggaggccgcggccaacgtctgggcctctgcgaacgccggcatgcataagacctctgccgccgtgcaaggccaggtggagaaagccacggcgcgcaacgcgtcggacaaggtcttagcagatgagcgccatcataagcgcgtgcg

SEQ ID NO: 31378 - DNA, 246 bp, Zea mays
  unsure (1)..(246): unsure at all n locations
  Clone ID: MRT4577_128624C.1
aaccggggagggtatataggggccggcctttttttttttctatgcaaatcgtgtctaggacgggacacccccttgnnngggggggggtaatactataatactgaagacccctccctccctgcatgtataatgaaaccaaccataccttctttggcttaaaggtgcatgcaatgcaacgcggaataactgctattaactctggatccatgacaacctatttttttaaatccatcttacttggggaaa

SEQ ID NO: 31379 - DNA, 215 bp, Zea mays
  Clone ID: MRT4577_128625C.1
agaccaaaacaatttaatttttatttactgggggctggttgaaacacagtaaaactaattctgttctggaacacgggaaaaacagcactaaacgtccttttataccatgtacattgcacccccaataaaacaaactgaatgccaaccaacttacttaaattcctgggctgattttggaaaatgagcttttttaatctgccgggtgatttgggaaa

SEQ ID NO: 31380 - DNA, 316 bp, Zea mays
  unsure (1)..(316): unsure at all n locations
  Clone ID: MRT4577_128626C.1
aattccacaatttttccacgcgntttttttatcccacaaccaacctggnnaaatcgcccaatttataaacacctatcgtgcttnaaacaaaaaaactacccatattatgatcctgcaacatgcanccttcacttttaactactccttgaagaccttaatttctttttttttttttaaattcatctcataaattcctttttttacaatctttttataatataacctatcatctccccatctttaatagattagtcnattttttaataatcaaatttacctctcttcaccttttttccccattttttttttttttctc

SEQ ID NO: 31381 - DNA, 396 bp, Zea mays
  Clone ID: MRT4577_128627C.1
ggaccaccgaaggaacttgtataaaccaacagtcgaaataggacgcagctgtggatatatcctggtggtaaacaatggattcacgcgtcgcgatcgaccaaatgcatgcatgcatgccagcacggccaataagacgaggcgcgaaacgacacgcgcacgtcacagattatccccaagcaaactagctaaccgcgtcggcgcaggtaggcgtccggcgtggcggcggtaggctgcagcctgagctgctcgtagaacttgcggatgaagtcgtcggcgtcggcgtcccacgcggtcgttgcagcacccgtcctcgggcacggccgggaacggcgggtcggtgacgcgcaacgggcggaccccggcggggctggggcccaggatccaggccagcggacg

SEQ ID NO: 31382 - DNA, 807 bp, Zea mays
  Clone ID: MRT4577_128628C.1
ccccgcgtccgcggacgcgtgggcgagctcaaactccgcgccggcgtctcagttgctgcaagtggcggcagcaagctagaggcagcaactgcataccttgcaagaaaaaatcggttttgttgacgtaccgatgattttcttgcaagttgtgcagttgttgtctcaagcttgctgcctccctttgccagaactattgaatgtgaaagcacagatttagctaaaggctataataatcttcaaaggttcaatataaattcttggactatagactgaagtatggctgctgatcttccaagatctctccagttcagaggatgggattatgggagcttagaccagagctgtctaagcaattccagagtacagaagggtatactctgatcctagaaaagatggcatattctatcggaccagagtcaccagaccttggatgaaagggcttcagtttaagtcctacaagagatgaacgatggcaaccaccaaaagtccaactacgtagaacgatggcaaccaccaaaaattgcccattgttcatccgacgggcaatttgccgtttcttctcatggtgagacatgggatgctgcaacatgacccgaaaaactggatttcaattcaagtgaacagtttctccatttgtacggtattccattgcaatttctgcctatgatggtgcgcggatacctgggctaagccatgtggagacacagacaccatatatgaagttgggcttttgctgccaaccaatcatgaacaccaaattcagagttaggaatgaactataactattcatagtcttgttattacctt

SEQ ID NO: 31383 - DNA, 504 bp, Zea mays
  Clone ID: MRT4577_128629C.1
gccggccgggctccagaatacagcctgataccatgactttctttcttgcattactctctcattgcccccatccccagcgtgcgcggtctccttcctctccagatgagtaatcgaacaggtcacatgtataaagctccttcattcagtttcccttctaaagtgtcttgtgcaggaaatggctgtactagtagcaagtttgcttcattgatcccctttgaggaaatggtcagggaaaactgcttaaagttgctcaatttggatgatgatgcagatgaggaaaagtttataaaggcaaaggagagaccccattcaccaaacctgagcatcatgcgaccccgtagaactaaactgccaacgtatgcagaacctcacagcttgggtagatctctcaacggctgtcctgccttaggatctgatgccattgattccaagacaaggtccaaagcatcggaagctaaagagcctgtaattcaaaaatccactcaaaattatatccagcttgat

SEQ ID NO: 31384 - DNA, 559 bp, Zea mays
  Clone ID: MRT4577_12862C.1
tccattcatggctgcgagtccacctccgccgagctgccagtgctccagctcgctccttcctcgccttcaatctcttggtcgccgcgcccctcagctcgcgtagcttgctggtggcccggccactcgccctcggcctcaccttcaggccgcaacgccatcggctcctcgtccggctttaacttcgtcgtggccaacagcttcaaatccttgtagcgtgtctccgcactctgcgtcatcgccgtcatggtttttggagttcatcgtgacacgctgtcgatgatctacgtatggcggaagatcttcgcaagttcacgcagcttcgtggttcactccaagacatggttgatggtgtgacttggcctgccaccctgccaccgggttggacggtcgagtgggatgccgccttggcaggagaggaccaggaggagtagtgggccaggccttgtcctattcctcgttatcgacgttattcatcatccgctgcaatattaagaacattgtttcttcttccaacctttgtttgttgtgattagattaagccagagccaaaaaaaaaaaa

SEQ ID NO: 31385 - DNA, 1256 bp, Zea mays
  Clone ID: MRT4577_128630C.1
aaaaaataaaggtcgagtccaaatccaggttatagatcctctcgcgccgccgctcgcagccgctcgccgcccggtacatctcccccgcgcctctccctgctcctggatttcaccgatctggcatgctttactgtcccgtcatacggtggcagcgggagccgcccccttcctgcctccacagctcatgccatgcatggccgatccattccctcagatcgggattgccgcagacatgccgttgcttccccgttagcttctcccttgtcacaccccctcgcttcgttctgcgtagtttcggggtttgacaccgcttgtctatcccgttcctatagcttttagggtttcgagctcaaactccgcgccggcatctcagttgctgcaagtggcggcggcaagctagaggcagcaactgcataccttgcaagaaaaaatcggttttgttgacgtaccgatgattttcttgcaagttgtgcagttgttgtctcaagcttgctgcctccctttgccagaactattgaatgtgaaagcacaagctgtctaagcaattccagagtacagaagggtatactctgatcctagaaaaggtggcatattctatcggaccagagtcaccggccgggtggatgaaagggcttcagtttaagtcctacaagagatggtacgatgtaggcaggaaaaaaatggcattcctaccctatcttggttctaagctgtaaaccttggcctaatttggttaaatctgtctgagcctttgtagaacgatggcaaccaccaaaagtccaactacgtagaacgatggcaaccaccaaaaattgcccattgttcatccgacgggcaatttgccgtttcttctcatggtgagacatgggatgctgcaacatgacccgaaaaactggatttcaattcaagtgaacagtttctccatttgtacggtattccattgcgatttctgcctatgatggtgcgcggatacctgggctaagccatgtggagacacagacaccatatatgaagttggtctttttgctgccaaccaatcatgaacaccaaattcagagttaggaatgaactataactattcatagtcttgttattaccttaagctcttgattttgcaacgaacctgttgatgcgcagttgatctaacacatgagatgtggtttaatagacaatacaagtgtattctagttgtctttttcatagtgggtcagtgaaaaaaagtgttttgaaacaaaaaaaaaaaagaaaaagcggcc

SEQ ID NO: 31386 - DNA, 320 bp, Zea mays
  unsure (1)..(320): unsure at all n locations
  Clone ID: MRT4577_128631C.1
ggaaacaagagagcggccgcccnaaanaannanntttttatttagaaggaacagccagcaagcccgggganggggacccaatcaatcgaggaaaaacacacacccgcgtgacattacaaatggagaaccaccgacgggaaaattggaaaaaaaacaattagcatagaaaacgccacaataataggaaaacaaaatataggcccgcccaaaaaaaaaggataacgcatgcgcggccagccggggacgaaccaacgaaagactcactcaacgcctgagctgaaccccacctcaccccggcgcaagcaaacaagcaagcaagc

SEQ ID NO: 31387 - DNA, 2002 bp, Zea mays
  Clone ID: MRT4577_128632C.1
gctcctccgcaccattttttactcctcttcttcccccccaaggccccaaccatcccactctctctatacaacagccacccccgcgcccttccgcccttgtcgagtccaaatccaggttatagatcctctcgcgccgccgctcgcagccgctcgccgcccggtacatctcccccgcgcctctccctgctcctggatttcaccgatctggcatgctttactgtcccgtcatacggtggcagcgggagccgccaccttcctgcctccacagctcatgccatgcatggccgatccattccctcagatcgggattgccgcagacatgccgttgcttccccgttagcttctcccttgtcacaccccctcgcttcgttctgcgtagtttcggggtttgacaccgcttgtctatcccgttcctatagcttttagggtttcgagctcaaactccgcgccggcgtctcagttgctgcaagtggcggcggcaagctagaggcagcaactgcataccttgcaagaaaaaatcggttttgttgacgtaccgatgattttcttgcaagttgtgcagttgttgtctcaagcttgctgcctccctttgccagaactattgaatgtgaaagcacagttaagtaatgccacgcccagagaatccaaaaggttgctgatataaaaagttgctaataagtggtggaacttttagcggagtaaattgtatgcctttatgaaataactgaagtagatatgttggcatgcaaaacctcttcatcttgtgttgatattttatttcagacacatacttaaattaagaaacaattttatctaatgatatgaagctggacgtgtattggcatgctttgattatgtaatttattgctgttatctacacttctcacatacaagtgctgacatctcaatggagctaaataatcccagagcatgtgaaatcctaatgacgcatgcgtcttgagggacgaaacaggacaagtcagagattggtgatgaacttgctggaacaagcttatgcatgaaactgctgatggttttaacctttttaggatttagctaaaggctataataatcttcaaaggttcaatataaattcttggactatagactgaagtatttggctgctgatcttccaagatctctccagttcagaggatgggattatgggagcttagaccaggtactgtgtttcctgctgaccactgtgtcttttcgtatctcctatcacttttgtctcaggatgtttgtatttcagggttgaaattagcctgaggttttggcttcctccagtaaaaaaaaattgcttggagggccacttttggcatatgaaccatctgtctaagcaattccagagtacagaagggtatactctgatcctagaaaagatggcatattctatcggaccagagtcaccagaccttggatgaaagggcttcagtttaagtcctacaagagatgaacgatggcaaccaccaaaagtccaactacgtagaacgatggcaaccaccaaaaattgcccattgttcatccgacgggcaatttgccgtttcttctcatggtgagacatgggatgctgcaacatgacccgaaaaactggatttcaattcaagtgaacagtttctccatttgtacggtattccattgcaatttctgcctatgatggtgcgcggatacctgggctaagccatgtggagacacagacaccatatatgaagttggtctttttgctgccaaccaatcatgaacaccaaattcagagttaggaatgaactataactattcatagtcttgttattaccttaagctcttgattttgcaacgaacctgttgatgcgcagttgatctaacacatgagatgtggtttaatagacaatacaagtgtattctagttgtctttttcatagtgggtcagtgaaaaaaaagtgtttcgaaccattgttccttttcccataatgttcgacgcacacaatttgccaagaactatctgcacatatggttttgt

SEQ ID NO: 31388 - DNA, 763 bp, Zea mays
  Clone ID: MRT4577_128633C.1
agaccgggtgaggctagctagctcgagatcatccattactttctatccaccaccacaatggcggaggtatcgactctgcctctgcagttcgtggtggccgcgttccttgcgctgtctgtgaccacgacagcgtcggcgtcacctgcgccggcaaaccggagcagctgctacaagcgtatgttcagcttcggcgactctctgatcgacaccggcaatttcatcgtccactacgccaatgcgtcgggccccgtcctggcgttgccatacggcgagaccttcttcggacgccccaccggccgctggtccgacggccgcctcgtcgtcgacttcatcgtggagaggctggggttcccgtactggccggcgtacctgcaagcggcggcagggaagtcgccggcggaggagttccggtacggcgccaatttcgcggtggcggccgccacggcgttgagccaggagttcttcattaaaaagaacctcagcgttgaccagttcccaccgatccccccctactccctcgacgtccagatcggcttgttcaagaaagtgcttgccgcgctcgcctccacggaccaagagcggaaggaggtgatggcgagctcgctgttcctgggtgggagagatcggcgccaacgactacaaccaccccttcttccaaaacaaacagtcgaatgggtcaggcccatcgtgccccaggtcatcaggtccatcgctctctccatagagggccttgatcgagctgggcgcaaagacatgtacgtgc

SEQ ID NO: 31389 - DNA, 267 bp, Zea mays
  Clone ID: MRT4577_128634C.1
gccggccggtccgggtcttgctcaattacatcaccatggcaatgtctgcaaatccatggattgatggatggatgttggttgtttcttaacaatctggacatgttgttcatttgtttctttggctatgtatgttttagcagtccagcgtcccccttacaaaatatggcgttcttttgttgactacacagaccgttgttcctttcctgagttattgtctgcaaagattagagatatcaatggcaaaaaaaaaaaaaaaaaaggccccta

SEQ ID NO: 31390 - DNA, 189 bp, Zea mays
  Clone ID: MRT4577_128635C.1
ccgtatccgccgcctcctcaacttaacccttgttccggctccccaggtgtggcgggcgtacagccaaaacttatccggcgcatggggaagacacgtggtatgggagctgggcgcaagctcaagacccaccgcaggaaccagaggtgggctgacaaagcatacaagaagagccacttttgcaatgagtgg

SEQ ID NO: 31391 - DNA, 170 bp, Zea mays
  unsure (1)..(170): unsure at all n locations
  Clone ID: MRT4577_128636C.1
gatcaanaaaagcgtaacggcaaacttaataacccagtaccaaagcggggtaataaagttttacaatcgaagtggaaaactcacacaacgtcagataggtaagaaccgacagagacataacacaataggagccactcaggccagatcaaagggtaggaggggcacacaag

SEQ ID NO: 31392 - DNA, 670 bp, Zea mays
  Clone ID: MRT4577_128637C.1
ggccgcttttttttttttttttttctttttttttttttttttttttttttttttttttttttttttttttttttttttttttttttttttttttttttttttttgacaaaaacaaaaaacccaaattccccaaaaaaaaaaaggggggcccccgtcggggccacaaaagtgccctaaaactaaaaacgcgaccccccctctgaaaaatttggcccccgaacgttaattttggaaccaccccgcgccaaaaaaaaaagaaaaacccgggggggggaaaacaaaatggccccgggcttgaggccaaagacccaacgggggggccaccccccaacaaaccataagcctctgggggggagggggggaaaaaacaaaacccacccatagggaaggagggggcaacgcccctaaaaaaaaaaccccgggagaggccccttgggccccccccggggaaaaagcgggtaacagggggggggcaacaagctaaaaaagaaaacccggggaaaaaacaaaagggagggccaggctacctaagggacccaggcccgggggctgtcccccctaggggcggaacaaacccccgaaaaacaagggtccgggggggttcggaaaaaaacggcccaaaaaaaattgggggatttccccccgggctggaccacctaaaaaagggctt

SEQ ID NO: 31393 - DNA, 451 bp, Zea mays
  Clone ID: MRT4577_128638C.1
gctgtaaaagaaataaaatgtttaactgaggataatattgttcacaggcacagctaaggaaattacttaagaatactgccacacgtacaattatttacttagaattcaggaccttaatgttgaataacctagattgaaatcctcaccactaatttcctccttagctaatcaccatgtatataacacaatgtcgtgtgaagtgtgaacctggagacaagacctgcgaggtttgccatgtagcaccagaagatacaactcatatactcctacgctgcacctttgcctccgccttctagagggctctaggtgttgggatctcccaaggtgagtctgatgtcttcttgctcagcctaatccgcctcccgagcatcccttttgatcttcataacaacattctaatcaacggatttgttttatgggaatactagctactttatcccattctggtcca

SEQ ID NO: 31394 - DNA, 539 bp, Zea mays
  Clone ID: MRT4577_128639C.1
tgttgaccttttttgttggactttgtgtttttgttttaaatccaagatgcaccaaatttttgccgctgtgacaatgcttcgacgtacacaaagatcttacatgtgagccggttcctaggtgaggtcaaggcaataaacatacttgtggaaagaagcaccgctgggctctaaaccgtggcacatacatttggtgtaatgcttgccccgaagaggtaagcttgtggctctttgacgttagagccaaaccatctatatgatgagcttgaaccaacgctggaggatgcttagatcggtgagacgggtacctgataagtagaagtgggcagcataaaccttgccagggggcactatgatggacgtatcggccctctgttagttattaatttgactttggagccagtttatcttgcttcgggtggtggcacaagccataagagagaaggacagcatataccgacaatgagcttactgcttttattttgcgggctggcatgaatcatgatgtaggtgcctcattggagagagaagcttttctactg

SEQ ID NO: 31395 - DNA, 277 bp, Zea mays
  Clone ID: MRT4577_12863C.1
tgcggtacctgctgtagtcacgagggacgggcggcggcctggtcggcagagagtagcctgcaacattcggccgtggttacgatgagtttacccctcaatcccaaacctttcctcaatggactaacaggaaagccagtgatggtgaaacttaagtggggaatggagtacaagggctatctggtatctgtagatggctacatgaacatgcagcttgcaaatacagaagaatacatagatggagctttgtctggacatctgggtgaagttttaataaggt

SEQ ID NO: 31396 - DNA, 382 bp, Zea mays
  unsure (1)..(382): unsure at all n locations
  Clone ID: MRT4577_128640C.1
cccacgcgtccgcacactcgaagcactctctctactttccgcgagctctagaaaccctaggtgtggccgaccggcggttgtgcnaggcgattgcgatggacctggacgcgctgtgctaagactttgagaagcactactaccttacgttcgatcnctaacgagcggtgctggcggggcttgataacgagaccttcatgctcaccttcaagggccagaagttccagggtccattcttaattgtctgacagttggtatctcttcacttacaggcctgagagcaccagatcgctaccgtgcactgacaggcacagaggaccaagggaggactgctccgattcgtttcgctatccatccgtaccggctactaggagcaccacatgaa

SEQ ID NO: 31397 - DNA, 800 bp, Zea mays
  Clone ID: MRT4577_128641C.1
gtcattggctttctcatgtttggagagaacactttttatcccaaatcactttaaaccttccaaagcattcagttgcctcaaaagttgcactatggaccacggtgatcaaccctttcaccaaatatgccttgttgctaaacccattagctcgaagtttagaagagttgcgtcctgaaggttttttgaacgaaacatcatgctctattatactgaggactgcccttgttgcgtcaactgtatgcattgcctttcttctgccgttctttggtcttgtgatggctctcattggatctcttcttagtatacttgtggcggtcataatgccagccctgtgcttcctgaagatcgcacaaaacaaagcaacctgtccacaggtgatcgcgagcgtcggtatcgtaatactgggcgtcgtcagcgccgcgctggggacctactcgtccgtgaaaaagatcgcagaaaactactaggcactggggacagtttctctccgcagaggctactaccacacggttgcacgtacgtccggccggagctggggaatggtcagggtttacgtacacgatctcaaagttttgctagaactaccgaaattccctgtagattattactgttatgattcggaccacaatagtctacttatacaaacaaaaaaaaaaccctgcatcatcacatcacttggaataatgtaatcatgccctccttttttagccgaggtccctaccatctcgctgtactgtagcaagttgctgtgctggcgactgttccctatacaataaggttctgctttgtgcaattgaggt

SEQ ID NO: 31398 - DNA, 143 bp, Zea mays
  unsure (1)..(143): unsure at all n locations
  Clone ID: MRT4577_128642C.1
tttttatagggtttagccgacaaggccgggtactgactactgttaagaccttacgctcctgggggtctgggctgtcgcgtgnagagctgctgcccttacacctactgggcgggccacgcggcgcgtcctggcgtcgcttctcc

SEQ ID NO: 31399 - DNA, 2048 bp, Zea mays
  Clone ID: MRT4577_128643C.1
cattgggtacctcgaagctcgtctcttctggaaccgtccctcgctcgtcatctttccgccttcgctacgcaattcctgtccacgctgcgggccagttgtgacgaccgcgaagctcgtcagagaaagaagagaggccggcaggcgggcggcgatcggagatggcgccagagaagccccggaaggagcaggagcaggaggagaaggaggaggaggaggagttgatgctggaggatggaggcatcgaggagagcccgcgccgcagcttcgaggactgcggtgattccgacgaggagggacgatgacaacgatgaggagcgggacggcgacggcgtcggttcgccgcgctccttccagtcccataagtggccgcagagctacagggaaacaactgatacttacacaatcgctgcatcaccgagctttggttacttgggcccttctacaagcaaatactcactcctcgatcttggtcgtagcggtctgggttctgacctgaagttgcctctattgtcggacaaggctgacggaaagcaagattctgtcaaaaccctgccgaaaacccttggttcaataagagatgagagggtctcatttcaattgcaacacacgggagaactctacattactcaagggtgcaatgtgacgcaaacagtcttcaatgggattaatgtacttgctggtgttggccttctttccaccccgtttacaattcatgaagctggatggactggccttgcagttctattatgttttgcgattgtttgctgttatactgggattcttctgaaacattgttttgagagcaaagatggtatctcaagttatccagacatcggagaggctgcatttggaagaattggccgtcttttgatatctattattttgtataccgagctatatacatattgtgtggaatttattattttggagggtgataacctcacatcaatttttcctaaagctggttttgattggcttgggattcatgttgatgggaagcattttttcggagtgttaactgctattttagtcttgccaacagtatggctgcgagatcttcgagtgctctcttacctttcagcgggtggtgtgattgcaactcttctcgtattcctgtccgttggtttagtcggtgctaccgatggtataggcttccattcaactgggaaggtagtaaactggagtggcatgccctttgccattggtatttatggattttgctactctgggcattcagtatttccaaatatctaccagtcaatgtccgatcgctctaagttccctaaggcactgttcatatgttttgcaatttgcacagcaatatatggatcttttgctgtcattggctttctcatgtttggagagaacactttatcccaaatcactttaaaccttccaaagcattcgattgcctcaaaagttgcactatggaccacggtgatcaaccctttcaccaaatatgccttgttgttaaacccactagctcgaagtttagaagagttgcgtcctgaaggttttttgaacgaaacatcatgctctattatactgaggactgcccttgttgcgtcaactgtatgcattgcctttcttctgccgttctttggtcttgtgatggctctcattggatctcttcttagtatacttgtggcggtcataatgccagccctgtgcttcctgaagatcgcacaaaacaaagcaacctgtgcacaggtaatcgcaagcatttgtatcgtaatgttgggcgtcatcagtgctgccctggggacatactcctccgtgaaaaagattgtagaaaactactaagctcttcgacaataattgcctgcctgcagaggctctaccaccagactccacgtatggaactcgaaatggtcaggttttactgtacgaccaaatttttactagaactaccggatttcctgtacattattgctgctgttattattcggaccacactagcctactaaaaaggaacacttccaataatgtaatcttgcgcacctttacctgagttctttatcatgcagttgtactgtaaaaaaattagc

SEQ ID NO: 31400 - DNA, 304 bp, Zea mays
  Clone ID: MRT4577_128644C.1
ccaaaaaaaaagggcccccccttgaggaaaaaggggggttaatgtaccttgcaaattggcgggaaaatccataattcccccccaacctggttgccctttttttgatgctttagctaaaatgacccatcatcgggggtttttgggaaaacggttttttttttggggggtggcctatccccccccgcaccaacaggagattaagttgttttgtccggggctttcccatccccagaataaggggagtaatttttggccgggttttccttccttttagcccaggccctttttaaaaaatataaccccc

SEQ ID NO: 31401 - DNA, 432 bp, Zea mays
  Clone ID: MRT4577_128645C.1
aaaacaaatgcttacgtatgtataaacagtgcccaccattggcacctaccatacagcactggatgagtgttcctgttatctgccatcagatattgccacaacgagcctcctccaacctatatttgtactaaacgcagcctaccagccaacagaacaaaaagcttagcatcagtctgccatgcgacaaggcgtgcgattcagtcagacgtcggttcggcgtccatgcagagatgaaccagcttctgctggtactgcccgaagacctcactgactgcgatcaggtcctaggcgcaccaagtattggaaggggaccgggaggatttacttatgtctggggctactagcgtgtaacgattatagccggtaagacaaaacccaggcttgttaacttaaaaagcgtgataacgtatatccacagaaaaatattagggc

SEQ ID NO: 31402 - DNA, 351 bp, Zea mays
  Clone ID: MRT4577_128646C.1
cccggggtctcatttccattccaccggtaaaatccataagggctagtttgtttgagactccatttttttccaagtgttaaaaataaaaatcccttgaaaaaaaatgaggttatcaaactagccctaaatccctaaccgtagcagcctgcaatacgtgaatatgtgtgaggactaaggagatgacgtcccctgccgctgccatagcaatcaccacacctgttaattgtcattccagccacgtgtatgtaattctgccaccatttgttagtaaagtctagctctgtacataaattagactctttttatctacataatatcgccggactaagttatcgagacgtattttgccaa

SEQ ID NO: 31403 - DNA, 421 bp, Zea mays
  Clone ID: MRT4577_128647C.1
gggactacatgccaaagcactacgtgttgagcgaatctaacttgggaacgtttcagacaactaacacgccaaccttaaacctgtggggcattataaggtgactatgcacttttggggggtatgatacccatgctacatggagaatctctaaagagttaaaatgaacctaccactggcctggtatactaattatccaatgtgaaaggtataaaggaaaagctagttttaattgggataatacccattctctcaaatgtgcattttttttacaaagcaaaatggacagggcccatcttcatattgttcatgtgaggcatttcccaaggacccaaaaagggcaacagatggtgcccaaggggttgaaacggaactagccgctttatcgaccgggcttagggtggcaccgaaatttcatcttatt

SEQ ID NO: 31404 - DNA, 560 bp, Zea mays
  Clone ID: MRT4577_128648C.1
ctcacactttctgaagcacattgcgtttagaaggagaactgaattctgagctgttgtgcgctacattcagtgtaccagatgatgagtgctatttgctgattgcagctccaagagaggctaccgccaacagctcgctgaacaaggcacccaggactatcaaaccaagaactacaacctggtcaactgcaacgtagccactgtctttgttatcgaaacaatgtgaacaggctgtattattccggccacgcacgaatggaatgtgagtgaggttggctgcaatgatgattttacgaggccggtagctgagcactggataaaaagagaaaaccttattgccattctcaataggactcaacatcacgaccttgcttggcggacacgatctttctgacctagcttcttgcttacgcagttgacatgactgtctggtaccttgtgggcacctactgaatcaaaggtctaataaagttattattatagtatgtcatactcctttcacggggttcaagggtggcatatatgtaagaattcaagcgtggtacattcttatgtgcattgca

SEQ ID NO: 31405 - DNA, 435 bp, Zea mays
  Clone ID: MRT4577_128649C.1
aaaaggggacaaagccggaaaaaaaaaagggaaaagtttaaacaaaaattttcggggcccaaaagggggcccccccagggggcaaaaaaacagggcttttggggaaaaaaaaaaaaaaccgtttggcaaaacgggaacaaaacagaacaaagtttaagcttggtaaaaaaaaaaacgtgggggggaaccccccaaaaaacctttaaaaaaacaaaacccggccgattattggccatgttttgccaaaggggaacccaccttaaaaaataaggttttccggggggggggaatttgggaaatttcccaaaaccataggggctttacccacccgccctaatgtggggggggccttggtccggtttaaaaccccccccggggggttgtttcatcccagaaacgttagtccttttgggggccaccttgagggggggaccg

SEQ ID NO: 31406 - DNA, 201 bp, Zea mays
  Clone ID: MRT4577_12864C.1
gagctggtggctatcgggaggcagtggatgacggcctccaggcccaaaggcgcggctgctcacagcaagatctgaactgaagcttcttccttccttccttccttgggtttcctttcctacctcgaaaactactgctctcgagtgaattgaactggctgtaattactaattactggggaaaaacacggtttaggttgctgtg

SEQ ID NO: 31407 - DNA, 174 bp, Zea mays
  Clone ID: MRT4577_128650C.1
agctcatttcgccgctaaagaaatggccctcgcgttccaacccgatgaggcgataggcacgggagagagctgcgcgggtgtatatataccacctccatggcacatctcttcctcaccaccgcatcccacaccccccgagctcagcttagctccactccagctccaatcgcagtc

SEQ ID NO: 31408 - DNA, 146 bp, Zea mays
  unsure (1)..(146): unsure at all n locations
  Clone ID: MRT4577_128651C.1
ngaggtctgttcagtttggccagaaaggcatcccctacctgaacacctactacttccggaccggccgctaccccgacccggtcatcaatgccaactacaccatcaatatcgatctggaaaccaacaagatcatggacttcatcaaa

SEQ ID NO: 31409 - DNA, 580 bp, Zea mays
  Clone ID: MRT4577_128652C.1
gaagaagaaaaagagaaagcgtcaattggccccttcaaaatctgtttctactcaaataacgacagaaccatcgcctggggcagccccagcagacttatcaagatccacaggcgacgaagcatataatgttgaattgaatggcaaagatgaaactatagtcaaagaatctggctgtcgtctttcatcatcagaacttaatgatgcaaaccaggggggcaaaagtgttcagtttgtgagcgatgctctggcatctatagatctaatctgtaaacaagagaagtttggtcattctctcaagggatgtaaggatccttcaattgcaaatgccatttattctacaagtgaaaatgtagctattgaaggaaaaactacaaaagaaagttgtgtccctttggatagaggggacaagcctgaagaaaaaaaacaacacaatgagggatgtcataatgaagctgtacctgaaataagccacatggagaaaggtggcagaagtacagatgtctctaacaagaggcgcacaaatcaaattacttctcaagtgaagaagggcaaaaaatcaaaagttggttctgttggcatg

SEQ ID NO: 31410 - DNA, 332 bp, Zea mays
  Clone ID: MRT4577_128653C.1
ctcacgttagcctcacgttgttaccgctttgagctccatactggtgtgtggtgaagtcatgggcaaataaaagccactatgagaccctttgggaagttgttggcgccgatttggacgccaaaaatctagagaggaaccgcctgacggttcgcggtcctggacggtctgcgacctggacacagaagcgggtccttatctgcgtacatctggatggtaagtgatggggcacagggttgtcttcttggcagaagacctagatctcgccttttagagggaccttgtcgaggaggagagaacctagggtgtgtcttgcggttggcaggccacgcaaa

SEQ ID NO: 31411 - DNA, 549 bp, Zea mays
  Clone ID: MRT4577_128654C.1
tggaaactcacccttttttttggttgaggaggtgcagcatcaactggagaaagtgccatagatttatttgctaatttgtacaacgctgctgcaccgtcaagttgatgcttagagttcaaagaaccaagaagaccgagtagcaactgcaaccctgacaaaagacaactcaatattaactctcttggacaaagaacatctaaactggacgggtaacgcattatacataacgcatgcatctcatttagctcatgaaaatataaaaaaactgtcacatgccggtgacatctatgaatatgggtcgttgatcctcgggtgaacagagatgagcaagggcaagagcaactcgtttttggatagacttctttgaaatgcgcattaggtacaacagatgtttcataacctacacaagaaaatcttagcacagaactctcaaaggttgaataaagaaaagctaaacttaaacagagctttagaaactcaaccaggataaagcagttttagtcatcaaagatggaaaaaaaaaagaattaaagaaaaagttagtttcac

SEQ ID NO: 31412 - DNA, 389 bp, Zea mays
  Clone ID: MRT4577_128655C.1
gctcgcgagctagttactgccagctaatacccaacattttttttgcttttgtaaatccgcgcagatgtttgtttcagaggagaatgcaataaggatatgcagaactatattccttaaaaaaaaaaaaaaaaaaaaaaaaaaaagcccacaacaacaaaaaaaaaagaaaaaaaaaaaaaaaaaaaaaaaaaaaaaaaaaaaaaaaaacaaaaaaaaaacaaaaaacaaaaaaaaaggggcgacgcctataaaaaaaaaacctaacctaccccggcctgtcaaccacaaacacttcccaaaagggcaccgaaaacgcatgctccggcccccgtgtgaacacatcggggaccgtaaaaccccagcccgaccaacactaaaccgcttgcaac

SEQ ID NO: 31413 - DNA, 309 bp, Zea mays
  unsure (1)..(309): unsure at all n locations
  Clone ID: MRT4577_128656C.1
tctttttgcaaacccccgaaacctatacgtgttcgttaaaacaaacgaaatccgctcaccaaaaaaaaanaaagctataattntctttttttcttttcttatttcaagtttgaaacccattatcatgcttttgctttttatattttatatctatctaatattataaacctatttcactgctttaaattacataccttaatcattgtatttatctaacctttaaannaaaatnncctattccccgttgcccttcaatatttttgngcttacttccttctgtggtgcgggcatataaaaaatccataataa

SEQ ID NO: 31414 - DNA, 254 bp, Zea mays
  Clone ID: MRT4577_128657C.1
agccttcgctagaccttagcttcaactggattaagggaattccgcacaaaatctttggtgttaaatttgttaataaattgctccttactgaaaatgatatatgtgctgatagcatctgctgcgaaagggtatcatgtcttcaaaagctattgaatttatctctaaacgcaaaccgactgggtagcttgccaccaactttggggttactgacttttctttgtgaactgtgtgttgcaaagaacacgctttataac

SEQ ID NO: 31415 - DNA, 768 bp, Zea mays
  unsure (1)..(768): unsure at all n locations
  Clone ID: MRT4577_128658C.1
gcccgnnggaccacggtctaacaactgtcccaacgactccggaggtagtcagccgatcttcaagcgtcacggtactagatactctgaaacttttgaaatcatcaaatcatttcttacaactcgttcccgatcctcgagatcgcaatgccagatcaagacaaagaaaatgacgaggcgactgcttttctccatgatgaggatgaggtgtcgcaaacaggaagatgggttgcttcacacagccattaccgacgttggtgttgtttaacagccgttaatttgttgctgtttttggtattcaccgtcataaattttactatttggtctcgtcgcggtcccagttcctggcaaacagacttcccagacgcacgcaaggccgttcaatacgaggaacagacatatactggagctttaacttacgatgcgacccagcgtcgagttatccgtctacacgacgcaaaagtggaatacttcggaccgccaagtccagaaatagagcaagcgtgggaggagttgctacacggtgaatttccgactatgagcaagaaagaagctacgccattcttggacgatttgacaccacagcgcaaggatggagaataccatttcgagcccgacgttttccattcccttcactgtctcaatgccatacgtaacgagatccaaccagtgctctacaatgtttccaatnngagacacgctcactctcaaactgagcggaaaatagcagagaaaatcggtgaccccatgtggaacgtaaacatatgggac

SEQ ID NO: 31416 - DNA, 161 bp, Zea mays
  Clone ID: MRT4577_128659C.1
attctggggtccatcgggggcaaccgccgattccccaacgccgggttaaactccttaatggcctcccaatcccaaccttccgctttttcccgaacttaacagggcctccgaaaggccttagggctccgggccttggacgccgcctttttacaccgggggcg

SEQ ID NO: 31417 - DNA, 532 bp, Zea mays
  Clone ID: MRT4577_12865C.1
ctatagggaaaggtgggacagccgcaggtaccgaacccagattcccacccacgcaccacgcggacgcccaaatcttttccctttcacccgaacgccattggcgccgctccccggcccggggcgccaccggagaacagagccgatcccatcccaaccggtggggcttgggccgcagcacgagtgagaagtaaaaaaatatggctgccctgccactggccaccgacgaaggatgcgacgctaaccctcacctgaacatgaacggagagctccgcgcgctcgacccaaacatgcaaatctaccgacagcgccaggactacgccgcgcccaacgccacgctcaagggctacgaggacagcgagctgaaccgcgagctccctcgaggagaaaaggccacgggggggccctcggggacgacagcggaggtggcacgcactgcgccatacaagacggcaaccccgaccagcacccgcagaacaacggaggggcaggcatcctggacaacggctgcatccgggacgtggacgagaacaac

SEQ ID NO: 31418 - DNA, 554 bp, Zea mays
  Clone ID: MRT4577_128660C.1
aaccctaaccctctctcgctcctgcgtcctctccgtgcggcggctcccggatctagctctcgctctcagtctctctcgctcctgtgtgcggctcctgtgctccggtgctctcggtctgtgcgcgactgcctccggtgctccctgcttcttctccggctcgagagctccggtactctctggtccctcctcccggcgcgagaggattcttcttcgggtaccggcagctggtggcggcggtgataggcacggcgaaggcgtcgggcaaccgggcgctgttcgtgccggcagaggggatggatccgctcgcccaaatgttcctggagccgccatactacccagcctggacaccgccaagacgtttctagcggattactgggtacaacagatagcgtagttttgcaggatttaaaatactatgcatgcatcgtaatttcgttggggccttttgccctttagtgatagagcgattcatttctataagcgatcatgtactggtgttctacgtagatagattgattcagttagataacagtaagatctctttatctctgagg

SEQ ID NO: 31419 - DNA, 183 bp, Zea mays
  Clone ID: MRT4577_128661C.1
ctcgaactcgagagtctaccataccatctacatctaccaagcaagctacgccgtcggggatggatagcaaagagagaaaggaactcgtcatcgtactaagctcgacatgccgttctgtatgccgtgcctgggatcccacaccggttcctggacctcttcgttgggccggcattcatgacggca

SEQ ID NO: 31420 - DNA, 845 bp, Zea mays
  unsure (1)..(845): unsure at all n locations
  Clone ID: MRT4577_128662C.1
ctgcctccgccatcttttatgcccgccggcgcatgccagccgcagccacatccgccgcggtgcgcgcggccatgcgcaagctcgggggtctcctcccccgcgcgcatcgtccgcactccaccacgacgggcccagatgccgtcgcgccgccgtcgtcgcacaccctccacgacttcaaccgcctcctggccgcgcttgcgcgggacggcgatggcgacgcggcgctccgcgtgctccgccgtatgcgcctatcgtcgcccgcgtgcgcgcccaccgccgcctcctacacctccgccatgtcggcgctcgccaaggccggccgccccgctgacgccgcgtccctcttcgacgacatgctcgccaacggcgtcgcccccgaccgcgccgccttctccctcctcctgcacgtctactcctcccacctccaccttcccgccgccgcgcactccgtgctcctctggatgaccgggctcggcctcccgccgacccccatcgactacaccgatctcatcttctccttctgccgcgccggccgcctccacaacgccttccagctgctcgacgaaatgcgcgctctcaattacccgctgacaccacatgcattcgcgccaatcctcaaggcagtctgcgacaatgccgacatccaggcagctgacgcgctcataagctccatgcgttcctctgggtgcctccccgatgtcgtcgtctacaatatatacatccatgggttgtgtaagatcgnggattttgacgctgtggagagagttatttatgagagtgcccgtaatgggtgggaaccagatgcagtcacatacagcacctacattgttgggctttgccgctct

SEQ ID NO: 31421 - DNA, 314 bp, Zea mays
  Clone ID: MRT4577_128663C.1
caaatttcaccgatctgggtaacctggagattttgctatttttgcggagttcaagataagcatcaacgcttacaagagaaccaaccccactctccagaacccaccccccccaagttatagcgtgcaacgaagcgcatcctgaaaaaaaaaagctaaaagatcttcggcagccggatcttatcgccggggaaaccccaacggcatccccacaaaaaaaagagctgccatcccgcggctgaaggagatctccaccaatgggctggagaagctgatgaatgaacaccggctggatgcgatcgttgtgcccaacagcg

SEQ ID NO: 31422 - DNA, 273 bp, Zea mays
  Clone ID: MRT4577_128664C.1
attcggctcgagctacgccggcacactttttttgacccggtcccctcacttcctctgggggtccttaatacccaacgcggccttcgtggttgcgctgcggttgaccttctaaactccaaaacatgacgagggggctcttcccgtattcaagcacctctactcgagttctacaagagtatgtcagtccagagggcccgagtgccaggacaaacagcacatggtactcccgcctggaaagcttgacaatctacgactacgggggtgggaacacca

SEQ ID NO: 31423 - DNA, 2098 bp, Zea mays
  Clone ID: MRT4577_128665C.1
ttagcccatccgtatgttggcttcggcgacccccaggctcctttacggtctggagtccgcgacccccatcgccccccaggacacaaggccttttctccacgcaccggccacagcgtctcattgtcgccgccggccttcgcgcagcgtccgcgctgtctctgtcctcacctccgcgaagacaggctaccgccgccgccctacgccaggtgccgaggcctctctgtctcttcgccggcgacgatccaatagccagcagcagcaggaggacactatgaagcttgacgtgaatgcccttcgctacctcgccaaggacgacttccgcgtcctcaccgccgtcgagatgggcatgcgcaaccacgagattgttccagcagaacttgtcgacaggatcgccagactgaagcatggaggcacatacaaagtgctgaggaatcttttgaagaacaagctagtgcatcatgatgccactaaatacgatgggtatagactcacctatctaggatatgacttccttgccatcaagactttggttaatcggggagtttttgcttcagttggacgtcagatcggtgttggaaaggagtctgatatatttgaggttgccacagaggatggtacagtactcgccatgaaacttcataggctgggaaggacatcttttagggctgtgaaatctaaacgtgactatctaaggcacagaaggagctttaattggctgtacctctcacgacttgcagccttgaaagaatttgcctttatgaaggctttaggggaccatggtttccctgttccaactgctgtagattgcaatcgccattgtgtgatcatgtcacttgtgcagggatatcctcttgttcaagtgaaagagttacaaaatccagatgacgtttttgacacaattcttggtcttattgttcgtttggcagagcatggactgatacattgtgactttaatgagttcaatatcatgattgatgatgatgaaaaaattacggttattgattttccacagatggtatctgtttctcatcgtaatgcccaaatgttttttgaccgagacattgaatgtatctacaagttctttaacaaaaggttcaatctgacatcagagaaaaatgaagaacaagctgggtctgaaagtgatgatgaagggaatagcagaccttcctttttgtctgtgaaaaagactgctggttccttggacaaggaactagctgcaagtggatataccaggaaagagcaagtggagatggacaagtacattgaggaagatgctgaaagacatgattccagctcagatgatgatgacgacgacgacgacaatgacaaggttggtgatgctgtgtctttggtttccttgaagatagaccaggacgattctgctgagcctgattgtaatcttgcctcaagggattcagatgtgcctggaactttttctgaagagcatgaaacaagctgtagcagtgagaagagattggaaagtccctcgggtgacaatggagaggctatgaaaccgcttgaatctgagggcaagacgctttcccagaaagacgacaacaatgatgatgactcatcagaggatgctgatgaagaagaagaagatgccgagctcacgaaacaattgaacaagcaaaggaaaaaggcaatagcagctgccagtggtcggagaaggccagtgtcgtccaggaacgcctacaaggacaagggtaagggcaccatgaactccaaaatccagaggcaggcgtgccagtggtgatggtcactcgaatgtctgcagtgcctctttcgacaatcgtaaagtagaccatgagtaggattttccatgagtgtagaaccgagggatccctgtactagaatcaactctggttttattcttttatcacatgtcgtatacctttttgtacacggttatggtgagatcatttgagttatgcttctgtttataccaactgaatagctgagcgtactgccttcttcaagagcccgtactgctgccctcaggcagtcaggcgtctccggtctggcctaaacatgtcgcctccatgagcacaacactacggaaagtttcgcacttcataacaaaaaaaaaaaaaaaaaa

SEQ ID NO: 31424 - DNA, 236 bp, Zea mays
  Clone ID: MRT4577_128666C.1
accaccagggggattggaatacatcgagggggcgctctttatagcctgcacaaccaccatgcgcccacgaggctgacccacgggaggcagtaacatgaatggtggccctcgatgcctgatccggacagatacagttgcgacacgcttaccttgtgccacaccataagtctggatccctccctcacgcctaatatccggaacgccgcctattctgactcttgattcttcatccggac

SEQ ID NO: 31425 - DNA, 710 bp, Zea mays
  Clone ID: MRT4577_128667C.1
ccgtccggaaaaaaaaaaaaaaaaaaaaaaaaaaaaactgtgctgtcttcccgtctcttcccaatgcggcgtctcgctctcctcttcctcctgcctctcctcctcgccaccggcgtcaccacggcgtcagcggagcccgcgacccctcccgcctctcctcctcctcctcctcctcctcctcctcctcctcctcctccaccgcctccgccgaccctcgccgagctcctcccgaagtacggcctgcccccgggcatcttcccctcgaccgtcaccgccttctccctcgccagcaacggcagcctcaccgtcgacctcgaggggccctgctacgtacacttcgagtatctcacctacttcgagccccacatcacgggggtgctccgctacggctccctctccgacctccagggcatccaggtccgccgcttcctcatctggttcaacgtcatccgcatcaaggtcgacctacccccgcctccgggctacgtctacctcgacatcggggggatcacgcgcaagctccctgttgcggacttccagtcgatccacgcctgcgaggactccaggaggggccgcctcacctccgcgcttgccgtcgccgccaaatggttccaggacttctttgcccaattttaggggatggcggaaggcctacgatttgacaacagcagtggatgagttccctgccttcgagtcttcgacggccgaaa

SEQ ID NO: 31426 - DNA, 453 bp, Zea mays
  Clone ID: MRT4577_128668C.1
gcctgcaggtaccggaaccggaatgtccgcggcgcacgcccacgcgaaaaaaaaagaaaaaaaaggaaaagaaaaaaacaaaaaaaaaaaaaaaaaaaaagacgccctcgtctactgagaaggaggcatgagcacataagcaaagggcgcggccgtggttgccagactcgcagggagcagctggggcaggaggggtacaaagagatggggaagaagggcgaactgagcaccacggacaagtccggcggcgagcgcgccgccagggaaggcgtcagcatacacgagtgcaagggcaccaagtagtcctatcgtgtgcgtgcgtacgcaaagttcgaagctgcctgcgtagtgtaccttggccgaaactagcgctactctttactacggaggaactgaatgataataaggtacctaacagcatgcatgtgggcgaaaatacatacgtgcgcgcac

SEQ ID NO: 31427 - DNA, 988 bp, Zea mays
  Clone ID: MRT4577_128669C.1
gccggccgggaaagcggagaaaaaaaaacgtgatgtcttcccgtctcttcccaatgcggcgtctcgctctcctcttcctgcctctcctcctcgccaccggcgtcaccacggcgtcggcggagcccgcgacccctcccgcctctcctcctcctcctcctcctcctccaccgcctccgccgatcctcgccgagctcctcccgaagtacggcctgcccccgggcatcttcccctcgaccgtcaccgccttctcgctcgccagcaacggcagcctcaccgtcgacctcgcggggccctgctacgtacacttcgagtacctcacctacttcgagccccacatcacgggggtgctccgctacggctccctctccgacctccagggcatccaggtccgccgcttcctcatctggttcaacgtcatccgcatcaaggtcgacctgcccccgcctccgcgctacgtctacctcgacatcgggtggatcacgcgcaagctccccgccgcggacttccagtcgctccacgcctgcgaggactccaggaggtgccgcctcacctccgcgctcgccgtcgccgccaaatggttccaggacttctttgcccaattttaggggatggggaaggcctacgatttgacaacagcagtggatgagttccctgccttcgagtcttcgacggccgaaaaggatttgtgtgaaccttgaacgagctggaacactgccattgttactctctcttcacgcgatgtagctaatcaagctgttatctcatttgtacatctgtcgacgtttcatcttgtcgggttgtgcataaacatgttgaaatttgagaacatgtagcatacatgatgcatgtagcaaatatcatgaagttgcttgtttcatcattgggtcggaagcttaaagcagtcgcgcagaaaaatcaaacaatctttttcagcagtaaataaagatgggaaaagggaagtttgcagtcaaaaaaaaaaaaaaaaaaa

SEQ ID NO: 31428 - DNA, 810 bp, Zea mays
  Clone ID: MRT4577_12866C.1
agtccggcatcagggccggaccgtccgcacgctcaattctggttcgaacacactccataacatttagcgcaagaactaatggtacacagctacatgaacatatatctctactgggtcgcagccgatcgagtcgagtcgggtcgggagggacaccatcctaatactagtccccctcctccatctccatctccatctcctccgcagcaacaccggcactcgccacgctattcatttttttttaacaaggacggacggaagctggaaaggttcaagcacacgcacgtatgtacagacacgggctgccacggcgatctggccggcggctagggcctggcgtcgggcgcggcggaggcgaggcgggacgcgatggcggagtggtacatggcgtcgtggaagctctccgtctccatcatctgcacgcgcagccgccgcgccttgtcctccgtcagcacgccgaaccgcctggccgaggccgaggccgaggccggcccccgcggcagaggctcgtcctcggacgccggccgcgcgtcgatgtagtccggctgcccggaccaccccagcagcggcgcccaccacttggcgccgtcgccgacggggcgcgccctcgccgtggcagagcaagcgcagggccgggccggagccggcgggcggacggagaagaccatccctgatgacactgccatggatggaagttctggattcggacgagaaagaggtttgaggctgactgtgtgttgagtttgcgacctgcgggtggattgggattggggccgggatggggtggcccggccggcgtcgagggacccaatg

SEQ ID NO: 31429 - DNA, 285 bp, Zea mays
  Clone ID: MRT4577_128670C.1
gaaggtactattaatggtaaaatagaagggcttgcagcattagggacaggcaagatattcattcatatgctcggttcacattaggagagaacactgcatggcgatctgccgacggccgtataaagaaatgtaagggattacaaaaccgtagaaggaacctaaagagcaacacagatgggggtatactcaggtgacaatacaaggtgtactatgggagatgaggggatagtatatctctgggggactggggggtacggaagcaggggagtgcttggcgggcaaaaa

SEQ ID NO: 31430 - DNA, 622 bp, Zea mays
  Clone ID: MRT4577_128671C.1
aaatttctccaaaataatcggtaccttctgtttgctttgctagcaacgagatagactaacagcgacagagacatgtagtacataggctaagaaggggccctcgaacctagatgatgtcggtgttcagcggggaaacgcaggaggtgtcgcatgagctggtggcggcgggtaaccgcacaccgtcacctaaaacaaaggcgaccaaaaatgatggcatgcttcatggccgggaccgatccgtgcgcgactacgaagatcggataccacggctacttcgactactcccacacatgccaggcgatccttcgtcccaagtcagtagagatcaataacgatatgttctagtctgttcaaagcaaagctccatcaacctgggacgtttgagtcactagaaatggctgaaaatcttcctcgaacaacaaggtgcatcctcatcatcataattctactatacgatgatggatcgcgcactactaccccaacaaattgatgctcttataccttatgaactactacaccttatgactcttcaacaaggccaccaactctctgctagtcgcatctaaacgcgatttcatttcccttgtcttctgcttgatcaccatcgatgcatgggtttgct

SEQ ID NO: 31431 - DNA, 220 bp, Zea mays
  Clone ID: MRT4577_128672C.1
ctcctctcctactcgagcagctagcccagtcaatcattctgcttggattggatccaccttgtctctgaaaatagcttcgagaccttagcgcccaagaaacggtgaccgaccgtccctgcgctagtagcaacagcaacaatggcggcgaagcaccttcacgacgggtacgagcaggacggccattagttctagcacacaaacgggagtcaactgacgtgtg

SEQ ID NO: 31432 - DNA, 367 bp, Zea mays
  unsure (1)..(367): unsure at all n locations
  Clone ID: MRT4577_128673C.1
ccgcccgcaggaaccggaccggaaattccggggcggccgggacgcgcgacccccccaacaaacaagaacgcaagacgagaggccaaaccggacaagcgggacgaaagaaacagcgaaggacgaacgagacgacgacaccancccggggagccgagagggggccaagacaacaccgcgagcaagattttgcagagggtggggggcacacgtgacagaacaggacagaataaaccaaaggcccaggagagcgaggacgccgcctacacaagagacgcgagcggaggcaacctgccggccagatgggaacaagccggaaggcagaccgggcagaagaagaacagccggagaggtacaaaaggaacagaac

SEQ ID NO: 31433 - DNA, 162 bp, Zea mays
  Clone ID: MRT4577_128674C.1
gggacatgttcctgacctttgacacgtagcagcagcacagcttgtggccagttgtgcgcatctgcgccgcgcaccgcgtacgccggctgcaggaggcgccgcgattgcgtcagcacctgcacacgctactgtctgcttaatctgagcgggtagaagcagcca

SEQ ID NO: 31434 - DNA, 300 bp, Zea mays
  unsure (1)..(300): unsure at all n locations
  Clone ID: MRT4577_128675C.1
agcagtggtaacaacgcagagtacttttttttttttttttttttttttttttttgttttttttttttttgctacnctnnaaaaaaaaagacaacgttgaacaacaggggcgcactaaccgacacacacgcctttgttcaacttatttagcatgcctataaacacccttgcaagaaagggaggacggggctgcctttcccatttacccttagccttagtgactttgaaccggagccgcacattcttgtatcccagtgcccataatggagcagaaaaacaaaactttgaagccttgctattg

SEQ ID NO: 31435 - DNA, 748 bp, Zea mays
  Clone ID: MRT4577_128676C.1
cactagcccactcaactcaagctcgagcttcacttcagccccacaaatggcgagcagctcactggtagtactggccgccatggccgcgctgctgctctccccggtcacatccctgcccgtcttcaccggcgatgcctccccgggcttccacgccgcgtcgtgcccgcagctggacggcatcgtgtggtcgtccgtcgaggcggcgctgcggcaggaggtggcggtggcggcgggcctgctccgcctctacttccacgactgcttcccgcagggctgcgacgcctccatcctcctcaacaacaccgccgcccgcgagacggcgctgggccccaacctcaccatccagccgcgcgccatgcagctcatcgagtccatccgcgcccgggcgcacgccgtctgcgggcccgtcgtctcctgcgccgacatcaccctgctcgccacccgcgacatcatcgtcatctccggcgggccctggttcaacgtgccgcaggggaacctcgacagcctcgcccctgcggcacaggagaaggtgttcgacctcccggcgcccaaaacggccagcgtggcgacgctagtggagtccttcgccaccaggggcctcggcgacgtcgccgacctcgtggagctctccggcgcgcacaccatcgggacggtcgcagtgcggaagcttcgaagaccggtcgcagcgcgccgacgataccttctcgcgccagctgggccgcaactgcagcaagcacccggagcggct

SEQ ID NO: 31436 - DNA, 210 bp, Zea mays
  unsure (1)..(210): unsure at all n locations
  Clone ID: MRT4577_128677C.1
ggggggggggggggggggngggnggggtgtggngggggggggggttttnnnntngtggccgatgggtacctcgaggccggccgggccgggatctcctcgacctctcgcgtctcgctagagcacacttcctgcatcactgtgctagatgctcaggccgtagtatcatgctcgtttcccgctgttggctccaccccgcgcgatcttcgttgc

SEQ ID NO: 31437 - DNA, 297 bp, Zea mays
  Clone ID: MRT4577_128678C.1
cagaattcccccctcccccgtagcgaaaccctagccgccacgccaaaaccaaatcccgccgagcccgaaattttccggcgggttccctgccgcgaatcgaatgatttcgagcgaatcgactcccttgtgatctccccgcgggggtagaacacggttcaacggccaggcaatgtcgaggtgcttccccaacccgcaacgggggtacgtgcgaaaccaagtggccgtggccgagccgaattcgacggctaaggtttgttgaaccttcggatttacacacgaacgtgccaaatcgtttgt

SEQ ID NO: 31438 - DNA, 2398 bp, Zea mays
  Clone ID: MRT4577_128679C.1
gccggccggggtcctctcccttcggcacgtcgctgcccactcccatcccacgcgagcacaaccaccacctactccctactccctacactactccccccgcaagcacgcccagcgccatggccatggcggcagcgcgcacgggggcctgctactccgcctccgcttcctctcctctcctgcactactagcgggtccgctggcgacgatggcggcggtggcgagcagggagaggctctccccgggcgccgcgccgcaggtggacgcgggcaagtacgtgcggtacacgccggagcaggtggaggcactggagcgcgtctacagcgagtgccccaagcccagctcgctgcgccggcagcacctcatcagggactgccccatcctccgcaacatcgagcccaagcagatcaaggtctggttccagaaccgcagatgccgggagaagcagcgcaaggagtcctctcgtctacaaaccgtgaaccggaagctgagtgcgatgaacaagctgttgatggaggagaatgaccggctgcagaagcaggtttcccgtctcgtctttgacaacgggtatatgaagaatcgactccacagtccttctgtagccaccaccgacacaagctgtgagtctgtggtgacaagtggtcagcacaaccaacagcaaaacccagcagttctgcatcctccacaaagggatgcgaacaacccagcaggtctactcgctattgctgaggagacattggcagagttcatgtccaaggcgactggaactgctgtcactgggtgcaaatggggcagaggcttcaatgatgctgtgagtggctttccagatgatggctggtcttgtttgttgaacaccgatggtgctgaggatattacagttacaatcaactcatctccaaataaacttgttgggtctcatgtcagcgcttccccattattttctgctatggggggtggaatcatgtgcgcaaaagcatcgatgctgctgcagaatgtgccacctgctctacttgtgcgatttttgagggagcatcggtctgaatgggctgatcctggcatcgatgcttattctgtcgcctctttgagggccaacccatacactgttccaggtttaagggctggtgggtttatgggcaaccaggttatactgccccttgcacgcaccttggagcatgaagagtccttggaggttattaggcttgaaggacatggctttagccatgaggaggtgcttatgtcccgggatatgtttcttctacagctgtgcagtggcgtcgacgaggatgcacctggtgcgtgtgcacagcttgtctttgctcctattgatgaatcttttgccgacgatgcaccgttgctgccctcaggcttccgtgtgataccgcttgatgctaagacggatgtgccaacggccaccacacgcacgcttgaccttgcctctgcgctcgaggttggatcaggtggaagcggcatgcgcgcttcatgcgatggttccggcacgtgcgccacgagatcggtcctgaccatcgccttccagttctcgttcgagaaccaccttcgcgagagcgtggcggcaatggccaagcagtacgtcaggggcgtgatggcctccgtgcagagggtggccatggcgatcgctccttctcgcctcggttcgcgtatcgaactgaagcatccgccgggctctcccgaggcacttgcactagctacgtggattggcaggagctacagggcgcacactggaacggagatccgctggtcggacaccgaaggcgcggactctccactgatgctgttctggaagcacagcgacgcgatactctgctgctctctgaagccgccggctttcacgctcaagttcgccaacagcgccggcttcgacatcctggagacgacgatggtgaacatccaggacctgccgctggaggcggtcctcgacgaggagggccagaaggccctgtccgcgcagctccccgcgatcatgcagcagggcctggcgtacctccccggtggcgtgtgcaggtcgagcatggggcggcaggcgtcgtacgagcaggcagtggcgtggaaggtggtgggtgacgacggcgccccgcagtgcctggcgctcatgctcgccaactggaccttcatctgaggctcgcaacatcgctcggcagcgccagaccggatgccgccttttgccctactacgtatcattagttgcttttccgttgtgccgcctgtgttaagaatttgtgtactgtgtggatgatcgagaactgactctgtttgtgtgtgtgcgtgacaaacaactacaacagctgtatgcgtgcctggtcgtggtctcgtctccccggcttgtcgccggcgacattgatcactgttgcaggttgcagtattactatttgctagttctgcttgc

SEQ ID NO: 31439 - DNA, 183 bp, Zea mays
  Clone ID: MRT4577_12867C.1
aaaggggcattattttttcacctggttttccgggggggcaccggcttgtttgaggaaaaacgcccggggaaaacggttaccacacgcgcccacttcccttttggaaaacctatcctttggaaaaaagggggggggaaaagaacctcccttaaaagacggggccccaaccaaaccataatatgg

SEQ ID NO: 31440 - DNA, 345 bp, Zea mays
  Clone ID: MRT4577_128680C.1
cccctccctttttttttttttttttttttttttttaattttattgctttgttaacaaaataaccacaaaacatcttttactaacaaattcccaaaaaatttgcttgcataagatgaagcacttcttgcttcattttttaaccctctttcaacataaacaaccaactcggggtcaaaaataagtcaaaattatgcatgtccccaccaaccgcctaaaatccgcgaactccactcactgactactgtgacctagtcagtaaattcacattccccaactcatgctccgttgctccaaacttcatgcccccttttcacatgctatccaccagatcagcctggggatttt

SEQ ID NO: 31441 - DNA, 403 bp, Zea mays
  Clone ID: MRT4577_128681C.1
atcctatattactccgccctttttttttttttttttttacacaaaccaatatctaattgacaaaatcattagagataactctgctaagaccatataaacaaaccctcttacattacatctaagacaagccaattcccctgtcaacaaaatccctcaaaaatgaaaatatacacctatccaaacccttaattaatttcaaacaataatatactaaagcctactgactgtatccactttcatacaaaaatacttggaatgactttacacatgtttttcccgtttatcctaaccaccatattttcgcaacaacttacaaacgctcttctgctgttcataccacccatcatattacattccttctcttcatctaacacgacactactccttgatatctttaatcttc

SEQ ID NO: 31442 - DNA, 449 bp, Zea mays
  Clone ID: MRT4577_128682C.1
gaccaatcttaaataggagccattaagttcaatagcaccctaacaacaacagaaaaaaacaattgcgatgaaaaaacaaaaggggaaacacaagccaacaagctctcaaacgagggcaggggccgcacagaaaagggggggcccaaggacataacacctccttcgcccatcgggccagagattggggaagctttcatctcacccttgggaaccacaaacacgccatcataaacggcgaagtacatgtggacaccgttcctgggacagagaggggaaggagctggcggccgaggacccgggggcatgacaaactttcagaggaccggcggggcataaattaccggggccgtgaccttggtcaacaaaacaagcaccccggcggcggcaaaaccgggcttgggaggccggaagagagaccatgcaaatatttttggcgcgggggggggccc

SEQ ID NO: 31443 - DNA, 748 bp, Zea mays
  unsure (1)..(748): unsure at all n locations
  Clone ID: MRT4577_128683C.1
acatcagcagaacagtgcatctattcccccgcgtcgctcagctcgggcggcaccaaccctagccgccgccacctcctctcccacctcgctctacctcgccgccgtcggagctagccggccagatgctcgtgcggctagcagtgaaggcggcggcagggcgtttctgccggctctgggctcctgcgcttcgtctgtggtgacggcaacggctgcgtccgcggcggccggcgggtcatctgccgggctgtggcatgggtggcgtccaccgtggtggtgggctcgtgccaggcgtggccgcctcgccccctggagagtgctcgccggcgcgggacgtccttcccggcggcgggtggcaaggtggtcccagatccggctaggcccgggccggatccggtgcccgcgaggcaggggcgcgcacctgtgcgtgggaggggcaacgtctggcgtccagcaacggttgcggctggcgtggccgacacaacgtggctttggctggtatgactgcgaccggctatgtcgacgggcggtcgtggcttggtgccaccgcctctgggccgttctggcctggagaggctgnagcgggacctctcgtctgcagcagcgtcggctagtggctcggacagcgcggggtggtggcggcggcatgtcccaaaatcttcatcattatgcaggacgacgggtcagcggcgacgacggaggcagcttgctgtgtttcgagggttcggccagacgcgatgcttggggctcg

SEQ ID NO: 31444 - DNA, 397 bp, Zea mays
  Clone ID: MRT4577_128684C.1
tggatcggagcttgtttagacacaacagaggggaggcgcctacaaaaacactgcagggcataactgggatcatccaaaccatctaagaaggatctgaaggtcactcttgagcgagaagcaaaaggagtcaacaggtatgcgcatcgttacccagctggatatctctacaagcttgaaagtggcttgaagtgaaaccgacgtgggtgctgggcggaggttatgagaaagaggcctccacttccgatggcaacatcgaccaaactccatgtggaagtgggaaaagggcgctcacccgtcgaaggtgactggcccgtcatgctcactgtggatgacatgcctgatgagctcaatgagacctgagagagggcactctcttgaaactcaacaagggatgatc

SEQ ID NO: 31445 - DNA, 715 bp, Zea mays
  Clone ID: MRT4577_128685C.1
cattgggtacctcgaggccggccgggatagccgttcccttcttgcttctgcgccgccgcctgatctcagctgccgctgccatggctacttcgtctgcgagaggctatcggcagagcaagaacaagtcataccccaagcacaggcactagcccttcagtccctgaccccaaaaccacgatctacaatgatgccatgatcagaatggctgatgatcagctcccctactgtctgcacattgtctccagccacaaggttaatggtcgccagggaaggtcctcagactgtgccgaattgcctgcaacaagtacactgaaccctattgcacgcaacgacgacttccagcttctcgcctcatactgcactcctcgttctcatgcctcttctaatcaacagacatgcttttctttgtgctggagctgataagctccagactggactcgtacgaggtgcctttggtagagcctctatgagcacctgtgctatggcggacatggcgcaagcccgtcctttctgtgtcgaccgcgaggacaacagtgctgcacttgccattgcacctctgctacgagccaagatcaagttccctgaacgccgaaagatcattgggaggagatagcgcggcttcaccgagttcagcctgagctcgcactacctgaagtacaagaagctggcatgactgctccatgatgggtcaacgcaaagctgctcgataaccatg

SEQ ID NO: 31446 - DNA, 555 bp, Zea mays
  Clone ID: MRT4577_128686C.1
ccgcctgcccttactgctcgatcctgacgtgatccacgactctccatgtcggtatctctcctcggcgtcgctgcggccatctgatgcatggcgtactccaaggtcgcctccgcggacaccctccgcacccggaaagacgtgaacaaacgcctcctaggccggaagcaattcttgcttcgtacgcgatccaccacgagcgaggcaacgcctccaaggcggagcccgaacgagaggattgacaccgcgtgcgatgcgaaggacccctacaccatctttagcttcatgtcctgcacccaattggtatcatcaaagaccgctggcttctcactcatctacgacgaccacgaggatgacaacaactacgaggcgatactaccggctcgtcatgaatgctacttcgttactactcgtggagaagtcaccgccatgtatatgaaggcagcaggtaaatcattgaccaagaggatcctgaggtgaacaataataccagggatgagtgacgccaagatagaagtagatgttcgattacatatgtataactgctactgggcctct

SEQ ID NO: 31447 - DNA, 236 bp, Zea mays
  Clone ID: MRT4577_128687C.1
gctgagtattaaatcgcgacagtagcgctctcatggagcagcaccagcattatgaggtgaggaggtacaggaaaggcgtgctaaaagtgcaggacggctctgagatccgagctatcgcatagaacaaggtggagttcgctaggatcgtcgactacaggttccggaagctctacgccgatggcgactggaggctgtccttgaaagagctacaaccggccatcgctgacatctgtgcc

SEQ ID NO: 31448 - DNA, 608 bp, Zea mays
  Clone ID: MRT4577_128688C.1
attgtgaagtttgatacgtttaccgatcgtattttagatttcgaccgttaccggtgtattttccgcaccgaactttcgtttccgatgtttccgaaataccgatatcgtttccgtttccgaagttaccggttccgatttcgtttccgataaaaaaatatgaaaacggtaatggttttagtgtttaccgaccgtttccgaccgttttcatccctagatgtgcatagtattcccctataaatctactgatgttaactgcaggttgcaggcaattgagaggagaaggcatatgcagaatgttgcgtctcagcaacagatcctatggacaaaatatccttcccaatttgtggatccaacagctccaatacaaaacagagcatgatgtgccaacaactgaggaaggtcaggctgtcggaaaccttgcaacttgtttggaggatggcaagctaaatacatcttccaagagttaatgaaataagagttaaaaatactttgatattcatgagatggcaaaccaagccaactaggtaagacatcagcaacaagtacttgatttacctcctagagctgaattgattggcaacaaacaaatggcagtagaagggtacaag

SEQ ID NO: 31449 - DNA, 119 bp, Zea mays
  unsure (1)..(119): unsure at all n locations
  Clone ID: MRT4577_128689C.1
atcataaatagaatctaacccgcgtggcagctgcgcacctgtgccagctcgccgtaggcttgacaacaggatcgaccccgggcttcgcccctctntaagtgtaaactaatttctactaa

SEQ ID NO: 31450 - DNA, 234 bp, Zea mays
  unsure (1)..(234): unsure at all n locations
  Clone ID: MRT4577_12868C.1
ggttgataggtagngctgggnatcgccttacgtagctcgaagtcgctcgagtctgtgcctacgcatgacatcacagtgtcctgaacgcgcgagacacatgggtttgcgcgctgcacacgtctccgcagtccagccatgtgccgtctagtaagtgcacatgcgtgcattctatcgcgctacatagcacagcgtgcccagctactgtccctctgtgcagctacgacccaggtggac

SEQ ID NO: 31451 - DNA, 560 bp, Zea mays
  Clone ID: MRT4577_128690C.1
aatccaaacgtagtgaccacttccgctaaaagatcatcagcattcagcagagctacactagctccaagccaccgagagaaaatggccggcttctcgtacacgagccacgttgcagttgcactggtttcggtgctgctgctgagcctcgcgcacggctcactggggctgggggccaggaggctcatggagctgtacaagccggaccccagcgagctcctcacgtaccacaacggcgccgtgctgcagggcgccatcccggtctccgtgctctggtacggccgcttcacgcccgcgcagaaggccgtcgtctccgacttcctcctctcgctcaccaccgcctcgccggcgccgaccccgtccgtctctcagtggtggaacaccatccaccagctctacctctccaaggccaagggcgccaacgccaagcgcgcgacgcaggtggcgctcgccgggcaggtctccgacgagcggtgctcgctcgggaagagcctcaagctgccccagctcgcggcgctggcggcgagcgccaagccccggaagggcgggatcgcgctggtgct

SEQ ID NO: 31452 - DNA, 573 bp, Zea mays
  Clone ID: MRT4577_128691C.1
tcgcgatctagaaccccacgcgtccgccacgcgtccggtaaaacgccgcagcaaagtttggaaatggttttatactgtggggctaggaggatacttgtctgtacatacggaaaagagatctggtctaaacatcacgtggagcttgtaattgtttcagaaacgttgttccttggcaaagaaaacgagaggtcccgtaaaaaaaaaaaaaaaaaaaaaaaaaaaaaaaaaaaaaaaaaaaaaaaaaaaaaaaaaaaaaaaaaaaaaaaaaaaaaaaaaaaaaaaaaaaaaaaaaaaaaaaaaaaaaaaaaaaaaaaaaaaaaaaaaaaaaaaaaaaggggggggccccccttttttttttttttttttttttttttaaaaaaaaacctgggttgccccctttttttttaagggaagggggggggccccaaaagaaaaaaaaaactcttgaaaaaaaaaattttttttttccaaccgaaaaaaaaataaaaaacctcgtttttttttccctggggggggggttaaaaaatttttcccttaaaaaaaaactttttttttggagggggggggggaaaa

SEQ ID NO: 31453 - DNA, 340 bp, Zea mays
  Clone ID: MRT4577_128692C.1
tttttttttttttttttcttcacccttttttttttgtgttgtgttttatttaaaaccaaaactttgttttttaccattttattcattccattattactgattgaaaaaaaaaaaaccaccgaaatccaatccaaggcaaatgggtggatggaaaccactaccgaaaaaaagggttcactctcatctggccgggaaaccccccacctttgggtcttaaaaattaatccccaccaatgcctcccccacccccttttttactaaaaaaaaaaaattgggccccttttaatgggtgaccttcttaaaaaagtcccaggccccacccccaggttctccctttttt

SEQ ID NO: 31454 - DNA, 584 bp, Zea mays
  Clone ID: MRT4577_128693C.1
ttcacatgggttgaggacgagggggttattttaattatatggcctaatgagatcgtacattcttgatgtatagattttgcaagaggtacataaagaacgtttcaagcgtataagtattatttcataggaataacagcagtttttacatatgatgggaaatattttacctcattcatacagactatattatgcatgatgttctgcaagactttcatcaggcaatgtaatttcttggaataacaactgatttgataacatttgatcaccattttatctgcctgatacataatatgtataaggtgattgtgttcaaaaagggaaatatgctatttgagttctacttcaaatgtatcaactaatgttatgactacaccattgtatttcccaaagacttgagggggtaaaggggattgggactgaaacggtagactatttgttggatttaaaattatacttcaaccacacgtatactgactaccctattgtttgtatgatgattggggatattaattgtgggttgatacaccaacgctgaactatttggtgtatgcatcaggatccatgatagcagcgtactctttact

SEQ ID NO: 31455 - DNA, 283 bp, Zea mays
  Clone ID: MRT4577_128694C.1
ataagatccacgtctacgatgacattcgaccccatcattatatcatcatcttctccgctatgcagctggaggatgagccagacaatggggcattacaacatgcagaaagggagcactcttcacctggtgctacgcctcactggtgagatgcacatttttgtcaacacattgactggatcgactatcaccttagatgtaggcagctctgacaccattgacaatgggcagggaagcatccaagacactgtgcgtatttctccagaacatgaacgtctaatctttg

SEQ ID NO: 31456 - DNA, 392 bp, Zea mays
  Clone ID: MRT4577_128695C.1
cccacgcgttcggccaaagcaagttgctaggttctttgaaccaacaactgaagcttgggggggggatcatcgagaccagggggggacatgtctgctaatctcaagtgggctcctgttctagccctcctcggcgtctgtgctgtcatgggtgggaccaccagagcctgcaacatcgcaaagtactggggccagaacgggaactaaagcagcctggcggacgcctgcaactccgggctctacgcctacgtctacattgcgttccttacaaccattggcaacggacagaccctatttttcaacctcgccggacactgtgaccccggcttccgcagctgcaccggccagagcatgcgacattcatacctgccagtcgctgggcatcaaggggctcc

SEQ ID NO: 31457 - DNA, 818 bp, Zea mays
  unsure (1)..(818): unsure at all n locations
  Clone ID: MRT4577_128696C.1
gaggccggcacggacaccctcttcgtggctgctctccgctcccatctctccgcttcgccgccccctgccgtcgcttccctctcccgcttcctccccggaatcaccccgctccgcttctcccacctcgtcgtcctcctcgcagggcgcgtccgtcctccgcacaacctcctcactgcgctcctcccctcaccgcctccatcgctcccgctagccatcctgctccactcactcccaccgcgccgctgcgctgagctcctcacctccgtgctcccctccgtctcgccgcgggccttcccggacctcctccaccacgtgatcctcaccgcccgccttgctgctgggacgcagcgcgctgccgtagtcccggccatagacgtcctcttctcctcgtgcgcacgcgacaagaagctctcctgggccacgcttacctaccgcgccatgcgcgcgcacggcatgttcccgacggtcgagtcctgcaatgtcttcatctcgggcgcgctccgcttgcggcgcccagagatagcaatatccttcttccgagagatgcgccgctgccgggtctctcccaacgtgtacaccgtcaatatggtgatgcgggctaaatgtgccctgnggcgtgtggtggacgcggcgcagttgctcgacgaaatgccgtgctggggattcagcaggactgcagccagctttaacacgctcatcgctgcctactgccatgacagtggtggcatggagaccgtgttgcgtctgaaggagaggaggagcgtgaaggtcctgtgccaaatgaggtgacctacaacacgatcgtacatgggctgtgc

SEQ ID NO: 31458 - DNA, 141 bp, Zea mays
  Clone ID: MRT4577_128697C.1
atgttgatgtgctccgacataacaccgcgacaccctagctatgccgccgttgtatcgcagcagcgctcacctacggacccggacataaaggacaggagaggtacgtgaagacatttttgggcgctcctgagatcagaactt

SEQ ID NO: 31459 - DNA, 322 bp, Zea mays
  Clone ID: MRT4577_128698C.1
cccacgcgtccggccacgcgtccatggtttcgtccgcaaccatgtccctgcacctgagggcttcggtaagcaactgcctattctcattgcatggtacaggatcatgaactgtcgccttatcctgctctctgtcctgcgctcctgtgcactggttgcggatgcgtttgacatacgtggccaaagtactgactgcatatcaacgcgccacaacgatccgttgctgacgaatagccgttctaccactacttaaaacgccattgcatcgcgaggaccgtatgatgcgtgccgcaatgttagccttagaccatgcattgacattcac

SEQ ID NO: 31460 - DNA, 884 bp, Zea mays
  unsure (1)..(884): unsure at all n locations
  Clone ID: MRT4577_128699C.1
ttctatagttgataggtgtcatggtctgcctctagcaattgttaccattggtggcatgttgtcttcaagacagcgattagacatttggactcaaaaatacaatcagcttcgaagcgagttgtcaaacaatgatcatgtccgagcaattttaaatctgagctaccatgaccttccagacgacctcaaaaactgttttttatactgcagtctattccctgaagactatcacatgtcacgtgaaagccttgtgcggctgtgggttgccgaaggcttcgtggtaagaaaagaaaagaacacaccagagatggtagctgaggggaatctcatggaattgatccaccgcaatatgcttgaggttgtggagaatgatgagcttggtagagttagcacctgtaagatgcatgatattgtgcgtgaactagctatttctgttgctaaagaagagagatttgcttcggcagatgattacgccacaatgatattggtacagcaggataaggatgttcgtcgtctgtcattatgtggatggaaagatgacactgcagtgaaagttaaacttccacatcttcgaacagtactgtcacttggagcaacttcaccctgccgtggcatgttatcttctattttgtcagaatccaactaccttgctgttcttgagctgcaagactctgaaatcactgaagtgccaacatcaatagggtctatgttcaatctacgttacatcggattacggcgcaccaaggtcagatcacttccagactctatcgaaaatttgtttaacctccatactctggacatcaagcaaacccaaatagagaagctaccacgaggggttgtcaagatcaagaagctgncgcaccttttggctgacagatatgctgatg

SEQ ID NO: 31461 - DNA, 438 bp, Zea mays
  Clone ID: MRT4577_12869C.1
tttgtacgtacgtagtagctagacagccgactcggctctctagctagctcctcccttccgatagatatctgggcggtggcgggaatatcactcgtggtgaagccaagggccgacccatcatggcgggtcgttcctactgctgaccggcatgctggtggtgcgtaataggctggctcgggcggaggacgttctgttctaacgctacctcaaggaggacctgccagggtgcaagcatgcgtccgaatggcatcacgtaaaggataccccgcgcaagcaagattgcgagagcgagtgccgtgagctgcaccagaaagctgacgcggacgaggacctagacagcggagtgggcgcctacgtctgcagctcctgcaggggcgagagccggcttcattgcctgggccgtcactgggtccacccgtattagacccaggactgcat

SEQ ID NO: 31462 - DNA, 314 bp, Zea mays
  Clone ID: MRT4577_1286C.1
gacgtcgcggagctgcgagcgcggaccagaggcagacgacggggagccggacacggtttacactgaatcgcgcgcgtcgtcgcgtttcgtcccatcgtacaagtcgaccaaacgtccaccgactcacggcacacttgcccatggagtaggacacgcaacggtgaccagccgacttaaccctggctggaggacaaccctaccagcacagttccgtctaactgtacagatacgcgggcgtagactgtccagaccctcattgccgtctgacttaacgccacaggcatgtacgatcaggcatgcaaggtcagttgcag

SEQ ID NO: 31463 - DNA, 140 bp, Zea mays
  Clone ID: MRT4577_128700C.1
cccacgcgttcttccacactttcgggagaattaacgggagaagacatctaggcagcagcaggagcttttacatctcctcctccatcgacgacttttattccttatgcctaaacatgtcgtcaacaacacacttcttaact

SEQ ID NO: 31464 - DNA, 1069 bp, Zea mays
  Clone ID: MRT4577_128701C.1
gcaatttgaataaaataattgtagcccttgttggatgttgtgtttaattttataagcaagggcggggagatcggtcttcaaagtctattttcgtcatgttgcacgggaaaaatcaatactctttcccggccgcgggggcgccacggttccaccttctccaaaccaaaaactcctaggttttctaaacgtgaattccaatcactgcacacgcggttgtttcggtgtgatttgccaggaagacggggcgaattcgtggtgctacctaaaagagaccccatctggtgcggttctggggttcgaggagcggcgaggcaggtgggaaatgagggatgtggtcgtggttgacgaagattgcgtccgcgtgcttgggcccggtccggaggtgcgcgcgtacgaggaaggatgaggacgacagcgataatggccgcggcgtcgccgacgacctgctgtggtcgcgggacctcgggcgccacgcggcgggtcagttctcgtttgccgtcgtgcaggccaacgaggcgttggaggaccacagccaagtggagacaggctctgccgcaactttcgtaggcgtctacgacggtcatggcggcgctgaggctgcccgcttcatatctgaccacctcttcgcacacctcattcgacttgctcaggaaaatggaacaatatctgaggatgttgttcggagtgcgttttctgccaccgaggaaggcttcttgacactcgtgcggagaacacgttttataaagcctttgattgctgcggttggatcctgctgtctagttggtgtcatatggagagggacactatatgtggctaatctaggcgattccagggctgttattggcgttctaggtagatcaaacaagatcgtggctgagccactcacaagagatcataatgcaagtagggaggaggtcaggcaggagcttatatcccgtcatccagatgattctcaaattgtcgttctcaagcatggtgtttggcgcatcaagggcataattcaggtttcaagaacaattggagatgcttacttgaagaggcgggaatttgctcttgatccatctatcac

SEQ ID NO: 31465 - DNA, 348 bp, Zea mays
  Clone ID: MRT4577_128702C.1
ctcataaagttcttctattaacatttcatattttttacttacatctttattctgcctttacctatttgcttaaacaaaaactaaccctcactttatcaatagttcctcaacaatagacacttacttcctgacatctatgaattttacttggagcctagccattctaagatttttttgcggagcaacttcctcctcataaatgttttgcgaatagtcactatacaagcttttccgtgaaaaaacttgcctcgaggaataaaggaaagatatcacaccttatacatcctgccttgcaagtttgctgcaaagattttccaatacctccactataaaacacaataaactatt

SEQ ID NO: 31466 - DNA, 164 bp, Zea mays
  Clone ID: MRT4577_128703C.1
cagcaccggcatgcagccgccgtgttgtcgcctacggtctcgttttcttccacagccgagacctgatcccggatcccttcgacacgtcgggccgacgacttacccggctcttgatgggtgattggtacaccaaggacaacactgatctggccaagaacctggac

SEQ ID NO: 31467 - DNA, 697 bp, Zea mays
  unsure (1)..(697): unsure at all n locations
  Clone ID: MRT4577_128704C.1
cttatttctttgtctctctaaaattcacctcgcctccccatttctttgcttactccggccgactatctctgctatttgtccccttgggagggcgtgctgccgtcggtcggtgctccagcgactgtccctatcggcggcatgatcggatggtaagatgatggctagatgtggctagagttgctgaaagagctaaggtctggactagttggacaaccatattgttgatgtttagatgatgaaatgttagaacctactccatctgatgtactattagttgtcatttagaacagcgacacggtctccaaaatataactttcatcaatattttttgttaaaatacaaataaactctcaacatttatacttttataaaagtacttattataacaaatcggtgtatataaacattgtgtttcaaaactacataataaaatagttatttgtagtcaaaatttataagtttgattcatgtcttgatcaaaacgacaactaataggacaccagatggagtaggaatatattgttgccttttaacggctaatactctgcatgtcaaactgtaaccagatttactatttcgattcgtagtggttctttcttacgaatatacagttgttagtgttctagttatttgtgcagannnnnnnnaaaaaaaaaaaaannnnnnnnnnnnnnnnnnnnnnnnaaaaaaaaaaaaa

SEQ ID NO: 31468 - DNA, 238 bp, Zea mays
  Clone ID: MRT4577_128705C.1
tcttctgcgcttgggctttgcctggtaccgagctgctctctatgctcgagttcgtagcgccctgctccctgctgccggggctagttgcttgccctgcgctctccgccgttcggatgtgcgccagggtgccccgggtcggatctgccggcccagcccaggtccttcttccctgggctgccgtggccaccaccctcatgtcgccggcgccctcgattcgaatggaggcgaggcgagcatg

SEQ ID NO: 31469 - DNA, 262 bp, Zea mays
  unsure (1)..(262): unsure at all n locations
  Clone ID: MRT4577_128706C.1
gggacgagttncatttttttctcacattggttatcacataaacaanggngaaagctggtgcgattctttttaacagggatggtgccaaagacaccatctttttcacccaaatttgaaatggccctaccactgtcaccggaagtatctcttgcctcaaaccttaccttcattggtttcatgtgcatgcgcttttttacaccaccaaatgcctcctttatacttgtccacactacaatcctgcgaacaatgaacattgagcacc

SEQ ID NO: 31470 - DNA, 245 bp, Zea mays
  Clone ID: MRT4577_128707C.1
agcgcttttacaaagccatacttttgcgctccccttggaccacggcgatgtaccattaaatggagtgcagccctacatctgcgaaccaacgaatgaattagccaggcgccagagattttgctcccacagatcgtagtctaacgttacatagactctaagatgccagaaaacttaacaaatgtgtattcatatatcaacgctgatcttagacactagccttttatcaagacgtaaactatactagg

SEQ ID NO: 31471 - DNA, 815 bp, Zea mays
  Clone ID: MRT4577_128708C.1
ttcgagaagagccggcgcgatgagctcgccggcaaggtcgaccgtctcggcggcgagtgggggagccgtctcggccgccgaagacgttgccgattccatcgacgcgctctaccgcaaggacgagaccatggctgaactcaagtttgaggtgatggaagcgctgcggaggtgaggtcgctcgacgatgacaattggatgttcgcgcgcgtcgcggttccgcatcaatctcgaatccagaactggtgcttacatgcccaagcaacacgggaaactctcggagctggggcaagcatccaagaaaacaaggaacttctagggtgtagatgtttgtgcttgcaagaagcctagttcatgactccatgatgatagtgaaggtgggattccatctaggctgtagcgtcaagtcggcacgatgattttgtccagttccaaatcaatctagttgcttcctgctaattcaatttcaagcacatgtaaggattttcgagtgattgtgacgtcaatgtcatggtattgtttatgacttgtgcctttcctatcttctacaaactcaacctgcctagtttttccaaaaaaaaaaaaaaaaaaaaaaaaaaaaaaaaaaaaaaaaaaaaaaaaaaaaaaaaaaaaaaaaaaaaaaaaaaaacccaaaaaaaaaaaaaaaaaaaaaaaatatactccggggggggagccgaaaaccaaatccgctcttgggggggggggtaacaacgcggccctccctgtaattccttttccaaccccaacatgggggaaaccccggcgatcgcccttttaaaaagccttgaacaaaaccc

SEQ ID NO: 31472 - DNA, 357 bp, Zea mays
  Clone ID: MRT4577_128709C.1
gacccacgcctctagagagaggcataggacgtaagaagtggtctaattcctggatccagttaggcgacttcatcgtcgctctcttcattaccagatttccttgtcatcgtcaagatccaagcatagacttaatttagttatagacggattggtaagcctcgtgaaaattcacgtggaccggggtatcatccttgccgatcgcaacgcaagaggcatcgatccgtaagtcatcttacggcattgcatgaagaagcggaagacaagcgtgaagaagagatcagtgaaacccatatggcaacatgaacctaagctgatcctcgcagatgccacccaaccacagaatcttgaagtgttcga

SEQ ID NO: 31473 - DNA, 751 bp, Zea mays
  unsure (1)..(751): unsure at all n locations
  Clone ID: MRT4577_12870C.1
gaggtctggccgggtaaggacaaaaaaatgattggttgtgatacaaagaatcataaatcataaaaacaacaatttacttatactatgttggttgtataaaagtgttgtctaaaatcatttaaaaattcaggcacctgaaatattgaagtgttttgttagattttgaagtgtcaaatgcatgtccagaacttgtatgactacaggtattatcgatacctaagtatttgggtgttgcttgtgcaaatataaactaacttaaattttttttgttaacttctatatctatgacttgtccaaacctatatctcctgatgcagttagttggtgaataaacaggaagcatgaaatgcctgttggcctaggggctaggggcatgtgatgatttgtttagccataacatcacgtgcttacattgtgatttgcgtgggtgaacacttggtgtgcccttttctagtgctgtagttgtgctgcattctttggtgtgcagaatatgacccatgtcatgatttttaacgtgatttacttgccaatgattatcttcttttgttttctttggttctgctgtcttcttgtagagctttttcattggtttctatttgcgtcacctttacatgcagcatttttttccccaactatacatgttctgaattacaacaacccattntttttgctgttcttacttttcagaccatgctttcaatcaagcgaactatcatgtgggtggaggatgaatctcctggacgtaggaaca

SEQ ID NO: 31474 - DNA, 197 bp, Zea mays
  Clone ID: MRT4577_128710C.1
gcggggccttttttttaatagcgccggaacatcaatctacctttttcaacacacatattatttacaaacacccccctttgggatccaccaccaaacccacttttgatcccctcactcacttatgttacaatcacattcattctacagacaccctcttaactcccccctcaagggggcgggctgaactcctcttaaac

SEQ ID NO: 31475 - DNA, 174 bp, Zea mays
  Clone ID: MRT4577_128711C.1
cttctatcagttccatcaatcatagtttattttagtagtgtaggcaccaaataaaatctgcagcatcaattatctaactccaaaaaccatgaagctggtgcttgtgcgtttcgctatcattgctttagaatcaagggttacatagtacacagacaggcggctgcagatgtggtc

SEQ ID NO: 31476 - DNA, 242 bp, Zea mays
  Clone ID: MRT4577_128712C.1
tacctgttaagtaattgcaacgttcgtctatgcaaaaaaaaaaaaaacaaaaagagcaaaaaaaaacaaacaaaaaaaaagaaaaaaaagataaaacgggcggccgctattaaagtatccaggttactttccctgcttgcaaagggctgaccttttataaggggccacctaaattaactttactgcccgcgttttaacaactttattgacgggcaaaaccttgattttcccgaccttatttt

SEQ ID NO: 31477 - DNA, 495 bp, Zea mays
  Clone ID: MRT4577_128713C.1
cgccgcgtccgacaccggtgcgtgctcgagctccaccagtcgccgccgccatgtcgctgattgcgggggaggactttcagcacatcctgcgtttgcttaacaccaacgtggatggcaagcagaagatcatgtttgccctcacctccatcaagggtgtcggccaccatttctccaacatcgtctgcaaaaaggccaacatcgacatgaacaagcaggctggtgagctatcctagatgagcttgagcgcctcatgactgtggttgccaaccctcgccagtttaaggtccttgactggttcctcaacaataagaaggactacaaagatggtaggttctctcaggttgtttccaatgccctcgacatgaagctcagggatgaccttgagaggctcaagaagattgggtcagtctatgaccatcgttttggagtcattattgattatctaatgctatatataagatgacatgcacacatatttgctgacatggcattgct

SEQ ID NO: 31478 - DNA, 141 bp, Zea mays
  Clone ID: MRT4577_128714C.1
gattattatatatctatgcttgggcgaattatatcttgtacaattaattgatctcagtataccttcaaaattatcatcactacaatatataattttgaaggtatactgagatcaattaattgtacaagatccatgcttggc

SEQ ID NO: 31479 - DNA, 1020 bp, Zea mays
  Clone ID: MRT4577_128715C.1
cccacgcgttcgtccacgcgcccggagagttgacaggtgtaggcggcgccagttggcggtcaccagtcctttgccgttagaggcacctcatctcccacccccagacaacatagtcgatgagcggcaggaacgaggcgcagcagattggccgacgacaagccgggaccccacctccaccggtggtgatgagcaactcgcaggcttcgctggcgtctgccccaagctcccgcttcgtcgtggcatagaggccttctcgaagcaggagctagacggcctccatcaactgttcgcctccttcgcagcacagtcgcagaccagcggccacaccatcttgttttaaggactagttattagcattatgatgtaggtttagtttttttagaagtttttttccagcagcccccaatatgatgtttttagaaacaaatttttggtaagctcttggagttgctattagtcccctcaatccccttgcttccaaacaagccaggttttccctccctgatttccctcacccttccaaactcgcctttatagtgaatataaaactgtgatcgggagccatagaaagatgaagatatctcggttgcaaatgatcagcagttgggtacatccctacatatcatataggtgtcagattacctgctctgtgatctgtgaagtgatacttgttgaagtgtcgatcaccgaagtagggataccagctactctggccagcagaagcccatagtgtggtacccgtcggatgccatcctttaggcagaactgaagtgggagttggtataatgttagtgtaacagacatgatgaaacaaattcctgaaatcgctagtgtgacaggtactactgaccttgaaatccaagcggtcatttctcaagtcaacctcaaaatggaggatcttcacatttggatacattgttgaaagttctgacaagcgttccatgtgcgtggcaaaaacagtgtatctacatgggtcaaaaacacaatgttattgagcaataacatatcactttccaccac

SEQ ID NO: 31480 - DNA, 350 bp, Zea mays
  Clone ID: MRT4577_128716C.1
attgattatccggggggttggtcttttaaattgaaaccaaacggatatacaaaactttgagaaatggcctgaaccagttgatcacacaacacatccggctcacaacgagcacaccggctgaaatatgactgaaaaagaaatagaaaactgtaaataaatgctggaaataacaaaatgtagatggaagcgaataaacggctgccgtcctcttttgactggtcgcattagaaaactacggaccgttcatgcaacgtacgcgacgcggtccactagtgcacgaacttgaaatacataatcacgaggatagccaatacatgaaccgctctaatgagaccaatgatccacttgtt

SEQ ID NO: 31481 - DNA, 402 bp, Zea mays
  unsure (1)..(402): unsure at all n locations
  Clone ID: MRT4577_128717C.1
cctacgcgtccgccttcgcgtccgccttttnattccatgcaaaacaacgtgtgggtttagaatgactaaccagttaaactatttgtcaccagctattatcaccaaaaatcatgcaggtaatatcaagaatataaaaactcggccggtggggaaagaccgccccacggtatttcactaagaagagctcaatcagagcatgagctggccccctcatacatagggatgtctcccctatggttcgggccttgacccatgctttgaggcccaacccacatgaccagcctcttacacgagggctcgttcacccatgccgactaagagaaccagcgagtgacgttttttttaccacagtctgaaatttgatctcacagggagtcgaacctaggatctgagtggtgctac

SEQ ID NO: 31482 - DNA, 422 bp, Zea mays
  Clone ID: MRT4577_128718C.1
aaagaaaaggggccccaggccccctacatttttttttaaggggccacctccccttccagaaaaaaaggggggccccccccttgattgcccaccccccccccccacaaagtttccttttaacccgacccaagggaaactattaacagcccttaaaactacaaaaaaagccccccccggttcaaggggggaacaaaaccttgacagggggggaaaattaaacttttgaaaaaaaaagaaaaaacaaacccccccccctaaaaaaaaacaaactttttttttcccccccggaaaggaaaaaaaaaaaaaaaagggcagggaaaaaaacccaaccctccgagggccccctttccctaataaaacaaccaggtttggggcccccgccccccataatttgggggagggctttccctccacggccaggg

SEQ ID NO: 31483 - DNA, 279 bp, Zea mays
  Clone ID: MRT4577_128719C.1
ccggacccgacgccacacgtacgaccgtatacaagaaaacaaccgatctttttttattcattgcagtctatataaaaccgggggctttttcttgaattaccatattcaaattattaaaaaaacctaactcctggagtgagaataacgccattcattttatcaaattaaaaaaaaataaccttttacctattaaaaacaaaaaaaaacttaccacccattgaataaaaattaaaaaacactgacctctttcttaataaaaaaaccttacgttcgctattt

SEQ ID NO: 31484 - DNA, 342 bp, Zea mays
  Clone ID: MRT4577_12871C.1
gggtgaaaacaaaagggattttttccaccctaaaaaaaatttcaaacttaaacagattacagtttccgggttctgtgactacctacctaaaaacaaaagttttttttttttttaaacaaaaacaagaggtcaaaacaaaaatttaaaatttaatctgttcccccttaaaaacccacccccaaaaaaccttattaaccatcctttgccaatgagccaaacccattctagccctactcctgaaaagaggcctccgaggaggcaaacaactagcacttttcccaaagcgtttttttcggggcccttttaccctttgggcgcctccattagcacacacacggtgag

SEQ ID NO: 31485 - DNA, 110 bp, Zea mays
  Clone ID: MRT4577_128720C.1
aacatgcatctactgaatatacttctacgactcactcaatccttcctcttaccgtctttttcacctcattaaatgcaaatccctcttctttattcaacacatatttacca

SEQ ID NO: 31486 - DNA, 200 bp, Zea mays
  Clone ID: MRT4577_128721C.1
aggggtatctggggaaatcgcccttttcggggggcccgccgggggggtccgctacatcttaacatattcttttttgcacacagggggtagaagaggcgattacacggaggcgcgcgccgatgcaagagcccctagaagagaccgaactattttatgctatgtactctgaggggacgaccgacccgatacatcagaggcag

SEQ ID NO: 31487 - DNA, 268 bp, Zea mays
  Clone ID: MRT4577_128722C.1
ggagaattcggagcctggcttgtgggaagagcagcatcattgcggccgccgatgagagcaccatcagctgtggtccgtcaccgccctttggtgaacatgtctacggggaccacaagcccaagtcttccactgcagcccaggaggtaaagactctggatggcatattctcagagcaggtcgccatgggctactcacactccttggcgatagcatgagatgaaagttagactgagaaagagaagatcaagaaactgccacaatacaaccc

SEQ ID NO: 31488 - DNA, 2619 bp, Zea mays
  unsure (1)..(2619): unsure at all n locations
  Clone ID: MRT4577_128723C.1
ggggtgctgcggagagtggtagaggggggaggggggaggggccatctgcggnggggttgattccatttcaattcccttccccatccatcgcccacctcccctacagacagccaacgcaattcgctccccgaggcgcctccctgaccctgactcccttcttcccacaacgtgcgcgctcactcgccggccgggccgggcccggcaggcacgctcacccgacccttattaatcctcttccgcgtcgcgccttaacctccccattgcccgccgccgcaccgtgtccggctaggactaggacccctgtttgggctcttgcgtttcgattcctgggtcgtctgcaaggagtgtggccgacggagggggccaaaatgtgggcggagagggtggtcggcgagcgccggatgcggcagatccagcgcttcgcgcggaacgccaagctcaccgtcgtctgcctcctcctcaccgtagttgtgctccgcggcaccgtcggcgccggccgcttcggcacgccgcagcaggacctcatcgagctccgccagcacttcgtctcccacccgcaccgggcgctcgcggagcaccacgacgccaggtccagggcctccaccaccaccacgtcgtcctcgtcctcgtcttcctccggccgccgcgacgagcccgacccaccgccgaggtcgctcagggacccgccctacacgctggggcccaagatctccgactgggacgagcagcgcgccgcctggcaccgccgccacccggagacgccgcctttcctcaacgacatcaagccacgggtgctgctcgtcacggggtcctcgcccaagccctgcgagaaccccgtcggggaccactacctcctcaagtccatcaagaacaagatggactactgccgcgtccacggcatcgaggtcttctacaacatggcgctgctcgacgccgagatggccggcttctgggccaaactcccgctcatgcgggcgctgctcctcgcgcacccggaggtcgagttcctctggtggatggactctgacgccatgttcaccgacatggcgttcgagctcccgtgggagcgctacgggccatacaacctgatcatgcacggctgggacgagatggtctacgacgacaagaactggattgggctcaacaccggcagcttcttgctgcgcaactgccagtggtcgcttgatatgctggatacctgggcgccaatggggccaaagggccctgtccgcatcgaggccggcaaggtgctgaccaagtccttgaaggatcggccagtattcgaggccgatgatcagtcggccatggtgtacatcctcgcgacacagcgcgagaaatggggtgataaggtttaccttgagaatgggtactacctccacggctactgggggatcttggtcgacaggtatgaggagatgcttgagaactacaagccagggctaggtgatcaccggtggccgctcgtcacacattttgtcgggtgcaagccatgcggcaaatttggagactaccctgtcgagcgatgcctcaagaacatggaccgtgcattcaattttggggataaccagatcttgcagatgtatgggttcacacacaagtcactagcaagcaggagagtgaagaggatcaggaacgagaccagcaacccgcttgagacgaaggatgagcttgggctgcttcatccagcattcaaggctgtgaagacttccacatgataattagagtacagttccacttgtttattttgttggctcgttctagatcctgttgggtctataatccaaagtgttcttttttgtagaatcgggtgacgacagaagtttgggttggggtcatgggatggatatctttgttgtaatgtgaggtgttaggagaattatgttatgtttatttattggcataagttatgtcttacacgtacaaatgagttaatggatgaactcaagttattggttcttcacacacaagtcactagcaagcaggagagtgaagaggaccaggaacgagaccagcaacccacttgagacaaaggatgagcttgggttgcttcatccagcattcaaggctgtgaagacttccacatgattattagagtacaattcaacttgttattttcttggttcgttctagatcctgttgggtctaaatccaaagtgttctttttgtagaatcgggcgacaacaaaagtatgggttggggttatgggatggatatctttgttgtaatgtgaggtgttaggagaattatgttatgtttatttattggcataagttatgtcttacactcgtagaaacgagttaatggatgaactcaagttactggttgcatgatagatttcaatagagttccctgtttttctcttaaaaaaaaaaaaaaaaaaaaaaaaaaaaaaaaaaaaaaaaaaaaaaaaaaaaaaaaaaaaaaaaaaaaaaaaaaaaaaaaaaaaaaaaaaaaaaaaaacaaaaaaaaaaaaaaaaaaacaaaaaaaacaatcatcaaaaaaaaaccacaaggcccccccccccccccaaccccccaaaaaacaaacccccaccgcccgccgaattgccaacccccaaatgccaacaccccggcgaaaaccggggggaaagcccccca

SEQ ID NO: 31489 - DNA, 759 bp, Zea mays
  Clone ID: MRT4577_128724C.1
ctatactataccgccaccgcaacagccgcccacccgccgccgccgccgccggtgcaagttcgtaacaactcccatttctttggaacaattggatcagcgcgtattcattcagtgatgcccgcgtcgtcgtcgtcgtcgcccaacatcctgagctgctccgccctggaggaggatccgtggtcgcctacagcaacgatgatgacctccggcgacgacgacgacttgttgttggtgcagctggtgccgagggacgtctcggacgagctcctcggcaagttcgcggacaccagcgccttcgacttcgactacggccgcagcgggctctggtcgcccctgctgctgcgccccgaggtcatgctgctcgcgcagtccccggccgccggacggcgcccacgacggcggcgccgccggaagcggaggaaggtgctctgcggctgctggcgatggtggtgacgcgaccgcgacctgcagtgcagtgttccctacggacgaaacatctgctctgctctgctctgctctgaataatgctgctgaatcttggatttcttcattcttcagtacatgcaaaagagtcattctctgtatggaccatgagaagctgagtatttatgtatgcgtgcagtgcagcgacgtatataaggaccagattgcaagacgacatgattgttttttggtattgctttttggagccatccccaacatggatgaatcctgtaattaccttgttttgttggaaagtacgtactactttttgaacac

SEQ ID NO: 31490 - DNA, 157 bp, Zea mays
  Clone ID: MRT4577_128725C.1
gctcggtaccccttaagaaaactgtgaagctatactgatctttgggtattggctatggattttttctgctcaggttagaaggaaagataaccaagtcctcttctcgaggggtcgtggccctttatgacatatcactcatgaagagcttggattctaa

SEQ ID NO: 31491 - DNA, 2112 bp, Zea mays
  Clone ID: MRT4577_128726C.1
ctctcgcctcttcttcttcttcctcccctccccttctccccccatctgcggcggggttgattcgatttcgattcccttccccatccatcgcccacctcccctacagacagccaacgcaattcgctccccgaggcgcctccctgaccctgactccctccaccccacaacgtgcgcgctcactcgcgggcggggccgggcccgggccggcaggcacgctcaccgtcaccacccttattaattcctcttccgcgtccgcgcttcaaaacctcctcccgtcctccgcctcgtcccccctcccccctcccccctctaccactctccgcagcaccccggcggccgcattgcttgccgccgcaccgtgtccggctagggcctctctgggctcctgcatttcgattccctcccctgcctgtgctttggtctgggccggttgcaaggagggggaagggagggaggatttgatcggagggcgaaaatgtgggcggagcgggtggtcggggagcgacggatgcggcagatccagcgcttcgcgcggaacgccaagctcaccgtcgtatgcctcctcctcaccgtcgtcgtgctccgcggcaccgtcggcgccggccgctttcgcacgccgcagcaggacctcatcgagctacgccagcacttcgtgtcattggcgccctcggcgccggccgggatcgtcgcacgcgtcctcgaataaaaatccagacgaaacccaaaatccccaccgaacgcccgccgcgacgacgaccccgacccgccgccgaggacgctcagggacccgccctacacgctgggccccaagatctccgactgggacgagcagcgcgccgcctggcaccgccgccacccggagacgccgcccttcctcaacgacatcaagccacgggtgctgctcgtcacggggtcctcgcccaagccctgcgagaaccccgtcggggaccactacctcctcaagtccatcaagaacaagatggactactgccgcgtccacggcatcgaggtcttctacaacatggcgctgctcgacgccgagatggcaggcttctgggccaagctcccgctcatgcgggcgctgctcctcgcgcacccggaggtcgagttcctctggtggatggactctgacgccatgttcaccgacatggcattcgagctcccgtgggagcgctacgggccgtacaacctcatcatgcacggctgggacgagatggtctacgacgacaagaattggatcgggctcaacatcggcagcttcttgctgcgcaactgccagtggtcgcttgacatgctggatacctgggcgccaatggggccaaagggccctgtccgcattgaagccggcaaggtgctgaccaagtccttgaaggatcggccagtattcgaggccgacgatcagtcggccatggtgtacatcctcgcgacgcagcgcgagaaatggggtgataaggtttaccttgagaatgggtactacctccatggctactgggggatcttggtcgacaggtacgaggagatgcttgagaattacaagccagggctcggcgatcaccggtggccactcgttcacacactttgtcgggtgcaagccgtgtggcaaatttggagactaccctgtcgagcgatgtctcaagaatatggaccgtgcattcaattttggggataaccagatcttgcagatgtatgggttcacacacaagtcactagcaagcaggagagtgaagaggatcaggaacgagaccagcaacccacttgagacaaaggatgagcttgggttgcttcatccagcattcaaggctgtgaagacttccacatgataattagagtacaattcaacttgttattttcttggttcgttctagatcctgttgggtctaaatccaaagtgttctttttgtagaatcgggcgacaacaaaagtatgggttggggttatgggatggatatctttgttgtaatgtgaggtgttaggagaattatgttatgtttatttattggcataagttatgtcttacgctcgtagaaacgagttaatggatgaactcaagttactggttgcatgatagatttcaataaaaccccctgtttttctcttgcggggatttctttt

SEQ ID NO: 31492 - DNA, 1082 bp, Zea mays
  Clone ID: MRT4577_128727C.1
ggaccctcgaggccggcctggccggggtccgcgtcgcctcattcaccgccttcctctctctctctcgcctcttcttcttcttcctcccctccccttctccccccatctgcggcggggttgattcgatttcgattcccttccccatccatcgcccacctcccctacagacagccaacgcaatccgctccccgaggcgcctccctgaccctgactccctccaccccacaacgtgcgcgctcactcgcgggcggggccgggccgggccggcaggcacactcaccgtcaccacccttattaattcctcttccgcgtccgcgcttcaaaacctcctcccgtcctccgcctcgtcccccctctaccactctccccagcaccccggcggccgcattgctcgccgcagcaccgtgtccgggtagggcccctctgggctcctgcatttcgattgcctcccctgcctgtgccttggtctgggccggttgcaaggagggggaagggagggaggatttaatttgatcggagggcgaaaatgtgggcggagcgggtggtcggggagcgacggatgcggcagatccagcgcttcgcgcggaacgccaagctcaccgtcgtatgcctcctcctcaccgtcgtcgtgctccgcggcaccgtcggcgccggccgcttcggcacgccgcagcaggacctcatcgagctacgccagcacttcgtgtcccacccgcaccgggcgctcgccgagcaccacgacgccaggtccagggcctccaccaccaccacatcgtcctcgtcctcctccgcccgccgcgacgacgaccccgacccgccgccgaggtcgctcagggacccgccctacacgctgggccccaagatcttcgactgggacgagcagcgcgccgcctggcaccgccgccacccggagacgccgtccttcctcaacgacatcaagccacgggtgctgctcgtcacggggtcctcgcccaagccctgcgagaaccccgtctgtgaccactacctgctcatgtccatcaagaacaagatggactactggcgcgttcacggcatcgaggtcttctacaacatggcgctgt

SEQ ID NO: 31493 - DNA, 526 bp, Zea mays
  Clone ID: MRT4577_128728C.1
ttgcatatgccagtatggggttcatgttgtctctgctaaaatgtaatgaagtgtgatgatgatactttcgtgagacttgattcagtagtcactgaaattaaaaaggtaccaggtggggagaagtctttacatggggagtatgaatatacaacacaagccactacgccatgggaaatgggctgtaacctatgaggagtggccacaaaaggtgtatccgttatatgcaaatggccctggatatgttatatcatctgatattgctgattttatcatgtcagaattcatgaaacaaaagttgatgctcttcaaaatggaagatgtgagcttgggtgtgtgggttgagcagttcaataagacaagacccgttgaatacgttcacagcgacaaattttgtccaaatggatgcgtccctgactactatactgctcattaccaatcgccaaagctaatgctttgcatgtggcagaagttactggaaggaaaaaccgactgtttgcatgcgagataacaatgatggccgtagttc

SEQ ID NO: 31494 - DNA, 524 bp, Zea mays
  Clone ID: MRT4577_128729C.1
cttttttttttttttgagggataaactgagtgcgtctcatatgtgcgccaaaggagaacatcacatataatgacaaagtgtatagagataaatgtcacaagtatcattattacatagcggaagtcttacaaaaatagatgataacaataaaatgaactaaataattattccttgtcgtcatcaagcacactgggagacgcaacctagataagctcatattcctcgttgtagggctcctcctggaccacctgttcttctccttcaacgagctcctgctcagcagtctccacctgctgaacatctgggttctcggtcacttgctcgtcagagttggcgacgcgcagaaccctacccacggcggcacaggcactcgcggcggcggtggaaaggcgtcgagaaattggtggcgcgttgttggattacatcgccaggagatgccacggatagcttcagtagccgctcgcggtcaccccaggcgctttactacggccctgccaccaccgtggtatggatctatccggcgg

SEQ ID NO: 31495 - DNA, 364 bp, Zea mays
  Clone ID: MRT4577_12872C.1
agcgttatctactccagagcgcagaataacccgatcgacaccatgagggtgtagatcggtgaggtcgctcttctaggtctcaatgttagcgccacctgcacgcatacaagcagcagctgcagatggcagccaccaacgacggttcatgtaccggctttacaacatctgccacctgaaaacacctgcgatctcctatgcatctgccaccgacgagacacctgtttgtcgccggtccacctgtaaccgacaggccatgtcccatcgccctttcatacgacgccgccaccatgacagtacattactcaaccgctgcagcctcagactaatccccagccacaccgatgctactgccaacaggagcatt

SEQ ID NO: 31496 - DNA, 213 bp, Zea mays
  Clone ID: MRT4577_128730C.1
tatcgtagaagtaaagccgcaggacgattagacaacgggtacgtagctgtacgaacaagactagattacaagacactaggacgcaacaaacaaacgaggaaggacacagagatttacctagatgtagcgtacggcaaacgacagaatactagacgaggaacatgttacgaatgactacaacgagtatggacctccaacgatgtactacatcga

SEQ ID NO: 31497 - DNA, 644 bp, Zea mays
  unsure (1)..(644): unsure at all n locations
  Clone ID: MRT4577_128731C.1
tgtcgcttccgctgcgcatnnttgaagacccaggccacgattnattttcttcannatgaagaaaagctcctttcgtcgatgctagtttatatcgttggaaggggataccacattgtgcattaccgtcactttgactgggnnactgcactcacagtactcctttcataatgggcttcnncaacaacnnaagctctgttcaacaaaaccacagtgcaagaaatgtgctggcacgttggacccaaatcacgttgagaagaaacanngacaaagnnncttccagtactgtnnctcctggtgggaacaagacgaatccgggatacggttcaactggtgctctgttgaggcannttcgccagaagaaaatccagtgctctgggnncgccctgcacgatcaattcnncagtcattccgaggcagcaaagagctttgcagaattccctttggaaccgtccaaaacgaagcacgttgctcgacttcatcagaagaaaaacgcgcatnctctgtcccgggggagggggagctcgtcgaaaaatggcccgcagcttccgttccaacccggccccgacctctttcggggggacttggcagtgaccaagaaccgcccggttggggtctttcggcaagcaagtggcggcaagcggggc

SEQ ID NO: 31498 - DNA, 346 bp, Zea mays
  Clone ID: MRT4577_128732C.1
ccttctctcctccagccccggctcggcccgaatcggtggggcccgatgccgtcgcgaagaagatgtgcagaaggcgatggggcttgagccctccgacttcaaggactccgctgctcagaattcttatgatctgaagcacgtgcaccatgagctcaccagtgacctcgaggacctgcacgtcaacagtggtatccagatggatgttaacagagtgtagaacgactgctgccatctcttcaacgtgctgactgcggtaggcctgaagattaatatatgctccaaggacaagtcaaatatgatactacttccttaacgatatatgcgagaagctgcctgttacgaggac

SEQ ID NO: 31499 - DNA, 222 bp, Zea mays
  Clone ID: MRT4577_128733C.1
ggctcctcaggtgtattttatttggaacagacgttctattgagcacataacttttgctttatgggatgcttctatttagtactagctagggctgccaaccccttgatgcccacaggaaattttgtattgcctacccagaattcaatcttgaaccttttttttgatcacagtatgagccgtcactggtgggtgagactcccagtggcgggcgacacgatgact

SEQ ID NO: 31500 - DNA, 351 bp, Zea mays
  Clone ID: MRT4577_128734C.1
agttacgtctggtctttcctgttaacgtgcaaggtccaatactgcagcctctatgaccaaggcgtacacaacactgttccaaaccagcttctgcgtgatggccccggcgggtcgtacaggccggcgtacacgctgtcagatgggagtcttgagagggctggtcgagcgaagaagaccgggaagcgagatggctcagctaatggcacgaagaacaacggcaatgaaatggaacagtagccgatcgctggagaactctggttgtttccaggtttattgtgaagaaaaagaatttcgtatgaaaaaaatggcaactgtacatgtgcgcgttcgaaggcaactcacttactactt

SEQ ID NO: 31501 - DNA, 234 bp, Zea mays
  Clone ID: MRT4577_128735C.1
ccgatcgagtgatcaggaggagtatcgatggggcgacgctgctgcatgtcactcgggtctggatcgctgaggcgctcttcgtctatttctacagcgtctcggggggcatgtatgggattatcatgctaacggtcatgtgcgtcacagtgcgagcggctcacaattcgatagagtacaaacgcctaaagtcagggatgcagttgggggctgaggggtttactgtcgggttcttgt

SEQ ID NO: 31502 - DNA, 337 bp, Zea mays
  Clone ID: MRT4577_128736C.1
cccatacttcctgatgatcaacggcaacgccaggggggacttcaagagcaactacgacaggggccctgctcggtcacacatgccgaatcgacctctcctcccaggctctcaagataaaccaaaccaaagggtgacatgaagaacggcgtgctcagggtcacacgcccccaacatcaaagacgaagagcgcaaggacgcctttgaaatcaaaatcgactagatagagtgcatcgaatggcaactcccaagactcctagtaggaaaacatatatatacatatcgtccaagcagtccatatatcatatagccagtgccatgagctagtcgtgctagaaat

SEQ ID NO: 31503 - DNA, 1007 bp, Zea mays
  Clone ID: MRT4577_128737C.1
ccgggaaaaaaaaaaaaaaaaaacccgtcccgtctccaaagtccaaactccaaagtccgaactccaaaccaaacgctccagccccgccgcacgcatacggcatacgcatccctcatctccctctcctcgccttcccgccgcggcgccgcctctcctttccgaattccgactcccgcctccccggggtgagtgtttccgcatccggctcgtccgccgatcctcgcgaggcctcctcgaccccgacccgacccggcgcggccaccggttcaagtcattcacaaaaaaacatgggtcatgatgaagctgtagttactcagaattcagtaaaagcaccatcaccacccaaggatcagccagctatttatccatgctttgattggtcgactgtgcaggcatattatggcccaggggtcttgccaccagctttctttaaccctggaatagcgcctggtcatgcccctccaccatatgtgtggggtccgcagactatgccaccggctgcctttggaaaatcatatgctgcaatatacccacatgctggtggtttcctgcatccactcatgcccctagtggtaaacccattgagtgcggagccagctaagtctgggaacagcaaggataatagtttaaacaagaaactaaaggaaattgatggatctgctgtgtcaagtggcaacagtgagaaaacaaggtggttacatgatatttctaatatattttttcctacgaatttggaagtgtactgttctggcatgttgttcgagccagatttgagccggcggactgtccggccctgaggccggacggtccgcggtccggacggtccgcgcgtgcgcagaacagattagggttccgagttttgtgctacggttgttagctatattcgcgggattagctcggaatcagttgtgtaaagggtccagcccccctcctctataaatagagaggtctacggccgatttgtaatcatcaacaatcgaatcaatacaacttctatttcgcatttt

SEQ ID NO: 31504 - DNA, 251 bp, Zea mays
  Clone ID: MRT4577_128738C.1
cctcctcttttacacatttttactattaacacagatttctatctacatagcttggttcctttttcagttgctagtactattctatacacattacattcaaccatttaccttcaatcattccatctatcttaatatcctaaatccacaattatcaaaccatattttcactcttttaacttcattaccaacttcacttaacatttcaatcaacatatctcaaattcatatcaatctaacttattatttcaatt

SEQ ID NO: 31505 - DNA, 182 bp, Zea mays
  Clone ID: MRT4577_128739C.1
tcgagggccgcttttttttttttttttttcttggggaaggaggggtttatttttccaaaacatgcgtggatttgtatgaataatacattcaactgtaacattactccatccagcagccaaacctcttggacagtataccacaccttatgaggattattttacattatatgtaacttctcatt

SEQ ID NO: 31506 - DNA, 392 bp, Zea mays
  Clone ID: MRT4577_12873C.1
cacaagggtaggtatatgtatctgctatatttacgcccgtccaaaaatatacacggccacatgtagaacctgaaatattgtaaaatcttacacagcttacaaacacgcgtcacacgtgctaccacaggcatggatcctgacccagcagctgcagctgatactgacacgccggggttcggagttcactcgatgggggggctcttgcctactgctgccgtgggcggcggcggcgtgaggtcgccgcagtcgaaccacatggtgtccgcgagccgggggaacacgaacctgtagaagatccagtcccggaacaccttcaccaggcggccgcgcacgccggcgacgttggtcccgccctgttggaaccacccccacaggtagggttcggggaccca

SEQ ID NO: 31507 - DNA, 196 bp, Zea mays
  unsure (1)..(196): unsure at all n locations
  Clone ID: MRT4577_128740C.1
agagctangacggcgcacgcacgcatacttaaactctcatcctttaaaccacacccactttctatttaacacacacataatactcttcgagccattccattccatcttaagggataaaataattatccgttcattcaccaaccttttatacgatcccctcccactaattttttacaccgggacgcaaagcgagcca

SEQ ID NO: 31508 - DNA, 620 bp, Zea mays
  Clone ID: MRT4577_128741C.1
ggccgcccccccccccccccccctcccccccccccccccccccccctttttttttttttttttttttttttttttttttttttaaaaccaggagggatatttatttgttcaagggattgggcctgaagctaaggtctatttggccatgggggaatgacagtccactcaaacccctttttaaggatacccatctggccttttacatggggagggctttttccttgaagaacaccccatactggccctccaatgttttaatcaacggtttgaaaatttccgggctaaaaggcgctaggataccctttttgttgagcgaaccgtaaagaacctgttggacagttaccgggcacggaacaccgaccaatttggccatggccgagtaccccttggggtcaccgtagtctacaagtgtgcaggggcggaccgccttgttgccgcccttgttttcaatttcaaacctgggctggagcatgaccatgtggggctcaccctcctaaaactgaatttttttttccaaagtagcgcataaagggcccaaagggttgccgcgaggaatgatttcctcatctgaaatgatcccgatccagcggagaccggaaaagatgcggtccttttttttt

SEQ ID NO: 31509 - DNA, 498 bp, Zea mays
  Clone ID: MRT4577_128742C.1
aaccagggcggccggggaacagattttcatctgagcgccgagctatccaagtcacggttcgccttccccgtctctttcgcctccacgaccaccaggacgtcacgtcgtcgctgcctattgtcctttcgaatttagaatccccgtgctgagacgtgagtgcccccttgggtgcagcgtcctggactcgattcctcgtcgcagcggagggatcccgtgccctccgcttgtccttgctatgctctgggaacgcagagactaaaaaaacagagcatcatgtcctaggagagggactccaatgtgcctgctgcacttgatgccaatcctcagcctacggaccaagctgaggacgattctatggcctccccacagcaactggaagaagcatttgataacaaggtggcacgactaatggccaaaaggccctcactcatcgcaggacttcatgagcgggccgaccttgatactgcggagtgggtgccagggaaggcgcgtgttgcc

SEQ ID NO: 31510 - DNA, 240 bp, Zea mays
  unsure (1)..(240): unsure at all n locations
  Clone ID: MRT4577_128743C.1
ggggggggggggggggggggggggggggnngggggggggggggggggtttttagaggtataagagggacatctgaggaaagatgacatagcagtacatgtacacgcacgacaaacagcgtgacctcctataaggaccgccctcctaatttttctttattttttttttttttttttaaacaaaggatcacaccttttatttaagcagggggcaaggccaagaaccctcttacaataaatat

SEQ ID NO: 31511 - DNA, 1197 bp, Zea mays
  Clone ID: MRT4577_128744C.1
ccggccacagcaagcgttctggctgctgttctatcaggcccacggcatgtcgctgcgaggtgccggcctcatcgacggcaagggccagaagtggtgggatctcccctgcaagtctcacaagggccagggaggatcaagcgtccacggtgcatcctgtgtccgcccagtggcgctgaggtttttcatgaccaacaacgtgacggtgcaagggctcaaggtgcagaacagccccgagttccacatccggttcgacagctgccgcggcgtggtggccagcggcctctccatcagctccccggcgctgagccccaacacggacggcatccacgtcgagaacacccaggacgtcctcatcaccaacaccgccgtctccaacggcgacgactgcgtctccatcggcgcaggcaccctcaacatgcacgtcgagaacgtcacctgcgggcccggcggccacggcatcagcattgggagcctgggcaagcagggctcgcgggcgtgcgtggccaacgtcacggtgcgcaacgccgtgatccgccactccgacaacggcgtccggatcaagacgtggcagggcggctccggcgccgtctcctccgtgtccttccagaacgtgcgcatggacgcggtgcggaaccccatcatcatcgaccagtactactgcctctccaagagctgcgagaacgccacctcggccgtcttcgtctccggcgtctcctacgccggcatccggggcacctacgacccgcgcaccccgcccatccacttcgggtgcagcgacgccgtgccgtgcaccaacatcacgctctccgacgtcgagctgctccccgcgtccggcgagaccatcgacgaccccttctgctggaacgtgtacggcagcaccgccacgcctacggtgccgccggtgccgtgcctcatagaaggcgtgcccaggaacctcgacgataacagcagcctcaaatgctactagcagcctcaaatgctaccttcctgctacttgttcattatattagaagaaggaagaaggcaaaccaacagagaaaagtaatcaagattagtgcagataaaacggagtttaacgcgtgattacttatgtatatatagaaaaagatgatagtactagtaacaagtgatttgtgtgacaattatacatatagtattaccagaatatatacatggttttcaactttaatattcgag

SEQ ID NO: 31512 - DNA, 144 bp, Zea mays
  Clone ID: MRT4577_128745C.1
gaaaagagccgaagagaaagctgctcgagaggctgaagagcaggctgctttagaagctgaacgactggcccgagaagccgaggaaaaagcagctgagatcgcaaaggaagacgaagaaattgctcagttgattgacaaacagcc

SEQ ID NO: 31513 - DNA, 1391 bp, Zea mays
  Clone ID: MRT4577_128746C.1
gctatgtcaccaagcatgtctggctagcgcttgcagagttgagctatttcttccaccaggtttgtgcaaaagagtcatctcggatcgtgattgcaaacttggaaagaatggcacccgtgttactgtgcgcaagtggctcgaccaccaagaccctgagatatgaagagtgtcgccatatcatgctatatttattgaccaaccttgaagaggtgatgccatacatcgatcaagggacccaactccacaagaatatgatacccttcttagaaatggtgctggaaatggattgcctaatttcatttcctagttcaaacagaagctacgaccaaagtcagcccaaacgaaaaatcacgtgttctggagtcttcacgcccaggcttgacgaggtcgagtattatggaagaattaaagaaatatatgaactcatttttcatggttccaaatctctaactccagtgatattcaaatatcattggtttgacattgaagtgacgagatggacacattctaatcttgggctagtcaaaatgcgacaggattccaccttaccaggagccgatgtctatatcgtggcccaacaagccacacaagtgtattatctcccatatgcgtgccaaacgaaagaacatcttaagggttgggatgttgtgtgtaagatatcaccgcacgataaattacctattccaaacgatgaagattataacttaaacccagacacatatgacaaagagttctttcaaaaagatgggctagaagggcgatttgataaagacttaattgaaacgatcagaatggaagtagatattgaaatggttgttcatgaggaggacgatgaggatttctttagatgtgaggatagatacgagactagggcgaatgtggtggctaccgtgagttgtaagaagctcgtcatggacatgcactatgaggcacgcatcctggccagcatcactaccacgactccgtccttggggagaaggtggatggtgaaccggtggtgctcgaacgagtgggacgaggcgcacaatgctagccaagaatggcatttgctaatgcaagtcggcatcacatggtggacagccttgctccatcttcacggcgtatgctatggcccacaaagcaaggtgacgtctgacgccacctacaacctggaggatgggctcgaggcatacaacaaccctgccgtccacagcctccatactgagtacattgccatggcaaaggaggtacatgggtcagattatgatctgaggaccaaggacatcgacggagatgtcctcatgagggtcagaggaggcaagattatgggcagtactggattgccgatagggcaatcaacttgtcctccagttccactctatcttaggtgcgagcaaggagcacgagcgtga

SEQ ID NO: 31514 - DNA, 310 bp, Zea mays
  Clone ID: MRT4577_128749C.1
tagggaaagtcgtgggctcctgaagggacctgttcggaattacctgggtgggctcgcgttccgttgtggatgtggatggatggcgtaggcatcgcatcggggacattggcatggcgctgggacacccgacctatggaccacatagaacggtcagacaccaccggccacgcgggcgagcacgctgccttcccccatgcatgatatgcggacacggatgcggccccggttccgtgtccctgccccccctctactctcccaacacgcgagcccccctctgggtctggaccagaacatcacaagagcccccccc

SEQ ID NO: 31515 - DNA, 646 bp, Zea mays
  Clone ID: MRT4577_12874C.1
gccgccgctccatcttctcccacccgaccgctgtgcactagcctcccatctccctgctccatgaccccatggtgagcaccgccccctccccccagtgcctcctctcctcgatccatacaaacaccgcggacgcagtggattggggcaagcagcgagcggcactaggcctttgccccctcctgttgcctcgtcgggcggagctccgctgcagtggcgtggacacccgtggcctggtgccttcgtctacaaccgcaggctccctcactgtacacacgccatagcgccgtcatccccataccgccatagccgctgctgctcctcaacgctggcacctagtcgagcggagtagctcgcactcaagccggagccgtcttcctactttagccaggatgccgagctcctctcttggagcagcaagcctcggatctgtgcagccccgcctccactgtccagggcactcagcgcagctccctcgagccctgtaacatccgatctatgttagagatcgcacaggccagtactagtatgtatgtatttgaattttattgggtcagtggactatatccatgacattagtataagtatgatgtaagacttgaggaagggacatcgaaaaaatatcagaaaccaaaacgaatcaaccttc

SEQ ID NO: 31516 - DNA, 1679 bp, Zea mays
  Clone ID: MRT4577_128752C.1
ggcacgagaaaaatctcacgcaggagacaaatccagtagccggcactttccttcgcctcctccatcgtggtcgcggccaaggccaacgaaccaattcctctaccattcctcctccctcctttcctgccattctcccatcccggcagggcgtctcctcctcctccctccctcctttccatcccgtttcttcgccgcctccatctccaggccgcgtcgaattcttccatccaccgcaccggtcgacgacgacgacgaggatgctgggcgcagcgaggaggcagcttggatccggtcccatgctgggacaggttttgcgaagactccgaccagcggtggcggctgaggtggcgaggggctactccgccgcggcgaaggagatgactgtccgtgatgcattgaactctgcattggatgaagagatgtctgctgatccttccgtttttctgatgggagaagaggttggagagtaccaaggtgcatacaagatttctaagggcttgcttgataggtatggtcctgatagggttcttgacacgcctatcacagaggctggttttactggcattggtgttggtgcagcttatcatggtcttcggcctattatagagtttatgacatttaatttctcgatgcaggctattgatcatatcatcaattcagctgccaagtcaaattatatgtcagctggtcagatatctgttcctattgtttttagaggaccaaacggagctgctgctggagttggtgctcaacactcacagtgttatgcagcttggtttgcacatgttccaggacttaaggttctcacaccatactcttcagaagatgcccgaggcttgctcaaagctgctatcagggaccctgatcctgttattttcctggaaaatgaattgctttatggagaatctttcccagtttctgctgaagtgcttgattctagtttttgcctaccgattggcaaagctaagatagaacgtgagggtaaagatgttaccattactgcgttctccaagatggttggctatgctctccaggctgcagagatactgtccaaggaaggaatcagtgctgaggtgatcaaccttcgatcaatcagaccacttgatagagctgctattaatgcatctgtcaggaaaaccaaccgattggtgactgttgaagaagggttcccccaacatgggattggtgccgagatatgcatgtctgttgtagaagaaagcttcgcgtaccttgatgcaccagttgagaggattgctggagctgatgtacctatgccctatgctgccaaccttgagagaatggctgttccgcaggtcgatgacattgtgcgggcggcaaagcgggcctgctacagggcagtaccaatggcagcagctgcctgattggtggacaagcctttctgttttccttccatcggttttcgctctctagccagaaacatgtagtattcataaggcgcaggcaaattggccggaacccagactccaagcgagctaattttgtagatctgccatggtgtgctttgtcccgttagtcgatatatgtggcgttatttctagattcaagtccatttgcttctctatgatttttgtacaccgctaaataatcttcttaagcccctgaatgaatgcaaaatatttaagatgttttaggaaaaaaaaaaaaaaaaaagcggccaa

SEQ ID NO: 31517 - DNA, 340 bp, Zea mays
  Clone ID: MRT4577_128753C.1
gggccaattattttaccgaaactcacaatgtgtgaaatgggcacaataaaatttatgtccacccccacgtttgacgtggtctcccaataagtgcagagagcttttctggaacatgaacaacacacttattcgtcccaaccaacttatttgaacgttttttccccattgacatgcatgacttgcaacaatgaacaaatcccagaagctttttatttttttagagttgaagggggataaattaaccccccacaaaagggcccaaaaagagcggcagcaggttttcacttgagcctttttttttaacccagggaaacaaacctggaacccattttattccttg

SEQ ID NO: 31518 - DNA, 137 bp, Zea mays
  Clone ID: MRT4577_128754C.1
tgcccccggccgtcaggcatggtaatacggctcgtggagcgtcgacttctttttttgcctgcccgccttgggaacgccataggagcggcttatctgagcggtctctcagttgcacaccgctgacgggggagagcaag

SEQ ID NO: 31519 - DNA, 1810 bp, Zea mays
  Clone ID: MRT4577_128755C.1
gaccctcgaggccggccggacgcgtgggggcacgataaaaatctcacgcactagacaaatccacgctttccttcgcctcctctcctctatcgcagtcgcggccaaggccaacgaaccaattcctctacggcccaccttcttcctacctgccattctcccatccagcacagcagggcgtctcctcctcctccctcccgcttctatcgccgcctccatttccaggacgcgtcgaattcctccatctaccgcgccggccgccgaggcccgagggggaggaggatgctgggcgccgcgaggaggcagcttggatccggtcccatgctgggacaggttttgcgaaggctccgcccggcggcggcggctgaggtggcgaggggctactccgctgcggcgaaggagatgactgtccgtgatgcattgaactctgcactggatgaagagatgtctgctgatccttcagtttttctgatgggagaagaggttggagagtatcaaggtgcatacaagatttctaagggcttgcttgacaagtatggtcccgatagggttcttgacacacctatcacagaggctggctttactggcattggtgttggtgcagcttaccaaggtcttcggcctgttatagaatttatgacatttaatttctcgatgcaggctattgatcatatcatcaattcagctgctaagtcaaactacatgtcagccggtcagatatctgttcctattgtttttagaggaccaaatggagctgctgctggagttggtgctcaacactcacagtgttatgcagcttggtttgcacatgttccaggacttaaggttctcacaccatactcttcagaagatgcccgaggcttgcttaaagctgctattagggatcctgatcctgttattttcttggaaaatgaattgctttatggagaatctttcccagtttctgctgaagtgcttgattctagtttttgcctaccgattggcaaagctaagatagaacgtgggggtaaagatgttaccattactgcattctccaagatggttggctatgctctccaggctgcagagatactgtccaaggaaggaatcagtgctgaggtgatcaaccttcgatcgatcagaccacttgatagagctgctattaatgcatctgtcaggaaaaccaaccgattggtgactgttgaagaagggttccctcaacatgggattggtgccgagatatgcatgtctgttgtagaagaaagctttgagtaccttgatgccccagttgagaggatcgctggagctgatgtacctatgccctatgctgccaaccttgagagaatggctgttccacaggtcgatgacattgtgcgggcagcaaagcgggcctgctacagggcagtaccaatggccgcagctgcctgattggtgtacaggcctttctgtttttcttccactcagttttcgctctctggcagcaagaaacatgtagtattcataaggtgccggcaaattggccggaccccagactccaagcgagctagtttttgtagatctgctatggtgtgctttattccgttagtcgatatatgttgcattgtttctagtttcgaagtccatttatttacttctctatgatttctacacacggcctaataatcttgctaaggccctgattgaatggaaaatattttttaggggagttttaggaaaatactacatttttgtgaaataccttggttttgagtaacagtaatatgaaggggatgtttggttagaagaaccaatccattctaaataaggtggtttatcaaaaaaaccccaaccccac

SEQ ID NO: 31520 - DNA, 724 bp, Zea mays
  Clone ID: MRT4577_128756C.1
gccggcccgggtcagggagagtattagctgagatgatgcacaaacgtctaaacgatcgtctagcatcagcattatcgccctgcagcgatgggcacatacgtgtgaataagtccgctgccgcgtgccattctgctcgccggcgacgtgctcggttgtgttgccccggctgtcacatccgcctgctatcgggccgacacgtactacgcagtcgacagtgcatcacagtggtacggagagaccaagactatggccactgcatgtatccgcggccgcgagcgacaccctctgtaacggctacaccagctgcagctccatgcacacggtcacgtgcgttctatgaaccgacgataccccgaacctctaggaccccgacgcctccgttaccgtgaagatcgacgaccgatggccgacggccgccatgccacgccacatatctgagtcgtcactacaggcgttcaccaccagccgtgagctcatggccggacatgatcgtcatctgctacatgccaggcgtaagatacttacatgcgtgccgcgttaagccagctggagctacgtacatacatgccgaagctacattccagcttatattattgcgagatggaatagcaaatctaaattgtaaccgatcatgtcgtgttagactgcagctacgactatacgatactagtgcaataagtgattagtatgctgaaatatgatctgcaccatagcagcgtgcgtg

SEQ ID NO: 31521 - DNA, 321 bp, Zea mays
  Clone ID: MRT4577_128757C.1
accacgcgtacgaccactcctgctcccactgtgtgctcagaagctatgccacctgttgacacacgaccacataacaaagcacttgcgcaatcaccataccaaccgtccctgcaaacatctctccgtttcatcgcaatatcccagaaccaacttcagctttattaccggcctgtcacactttatggaatttcacaatcccataaatctgatcttgtttgccgtaacgatcgataaccttctttgctcaaaatgtaccgattgcatcgaacgaatggccaatagcctcacctggctactaatcatttctctgaacttcacatt

SEQ ID NO: 31522 - DNA, 395 bp, Zea mays
  Clone ID: MRT4577_128758C.1
gggggggggggtcaaacgatttccattagctttataaaacaaggggcttttacatttcgagcgagcgggtgggggggggccagcgaaaatggaccaagtttaccacgggccggggggaccaaaaccaaacaaaagggaggcgtgctttatacaggcacaggggggggtttattcaacgcaacaacccccggaaggtccttttcttccaacaattccagggtagggcccccccccggggaaaggggggtaaaaacgggaggaacccccacctttttgacgggggggaagggggctccccccccgaggaaaggggggacccccttgccgctgagttctgccagcttttttgccacagcctcggttcctacggggaacttggaaaattcaaaaacccc

SEQ ID NO: 31523 - DNA, 414 bp, Zea mays
  Clone ID: MRT4577_128759C.1
cgggccgggatcactcgcctcgacgagtctctgataggacggagccgccgttctgacggcgtccgtcggagccggcctgactcctttcggtacggtgttcaggccagaagccgctccgtagctgtccaagtaccggagacgtgcgatcacgctggtaaactgcccacggcaggttatgaggcgtgatccacgcggcagacacgaacctcaaggccgaggactcatggtggaggctgaagaaaaagtacggcaacggagtgagtgccatggtcctcgtctaccacgcccccggcgtcagcctgagcctgacggacgacggaaaagactggatgggatccgtctacagatagccgatcccgggaaggttccacaaggggcagaggatccccttcctccacaggcagacccggctcg

SEQ ID NO: 31524 - DNA, 622 bp, Zea mays
  Clone ID: MRT4577_12875C.1
cggacgcgtgggtgaaaagcttcttgagtttcgtcaaaagcaagatggatttatcgagacaagcttcgacactataagtggttatggtgcaaatggtgctataatacactacagaccaaccccagagagctgcagctctgtaggaagtgacaatctgtttttgttagatagtggtgctcaatacattgatggaactactgacataaccagaacagtgcattttggtgaggcttccccaaggcaaaaggaatgcttcaccagagttttgcagggccatatagctctcgatcaagcagtgttccctgagagaactccaggctttgtgctagatgttctggcacggtcatctctgtggaagattggactggattatagacatggcacaggccatggagttggagctgcgctaaatgtccacgagggacctcagagcattagctatcgatatgggaatttgacagccttacagaagggcatgattgtcagcaacgagcctggttattatgaggacaactcatttggcattcgtatcgagaatttacttctggtaaaggagcttaatctggcaaattcgttcggaggaatctcataccttgggtttgagaaactcacccttgctcca

SEQ ID NO: 31525 - DNA, 2206 bp, Zea mays
  Clone ID: MRT4577_128760C.1
gcgggccgcctccctgtctcttcggttgagaaatatcaaatatgaaccaatcaatgacaagtcggacccactggattgacagcctctgacaccgaaaaagccacagatcggatcgcggcgagcagcggccacctccggattcgggcgctcggcgtagccgcgcagtggtgtgtctgcctccctccttgtatcctcctcgaattcgagcgacggcgacggcgggaagggagatggaggcggttagaggcgatgggaggtggtgcgtggtgactggcggccgcgggttcgccgcgaggcatctggtgacgatgctgctccgctccggcgagtggcgggtgcgcgtggccgacctgggccccgccatcacgctcgaccgcgacgaagaagagggtttcctgggtgctgctctccgcgaaggccaggccgtctacgtgtccgccgacctccgtgacaaggcccaggtcgccagagcttttgaaggggcagaagtagttttccatatggctgctccagattcatccatcaacaacttccaccttcattatggagtcaatgtcgatggaacaaagaatgttattgacgcttgtatccgttgcaaggtgaagagactcatctatactagttcacctagtgtcgtgtttgatggagttcatggaatttttaatgcagatgaatcaatgccttacccagataagtttaatgattcatattcagaaacgaaagcggatgcagaaaagcttgtgatgagagctaatggtagggaagggcttcttacatgctgtatacgcccaagtagcatttttggccctggtgataagctaatggttccatctttggttgctgctgcaagggcagggaagtccaaatacattattggtgatgggaacaactactatgatttcacctacgtggaaaatgtggcatatggccatgtttgtgcagagaaaactctatcatctgaagatggtgcaaagatagccgctggaaaaacctatttcataacaaatatggagcctataaaattctgggagttcatgtcattgattttagaaggtcttggatatgaaaggccttcagtaaaaataccagtctctgttatgatgccagtggctcatgttgtagaatggacttaccagaaatttgccaagtatggaatgaaagttcctcagctgaccccttcaaggatcaggctgctttcatgtaacaggacattcagttgctcaagagcaaaggagcagcttggttatgaacctctcgtgtcccttaaggatggagtgaagagaacagtagagtcgtactcccatctacaagctcagaatcataggagtatatcaaaggcttcaattttcctcgggaatggaaatcttgcaaaaacagtactttgggaagatgcgaagcaaactgtgacagtgcttctactgttggctgttatctactaccacttatttacatgtggttacaccttcatcacagcgatggcaaagcttttgtcactaactgctctgttcttattcattcatggcatgctgccatcaaatctgttcggtcacaaggttgagaaactcgaggcctctaattttcacatcacccaggcacaggctcatcatattgctcattccattagttcaaattggaactctttagtcagtgcgctaagatctctttgtagaggaaatgattggctattgtttctcaaggtttcactatctctgctggttgtcagcatccttagttccatgtcttctcaggctgcatttaaaataggtactgctctggttttcacaggcttcaaagcgtatgagaaatgggaggacagcattgatagtatggtgggcgacgcctgtaccattcttctgcactttggttctgccaaggaatcatctagctagaaacaaacgtaggtgtagcttgcagactgccagttgctttgtttactgatattatcttcagctccagctgtttctgggtttcgttgacctaaattttcttctgtattcatctgatggtgttgtagaattgcctagcggcacatatgcaagttttggactcttttcctcttgatagttgatgtacaatatgaaattgtacatttttcccctttcccctgggagtggttctcttcccatgtagagtgacaataggctctagtaaagattgaatcggattaggattggactctattacaaccttgataaaaaagcttgtc

SEQ ID NO: 31526 - DNA, 248 bp, Zea mays
  Clone ID: MRT4577_128761C.1
tcacactagctctagcatcttgagctaaatgttttcttttagcatttattttctttttaaacggtcatggcacactgttattgggacagggtaattacttaaatatatcaaatggattccacaaatcaatacgaatataacaaataggtagaacattccctatagatcaacaaagcttacgtacatttcccttccatgacatagcttttctatattattacttaaacataatttactattactaacat

SEQ ID NO: 31527 - DNA, 488 bp, Zea mays
  Clone ID: MRT4577_128762C.1
gaacggccgactattatgaccatttattggggaccgatgccccctacagtacactggtaacggacttcacctatcggcaaaaagtgcgggtggaccaacacagaaaagtggagaccaatcgcatcattcgctacagactgtatcttgcccgggacggatggccgtgcaggcgcccacgcaactgagaggggggatgtagcaatggcctattggggggctcctggccttgccttcgcttcatgccccaccctacagacggcacgacacccttcatgtgcagagcactctgttagggcctgctgcttttgatccgcctctcataactgacattattgaatgccttgagccttctactgcagcactgaaacctgctccactttgcaagacgccataactgtgtgcttggagacaaaacacctgacagcagtggtggagatcgagatgatgaacagcgcagggtggacttcgccctgctaggcatcatactc

SEQ ID NO: 31528 - DNA, 265 bp, Zea mays
  Clone ID: MRT4577_128763C.1
aattccctggtcgttgagctctctagtctttggccgcccttcgtttttttttttttttttttcctttaagacaccagtcgaggaccacccagcagcccttatgaagcaggctgcaaaaaccgggcttgctggaatgggtgtgtcccacacacaactaccagtcagtttctctcatgtgcatcgacttaactccacatattgcggactccactgcctggttgttcccaaggcttactgggcagggcttcatacacaccctatttac

SEQ ID NO: 31529 - DNA, 379 bp, Zea mays
  Clone ID: MRT4577_128764C.1
cagcaagccgtgctttcttttttacaccaacaacaattgcttgccttttaacaggaattttggggtaaccccgcaaccctcttacaactacaacaattgttgccctttgtccaacttggtttgacaaacccagcaagcttctaccaacaacacattattggtggtgccctcttttagaatggttattagatgtaatacaataataaaattttttggatgatgtatggggcccaccaaaaataaaaaggttcattttcagagtttatatggtattttggggcccaaaggggggttgagaatattcacttttctaagaaaagggggagaacacgcgtttttataaataataaaaatataaaataatggggggggccctttt

SEQ ID NO: 31530 - DNA, 360 bp, Zea mays
  Clone ID: MRT4577_128765C.1
gaagacatgggtgcacgagcacgagcccatggggaccctgctgaaggccgtgcagtccctgaaccctacagtgctgatcggcacatcgaccaagggcggcaccttcaccaaagaggtggtggaggcgatgacgtcccagaacgagaagacagtcatcttctggctgaccaacccaacctcgaactcggagtgcacggcggaacatgcctacacctggaccaagggccaagcggtgttcgcgagcggaaggcccttcaacagcatacagctggactgcaaggtgctggtgcccaagcaatccaacaacgcctacatcttgccggagttcggccttggcgtcgtcatctccggagacatccg

SEQ ID NO: 31531 - DNA, 363 bp, Zea mays
  Clone ID: MRT4577_128766C.1
ccctgttgttcgaaggaggcctgttcagggccatcaggaggctggagggggttctgccgcagctgctctctggcgtccgtgggccttggggaaaccgagttagaagcgtgtcttgtggaggcggtcggcacgatcaagagggacatagggtgcgcaggctctgtatactgggagtgttttggatgggtgggtgtatgtcgggggctggggcccttgctgatagggatggaaattaatcttaatttgctgttcatgttgagtgttgttggcctgatgaagctgtctgatttgctgttagcggtgacatggcagtgaacgttctgttaggtttcttctccgcgtcgggtctatttgacattcaag

SEQ ID NO: 31532 - DNA, 301 bp, Zea mays
  Clone ID: MRT4577_128767C.1
aacattatggggggggattacacacgaacactcgcaccacaaatattttacaacacagcgaggcatcggcttaaaacaaagtacatgacttgagttagcgatgatccaacaaagaaagaaagtccagaccagggctttatgttatcgacggtgactggaacgtaccctagaaagagagaggctacgaacagcgattatacctatcatataggcatgcaaaggaaccgccacatatgcaccgctagctactttgccactgccatggacctgcctatggggtactgtgcacacggacatggcc

SEQ ID NO: 31533 - DNA, 1022 bp, Zea mays
  unsure (1)..(1022): unsure at all n locations
  Clone ID: MRT4577_128768C.1
ctggccggcgtcggccgtcttcccgaggatgctgcggctgcgctggcgtgccgtcctccccccactcccactccctccgccgcctggcttgcttcgccgcctgcctccgcaccggcgcgccctctcgtcctcttccggcactatcccgcttccaccgccggtgatggaggcttcctacaagtttgggccctacaaaatcgacgccagggaggtcttccacgccacgcccctctcctacgccatggtgaatctccgcccgctgctcccgggtgggtaacacacacacacacacacccttgttccctccctttccagttcgccttccatgatccatgcttgcttcgttactgtagacgcaaccactcccgaactcactgcaccatagcatttttttagcttgggagtgggagttgctggaactgggagactagtcatcgcgacaaaaaaaaagctttctcggaaacgtggttgatggaaattagattcatctaacgttgggtcccagaatgctaaaataaaactttgtattcagaatcatgcgctgctcgtaacaaattcggcaagacaacaatgtaccgccacacccattgctcccgtagggattgttccaataggcaaggatcacaggcattgcccttctgggttggctggtaatcccaacccagttcctgcaatctcgtcgtacttaatataatccctccctatagaacaacagtcccattcaagattttctcctgatgaaacctgagaccactcacaagtgcttcctgtagacattgcatttaagctttgcatatctctaaaccaccgcatcgcattggttttttttctaatagacattgcatctgacaatgcgaaccttttcttatgcaggtcatatcctttganttcagcgaacctagagctgtaatttctttngagctagtttttgcagttttaccactgatgtgtctgcccaacattttcttctgcaggcactttctattgattgctcactgcagnatagtcatgaaactttacta

SEQ ID NO: 31534 - DNA, 388 bp, Zea mays
  Clone ID: MRT4577_128769C.1
cccacgcgtccgcccacgcgtccggaccttggagacagccttgcatacaatagtctgaagggcttaattctccgcaacacttttagggcacaaaagaacgctgaagatgaaagctgcgtgatagccctcggcaaccttcggtcagaagttatcaagctgagaaatgaagccttggagaaggacaaaattctactttcattggtggatagagtgaaagaagatgaatcaaagttgaacactcaatccgaaacttataaagccgaaattgaagaccttcagaaaaaacttgctgaagctaatgagaactttgcacttgcaaaagctagccaagaaattagtgaatggtcgaaaactagactagagaaaaatgttgaagagcttcgtgaat

SEQ ID NO: 31535 - DNA, 351 bp, Zea mays
  Clone ID: MRT4577_12876C.1
atcgctatagaattcctacaaaacttgaatcctacaaactggtttgtctttcatgtctttgttgctcatttaccttaggtgtaaaattactgttggaaattcagttgtgcatactcactcagatttgttctatgttgctattgcagatatgtaaatcaaacttaaaaccactctctctcatgttcttctccaagaactgcaagggaataagtgcttagtttttacctcatcagtggaatcaagccacagactaagcactttactgcgttttttcgaaaacttaccctttaaattcagtgaatattcacgtttgcagcgtgaatctactcgaaggtaagctgtctacattac

SEQ ID NO: 31536 - DNA, 303 bp, Zea mays
  Clone ID: MRT4577_128770C.1
gaagacattccaggcacagagttcattcaccgccggttctttcacacttcattccccactccccaggcagagttttttttttttttggggggggtgaagcaccgcgcagctctccttgtcgatcggcttctcttgtcccccccagtccttctcgatcggttctcagcggcagacatgcagcggaacaactcgtttggggcgtcgtgggcggaccagcgggactacggcggcgacccgagcccgagggcgccgcgcgacggcggcaaggcaggcggcggcgtgggggagaagaccaaggcggcc

SEQ ID NO: 31537 - DNA, 280 bp, Zea mays
  Clone ID: MRT4577_128771C.1
ctttaaataatccaatctatcatacccttccatacaaccttaacacactttttaattttaacacaatacaaatttactatacctattattccaacactcttactctaaaaaccccattcctcaccaaactaaatcccctttcaaaataacccccttttcccactctcccttttttccaaaaaacccctaaccaaaaagccctttccaaaattcttttttcaaaaaaaaaaaaaaaacacccccccttaaaattccctttaatcacagcgtcctttttata

SEQ ID NO: 31538 - DNA, 432 bp, Zea mays
  unsure (1)..(432): unsure at all n locations
  Clone ID: MRT4577_128772C.1
ggttcgcggcactgcaaccgcagtggtcaaacgtgggaaattgaagcggaggaagatagagagaaaaagaggagacgagagagggagacagatgctgcaggtggaggaggcgctggcggcggtgctgtccgcggcggcgggccacgcggcgccgcacgccgtgccgctgcagggcgcgctcgcgctcgtcctcgcggnccgcgtctgcctgcccgctcctctccctcccttccgcccctccctcccgggcggttccgccggtcgtgctttctcgcccttcccgcccccgtccccccccctccgcccccccccctcccccccccgcccccccgctccccccccccccccctcgccgcccccgccccccccccctccccccctccccccccccgcccccctcccctcccccctcccctcccgcccctccccccc

SEQ ID NO: 31539 - DNA, 468 bp, Zea mays
  Clone ID: MRT4577_128773C.1
ttaatcacatggcctcccaacagcaacaaaagcacttttaaccacatgagggcggattaaaactctcccgagcctctattcctaaaatccaggtgtacaagactccttctctcccactaggcaccctccacaacactcttgacatcgatataacaaaaacttcatatgttgcaatcctcgataagtaccatccacccaccaggacatctccaagagtcccattaatgggcctttcacccataacccatagatccctatcacaacccccaaaccctatacaaagataaactcactccatcctgaatgtctgactatatagaacaaggaatctccttttgcatgcatccaattcactccaacaaggtatacataggctccctgaccacctcaacactacaatgagaaggaaccatactagaacaccttactaaatgcgaaaggcaattttaacacccaaacaacaattac

SEQ ID NO: 31540 - DNA, 173 bp, Zea mays
  Clone ID: MRT4577_128774C.1
cggacgcgtgggcggacgcgtgggaattaggttccgtgaaacaacgcttgatagatatttcgatatcacactacattattctgtgcgcaaagaagtggctctcacgatgcatttttggaaggggcattttgctgtttttttgcccctctggagggaaaatctcctgcttctgg

SEQ ID NO: 31541 - DNA, 372 bp, Zea mays
  unsure (1)..(372): unsure at all n locations
  Clone ID: MRT4577_128775C.1
tactaacaaaaaaanagtttgtgttccaaaatatatagggcggccccaacaaaatncccaaaacaaaaacaacaacacaaacttcctatttttaaaatagccaaccaaaaaacccaacaaataatcacccatccacatcatacataaacacccattcaccatcaacccactccctttccacatataaaccacacaccgactcgaaaaaaaaaaaaccctttcatcaaaaacttacaactaatcaaatatataaacatttacaacaaattaaaactccacatttaaaaaatttcaccccttcaattcccaaacagtcctacacaaacacaattaattctctcaaaacacactggcaactaccaattttccaaa

SEQ ID NO: 31542 - DNA, 339 bp, Zea mays
  Clone ID: MRT4577_128776C.1
cggaggcgaccccggcggaccgaggggcagaccaaagaccggggggaaaaaggggggggagggggggcccccgaaaaaaccagcccgccggcaaaaagcgcaaacaacgggccgcccaaagaaagaacgaaccaagacgggggggcaaaaggggggggccaacaaaaaaaaagggcaaccagccaagcgggcggtatcaaggaaagaaaccaggcgcgccaagaggaaaaaagagccgcccaacgcacggggagaggccgcgtgaaaagggagaccgagagtggttcattggccaacaagggaggccccaaagagagggggggaaagcactgcccgccg

SEQ ID NO: 31543 - DNA, 2302 bp, Zea mays
  Clone ID: MRT4577_128777C.1
acgaggcgacctcagccgtagtggccgtggggagcaagccgcaaggcatcctgacttcaagggatatcttgatgcgcctggtcgctaagaacctgtcagcggacgcgactccggtagagaaggtcatgacccctgaccctgaatttgccacggtcgacatgcctatactggacgccctacggaccatgcaggagcgcaagttcttgcatctcccagtgatggacagagacggctcaatcatttcaatcatcgacgtcacccacgcgtccgcccacgcgtccgcccacgcgtccgcccacgcgtccgcccacgcgtccggtcccgtccgtccgtgcgtccgtccgaccatccgtccgtccgcagcaatggtcggcggcatgtcaccgccgcggcggacgctgtcgatggggagcggcggcgccatgggacgccgcgcggcctctgccggcgtgatgggcgacagccccaagcgcgggctgtcccgatcgatgaccatgggcggcgagcgcacggtgaagcggctgcggctgtcccgggcgctgacggtccccgagagcaccaccgtgctggaggtgtgccgccggatggccgcgcggagggccgacgccgcgctgctcacggactcgaacgcgctgctctgcggcatcctcaccgacaaggacatcgctacgagggtgatcgcgcgcgagctcaagatcgacgagacgccggtgtggaaggtgatgacgaggcaccccatcttcgtcctctcggatacgctcgccgtcgaggcgctgcagaagatggttcaaggcaagttcaggcacctgccggtggtggataacggcgaggtggtggccatgctggacatcgccaagtgcctctacgacgccatctcccggatggagagggcgtccgagaaggggaaggcggcgatcgccaacgtcgcggctggcgacgacaagtactccatcgtcgaagctctcaaggagcaaatgttcaggccctgcttgtctgccattattggcgaagactcaacagtcgtcatggtgtcgcctggtgattccgtccttgcagctaccaagaggatggtggaagcgcatgcgacctcagccgtagtggccgtggggagcaagccgcaaggcatcctgacttcaagggatatcttgatgcgcctggtcgctaagaacctgtcagcggacgcgactccggtagagaaggtcatgacccctgaccctgaatttgccacggtcgacatgcctatactggacgccctacggaccatgcaggagcgcaagttcttgcatcttccagtgatggacagagacggctcaatcatttcaatcatcgacgtcattgacatcgcacatgccgcgatctccattgtggagagcagtggcggcggcggcgacggcagcgcggggagcgacgaggcggcatcgtccatgttccagaggttctgggactccgccatggccttgggccccctggacgacgagacggacacccagtcccagatgagcgaggcgtcgaggtcgcagatgatgatgtccgatgtccaccaccaccaccaccaccacgactccgcgggcggcggcagcgaggcggggttctcgctgtcgtccttctccttcaagctccaggacaggcgagggcggatgcaccgcttcagctgtgaggttcagagcttgacgcctctggtgacctgcatcctgcggaggctcggcgccgacatcgaccctgaccgcctaccgcaaatcctgtacgaagacgaggaccgggacaaggtggtgctcgcgtcggacgacgacctcgcggcggcggtggaacacgccaggctcgccggatggaagggtctgaagctgttcctggactactccggcaccaccgggcgcaggaaagcggtggccaccccacgtggcgccatggcggtgggcatgtccagccgggacgcgtgggcggcggcgtacagcggggtcgccgccggggctgccctcgtcactggcatcggcgtcatggcgtacctgcgaagatctgcctagctagtgtggtggcgcggcggcgcggcgcgcatattcgccaatgcaagagcaaggggttcctgtcctgccttcgaatcaccacagaggtgctagtatgtgtggattacgtacccaaccggtgtatgtgtgtattcttttctacacgaacatgtaccagggcacaagttttccattaagaagaaatgggtggaccaaacaaatccttcagaccgaagcgagctaggtcgaggaaacccggcgttcggcattgatagcgattatataccgatattgtttgattt

SEQ ID NO: 31544 - DNA, 633 bp, Zea mays
  unsure (1)..(633): unsure at all n locations
  Clone ID: MRT4577_128778C.1
gcagccgttgaccttgcgcctttttatccccatccggccatccccaacccaactcccaaatccttcgtttcgtcgtctccacacgcaatagcatccgagcaaagaagccaaagagcaactgggagcgaggacgggaggcaacaagcggcggcggcatggnnaccggaaccattcatttccctctgaatctctctgagcgggtttctgatcgggtgcctgggcgccgccgtgacgctgctggcgtaccagcagacggtggtgaccagcacgcagagcgtcgcggcgggcttcgtcgtcatcctcttcgccctcttcgtcaaggaagggtgcgcgtcagccagccatgcatgaggaggcgtcatcgctccgctgcctgtatttctgctcgctagttcagtcccgcagctgccgctgtgctcgtcaggttcttggaaaaatactgtaatagcgtagtgacttttatgtacgacacggatggttgttgctggctgaagggtctactctgtcgaaatcgatgtatcttagtttatgctacttgaagaacagcagactgcagatcagcagagttcttgccttcttacgctaattaataattattggtacacgaaaaaaaaaaaaaaaaaatttgcggcc

SEQ ID NO: 31545 - DNA, 242 bp, Zea mays
  Clone ID: MRT4577_128779C.1
cagctgagtccctgttaagcaattatctgttccaagaggcccaaccaggggtttgagctatcaccaggacctgagcctcagctgtatgggaaaggatcgactcttttcaaaagtctggaatgctgctcgaatagcttgaccaaccttttgactagaaagcctctgccgttgatattgacaccattggcgcaggcgcagctaggtataccatgcaacggactacaacgccttaagctgtactt

SEQ ID NO: 31546 - DNA, 146 bp, Zea mays
  unsure (1)..(146): unsure at all n locations
  Clone ID: MRT4577_12877C.1
gcaacaccttcnagaagattcctctcctctccggcaggcgcgctacctacgatgcaggcatntcntccncnccnagcaccacntcntccaccatcgcatcctctatccacactccgttctcctcgggtcccctcttttcccgcctt

SEQ ID NO: 31547 - DNA, 781 bp, Zea mays
  Clone ID: MRT4577_128780C.1
gatttccaaaaaagggggaaaaaaaaaaaaaaaaaataaaaaaaaaaaaaaaaaaaaaaccccggcccggccgggaacgccgcagccgttgaccttgcggctttttatccccatccggccatccccaacccaactcccaaatccttcgtttcgtcgtctccacacgcaacgcaatagcatccgagcaaagaagccaaagagcaactgggagcgaggacgggaggcaacaagcggcggcggcatggaccggaacctgagcgggtttctgatcgggtgcctgggcgccgccgtgacgctgctggcgtaccagcagacggtggtgaccagcacgcagagcgtcgcggcgggcttcgtcgtcatcctcttcgccctcttcgtcaaggaaggattcatttccctctgaatctctggtgcgcgtcagccagccatgcatgaggaggcgtcatcgctccgctgcctgtatttctgctcgctagttcagtcccgcagctgccgctgtgctcgtcaggttcttggaaaaatactgtaatagcgtagtgacttttatgtacgacacggatggttgttgctggctgaagggtctactctgtcgaaatcgatgtatcttagtttatgctacttgaagaacagcagactgcagatcagcagagttcttgccttcttacgctaattaataattattggtacacaaaaaaaaaaaaaaaaaaaaaaaaaaaaaaaaaaaaaaaaaaaaaaaaaaaaaaaaaaaaaattttttcccctagaggggggcccgtgtacc

SEQ ID NO: 31548 - DNA, 255 bp, Zea mays
  Clone ID: MRT4577_128781C.1
ttatcaccaaggatcatagaaagcgcaatgggggacattcgacagagcatcaaggggcaccaagagaaccaccctccttaggctcgctggtctgtgtgcgtgtgtggctcacgcgacaatccaccctgaagggtcacaggctcatatggatagccttctgcccatatacctgccatcagtgatggctacagcctgtgaaaagggaggtctccagccctatcggcccaaacaagcactcgtaatacgcaacatacc

SEQ ID NO: 31549 - DNA, 705 bp, Zea mays
  Clone ID: MRT4577_128782C.1
gaaaaaacaagggtagtccagttggttatgtcattcatgtttgagtcaatagattcaaggttcaaaaccttaaaaatcttttttaaaaaaaaaaaaaaaaaaaaaaaaaaaaaaaaaaaaaaaaaaaaaaaaaaaaaaaaaaaaaaacgccgcggaatttcctcaaacgccccgctcacagcgcccatgggctcccttccggggccggcctcaacgaaatgcaccccgaaggggcgcgccacggtgtcggcgtcgaacctggcgccgttcttctccgcgaagcgccggaacctgaaccacttcttcaaccgcctcaacatgtcgaaggcggcggcgttcgcgaaggtgctgctcaacgcgccgggcgccgtcttcttcacgggcgtcggaaagtcgggaatcggggcgcgaaaaaccgcgaaaacgctggcgtcgctgggtttcgcgcgcgccggtttcctcgcccccgtcaacgcgctccacggaaacatcggggcgctcttccccgggaacgggctcgggctcctctccaagtccggcgcctccaacaagctgctcgcgctcgtaccctgcgcgcgcgcaaaggaaggtaacctcgtctcggtaacctccgcggcctcgggggccaactgcccgctcgccgcggcctggaaacctcaacgtccacctcccgttgaagggggaaaggtgtgccccttcggcctc

SEQ ID NO: 31550 - DNA, 716 bp, Zea mays
  Clone ID: MRT4577_128783C.1
atctgctcctcccccctttgtctcatcccagttcctccccccaccaagaacctagggttagggttagggaggcggcggctgctttattcccgatcccgcccgatcgccatggtcatcgcaggcgagccagagccggaggaggtggccgtcatgttctccgataggttgagggcggaggaggagaccgtcgtcttccccggttgggtgatgctggatcgcatcagccgcacccactgcgacggcgacctaggagctgctcgtgaggctgtcaacgggaacaagaccgccgttcaagtcgagatggacagcggccactccttctacgtgtccttcaccctcgcgcctcctccacaaggggcctcttaccttgatctccactggccgctggaaggctcagccaaatccgtgcccccctacaagcagcctgcctatcccttcgtccgggcaatcgacaaggacctcgtcctcttccacatctccatcccgagcctgcctcaccgcaacttcgtcccgccagatctgttcgtctacaatgccgctggtcaccccccctcggtgcagcagctccctctgtacaggagaaggtcattcctcagggttaacttcaccacaggcatcctgcggcgccaaaacggcagctacatcgtttccgacctcaatgtctacccaaaaaaggagggcactggtaataattccatgtgcgccgaactctgcgt

SEQ ID NO: 31551 - DNA, 430 bp, Zea mays
  Clone ID: MRT4577_128784C.1
tgaactggcaggtggctatggaactctggaggagttgcttgagatcattacttgggcacaactggggatccacaagaagccggttgggcttttgaacgttgatggattctacgacccgcttctgtctttcatcgacttggctgtcagagaaggtttcgtatcggaggcggcaaggcgcatcatcatctcagccccaacagccaaggagctagttatgaagctggaggactacgtcccggagtatgacgtcggcttggtctgggaggagcagaagcccaacagcttggtcccagctgctgggatcacctcatcctgatgatctctcaccttccagcctgcaccgcatcatatatacacatataactaagtaactaaccgatcgaagcctgccacaaattttttgttcatctgccaaagtcctaaccaaagg

SEQ ID NO: 31552 - DNA, 329 bp, Zea mays
  Clone ID: MRT4577_128785C.1
taatggaggccgacaaaaccatactcggggctatatgttagcttcatcctaggtcgtgtaaaagacaagcgctagctggctctccggccgtgccaccgagaggttaaataacgaacaaggcgactaaggataagggcctggacacagacggtgctgaagacgctacttatgataagcggaatagtgactctttgtaagctaacagggacgatcagtgccctgaagctagctaagagattactggaagctcacaagatggctcactgtactatagaggatattgtgggcgatcatatatatatgaacactactggaacctgcccgagcag

SEQ ID NO: 31553 - DNA, 395 bp, Zea mays
  unsure (1)..(395): unsure at all n locations
  Clone ID: MRT4577_128786C.1
ggcacgtggagccgtagcaccggtcccaggcgatcttcatgtcgatcctccagtgcatgctgcagtagcggccgtaaagcgggctggtcgaggtgctgttggtggcgcagattgcgcatcagctgacggcgatctgcggactgcagtatgcgtgtacatgccgctacactgttgtcgacgttgtgctatactagaagaaactatgtgctgtagaatgagacgctggctatctaagctagatgagtaattgatgcgangaatattgatgaatagtgtgtacacgcatgaccatggttgcgcagcagtagcttgagcagtgtcaccaatgaacaactgcgctggcacaatcatcacatggaagtgcagccgatgtaaacgatgcatgcttacgtact

SEQ ID NO: 31554 - DNA, 296 bp, Zea mays
  unsure (1)..(296): unsure at all n locations
  Clone ID: MRT4577_128787C.1
tnnnnnnnnntngggncccagcaacaatgtttcgaaccccaccaatatgaaacactcgcaatatttttttttttcccaagtttggggggggaagaccccccaatttaatcctgtggctttgtgggggttctcccccaacattatttaaacacagtttcggacaacagggttgcggttttagatgatgaataacaaacggggacaaaacgggttaggtcacacatttttttaaggggggcctgggggtacatttttgcaactaaacccacatgcatgtgggttttctaggggggggg

SEQ ID NO: 31555 - DNA, 425 bp, Zea mays
  Clone ID: MRT4577_128788C.1
cggccgccctttttttttttttttttttaaaatgtcaattacaaagtttcattaaattttaagacctaaaacttttattttagtggtttttccatccgaggtagtttcaaaaattcaaattttaaaattcaaacatagttttgcatgacaaggtgatttcaaaccaaaacattgtcaactacaaagtttcataactcttcaatacctacaacttttatgttggtgattttttctttcgaggccgttttcaaaattcaatttttaaaatttttaaatttagacgtagttttagttgacaatatgacttcaaatgaaaaagttgtcaactacaaaattctataacttctaaagatctataaagtttattttggttgtttggtcatttgttcatctcacatgatggttctaacaatatgcacaaatct

SEQ ID NO: 31556 - DNA, 356 bp, Zea mays
  Clone ID: MRT4577_128789C.1
gtaaggtgggcatcggactttcaggacagtcacataagatacatgcggggccccactccactgtgacccctttgaatccgacaaaattgcagtgcctgttgagaattaagatcctacccttccctcctgccccggacccgggcaccacgccagccgcctcggccacagactactaacctacccctatcggcggcggcgtcacccttggggtggccaccaaacttcttgccgataccgaccttgatgtcctcaaggagaggcagtatcttgtccacacactttcggaagctgaagtcatccgaggatccggaaatcctgccgataaagaaggaacggctttgcccccccggggggtt

SEQ ID NO: 31557 - DNA, 382 bp, Zea mays
  Clone ID: MRT4577_12878C.1
tactttttaagtaattgcaacgttcgtctatgcaaaaaaaataataaaaaaaaaaaaaaaaaaaaaaaaaaaaaaaaaaaaaataaacaaaaaataaggggggccttttttacgtccccggggcttccttcttcttgatcccaggtttggccccttttatggcgccccctttccctctcctatccggccggctttttactttttctttggggggacttttcctggattccctgggcttaatttccttgcttcccgacctggatttcccctgggtggcccccaccttttgtgccctgggccaaatttcccttttcccccgttggggttttctttttcgaaaggtggggccccccctttctttgcccaacgttttacccccccc

SEQ ID NO: 31558 - DNA, 1211 bp, Zea mays
  Clone ID: MRT4577_128790C.1
ggcttgcaatcagtattatatatatgtttttccgcttttttttttttttttttcgcaaacaccaaaatgacaaaaaattgaacattgcaactaaaaatatgaatgtggacaaaactgaagagcatctgcctaaacgataccaaagaatctgctgcattccaactccaacttctgactatagccctgcctccgccgcccgccgcggggtgctcttccggcggcttccagactggcggaagccattggatctggtggactcgtcattgctggaccgagtgctggagctgttctcgtccatgtcaaggagactagagccctcttcttcattgtgcaccctgttcctcttgttgccagtgccaccggctcctgcggaagcatgctctgttctggagcccttcggcttggcaccaccatcccctgctcccaccacgtagtcctcgtcgccatcatcggcctcctccaccagttttttcatctctgcctcaatggtcttctcagcggcgacacgcttctggggccgtcccctcctcttcctcgcaggcgcggcgacctcctcgccgctgctccccttgtccgcgtgggtcctgccgttggtgagctgtttcctccctctgcctctccccctacccattgatggctcaattcaacggaagaagctgcagatgtatgcagtacgaggcaatgcaacgggagaagcttcagccggttcaattcgtcgttgcttcctttttggaacccgcagaaatatctcacttgtgacagaaacttgctctaggacagtgcagccaagacaatctacaaagcttgcatcaaactagtatgtctgcagtcaaaagatgtgagattttctctctcttttccctagcaccgaaggggaaaaaatactgcagattgcgacaccggtaggggagacggagacccacgcgcaccacagatcaagaagaagccatggccgaaggttggttctgtttgggaaagctggaagattcttgaatggggctagcagtgtcctgtgggcgccggctggatgccttggtgcttgagctccaacactgcggctgcgggacagcagaggagcacagggcactactgtactgtacacaccactttcccggagggagagagagcttgcttgctggagttgcttttccgtggagctggctggtgccatgccactcggttgctcagttttgcgctttgcccacggtccg

SEQ ID NO: 31559 - DNA, 319 bp, Zea mays
  Clone ID: MRT4577_128791C.1
ctccaagaaatataacgatggggtttgtaaaagtgaagatggggacactgtgcttcatagacatacagaacctcagccatgccatggtgccgggattcaatacggattcacatgaccctgactaggggagccgcacattacaccgatataactcattattgaacacacttattcacgcatgcagagaaaacgaaaagagtacaggaacacgcctcttttgacgtagccggccccacgcccaccacctgttatccctcagtctcaccttaccaacaagctctggattttcgagagggacctcattattggtgaggcatcc

SEQ ID NO: 31560 - DNA, 469 bp, Zea mays
  Clone ID: MRT4577_128792C.1
gttgtctgtaacgtaaagccccaagggggtttcaggtcaaaacacaaggggggccgggaagggaaagggggggggggggttcggggcaaatgccaggcgggggggggggcccccccgggggggcccgggtgggcgccccgggcccagggcaagccccgggtgggggccctattgggtgaccagggcttaagccctaaaaaagggcccaacaagggccggggggggggccccctccaaaaccggggccgggtccagatccctggcccgggccccccccccctgggcccccgggggccccaccgccacccccggttccaaagccgcccccaagggccccccctgggccggttgcccacccggacccatatcccgaaccagagccatggccgggcccaccttggcccccaaccccaccgtccccaggtccaccggcggcgccgggggatcccccaccaaaccccccggccgg

SEQ ID NO: 31561 - DNA, 924 bp, Zea mays
  Clone ID: MRT4577_128793C.1
tttcgagccccggagggggccgggattgttactctggccccggaatgtattggcccctcacctgctcggctgctccccttctgtccagcccacgggagggcgactagggttagggccttaggggcgacgccaaccatctagccaccggaggtcgccgcgcctgcccagatccactcatcccttccgttcaagccgccggagctcccaggacgctggtgtcgaagccgtcgtcccttccttccaggcccgcctcctctctgtccgttctgtcttggtcgccgaagctcaagaccacagtgtcaggaagctctccaatcttccagccaaacacaattcatcagtcagatacacttttaccaaggaatttttcagaatcactccacgagaggttcagctctcgaagctagagaagcagagctctaccaaacaggccaggacgtctctcaaatccccagttcagtaactagctaactgcaggagaaggagagagatggagaacggcggcgctaaaggcgacgtccccaacgatgcgaacgagcattgccctggaacacagtccgaggaggcaggcaaggcggatgcctgcgctgggtgccccaaccagcagatttgcgccaccgcccccaaggggcctgatccagatgtggttgctattgttgagaggttggctactgtgaaacacaaattgttagttttgtctggaaagggaggtgttggaaaaagcacattctcagcccaactctcgtttgccctagctgaaatggaccatcaggttggccttcttgacatagatatatgtggccctagcatccctaaaatgttaggccttgaaggacaagatattcatcaaagcaaccttggctggtcacctgtgtatgtcgagtccaacctgggtgtgatgtcgattggtttcatgctgcctaa

SEQ ID NO: 31562 - DNA, 659 bp, Zea mays
  Clone ID: MRT4577_128795C.1
cctcgaggccggccgggacaacattcatcagccatccccttttgctgctatctttctgtgaattgtggtactgctactatggctccgatagctccatctaatagtctggagacaagactcccttcgcgccatcttcctgctacgccacttgactcctcacagcgttccctatcaagatagcctgccttttcccctccaatgctgcccagaactccagggccgatgtggtatccacatcttctccagatatccccaaacaacttacaacagcgtgattaccactgatggagaggatctaccgtgcacggatgatgctagtcgtacttcatcgtcaggtgaacggagtacctcaccgaaagatttgctggagactatgtataccacaacttttgttgctgaggaagaacgcagatgacttcatcaaggaccaggactacaaggtgatactggtcaaatatgccatgctcgctgtcaatagaggctgtcatccacagaagaactgcaacaagtgtcatcagctaactgtaccactgaggctgtgtggttcatcatcggcacgctgctcctggacggtaacagcctcaaatacttcgggaagtggataaccatcaatctgaagttgtgcgtgatataggaggtcatcctcctcgggcaagcga

SEQ ID NO: 31563 - DNA, 263 bp, Zea mays
  Clone ID: MRT4577_128797C.1
aaccggctcctcgtgttgtcccccaaatcacggtctttttcgacatcgacgccaacaggggggtgaacgtgtctggcgagggcaagaccaccttacataataacaatatcacaatcaccaacgacaagggccgtctgtccaaggaggagatcgagaagattgtgcatgacgcggataattacaagtctgaggacgaggatcacaataagaaggtggagtccaagaactcgctggagaactacgcctacaacattcgcaacaac

SEQ ID NO: 31564 - DNA, 219 bp, Zea mays
  Clone ID: MRT4577_128798C.1
cggacgcgtggattccgatatgttatcttcaaaatcgaagataagcaaaagcatgtagttgtagtgaatgaaggggccactactgaaagctatgatgatttactggactctctcccagagaatgactgacgatatgcgctgtatagattttgattttgtcaccggggagtatgtgcagaaaagctagattatcttcattgaccaggccccgtcgacatc

SEQ ID NO: 31565 - DNA, 1717 bp, Zea mays
  Clone ID: MRT4577_128799C.1
ttggctcgctcgccggccgggacacagagctacctactataaacattcaacactcaagagccaagagggagagacgatgaaggttgatgtggtggggacgacgcttgtggcgccgagcgaggacacgccgcacccggagctgtggctgtcgaacctggacctggcagtccccaagacgcacacgccgctcgtgtactactacccggcgccggcggccggaggcgacaccgacggagaagcggccttcttcgcgccggagcggctcgaggcggcgctggccaaggcgctggtgccgttctacccgctggcggggaggctgggcgtgggcgagggcgggcgcctgcagatcgactgcaccggcgagggcgcgctcttcgtcgtcgccagggccgacttcgccggcgaggacgtgttcagtgactacgagccgtcgccggaggtcaggcggctgttcgtgccgttcgcggcgtccggagacccgccctgcgtcatgtccatgttccaggtgacgttcctcaagtgcggcggcgtggtgctgggcacgggcatccaccacgtgaccatggacggcatgggcgcgttccacttcatccagacctggaccggcgtggcgcggggcctcgacacggccgaggcgtgcggcccgctgccgttccacgaccggacgctcctccgcgcgcgctctccgccggccccggccttcgaccacccggtctactcgccggctctgctcaacggcgtgccccggcccttcgtcacccgcgtctacgccgtctccccgaagcttctcgctggcatcaagtcccgctgcgcgccgggcgtgtccacctactgcgccgtcaccgcgcacctctggcgttgcatgtgcgtcgcgcgcgggctcgccccgggctcggacacgcggctccgcgtgccggccaacgtccgccaccgcctgcgcccgccgctcccgcggagctacttcggcaacgccatcgtgcgcgacctcgtgaccacccgggtggaggacgtcctggaacgcccgctcgggttcgtggcgcaggcgatcaaggacgcggtggaccgcgtcaatgacgcctacgtgcgctccgtggtcgactacctggaggtggagtcggagaagggcagccaggcggcgcgcgggcagctcatgccggagtccgacctgtgggtggtcagctggctcgggatgcccatgtacgacgccgacttcgggtggggcacgccgcggttcgtcgcgccggcgcagatgttcggcagcggcacggcctacgtcacgcagcgcgccaacagggacgacggcctcgccgtgctcttcgggctggagcccgagtatctgcagtgcttcgaaaaggtgttctatggagagtgagtcgtgagattactagtgtcatccgcgtttcgtcgtgagcaccgagtgcgattactgtagcttggaacctgatgctgtggatgtgggctttgcaaattactccggtttctgtgttttttttcctagtattctcatgtggtttttaggtgctcagtcgagacttgagagagaacatagctgcgttgactttagcatggtttaatttcaaacagtgaaaaggaatagacgaccacattcgaaagcaacttttgggtgtacgaatacaaaaaattagggcggccggtctgaggatccacgcttacgtacccgtgcatgggaagtgaaagcttttctatggggtcacct

SEQ ID NO: 31566 - DNA, 1882 bp, Zea mays
  Clone ID: MRT4577_12879C.1
ctcaggcgttggactttgagtgcttgggctaggattccttgccaaacagacctgagtgcatgacagcgacagccttctgggctcactcgcacggtcgcacccgaaacgccgcaaatccgggcccgcagcccgacccaactcaactcaggcagacactcgccgccgccgcgacgtcactacgtcactagtagagggcaggaggcgacggaatgacggagcggcaggtggcggagctgggtcccgggacggcgtgctgcggctggaaccactgtggccgccgcctcgccgctggcgccgtcgatggctccgtctccgtctatgactcccagccgccaccctcgttcaagtggcaggcccatgagcaagccattgtgaatgtcgtctggcttcctccagagtatggggatgctatagcttgtgtttgtgctgatgggacactgtctttgtgggaggaggttgctgctgatgatcaacttccaacctggagaaattgtaaaatcttcgaggatggcaactctcatatactaaatgtacattttggattacatctgggaattctgaaaatggttactgcatactcagatggccaagtcaaggtctacgagctcttggattcattggaattagacaagtggcagcttcaggcagagttccaaaacattactgatccaatctctagatttggaaaacctgcatgcacttctgcatccatagcatggaatccaagaagaggtggaagccaacaagctagttttgcaattggctttaattcagattcgcctcatttcaactcttgtaagatttgggagtttgaagaagctcatcagcgctggcttccacttgttgagctaggttcacctgaggatacaggagataaagtgtgtgctgtagcatgggctcctaacattggcagaccatatgagattatcgcagttgcaacctgcaaaggaattgcaatctggcatataggtttgaacgctgatgctgatggtggaccttcgacgcagaacgttgctttacttaatggccacgatggcgaggtgtggcaactggaatgggacatgggcggtatgacactcgcatcaaccggaggagatggcatggttaagctatggcaggctaatttggatggagtttggcatgagcaggctgttcttgactgcagtggatcacatgtctagggtctacgtgtttcagaaaacatttttttttgttcccagcactagaagttgctgctcttgctgcagaattatcaagtacttctttcgcttatccgcccaactattgctgtctcctgtgtggctggttgggcgctatcaaaactgggccattaacggccgtgggaccgcattgaaaagtccagaaaacgaaggtacatttgcttgtaaccttgtaattggggaagctacacagacgttgagtctaagctagtggacggaggtcgagatcaaccacgtgatgtacacgtggtcatgttcctcaaaatcttccgcaggtcctttcagatatcactgatatgcttgtaccattaaaagcagattaacacaggacgaccttcggctgcccacagatcagctatccacaatcaatgtttattttcatggtatattagatttaatattagcgctaggtttttcagatttggaggtagggagatggcagacggaaattgtggcaggatcaagcttcgctagttagctgtgacagcgttttacactaaaactgagtggtgcccagcccataagtgaggccattgtaatactgattctggcgaaccctatttgtggaagtacccaacgataaacctgctgcaggtagggatgtttttttacaattcgttttataatctgatcttatacttaaaaaaaaaaaaaaaaaaaaa

SEQ ID NO: 31567 - DNA, 1522 bp, Zea mays
  Clone ID: MRT4577_1287C.1
accagaccttatctcactccgctaccccctcatcctgccatccaccagaagcagtgcgagcaggcggcgcggctcgaggccagcctccagggcacccggtgggccgccgccgtcaacgacgcgcgcagggccgacccggcctcgccctacaccgtcgcgcagtacaactcgcccttcgagttcaccggcagggtcaacgagatctggatgctcttcgacgcgtacgacgacgcccgtttgtgatgcgattccaagcgtgctctcggggcactggcggggctcagaaaccaccaaaactgggtgctttctacgtgcttctgcagctaacctcacgccggcggactctagcaagagcacgaacgagggccaagcgctcgaaacccagcgacgtggaagcgcctgcgccgcgagcatccttccagagcgcggggccaaggccaagcagaggtatttatcatcgcagccgatccccagccgcacgaacggaggtcgagcaccagacctcatctcactccgctaccccctcatcctgccatccaccagaagcagtgcaagcatatggcgcgccgtgccagcctgctcctcgccgcggcgctgctcgtcgccgtcgctgccgcggcggtgccgccgacgtgcgagcgcatcgagtgcccggcgtacgaggtggtggacagcgccaacgggttcgagatccggcggtacacggacgccatgtggatcaccacggcgcccatcgaggacatctccttcgtcgccgccacgcgcaccggcttcctacagctgttcgactacatccagggcaagaacgcgtacaaccagacgatcgagatgacggcgccggtgctgacgcgggtgtcgcccagcgacgggcccttctgcgcctccgccttcgccgtgagcttctacgtgccggccaagaaccaggcggacccgccgccggccgagggcctgcgcgtggaccgctgggccggggccaggtacgcggccgtgcgccgcttcgggggcttcgtggcggacgccgacgtcggggagcaggcggcgcggctcgaggccagcctccagggcacccggtgggccgccgccgtcaacgacgcgcgcagggccgacccggcctcgccctacaccgtcgcgcagtacaactcgcccttcgagttcaccggcagggtcaacgagatctggatgctcttcgacgcggacgacgacgccagtatgtgatgcgattccaagcgtgctctcggggcactgaggcgtttagggaaggacgcgcatgcacctgtgcagtgcagctgtgctaccatgaagtatttcgtgctcttgtgcgctagcttcgtttactttcgagttttcgagtaaggaataaggtgcctcttgttgcaataatgataaagctaatcctgcttgtaattacatttcgtggcatggccattccggcaacatgtccagtaaaaaaaaactttttagtcccaaaaaaaaaaaaaaaaaaggcccctagggccaaaaaaaaaaaaaaaaaaggccccta

SEQ ID NO: 31568 - DNA, 373 bp, Zea mays
  Clone ID: MRT4577_128801C.1
cccacgcgtccgcccacgcgtttttctacgcgtccgtgaggaaagaggtgctgcagtagaggtaaatgttgtggataagatagcagaggatgtcgagtcgcctgtggctgaagaggagaaactggtaccggaagttgagaagggcgaggaggtaggttctgggagtgcagttggtggcgagttgagtgatgaggaggaggttgaggtctctccctctcctctgggcgaggaggtggcagaggtggcagaaccacaggataaggtagcccatgtttctgaagctaatggtgaattgggtgatgggaaagaagcgagtgatgatgtggttgctctgggaggtggagaagccacttacaaggatgctgttggtgat

SEQ ID NO: 31569 - DNA, 1330 bp, Zea mays
  Clone ID: MRT4577_128802C.1
ggtacctcgagccggctgggtgtcgtcaacagaaaaagacaggatggcttgagttcaagaggagacaacctggatatactgaagcaggaattgaaggtccagagtaagcatgttaagagtctgaaaaagaatcactttggtccaagaatttggaagaggtgatggtaaagcttgtagatattgtccacttcttatatttggagatatataatgccttcggtcgtcctgacagtgaagagccacaagaacctgccaaacaccataatagattgggaccagcaggccttgcattgcattatgctaatatcatcaatcagattgacaatcttgtttctcgatcatgtgcaatgcctccaaatgcaagggatacattatatcatagcttaccacctaccatcaaatctgctttccgttctaagctacaatcttttgaagtcaaggaagagcttacagcttctaggatcaaagcagaaatggaaaagactttgcgttggcttgtcccttttgctagtaacacaaatagggcacaccatggcttcggttgggttggagagtgggcaaatacaggatctgaattaaactgcaagatatcagggcagatggacatgtcccgaatggagaccttgtatcatgctgacaaggagaagaccgaagcacttatcctggagctagtcgtgtggcttcatcatcttatcagcaaatcaggaaacgccagtggaggtgtaaggtctcccatcaaatctccagtcagctcaccaacacaaaagggtgctgcaatcacactgttgtcgggcaaaacaaacaatttgccaccgattctcacccaagaggaccaggatatgctaaggggtgttaagtacaggaaatttgttccaggaataagcaaaagccaagagtttgacacaaagtcaagtcacagcaaacatagtaggttgagcaagagcaacagccactctccggccagtggcagcagaaaagacttgctcccagttaggaggtcttccatgcttccagttattgacttcgagattgacaggaccaaggctttggatctaattgacaggcttgacaacctaaaagtacaatgagcatgaagcttattgtggtcatccgcagttcttgaaaccccagccgcgatataaacagttatcgtgtatcagcagcaagaccgcccgttaggctctgcggttacaagataacaaacagtatgataagttggtgtctcagatcctgtaccgaatagaataggaaaaaatgttgtaaaaattacctgtcgtttctacctgtacaagaaatggaaagtgcagtttttaagaaaaaaaggagggtg

SEQ ID NO: 31570 - DNA, 178 bp, Zea mays
  unsure (1)..(178): unsure at all n locations
  Clone ID: MRT4577_128803C.1
gcagttcttgtcttcgtctccgcactccagtgtccggacttcgctagaacaagtggatggttttttggctactccatatcaattcctggcggcgttttttttgcgccttttgtttctgcttttctctttcaaaatagcacgtgatgcccctgctcgacttcattntcactgtcggcta

SEQ ID NO: 31571 - DNA, 454 bp, Zea mays
  Clone ID: MRT4577_128804C.1
ggtctcgggggtctccccgggaaatcccggcaccgggccccgaaggcggaccagcgcccccgaaagggaggcggaccagaggggggggaaaacagggccaaagcggggcccgggggaaaaggggaatccccccacaatgccacaaaacaaacaaaccggaagaaaaaagggaaaagccgggggggccaaaaaagggaaaaaacccaaaggaaaaacagggggcccaacccccggaaaaaaaacgaaaaaccggggccccaaggggaaaaaaaaaaacccccaacccccggggaaaggggaaacggcaaaggggcccaaaggggggattcctttaacccaaaaaaacgggaaaaagttgaaaaccctgcaccgccgggcccggaaaaagggggaaaaagcgggccaccccgggtggccccaacagggaaaaacccgggtggaggggggtaaacgg

SEQ ID NO: 31572 - DNA, 669 bp, Zea mays
  Clone ID: MRT4577_128805C.1
ggccgcttttttttttttttttttcttttttttttttttttttttttttttttttttttttttttttttttttttttttttttaaaaaacccctacattaattattccttttttttaaaggcccaaacataaaatttgggggccagcacaacaaatttagttggaccaaaacggaaccttcccaggaggtcaaaatgactgattcagggggggggggggcatttagcaccaaaaaaaacattgggcgaaaaaggtttttttttttcagcttggcctataaaaccaacccagttaaatagcttgtcccggaaactggcaacaccccttaaaataatttggagcagggcctttcccatttgggccccagagttttattaatgggatttgggggggccggggggcttttccggttggccatccgcccactgggagagggaaaaagggcccttttcggggaacgcggcctgggacttgaggggctccttggggcagttccgacccagcccagcgcaaatgttggagtacccgatgtaggtcatcccggcccccccccaaaagggccccgccggccggggccgaaaacatcgggggggatcccttttcgtttcccttggcccccccccgggggttggttgaacggggaaaaatgcccaaatgtaaaccccggcc

SEQ ID NO: 31573 - DNA, 1252 bp, Zea mays
  Clone ID: MRT4577_128806C.1
gggtacctcgaggccggccgggaatgggtggattgatcagtaataatatttgttcaaggatatatgctatcaacacttcaaagatgccacattacttccacaaagtacctgcatgattattattctctctctctcaatctaacattatttctcatacaaaatttaactgatttacgaaaaatggatgtatggttattcatttctatgctactcattgaagacttatggtctgaagctgtggaagccccaggtgctgcaaattttctcattgtgcatggtgaaatataatttgacttggcaggttgcatcacaaccaaggagctcggaaccgtgatgcggtctctcgggcagaaccccaccgaggcggagctgcaggacatgatcgccgaggtggacagcaacggcagcggcaccatcgacgagcaggagttcctgggcctgatggcgcgcaagatgagggacgcggagtcggaggaggagctcagggaggcgttccgcgtgttcgacaaggaccagaacggggtgatctccgcggccgagctccggcacttgatgaccaacctcggggagaagctgagcgagcaggaggtggccgagatggtccgtgaggccgacgtggaccgcgacggccacatcaactacgacgagttcgtcaaggtcatgacggccaagcgaaggagcaagaggacggaggagaaggcgacgcgcggcaagaagaagccggcggcggcgccgtccgacgccggcaagcgtggccagaaatgcgtgatcctgtgagccggagcttcggtcgtccagtacatgctggtgcagtggtgctgcgtgcgtgtcacccgctcgacctctgcttccggcacaccagctgcgggaagctccacttctgctgttctgcaggtgaatgtagctgtttgtaaacttatcagagcgtgtttgggagcatgattgaatgggaaccccctcagttcctccaatccaagggattttagtcatctcgatctcctctaatctccttgcccccaaacaaaccattaaataagaaaaacggaggaagtaactgtttgtcaatcttgtacatgtgctcgtgtgtagccttagtttcgggctcataggtcagtggtaaaagcaatgtcacaacagaatttgtgatgaatatttaactatcacaataagaaacaatctgatttttacgacccattaaataagaaaaacggaggaagtaactgttgtcaaaaaaaaaaaaaaaaaagctgtg

SEQ ID NO: 31574 - DNA, 275 bp, Zea mays
  Clone ID: MRT4577_128807C.1
aacccctttaagaatctaataaaaaattggaaatccccaaaaagacatcctgatccaaaagtatgcatataatttcagggaatgttcaaatccctggagatgtgtcaatctatagattccttaggtcggatcccagtttgtgagccaagcggatttttctggtctaaatatacgaaccactgttatagtcatcatttcatcttttaagttaccattcccaagctataaagagtgactgccttctatatctttgagttgaagaattttgttatagt

SEQ ID NO: 31575 - DNA, 824 bp, Zea mays
  Clone ID: MRT4577_128808C.1
cctggctcgacgtcatcgagcacgccagccacccgcccctgaacgagctccctcccagttgtcttctctgtgccgcctcctcgccgagttgcgcgctgccgaccgagctggtgacctcgcccaggtccgagctcgacctccccaacgccctggacaccaaggtcccacgacgcggtgcagtgacaaacttgcctaggtccggcgcccttagctctagcttgccgagcttctttcccagccgctccagcatacaccgatagccaagcctctccatcacgccaagctactcacctccgctcgacttgcaagcttcggccgcacctcgctccttagccacctcgccggcgcctacctacgtcacagtcccctcttgtggtaggcgtcgcgacgttcctgctccacgccgtggcgtctccccggtgtctccctgccttcaacgggtctcacccggctgcgtcctcggcctggctcgctgtgctcgtccatggccaccggtgttcgccttcttgcgtcgcgcccgacccagccgtgtgctcgcccggccgcgtcctatcgaggttgttcctgcacacgcgcctctggttcctgcttcagctccatcgcgccctcccggttgctcgcgtggctacctactcggtggaatgtgaaaaccggtggccgatcttgctccgccggttaatttcggttcgcagctcgcctggctgtcgtggtgctgctatcccacgacaatcatactggtgcatcgtctgttcccttggtgtcgtggctggatgaagatggagctagcagcgtgatgttcatcaagtactcgacacaagtgccga

SEQ ID NO: 31576 - DNA, 238 bp, Zea mays
  Clone ID: MRT4577_128809C.1
acgaagactattgcggcgaggagcgctgtcaggagcacacacgcgcgcagaagcttccgcagtacgcacctgggtccacaagttgttgcgctagtgcgctactatgttcgatagcggagcggagcactgcgacatgaaatgggacatgtgatggagatagctggatcaggagctggaagagtggcggttgcaacacttatggcgactgtgcagccaggtccggaggcagtagtggcac

SEQ ID NO: 31577 - DNA, 104 bp, Zea mays
  Clone ID: MRT4577_12880C.1
acacatccaaccagcttgaggcaatatgcgcactctctgccgcgcccgcgttgtgtgtcgctgctatccgtcccgatgttcagtgtggtccttagcccgacggc

SEQ ID NO: 31578 - DNA, 328 bp, Zea mays
  Clone ID: MRT4577_128810C.1
tgccgagacaaagcccgcggagcagaatccgacggatgagactgtcgagaagaagcgcaaggccgctaatcgagtaccacgaatggattgcaggaagaactacgtggatgcacactgcaaatacagcgtcactacgtacgagatctacatcatcaacagtgtcatgcacgtgcacgcggacatcggtatatcgtccaacgacatgtccatcatgaactccttcatcaacgacatctacgagaagctggctgtcgaggccgacatactcgcccgctacaacaagatgctcaccataacctcccgggagatccagacttcggtgcgcctc

SEQ ID NO: 31579 - DNA, 419 bp, Zea mays
  Clone ID: MRT4577_128811C.1
aaaaaaccccgccggccgccgtttgggcaaaaccgactaaaggagaggtttttaaaaaacccgggccaaaaaaaccaggggtttttttgaatatacggggcgggggcctagctaaaaaaaagcctaaaggggggggtttcctaggggaaaaggaattaattggggacccccccccccggccaattggaaacactgggaggcccaaaaaaaaaacggggggttggggtggtctgttttggcaccccccactggttttatttaggctactagctacgacggggggttttttcccttggaagcccacctcgaacggggttgggcccaaaaaaaacggggttatatgcagggaaataattgatgcccatgcccatgcccatgccataatgcatgccctttgccccctgaaaactgaaaaccct

SEQ ID NO: 31580 - DNA, 704 bp, Zea mays
  Clone ID: MRT4577_128812C.1
caggtatcggtccggaattcccgggtcgacccacgcgtccgggaggttttccgaagtattattttgaatgaatacaaaaggtgtgatggaagagatctgacttcacttaggaatataagttgtgaggtcgatatgtttaaaacacttcatggatcagcattatttcagagaggacaaacacaggtactctgtactgttacatttgattcattagaatccagtattaagtcagatcaaattataacagctataaatggggtaaaagataaaaatttcatgctgcactatgagttccctccttatgcaaccaatgaaaccggcaaagttactggtgtgaatcgaagagaacttggacatggtgctcttgccgagaaagctttgtgtcctgttattcccaaagattttccttttaccataagagttacatctgaagtcctcgaatcaaatgggtcatcttctatggcatctgcatgtggtggaagtttggcattaatggatgcaggggtcccaatttcatctgctgttgcaggtgtagcagtgggattggttaccaaaaccaatccagagaaaggtgaaatagaagactaccgtttgctaacagatattctgggaattgaagaattatatggtgacatggatttcaaaatagccggtacaaataaaggaataactgcattacaggctgatattaagttacctggagt

SEQ ID NO: 31581 - DNA, 764 bp, Zea mays
  Clone ID: MRT4577_128813C.1
atgcagtttctcaaaactactaccagagaattacccgaacttatagatcctgaaattttgggtacccataatatcgggtttaggtctgggttatcccaaaatacccagctgtcggcggtgtgtctcaccccttccagtcctgctggcggatactattaccgtgctgtcgagagctgaatcaccaattcttgttgctggaggtgacagctgccttggagcctatgctgaagctggaactggggaaggcgggagcaggatctggttgttgccatgattcttgtgtaatgctggagccaagcgctgtaatatcgaagtagaaggcagctggatctggacgggaaacaccaacagcggtagccatcaaggagagcgactgcacggcggcggcctggtagtttgcccgtggtggtaggttactcgtgaaggagaaggtgcatgttgcactgtggtctgcagctcaggaggttggcacttgtcagttgtcacccatggtagatttttttttccttattagttctcacgatatatgtatgggccttgtgtttgcatgtcctagatttctgattgggctgctgggggttgcaggctttaagttattttgcataatattagtattttggattagtacctgaatttcttgaaataaaatcggctatttggactatctacccgagattttgttcgggtatatctttttttttgtccagtcctaactgttaatgcttgcatgctaggttgtcagtgaatatatttgtaaaatggaa

SEQ ID NO: 31582 - DNA, 1296 bp, Zea mays
  Clone ID: MRT4577_128814C.1
cattggtggtcttcgaaagttttgggctggcttatttacttacgggacaagaccgagcgggctcgtggcccattatctgctagtagcctggcagttccgacgctgcttgcggcggcgcttggcaaggccgacaaacggcgaccaggcaggcgagctcgtcgcctcgggggcagggaggaccggagcccctcgcctcggaggaagggaggacctgagctttatgatcaagcaggagctctgattaacagaattttttgaattctccccaaattgaagggtgcacctgaagggagttatggatcggaagaatcaaactcctcaaggtcaaatagcacaggtggttgtggaatttcttgaggtagcaatcagctgcatcgtcttcctcaaaggcttctatcctcctcgtgcctttgagaggagaaggtacatgaatgtggtggtccagaaagcactgcatcctgagcttactagctatattcactctgtgactttcggtcttctacctttcattcagaagggattggtagagagggtcgtggtcatcttctatgacaaagggcatgtaccgaccgagaagttcgtcttcaagcttgcagtcaaccagtcataccgttccaagttagaggaggcgaacctggagttcgctctgcgagcattcttgatcaggctgactgttgctgagcctgttaccagaccccttccaccagatggtagctgggaggtgaccgcctacttccggtccctccccggcgacggtgaccgagaagctcagctgtggattcctacggacgccgagctgtggatgcagcctccgcagatcacccccatcaagtcagtcagctgtgaccctctgacgatgcagctctacttggagcaccctagcgtcacggaaccgaaggagccaccggcataatgacaggagcctgcacctgtgggctgtgatacactgcaatgtatataaaaaaaatattgcaaggcaactttggcacgaaccctcgagtcagtgaaacctttttttgttcagacagaggcaaggaaactacttctatccagtggcttcaacttctggctagagaaggcgacactgcaacaatcttgggccttgggattttggcttgaggctgaagctgaggggggtggcagagacggacgacacatgggtgagaagcacatggctagaagaagagtggggaggaaactgcccgactgaaaaatagaatagagaccaaacagaaccctgccaaacatggcattttgccgtgactcgtactactcttaactgttttagcgtcgcgc

SEQ ID NO: 31583 - DNA, 389 bp, Zea mays
  Clone ID: MRT4577_128815C.1
gtttgtcaggagtaaaaaaagccaaagtttctcttggtcatctagtttgtgaaaatgacatggacgaggaagaggagtgatttcgagcagccttgaccttgaggatgcaatagaagtgcacttagatggttccacttccacctgcacctgtgtgttttgttatgctagtcttagtctgtacggcgatcttgaatgtaaagacaagtacaaagttgaatgtcagttctcatgtgttgcatgaatgaaaattctaagggcttgtttggtaggactctggctccctttaaaaacccctgtagctctgtctcatttgtagctcctccacatgagccacctcaatttctataaatcagtttcttaaaaaccaatgggagctttcaaaaaccaaa

SEQ ID NO: 31584 - DNA, 1330 bp, Zea mays
  Clone ID: MRT4577_128816C.1
ccgaaacaataaatttcactgtgggactgatggaacggcgtcccagaggctggggcggaggcggaaggggagcactgagcaggcgttggcgttgcgagaaagaagatcatcctctgcatagggccgcaaggtcttgtgatgcggcaacaatggagtcggtgtgtgagaccaaacctgtcgccatcaattcaagaggtcgcttctcacgcacaccattccacctagaagcatgagctgggcctggcaaaaataagagatttacctgaccgattggcgagactgatgggacggcgtcacagcggcggcggcggcggaagaggaagagggcgagggcgagggcgtgggcgagatgaggaagaagatcttcctctgcacaaggccgcaaggtctggtgatgcggcagcagtggagtcggtgtgcgagtccaaccctctcgccgtcaattcaagggatcgcctctcacgcacaccactccacctggctgcatgggctgggcatgttgatgttgtgagatgtctttgcaagcacaaagctgatgtgggagctgcagcaatggacgacactgcagcacttcattttgcttcccagaaaggccatgtagaagtggcccgtgagctgctggcatctggggcctctgtgaaagccaagaaccggaaaggcttcacggcgctgcactttgctgctcagaattctcacctggatcttgtgaagtaccttgtgaagaaaggtgttgacgtcacagcaaagaccaaaggtggtcagacagctctacatgtcgctgaggatgatgaagtgcgtgcgttcctgaaggagtgcgagcaatccttgaagaagggtgcagagctaccatcggagaaggatgattctgctgagaaagagggcgatagcaagtcttcaggtgaggttatgaaagatgaggaggatgcagagcagggcgagaagaggaaaagcgaattggttggtgcgtcgagtttgtcaggagtaaaaaaagccaaagtttctcttggtcatctagtttgtgaaaatgacatggacgaggaagaggagtgatttcgagcagccttgaccttgaggatgcaatagaagtgcacttagatggttccacttccacctgcacctgtgtgttttgttatgctagtcttagtctgtacggcgatgcttgaatgtaaaggcaagtacaaagttgaatctcagttctcctgggtggcctgaatgaaaattctaagggcttgtttggtaggacaaaagatccctataaaaaaaaaaaaaaaaaaagcggatttgtagctcctccccatgagcccccccaatttctataaatcggtttttt

SEQ ID NO: 31585 - DNA, 688 bp, Zea mays
  Clone ID: MRT4577_128817C.1
ccacgcgtccgcagggagtgattatgaataaaggtggagctcgattattagcaaatgttgcttctgaaactgatgatcctcaaactttgcggatggtggctggcgcaattgccaatttatgtgggaatgaaaagctgcacttaatgttgaaacaagatggtggaatcaaggcactactgggaatgtttcgtagtggacacgccgatgtcatagcccagatagcacgaggaatagcaaactttgcaaaatgcgaatcccggatgataagccaaggtcacaggaaagggaggtcccttctgattgaagatggtgttctttcttggatggtggcccattcaactatgttttctgcttcaacacgaagacatattgagcttgctttttgccacctagctcagaacgaagacaacacttgtgacatcattgcttctggcggaatcaaggagctgcttcgcatatcgagggagtccccgggagaagatacacgtaatttagctaagaaggctttagattcgaatcctgcttttttaagagagatccaatgacttttctttggccaagacaaacatttcattgtagactcatccatgatactatacatatgcagatgatgttccattttcaaaaaaaaaaaaaaaaaaaaaaaaaaaaaaaaaaaaaaaaaaaaaacaaataaaaaaaaaaaaac

SEQ ID NO: 31586 - DNA, 449 bp, Zea mays
  unsure (1)..(449): unsure at all n locations
  Clone ID: MRT4577_128818C.1
gtctggatggcggatggcggttccacaaactctcctgctagttatgctggtcgtcgtgctagcgatgtgtcgtcgatgtcgccaactccagtcactccaatgctctaacgcttgacgtgcgcgttgtactcgacagccacagtaggttcacgcgtcggacccgagacaaatcctgacctacgacaatcgttgtacgagtaggcgtgacggatgcgtcaccaacgctggcgcgtgccgctacaatgacactcgcacgcatgggtacggcttgcacacagtgtacgtgagcactgtgctgttcggagaccgtacggnctgctgacggtgctacgaggtgctgcgcgtgtacagctctagcaggtgcaagcctgaagcggcagagctgatggtgacggtgaccgaactgtgcccgtgctaagaccaatgatgcaagccaccgcggtaacact

SEQ ID NO: 31587 - DNA, 1106 bp, Zea mays
  unsure (1)..(1106): unsure at all n locations
  Clone ID: MRT4577_128819C.1
ctcgaggcttgccgggagggagtgattatgaataaaggtggagctcgattattagcaaatgttgcttctgaaactgatgatcctcaaactttgcggatggtggctggcgcaattgccaatttatgtgggaatggtacagcttgttgtcgttatttttttcttgttttttatcaaaattatggttaatattctgttggatctagaagactagttatgcacaagcattagtgtacaattcattttactgtgatcattttgctagaagtggaacgtctatattttgggaataaaaacgtgacctatcagatgtgtacttttgcagaaaagctgcacttaatgttgaaacaagatggtggaatcaaggcactactgggaatgtttcgtagtggacacgccgatgtcatagcccagatagcacgaggaatagcaaactttgcaaaatgcgaatcccggatgataagccaaggtttgtaacttttctatttgttcgtcaaaagtcccttgtttttctggtgagccatcatagctgcgtccacatggcttttggctggcttgactacttcagagtgctgcattgctgaagattaagccattgaagtggaatacatcgagttttcctgatttcttatagttcaataataggtcacaggaaagggaggtcccttctgattgaagatggtgttctttcttggatggtggcccattcaactatgttttctgcttcaacacgaagacatattgagcttgctttttgccacctagctcagaacggtaagcacattgaggtttgctctcgaccattttgcgctgatatcttaccaaatatcgcccacatctttgcagaagacaacacttgtgacatcattgcttctggcggaatcaaggagctgcttcgcatatcgagggagtccccgagagaagatacacgtaatttagctaagaaggctttagattcgaatcctgcttttttaagagagatccaatgactcttctatggccaagacaaacatttcattgtagactcatccatgatactatacatatgcagatgatgttccattttctcaaggtcccacgctgccacgctcatgctcatcnncaacaca

SEQ ID NO: 31588 - DNA, 571 bp, Zea mays
  unsure (1)..(571): unsure at all n locations
  Clone ID: MRT4577_12881C.1
ggagaaagttgtgtgtgaactttatttcatcatgagaaaatcacttctgtgcagtaacagagaatactgatatatctacacgatgataaggttttctttgtatttagatacataccttatatttgtacacaatatataaaattcatggaggaaattaatttctacagtacagtttctttgttggaagaggacttgttccgttagtttcttttagaaaatgacccccagttctgtgactgtggtaccagggatcgcagttccaatcctgtaatttattagacaccataatcttatgaacaataagagaaactgagaaactacatcctcctgcaggatgaaaagagaaacatgaatgctcaagctgctatgctagtaactgattttagcggaagaatatgatttccatgatgtattatgaatagaaattgtaggtctcatgatacatattagcaacattgctgcaaactgtctccctgctctgatggcatgcacttcactcgtcaatcaaaccgccttttacgcccatgggnaaatgaggccatcatcatgaaaggccttctgcattgcatgt

SEQ ID NO: 31589 - DNA, 340 bp, Zea mays
  Clone ID: MRT4577_128820C.1
gaccggcacactatgagccagacccgcgccagccggttagtgaatgcggctacggcatcctgacgcccgactccagatcgcacttatgctacagcaactcttgccatagcgactgcacacgtatgagacaatccatcctgtggatctggatataagcggacactgggcctatcatcaccgaaacagctgcacgcaacgtgttgtaaatgcgcagtgcgccatcggcaacgtatgatctatggacattcatggaggatgtcatcaaagacgtgggaactgtgtcctggattctcaccagctagcaccagcctgtggcttgtattttacggtgggggccgag

SEQ ID NO: 31590 - DNA, 394 bp, Zea mays
  Clone ID: MRT4577_128821C.1
ggaaaaaaagcatgccaagtttgcctaattttttttttaaaaaaaaggtttaaatcgttttaaaataaaataaatttctttaaaattcgggggatatttttccataatatattttttcactgggaggcccatgacaaacgattccgatgcgataatgcaaaaggtttcacgagcaaaacctttcccgttaacatggccaaaactcccgttaacaagaccttaaaattggccccaaaaactttttcctaacttgaagcattttgcatccagcagggcctttccttagaagggctcctggccctaaataatggcattgacccgttctttttgggccttatcagaggggtcaaccttggcccactcataaagctccatgttatagacttcgcccatg

SEQ ID NO: 31591 - DNA, 840 bp, Zea mays
  unsure (1)..(840): unsure at all n locations
  Clone ID: MRT4577_128822C.1
ttgggtacctcgaggccggccgggaattcgtcagtcgccatgaagtcgttccggcgctgggctgacctgccgccggatttcctctgctgcatcggagaccggctcgagctcaagtggtacgccagcgcgcggggcgtctgcacgtcgtggcgccgcgcgctcgtgccgccgtcgcccgcgctcctcgtgatcgcgaagagcgacagctgttacccctacgccgccgcatccctgcccacggggaggtccttcgagctcaccgccttcatctcaggatggcgctgcgtcggatccagcaacggctggctcgcgttctccgtccacgagaccgtctacgtgctcctcaaccccatcgccgcggtgcaaatcatcctcccaccgcttaactacggggacgagtacaatagccactgggactggtgggtttccaagatcgtctgcaccccgagcaccgccaaggatgacttcgctgccgccgcgatctgcggcatcgacaggatcgcgtacatcaccgccggtgccacgaggtgggccttcatgggcgtccgcctcagcggggaggtcggggacaagctcaccgacgtcgtctacactgacaaaggtaaattctactgtctctccagntacggggacgtgcatgtactccgtctccctgcgcgccggtgccggaagcctgccaacgccgaagaggcggggtcctcagagctaaagttctctgttctccggccgctgccgcctgctagacattcaagtattgtctccccgctgtgttgggaaaatatcagatgctattgatgantgaggacgaagttccacctttcgcaggacgacgcctgaatc

SEQ ID NO: 31592 - DNA, 323 bp, Zea mays
  Clone ID: MRT4577_128823C.1
aaaacccctcgaaacaggccaatagccatacattttaggacacaaacgaaaacaagagccttacgggattttttagctacccgggacgaaacagtttttttccccgggtcacgtccggttttgcagagtgcacacaacgttgcttatactaacaggacaactaattggtcaccgacctatgcgggatttcgagcgggtttccttcttcctcccgggcatagggcacggccggattcaggggcttatttgggggttttccttttgaaccctacgcgggagccggggattttgacaataacctacactttttgtttttaaaggtt

SEQ ID NO: 31593 - DNA, 260 bp, Zea mays
  Clone ID: MRT4577_128824C.1
cccacgcgtgtgtggacgcttcatgtgggctgactcattctctggtaaagttacagatgtgatcgattgaggtgtgatccgcgatgctgtcggattctctcatgtacgatctctgggacaggagagaactgtggcatcttagcctcagctatcttgtacgcacgcgcataagcagctagtatgaccttgacaaatggccgtctgtacacagcatagctaggggagcatgtacaagatcaaatagcacttagagaacggca

SEQ ID NO: 31594 - DNA, 184 bp, Zea mays
  Clone ID: MRT4577_128825C.1
ctgggttgggggtttttttcatgagtggggggaagtctttaacaacaatttgtaaattacctttttctgacattttcaaggagaaacttttaatatgacccagggactttgaatagttcacaaaaccagtggggggcgaggtcaccccaccatgcgatcaggttttccaccatcaagaatatca

SEQ ID NO: 31595 - DNA, 556 bp, Zea mays
  Clone ID: MRT4577_128826C.1
agcttctccctcgtcgtgaaagcgtcctcccctaccaaggacaccagagtggtgatgccggccgcgccgtcctgcaacgtggaggccgccaccgccgatggcatccgcggcctcctccgtctgtaggacagcagggagaaggcccatctgccagtctgtcgtgcttggtattccataatatttccccgccaatattatttttttggttgggaaaattaaatgcgtagaaaaatattgcaagaaaagatgtgatgcttgagctctggtcggtcgagttgtccgcagcgtgactgtgatgttgccgttggatggatgctacctctggcggtgcaaaagcgagaggaagacgacgatgtcagctaaggttagtttgtgcgagacgtcggtgtggtagatatctagggttttacgttagtgtctactgccgtactccactagtactgctttttcttgattgggtgatgggttttttgaattaccttgtatcaagatcactgcatatatacgatgtaatgtatgcaagtgcgtgtgactttacatatatattatatatttg

SEQ ID NO: 31596 - DNA, 370 bp, Zea mays
  Clone ID: MRT4577_128827C.1
ctcgatctatatcagaatatatagaactgaagcttggatttggaccggacgtccttctgtcacacgtatacatactttttgcctgcgtaagtgggagaagacaggagcacaagcgttcaaagatggcactaatgcccatctcatcacattcatattttcatagcgtactactactaccttgtaattgagcatgctcaccaagccgatcgcgatagaccaataaattttgcttatgggcacaccagatgcactgtgaaactgacgatatctgcatatttaccatataaagacctcagtatggcttgtggccttcatattcattacatgctcactgaacttggccaggacctgctcacggacgcacatgtta

SEQ ID NO: 31597 - DNA, 397 bp, Zea mays
  Clone ID: MRT4577_128828C.1
gcgtaacaaaaaatcgtccggacaccttccacggagacaaggaccacagaagcatacaggggggccaccgtagggctatgggagtgggccaagggcgacaaccagcgctggaagatcctgccctggtgaacgtgaacttcacctcgttgtcttatatacgcagagagacgagctagatgaatccaaggaaccttacctagctgctgcctacttcggctaattcgtcctactccgctctagctgatatctgtctgtgtcttcgcatcctctgttcctgaatggacgaataatatatagcacgcatgtactgatagcgaccatgtctgaatgacatcttacatgctgctgctgctgctactgctacctgtccgtttggtgttctaagaggactctgatg

SEQ ID NO: 31598 - DNA, 593 bp, Zea mays
  unsure (1)..(593): unsure at all n locations
  Clone ID: MRT4577_128829C.1
tgggtacccttgtgagtccggccgggnnactcgtcatacggcaaaccaacacccccggcccggccgcgggcgtctgcgctcacactccactcccctgacggcctgaccccgcgcgcacaagcaacagcagcccgatggccgcaccgtcctccgccgccacagcctgcttcgtctccccgctcccgccgcctcgccgcccgcgtcatttcctcaggcacctcgcgcgcgccgccgccgccgagcccacgcccgcctccgcctcctcgttcgccctcccgtcgccatggccgtgggcgcggcggctccgcgacctggtccccgccgaggccgcgggccggctgctgtcgtcggccgcgggctccctcatcgtcgcgctcgcctccgcgtcgctcgtcctcggcgacgccggcgcggcctccgcgttcgtcgtatccacgccgcggaagctgcaggcggacgagctcgccaccgtgcgcctcttccaggagaacacaccctccgtcgtctacatcaccaacctcgccgtcaggcaagacgcgttcacgctcgacgtgctcgaggtgccgcaggggtccgggtccggctttgtctgg

SEQ ID NO: 31599 - DNA, 624 bp, Zea mays
  Clone ID: MRT4577_12882C.1
ttttttttttttttttttctttttttttttttttttttttttttttttttttttgaaaaaaacttctcaaacttacttttggggatggacataaactaacgatgtaaagcttcttggaaaaaaaaaaaacccattataaaaatgctaaaaaaggaccaataatgaactaaaaaactttaagttaacaatgggagaactgtctaagcgttcaggaaaagtaggagagagtgtacaaaaaagtatgaaactgaaccttattagcttatcaccagctgctggagaatcgacagaaaaaaaaacacattttgatcggggctgcatgcatgtggaaaatttatatttgtctaggcagcacgcatgcatttgcacaggatgaccaagttgacggcaccggccatgctttgctgctctgctggcctctctctccagtttcccacagctttattgaactgcatgcacctgctgatgcgggtggaggagttgaaactgccgctcctctgaaagatgcagttcaagaaagctgtggaagatcacaaagaaggccatctgattactgcaggaggaggaaggaaggaggaataaggagaaggaacactggttgctgcctgctgccatcgtctttgg

SEQ ID NO: 31600 - DNA, 1330 bp, Zea mays
  unsure (1)..(1330): unsure at all n locations
  Clone ID: MRT4577_128830C.1
cggacgcgtgggttcttggccttctctgcttcgctgttcttgttcttgagatcgcgctttctgaccggggagtgccgtgccggagatcctgaaaagaggtgatgcaattgcacagtatagatacggctttctctgctattgtcccctgcttttgtttcatggatatttccttcttcttgttgccgactgaatgataaggtctagatatatatatttgctttgcttggaacaactctctgaaagtcccggaaactctgtcggccggatcatcgcatcgcagctcccgntttttgcatgcagcatgcagcaccgatcgagtaactgatgctgaaattctcgtgaaacagacacacaccacacaccacggttgcgcgcgagaagtccgagacattggacctcgaggccggccgggagctcgcagtcccagcagagaccagagcctccggaaaccgcagcctcttggcctttgcttcctcgcttatctggcgtacaggctaagctagagagggagggagggagagctcgccgtttccgacccatcggcagcgccggagatcctgaaaagagtgccagctgagtacctcctgctgctcgaattttctcgtgggacagacaattttcagataaggacgtcagggagcatcatggacgacagggagcagatgaggatgaccgtcctgaaccaagaacaggtcttcagacatcaggtacacgagctgcaccggctgtaccacgtccagaagcagctgatgatgcagcaggcacacacgcctgctccggcgacccgtgctccagcagtgctcgacgacgccaaggccaagccaagaagaccgcacctagacatctggtgcagcgagacggcgagaaacccccctcagcaacggatcatcagcttcaacacggccacagcaccggcaccggcaccggcaccggcgcctgcaagggccgaggactgcaaccttgagctgacactggcaacgggacgaccgagcagcagcagcggtagcagcagctgtgacgccggaaggcggcgggggaagcggctcaaggtgtcaaccaactcggactccggcgccaccgcggtgtcgtccacgtcgacggactcggagctggcgcagttcggggacatcgacgcggcgaatctgccggtggtcaggtttcagggcgaggttactaggaggatgggcgaggtggggcagggcccgtggatgtaccggtgcctgagcttgaagaccgcgtgacgagtttgtgctgtatgtagttgtaggtaggaaatggggagttgcggttgtagagttcagacttgagaggattgagaaggagacacatc

SEQ ID NO: 31601 - DNA, 1061 bp, Zea mays
  Clone ID: MRT4577_128831C.1
gggtacctcgaggccggccgggagtccaggttggagatctccttcctcctcttcctcccctgcctcgctagatataacaaaccatgccggcctacttgccagctcgcagtcccagcagagaccagagcctccggaaaccgcagcctcttggcctttgcttcctcgcttatctggcgtacaggctaagctagagagggagggagggagagctcgccgtttccgacccatcggcagcgccggagatcctgaaaagagtgccagctgagtacctcctgctgctcgaattttctcgtgggacagacaattttcagataaggacgtcagggagcatcatggacgacagggagcagatgaggatgaccgtcctgaaccaagaacaggtcttcagacatcaggtacacgagctgcaccggctgtaccacgtccagaagcagctgatgatgcagcaggcacacacgcctgctccggcgacccgtgctccagcagtgctcgacgacgccaaggccaagccaagaagaccgcacctagacatctggtgcagcgagacggcgagaaacccccctcagcaacggatcatcagcttcaacacggccacagcaccggcaccggcgcctgcaagggccgaggactgcaaccttgagctgacactggcaacgggacgaccgagcagcagcagcggtagcagcagctgtgacgcgggaaggcggaataataagcggctcaagggcgcaaccaactcggactcactccgcccgccacggcgtcgtccaacgtcgaccgactccgagctggcgccgttccgggaggtggtggaggacgtggcgacgccggtgaggtttcgcggcgaggttagcgggaggaggaggatggacgaggtggggcagggtccgtggatgttccagcagtgcctcagcctgaggacggcgtgatacgtcgtaggatctggggcatttggggttagagttgagagggagacagcactgttttgtgttttacatgcacaactgtacatctcagagttgtttcacaaggcaaagaagaccttaaaaaaagtgttaatg

SEQ ID NO: 31602 - DNA, 847 bp, Zea mays
  unsure (1)..(847): unsure at all n locations
  Clone ID: MRT4577_128832C.1
agtccggttggagaatctccttcctcctcttcctcccctgcctcgctagatataacaagccatgccggcctgcttgccagctcccagcagagaccagagcctccggaaaccgcagcctcttggcctttgcgtcctcgcttgtctggcgtacaggctaagctagagagggagggagggagagctcgccgtttccgacccatcggtagcgccggagatcctgaaaagagacaattttcagatgaggacgtcagggagcatcatggacgacagggagcagatgaggatgaccgtcctgaaccaagaacaggtcttcagacatcaggtacgcgagctgcaccggctgtaccacgtccagaagcagctgatgatgcagcaggcacacacgcctgctccggcgacccgtgctccagcagtgctcgacgacgccaagcccaagccaagaagaccgcagctagacatctggtgcagcgagacggcgagaaacccccctcagcaacggatcatcagcttcaacacggccacagcaccggcaccggcaccggcaccggcgcctgcaagggccgaggactgcaaccttgagctgacactggcaacgggacgaccgagcagcagcagcggtagcagcagctgtgacgccggaaggcggcgggggaagcggctcaaggtgtcaaccaactcggactccggcgccaccgcggtgtcgtccacgtcgacggactcggagctggcgcagctcggggacatcgacgcggcgaatctgccggtggtcaggtttcagggcgaggttactaggaggatgggcgaggtggggcaaggncccgttggatgtaccggtgcctgagcttga

SEQ ID NO: 31603 - DNA, 284 bp, Zea mays
  Clone ID: MRT4577_128833C.1
accttcctgagtttgtgatgtttgaaggcattgcggagattacagagatgacacacacaaagggagaaaggatgcacaagagtgaggatgatgttctgagcaaggagaagaaatcgaggcgcgctgggagatcacgtagcaaaggagaggctttaccagaggctgcaaatgatgatgctatagatgaagacagcaatggaggggcaggaaatgatacgttgagtcagggggaaaagtcaaagcgtgtgaagagttcatcgaagaagaaaacagacatttacaaa

SEQ ID NO: 31604 - DNA, 285 bp, Zea mays
  Clone ID: MRT4577_128834C.1
cgagctcacagataccggcacacgctgcatggctgtccaatgtgccacatagagaaggcagactctgtgagccatactcgaagaaccctgtgcctgatacactttgcaacatcagaaaatggagccactggactgcaagctggaactgcttcatccctacaagaccttgcttcctgcactaactttggacctcttgcttgcacatttgacactaatactgtttcacaagcatatcaacgattaccattgcgttagattgtgccacctatgatgattatatttcca

SEQ ID NO: 31605 - DNA, 302 bp, Zea mays
  Clone ID: MRT4577_128835C.1
ataaaacctgggcgacttttttatttattttcaggggcaaagcccaggcggattgtttagccctatcctggcccagatgaaggatccaagctcacaaccgactaaaaaaagcggggaccgactacgcttgaccttttcgaaaaagttttggcctgggagacaggctacaggcaatcccacaccgcgtctgaagcccgcccaagcgaaagcggctaacaccgcctgaagaaggtaatttcatcggggcggaccaagcccttgaaaaaatgaggcccaggcccaggcaaaaaaaaggttccacg

SEQ ID NO: 31606 - DNA, 415 bp, Zea mays
  unsure (1)..(415): unsure at all n locations
  Clone ID: MRT4577_128836C.1
aggacccacagccgtccgctttttcatgcatagctaggatatatacaacactttatgtctgtatgcgtttagagaaatatgcaacgtgagcgagtctttgcaatattacatcgtggtgccatatcagttggtaggccccttctgaatgggctatcatttggaatatggcaaccgaaatagatnncattgcagtatatagcctttgannaaaataggaatagatccgagtaagtggcagcagtcatctattatgggttccattattagtcaaatatagctgttgagttattgggttagtgccctttctttagctggtgagtggttggttcaaaccgcaaccaaagaaccatatatcttcagtaaagggcaactggcagtttgtcaactcagagtttactaggttgatgggctgtca

SEQ ID NO: 31607 - DNA, 302 bp, Zea mays
  Clone ID: MRT4577_128837C.1
ctcgcgggtcgacacaagcctctaaagtcactcgtgcgaacgcgtgggcggacgcgtgggggaagttctgcaatctgactatgttttaaaatttataattgttgtcaattagtgttggtgttggtttcgcccatcaacggatcaaccttattggttatctgaacgacgaattgatatgttaactcgtgaacttcgttatatttaggcagcaaaaaaaaaaaaaaaaaaaaaaagaaaaaaaaaaaaaaaaaaaaaaagaaaaaaaaaaataaaaaaaaaaaaatatataataaaaaagaaaa

SEQ ID NO: 31608 - DNA, 296 bp, Zea mays
  Clone ID: MRT4577_128838C.1
cgcacgcgtccgcacacgatccatccacaggtccgcccacgcgtacttacaggcgtccgatcgtatcagcggcgatcgtgtccttatcgctgttcgcggcgtacttctgtccgtcctcgatcatggcagtggccgtgctgagacctcctgtgttccggggagtgccattcggcacaatgctctcctactgtgtctctggtacgacaacaggcagacctggaagctcgggcctcgccttccgtgggcggagctgaagaggagatgctaccatgagctggctgacataggggcgtact

SEQ ID NO: 31609 - DNA, 2683 bp, Zea mays
  Clone ID: MRT4577_128839C.1
cggacgcgtgggcggacgcgtggggctgccgcccgcgcgcgggacgctcaaacagccggactcccaaccaaaaggcgcaagaaaactcgtccccgccgctcaaaaatctcccgcctcccgcggatgggatggcatccagtttcacagaccacacgcccacccgctccgccgctcgcgcccaaaaattttcgttcagccggctgcctgccccccaccaccacttccctcccgttccgaaaccccgattagccgccgacccgccgtctccccacgtatttgactggtgctagagccagcgcccagatcaaccttcctgagtccatcggcaccgcatctgcctcgcgatccgtctctctctctgtcccctcacggccgtagaccttttcgagggcgatatcggagggaggagagggggaggcgaaggcgggagtagtagaaactaggaagggccgttcgtgtcttgcggagaagatggagaacctgaggaggttcctgaacccgctggtgctcaacctgcagaagatggagctggagctcacctgccccgtctgcctgaagttgctcacctcgcccacaacgctgccgtgttaccacacatcctgcagcaagtgtgcccttacaccgacttcaaaaggctacagctgtgccatttgcaaatcaggctattgttctcaagatttaaggccagcttctcaccttgagtcgatagtgagcattcataggagcctcagctctaccgtcagcaccatgattgaacaacaggattctcaaattaacattcatgttgcaaaggcagcatctcatggaacaccagaatcaggaaacagaagtggggtggaggagaaatctgaccagatgaaatcttacaaccctgttgcttcaaagctagtatataaccaaccaactggacctgcatttgggaacattgatagtgttcaagcaaaagatcctgcatttgagaacaatgctggtgccgcagctgttgcaccaatggcttttgtacgaaagggtcattctgggtcacaatcttctgatggccctggagatttggactgtgacagcaatgacctcgaaggagaactgatgacaagcctatcacctcttcaaactgcattgaaacgagaggcaaatgcaatggatgatcataccagagaattgaagaagcaaaaatcaaatgatcaagttcaaagacaaacaaacatggccagtgcttggaaatgtgagttctgtcattcttcccaagttactgagtgtactggccctttgtcacattatttgaatggggagccagtagaagctgatcaagcttggaaatcaagtgttcagcatgtccatgagaaatgcattgaatgggctcctcaagcattctttactggtgacaccgcaaacaacttggggcctgagttggcccgtgcttctaagatcaaatgcagtgtttgtggcttaaaaggcgcagcacttggctgccttgtgaagagctgccgcaaaagttttcatgtcccatgtgcctacaacgtcaaaggctgcaaatgggatcaagagaactttgttatgctgtgtcctacacattcgtcaaaaaagttgccttgtgagagattaaagccaaaaaagaaggccaagctgcagcaaccatcttctgacattgatggtccgatttcaccctctccgatgcaaagggctgaactttggactgcctcaccttttctgactagtgaatgggtgatatgtggatctgcgctcattggccatgagaaggaaatcttggatcagtttgagtgtcacactggcatcacagtaaccaacacctggagttcagatgtgactcatgtgattgctaatacggatgaacgtggggcatgtgcacggacactcaaggtcctcatggctattttagctgggaagtgggttctcaatgtgaattggctgaaagcctgtatggaggctagggaaccagtcccagaagagccctacgagataaggtgtgatgttcatggctctgtcgacggccctcgctcaggaaggctccgagcgatgcagcaggcaccaggtctgtttgctgggttgaccttctacttcagtggccatttcatgccgggatacagggccaacctcgaagatttgatcgccgcagcaggggggtccgttctggagaaggccgagctctctagcacgtccttgatcctctacagcatggaggcgccgccgccccacaacaacctagacgccctcgagaccatcaacaagagattagccgaggcccaggaactggcgaccacggctggctgcaaagccattcctcatacatggcttctggactgtatcgcgtcgtgcgcggttgagttgaacgtgtcgtgttctactgcctaggttcaaacataggaatgtgacatctgctgctgtttttttttgaaaaaggagattaagagacgattggcttgttgtcttgatccaaagtatctttagacgttgtagcatgaaagcggaatttagtcggaataagcctgtgtatcttagtcaacgttactgtcggtgatgtcatccacatgtttcacctactgacaggtgcagtttgtctgatttttttcttcttgatttgtatctaaaaaaacataaaaggatgcactcaggtcaggtttactccatttttcttgaattgacgttggaaaaaaaaaagagatttacc

SEQ ID NO: 31610 - DNA, 155 bp, Zea mays
  Clone ID: MRT4577_12883C.1
ggaaattctttttgcacaagataatgaagagcaatcagttgccactttaatattggattcccttatacagtgtccgatagacaccaggaagcaactagcagagaatttggtagtcataggtggcacttctatgttgccaggatttctccacagat

SEQ ID NO: 31611 - DNA, 163 bp, Zea mays
  Clone ID: MRT4577_128840C.1
cccggccggccggaggcgtccacctggacggtgcgggaggcggcaaggctctctcgtgcggcaagcaccacacagacacccgatggcgctcctgctgctgggcggctgggaccgcgccccagccgtccacggggccccggccggggtcccggctggtccctcc

SEQ ID NO: 31612 - DNA, 181 bp, Zea mays
  Clone ID: MRT4577_128841C.1
ctaccaccaccactatttgtttatctgatgaatgaacggtggcgatgatgaccgatattgtttaaaaaaaaaaaaaaaaaaaaaaaaaccatgcccaaacaaaacaaacgaaacggccaattctgcccattcccatcgccctgtccggcggtcccgcctgcatctggcggcccctcttgcc

SEQ ID NO: 31613 - DNA, 309 bp, Zea mays
  Clone ID: MRT4577_128842C.1
ctacaatcacaaacacacctatttaagcgtttttgcaacaacctaacaacagggggtaggaagatattaaccctccttgcgcatcttgcccttttagtgagcgcaacaaacgcggacattagttgataccacacactagctcctaatgccattattccacattatctaccaccagttacttaaatggactttgaacattcagccgtgcaagcctactagctacaactatcgcttgccgagagcgtcttacaacaaccaattgctcatttgcatcaacaattcttggcacatataaacctacaaaccatc

SEQ ID NO: 31614 - DNA, 295 bp, Zea mays
  Clone ID: MRT4577_128843C.1
taaagcgtgaggcccgtttgaacggcctgctctattatatcccatacaccaacctccgtgtggtcgtctacataaatggcatggacatcaagcatctcaacaccaactacatctcccaaatgaagctatacatacacagcccatacgcccattacatccacaagccctgcgcaaccatcactatgcacaactacggggacaataacgtatactttgacctcgactacatcaaccacaccacctcacagtgctacctctacagatctgactcgccctcttactacaaccctctaca

SEQ ID NO: 31615 - DNA, 183 bp, Zea mays
  Clone ID: MRT4577_128844C.1
gatccagcaccataacttgtggggatcaaatacgaatgcgaggactttcaaagcttaataaaacggttgagcgagctcggacacgcttgccaaattaattcaggggaacaatacctgtccacatggcctagaggctgcacacatcattggggtactaattggaccactaccagcctaattaca

SEQ ID NO: 31616 - DNA, 310 bp, Zea mays
  Clone ID: MRT4577_128845C.1
gcgtcacgtccacagctggtcgccagtgttacggcgaggctggtgcgtcctgagaaggtgtatatgaataagggtgtgcggattaaggaggaggatgagtggtcggcggtgcatgcctgggtgtatggagaggggcgtcggtgtctgtcgcttaacgtggtggggtcgtcgtgtcgtggtaagagtcgtaggtcgtgtcggacgaatcattcgtgtatggattccaagtgtggtaatcctattgatgatgaggatgagtctactacctgctcgtatagctcctcgcgtaataagcgagcgagtgcgccgt

SEQ ID NO: 31617 - DNA, 294 bp, Zea mays
  Clone ID: MRT4577_128846C.1
tcggtacggcttgtcctccccctacggttcgggttcgagttcatgaggctctcctgagttcggctacatgcgtgatcggatctagatggcggcttcggatgtttactaccgctgctttgtcggaatcctgtcctggttcacagacgaccactacttacacaactccttctgcacctacggcgaggtccacgagttcaagatcatccttgatctggagacgcagaggtgccgcggcttcagcttcgtcaccttttacacggaggaggctattcgatacgccatcgccggccttaa

SEQ ID NO: 31618 - DNA, 566 bp, Zea mays
  Clone ID: MRT4577_128847C.1
ggccgcttttttttttttttttttgcttttttttttttttttttttttttttttttttttttttttttttttttttttttttttttttttttttttaaaaaggggcctttcttatttcggggaagccacaaacatcatccaaaaaacttcattttggaaccataacccaaaagcaacctaaaagggggcccccccaatgaggggtggggggaaaaacggtggggggtttggcaaaacaaggggggtgaagggcaacaatgggggcagttgaaaaaggggccccgcgttaggcccaccgggcaggtaaaacggcaacaaccggggggggggaaaaaaggcaacagggcccacaaaaactaactggctgaaggggggaacccgttgctgttgaaaaaaaacagcaaagttcaatgcccccactgggttgaagggaaaaaattgcgggggggaggcaacaactaaccgaccgaaggggaattggtggtgcaaaaaacccccaaagtccaatgccccccggtgggtgaagggaaaaaactgctgttgccgaaaaaaggcaaaaaggtttc

SEQ ID NO: 31619 - DNA, 569 bp, Zea mays
  Clone ID: MRT4577_128848C.1
agcgtccgccacagcgtcctgaagaaactacctcaaatttcagccggctactaacgctacgcggaaaaccctacagtttcgtaggccctcttctgtgagagtatgcgcagtcgaccgagtactaagggcacggagagagatgttgctgcctacctgcttggtgaactcactgggaatgccagcccatccgctgaggatttgactggaattctggagtcagttggctgtgaagagaacaaagaaaggatggaactgctgatgtgccaactgatcagcaaggacattaccgagctcattgacaagggcagagagaagttagcttgagtcccatgtggcggtggtggtgtgggtgcagctgcaggtgcacctgctgctggcggagctgatgctgcaaatgaagcaaagaaagaagagaaggtggaaagagaggaagaaagcgattataatatgggctacaagcttgttcaataagtagaacagtgatcacagcattgaatagggcagggaaatcaaagggaaaccagagtcaagcctaaattttaaccttaaagtatggtgaaaagtgctga

SEQ ID NO: 31620 - DNA, 548 bp, Zea mays
  unsure (1)..(548): unsure at all n locations
  Clone ID: MRT4577_128849C.1
cccggcgaccacgggggggacaccgcgggccncncggccgacccggagacanncgcgcgcaaccgggagcnggaggcganccacncccggngggcgangcngggcgcgccgggccgcgcgcncccggagagcccggccaagaacggcgccaagnccggcgaggcggcggggggcaaggccggcgcgcaganccncccggagggcgggcnggacnacccggggaaccccaaccnggcgcacgcacagagcanccnggccancngggcgngccaggnggngcccangggccncgncgagggccaccgcgncggcggcggcccgcccggggaagggcncgacaaggcgnaccccggcggcgccnncgacccgcngggccncgccgacgacccggacaccgccgcccagcncanggggaaggagcccacgaacggccgcccngccangnncnccangnncgggcgccgcgggccggccaccgncaccgcccagggccccaacgcgaaccccnncgaccacgncgccgaccccggcgcccacaacgccggggc

SEQ ID NO: 31621 - DNA, 202 bp, Zea mays
  Clone ID: MRT4577_12884C.1
aagctgcataccaggcccgcggtttcaattttctttttcagataatgcttacttctgggagctttcttatggatcctgccgctcatgacaataagtggcgtcttactgcattattacttttctagattgacagggatgggtgggggggatttccccattctcattactcactagtttggccggctgcggctgtggtttaccc

SEQ ID NO: 31622 - DNA, 224 bp, Zea mays
  Clone ID: MRT4577_128850C.1
tcctaccacgcgggcggggacacccaggggggggcgcggaaaagcaaacacaccgggacgagccaggcccgaaccgggggggagcggaaaggcagacacagaaccagccaagggcgggccccgggagccgggagggccgagccacgccagcacgaggaggacgcccgcaacaggcgcgcgacgggcacgaagacgacagaaccagaggacaaaccacgaacaag

SEQ ID NO: 31623 - DNA, 288 bp, Zea mays
  Clone ID: MRT4577_128851C.1
cggacgcgtgggctaaccgtgtttatctgcttgcatcctattggatacatgctggcgtgcaatcaaatgttaacagaagaaatgatgtgcaacaggcgaacgatgctgatcaagcacacgaacattatcctgttcggaaaatccggggtgtcagttatttatagttactaaagactctgagcccctccgtctattctaacctttacttgtgaaatgtactcctttgtacagattagagagctggacagcgaattctgcaccgagaaaacggttccttgggattatgct

SEQ ID NO: 31624 - DNA, 1142 bp, Zea mays
  Clone ID: MRT4577_128852C.1
cccggggtcgcacccacgccgtccgggaaaaaaaaaagaacaaaaaggaagacagcgaagttgtctacatcacttgacttgcgagcgaccgcggctcacgtcggctgcataaattgcttcgtagactagtaccacacagtttgcgagaaggggagaggtagaggttccgaggtagagagatagagaggaggagagggagggcgaggcggcggatccgtcactccgttcttctccgctgatctggaggaaggaggcgaggggagttgcaaatccatcaatggccactccaaccacctattcagtccgcatatcctcggagacccacaagattgaagcctgggtggtgtctgacgaagctttggccaggcaactgcaggaggaggagaacacgcgtgacgctgctgccgacaccagagaagtcgccggcaatgtacccttggagtcatcgtcaccggctgttgagtacaggcctgcacagaatgcagctcaggttgcaagggaagacaatgtggacccagataatatgtcatatgagcaactacaagcattaggggaagcagtaggaattcagtccagagggttatctgatgagctgatatcttatttggagccatttaggaacaagtgcactttcttctccaggaaaaagaacagtgaggaatgtgtgatctgcaagacaacatatagaagccggcagaaattgataagactaccctgcagccactgttatcacgcagattgcataactcgttggcttaagatcaacaaggcatgcccagtctgcaacgaggaggtgtttggatgaactgcaaggttcctggcagatgctgcggtttcatcgttacttgcttgcggcatgcttttgagaagacgttggacgcataaggtccattgtttgtgattatgttgtgagcctagtttggtgccctttgcttaagaggactggctctgcccatgcatgggtcggtctacacgtgtgctagtaactggaccaggtcgcgttttgtgatgcgtctatccatcttggttttatcacaaattgatagatctgttgtgtgggtagtttggttgccgttttctgaatataatggatggtgtttttgcccccttttgggagaagttcaagcaaagagcagttcaat

SEQ ID NO: 31625 - DNA, 868 bp, Zea mays
  unsure (1)..(868): unsure at all n locations
  Clone ID: MRT4577_128853C.1
cagcgaagttgtctacatcacttgactttcgagctaccgcggctcacgtcggcggccccggttagaaaagaaaagggaaaaaacaaagtttgcgagaaggggagaggtagaggttccgaggtagagagatagagaggaggagagggagggcgaggcggcggatccgtcactccgttcttctccgctgatctggaggaaggaggcgaggtacgcactgctatctccttccagttcgttcgagaagacggtcgttgggtgattcggcgggcgctcctgttctgtagtaaagttgtttgttttttgtctcttgtatgtttggtttcttgatcggaaacagaagtcccaaattctttcttttgcttggtcaagtgccaattgggaggcagaacggaagacagaacctccatgcgaactttagtcgcgctgatttcgatggaatcggaactgatttaggtgtattttagctctgattgttcttggcaggagtacaattttagtagcaccgtttgatggtacggttcttctgggtggtaaattgcccttcctgcgacgcgatgtcagacttcgatctctgttggaagacgctagacattgcagacataaatatttttactgcaatcatgagctcgaaatccaaatgttaatcagttcacagttcagacaatcgcttgaacatgtttaaaagctggacgaggtttcatctactcgattgaatcctcgtcttcgccgctaaatcgttggcaggggagttgcaaatccatcaatggccactccnacccacctattcagtccgcatatcctcggagacccacaagatgaaagcctgggtggtgtctgacgaagctttggccaggcaactgcaggagga

SEQ ID NO: 31626 - DNA, 281 bp, Zea mays
  Clone ID: MRT4577_128854C.1
ggtgacactatagaagagctatgacgtcgcatgcacgcgtacgtaagctcggaattcggctcgagggaatccgctgaggttcctcctgtagatcctctctcgaataccagtagctaacaggacgcgcgcgcgcacggccactgatacgcctagcttgatgagcaacggcgacctgtagcgccgatcccattgccgaaccggacatcacacctcttcctgcacgctgacccgcacgggaccgaccgacatccgagtatccaatagcccttgattggatcctg

SEQ ID NO: 31627 - DNA, 615 bp, Zea mays
  Clone ID: MRT4577_128855C.1
gtcacaacaaacatgtattggtgtgtatccatatatgaaccatgaaatcaaacctatgaactgaacaagctgagaatttcaacaaatgaaagaattgttgtcattcatcaagtagagttgacagaccaactaaccatatcctttctcaccgtgtgcattgcaaatgccacatcgtcacgtatcttgtaccatagagagagaaatttgcatgaaatcgtgtttttatatatagaaaaatgaaattttaattcctacaaactacaatagaactctttactgcaaaaagttgtgcatacacgatctatttccctaccattaagggcacacaataaattaaatgtggttttcaataacccaacgagaaatgcacatcaatgttaatcaatctaatactaaacatcaagcaaaaagtgatgtttagccatttttaggcgcaagcaaataaaaagtacctgaaggaatatatctagtatgaaattgaccctaagatgtgcaagtataaggaaatggctactacttttagctttatccaatagactatctttgaaggagtgaaatacgcaaacagtaagaatttatctagtggaaggtgcacatagttcgatcaccatttta

SEQ ID NO: 31628 - DNA, 302 bp, Zea mays
  unsure (1)..(302): unsure at all n locations
  Clone ID: MRT4577_128856C.1
cgaccacgcgtncgtaattttcttaatttagcactatgtttctttgggcaaccatccaaaactgaagtggcaggggctgttcttcttggtcggcaccacactggacgtgtcaagctatagtccctactggcgcaagctgagtagggcggcaaacgtacacatattttctactgatacttcggatttcatagtatatgtaattcttttgtttggtgctaggagggaattgtaatcatgtgtgcccgattccaaagagtggaaaacatgcaaaatgttaaataaaaaaaaaaattttcctcagt

SEQ ID NO: 31629 - DNA, 2146 bp, Zea mays
  Clone ID: MRT4577_128857C.1
cctttttcacccggcgacgtcgagcccggccgggcgggccccaaaagaggccgcattcttggtgctttctgaaccttctttactttgtcctcaaatggcctcctcgccctcttcacgtttcccttcaccataagcacaggcacctctccccccctcctgcaagctcctccctttctcggctcttggttcttgcattactctgtcagcccagaggcagagcaagtaagcaaatggttgctatggcggcgccagggcgagtggcgctcctggccgccgcactcctgttcggcgccttcttcccatccgcgttcgccacgtcctcgtaccccgcaaggcttgcgggcaggctcctgtccaccacggcgtcggcggtggccaagcagctgtggtcgctcaaatcggccgccaccaagacggcgacggcgtccgtggcggggcggtccatggtgcggtacgagggcgggtacgcggtggacacggtgttcgacggcagcaagctggggatcgagccgcacgccgcccagatcaaccgcgccggcgacctcctcctgctcgactccatcaacagcaacatctacagggtccagctgccgttgtcaccatatagcagaccaaagctccttgctggttctccagaaggtttatctggccatgttgatggaagactgcgagaagcgaggatgaaccatcctaaggggttcactgtggatgataggggcaacatttatgttgcagacgctatgaacatggcaataagaaagatcagtgacacaggggttacaaccattgctggggggaaatcaattagaggagggtacatagatgagcccagtgtcagtgatgatgcaaaattctatgttgcagacggcatgaacatggcaatacgaaaaatcagtgacacaggggttactaccattgctgggggaaaatcaattagaggagggcacatagatgggcccagtgatgatgcaaaagctggttttccactagggtttgcattgctttgtgctgctggcttctttggttatatgcttggaatgctccaacaccggcttttaggaatgccgtcaacaatcgataaacctcaagcgcctccaagacccagcattgcaagtatccctccatcataccagaagcctttaaatccttatattcgtcatccattcatcccgagagaagaaactgcaaaacaggaaaccgaagaggggttcttcaccacagctggcaaactcatgggaggggcaaaatcatctgtgggtgagatatttggtttcaagaagaagcgcctgagcagcccataccatcagcagcagcagcagcagcagcgaagagctaacccgtggccagtgcaagaaagctatgccatgacacacgatgaaccacctccagcactggacacgagagcaccaaccccgcagaagaactacagcctcatgagaaaggagcccgagaagacccactacgtccgccatgggcacccgtatttcaatagctgggacggtcactgtcacccccagcagcagccggaccagcagctgtatcaccagcagcagcagcagcacctgcagcagcacaggcagtgctctgcaggcccccagacgttttacgagcagagttgtgaggctacaaacgaggtcgtctttggcgcgggtccaggaggtggacagcaagcggcgcatggtcgagatcaaggctgtgaactacggagacacattctatgagcggtacggaatgcggtaccgcaacaatttcatcggctacaacaacaataacaactactgaacagcctgcctatttctttgacttccctgtctctctttttcctttctttttttccatcttagttacgagttatttgctttatagtatttatttaaagtggcttttctataatagtattaatagattaggtttctctataatagtatttacaagtgagcaacttctctaaaacattatttcacctttatgtcacccattcttttctttaaaaaaaaaaaaaaaaatcctccacattccctgtaacaaaaaaaaaagaaaaaaagtgggggcagcagaagctatctcctgtttttgacttgtacaacggggaaaactgggttttggaagcacatcatgattgcatattccttagactttcttatgt

SEQ ID NO: 31630 - DNA, 238 bp, Zea mays
  Clone ID: MRT4577_128858C.1
tcggcgaggcaaaagcattgggaccacagacagggcgcgcttcaagggctttttttttgagataacaagggggagaggaggcgaatgcggtcactatcacgtaagcaaaggcgaggcaaaaattcgacaggcggggcaaccccacccccaaggtggacctgggccttaactactgctgcgttcccgaggggggccttacccaacagaacattcaattgcatatatgaaggcctggaat

SEQ ID NO: 31631 - DNA, 727 bp, Zea mays
  Clone ID: MRT4577_128859C.1
ctgtgcggcgcttgacacttgcagcaaccaccgtcaagcccgaacgcctcctctccccccaaaccgacaatctcttctccaataccgacaaaatgggtggtgttaccgtcaaggacattgagtctcacactttcgtgaaggcgtacgccgctttcttgaagcgtcagggaaagctccccattccaggctgggttgacactgtcaagacaagccactccaatgagctccctccccaggacatcgactggttctacgtccgcgccgctgccattgcccgccacatctacatgcgcaagactgtcggtgtaggccgcctccgcaaggtccacggatccaccaagaaccgcggctcccgcccttcccaccacgtcgacgcttctggctccgttgaccgcaaggtcatgcaggctctcgagaagattggtgtccttgagcaggacgaggacaagggtggccgccgcatcacacagtctggccagcgtgatttggaccgtattgcgcagaccaccctcgaggccgaggaggacgacgagtagatgtttcgcacaggattgtgatgcgcgggcaaaaaaacacggctgttctaagcatttgattgcggggcggttacggatctacacggttttacggcttatggcgttgaagacatgacttcgctgggcctgcttttagcctaggacaaccaatgacactgggcttgggcctgaaaagcaacatgatacccctc

SEQ ID NO: 31632 - DNA, 1440 bp, Zea mays
  Clone ID: MRT4577_12885C.1
cattgtacccctcgaggccggccgggaagcagtcgcaccccctctctgtctctcgcatctagtctagacgttgtactgcagcggcagcgcaccacatctgaccctaccaacatggcatccgcggggacgacggcggtggtgcccgaggtggccctgcggtcgggcaacgcgaggacggcgatgccgatggtcggcatgggcacggcgtcgttccctctggtgcacgaggccgtcaaggacggcgtgctctccgccatcgaggtggggttccgccacttcgacacggcctccatgtacggcaccgagaagccgctgggcgacgccgtggccgaggcgctccggcgcgggaccctgcggtcccgggaggatctgttcgtgacgtccaagctgtggtgctcgcagaaccacccggacctcgtgctgccgtccctccgggaaacactcaagaacctgcagatggagtacgtggatctgtacctgatccactggccggtgtgcctgaaaccggggccgcccgagctcccgaccaggaaggagaacgccgtgccgctggacctcgcgggcgtgtggcgcgccatggaggagtgccagcggctgggcctcgccaaggcgatcggcgtgagcaacttcaccaccaggcacctcgacggggtcctggccgtcgccacggtcccgcccgcggtgaaccaggtggagctgaacccggcgtggcagcagcggacgctcagggcgtactgcgccgacaggggcatccacgtcgcggcctactcgccgctgggagggcagaactgggacgggcagggcagcgccgtgctggactccgaggtgctcgccgcgatagccaaggcgagggggaaaaccgtcgcgcaggtggcgttgcgatggatacatgagcagggagtgacatgcatcgtcaagagttacagcaaggagaggctgaggcagaaccttgggatattcgactgggagctgaccgacgaggagcggctcaagatcagccagatcccgcagaggaaggttgtccagactagtagcttgttctcgcaagagggtgagttcacggctgttgatccagcggaacttaatattttagaggaatagggggaaaatgacccgccacacatacactgcatcagtgttgctgcatacaaaagtgtatttcgtagaccatttgaataaggctgttggaaacggtgacatctagtgctgtttggtttcgttgccgggacggtaacatcaacagttaatgctgcaatccattaacggaacggaggggaatggatagcgctcgtttatgagtggtttcattactaaaaaaaaaaaaaaagcggacatttactaaatttcattctctaaggattagtttgagaatttccttttaaaaaaaaaaaaaaaaaaaaaaaaaaaaaaaaaaagaaaaaaaaaaaaaaaaaagcggcc

SEQ ID NO: 31633 - DNA, 721 bp, Zea mays
  Clone ID: MRT4577_128860C.1
gggatgccagatgcccagattacaccagacaaatcttgaaggcttcttgttggctctgtcgatacatattttatggtgattttgcttacattctttctggggcatgcctcccaccgatgaaaatttagtatgtgttttctcgtgctctatgcagatcgactgagtcagcatggagaagatagcagacgtatacgccccaaacttgacatgagcaggaaccagctcatcggagagataccagcagagctgggcgccatgccggtgctcagcgtccttgacctgtcgtcgaacgagctttccggtgccataccgccggcgcttgcgaacctgcgactcacctccctcaacctgtcctccaaccagcttagcggccaggttccggccggcctagccaccggggcctacgacaagagcttcctggacaaccccggcgtctgcaccgccgctgcgggagccgggtatctcgccggcgtgcgctcctgcgccgcggggtcgcaagacggaggctattccggaggcgtctttcatgcgctccgcacgggcctcctcgtcgccggcgaaggagaagcgacggagacgagaagagtacgccagacggcgtctgcgcacggatacttatacctgtttacgtagcccaaagtgttgtctcgtatctattttagagtttgtctgtcggctgcgtctccaaaatagagaaggcaacaccaacgtctctatttcg

SEQ ID NO: 31634 - DNA, 233 bp, Zea mays
  Clone ID: MRT4577_128861C.1
tttgtcgtcacacggatcgcccatgtgcatgcgagtgctgttgctctgaatggagtcaaatcctgtccgcatgcggcctatggcatcggctacaccgttgcgatgacaccaaggcaactctgactgtcgatgactgccttactcactagctgcttcgggacgctcccttcggactagcgggtacggaatctggaacgtacattcgagacgctctcgctatgctgagcgatgaa

SEQ ID NO: 31635 - DNA, 242 bp, Zea mays
  Clone ID: MRT4577_128862C.1
atctaatattgttttttttaataagcgggtgagtttatttttttttttggggagggacaaaaaggacggattaaatgtacataccgatacttaaaagaacggcatggaagagttttaaatgatcagataacaattcaaattggacactggtacaataaaaactgaggatatctttgattattttggccaaacatacaccaaatttttgacaaggaaactactttaatgtgctatttaaaaga

SEQ ID NO: 31636 - DNA, 1848 bp, Zea mays
  Clone ID: MRT4577_128863C.1
caagcagcaagtcgatcgtgagcagctagctcttccctgctcatcgtcgccagctggtccaagggaggaggaagaagagatagatggacgacgtcggcggtgctgctgctggtggtggcgattcaaagcagctcttggttgaagcagatgggaacacacgcacgcttattttgaacaggccgaaccagctgaatgtactctcctctgcaatgattaagggactcctgagctgtttcactgcttttgtgaaagatgatggagttaaattgttgattatgaagggttctggaagagcattttgtgctggaggtgatgttgttgctggtgtccagtcaataaataatggatggaaatggggcgctgatttcttccgagatcaatattttttaaactacataattgcaacatgtatcaaacctcaggtttctcttcttactggaattgtcatgggtggaggcgctggtgtttctttacatggaaaatttcgagttgccactgataacacggtttttgcaatgccagaaacatctcttggtctttttcccgatgttggggcctcatattttttggctcggcttcctgggttctatggttctctaatacctccgatctttattcaattgaaatacatgtagctatgtcattgcaacgtatatttcaatgttctgctaacactcgagggatattatgtatcatcgtatcattcttcaattttagttttataccatgtgatttattcttagcaagtgtgattcttgcacaattgatctatgcaattacatatttgatcgtggagatatattaatataaagaaatgaaaaatgataatctttcttcttttcaagttgatttattggttccattatgaggtagccatatagttggtggtaatgacaacattggatatcttgttaaataaaacattactctaacattctgcaggagagtatgttgctcttgttggtgctagattggatggtgctgaaatgcttgcatgtggtctcgcaactcattttgtcccttcaaatagaatgctattgctggaagaatcccttaaaaaggtggacacctcgaatagttttgttgtatgtagtattatcgatcaattttgtcaacagccatccctaaaacaaaaaagttccttgaataggttggaaatcatcaacaaatgcttttctaatagaacagttgaagaaattatatcctctcttgaggaagtggcctcaaattcagcaagcaaatgggttgctcagacaattcagtatctaaaaaaggcttctcctactagtctgaaaatcacattgagatcgataagagaagggagaacacaaaccgttggggagtgcttgcaacgggaatatagaatggtttgccatgtcgtacgcggtgacttcagtcgagacatttttgaaggatgcagggcaatactagtagataaagataaaaatccaaagtggatgcctccaaggttggaacaagtgcatgatgatgcagttgaagagtatttctctagggttgatgatccagagtgggaagatttggacctacctgtcatgtgttcaaatggaagaattatggagtccaagctttgaatgaagcctttattgaacaatttaatggaacctcagttgtggttaaaataacaacacatcccatgttcgaagagtctatgtacactgaatactattggtaaaataaatctaaatatgttgtgtatatccacttataccatagaaggtactcattgctatttgtgttatagggatagacaatatcggttcctagctcgatctggcttatttagctcgtgagccaccatataatatgctaccactattggttaaattg

SEQ ID NO: 31637 - DNA, 597 bp, Zea mays
  Clone ID: MRT4577_128864C.1
tcgagcggccgcccgggcaggtgctttttttttttttttttttttttttttttctttttttttttttttttttttttttttttttttttttttttttttggattaaaggttggtccccccaatcttagggaaaggaattttcgaacccccttggggaccaaattcacattggaatctggaaagggaactttttattttggggggggcccataccttatccaaaaaactttttttttggattaccaccaaaaatcaatctaaaaggggggcccccccatgatgggttgttgggaggggggtggtgggtttggcaaaacaaggtggacaaagggcaacaattggtgtaattgtaaaaggggtggggggttagccccaaaccggttggaaaaagggaacaactggtgctttggcaaaaaggaagcacgacttggtggaactaggtcgctaaaagggaggagtatttggtggtggaaataagccgggggggtcagggggggccattggttaaaaggaaaaagtttttgttgcttaaaataggcaaaaactagccggctaaaagggaaaaggtggtggtggaaaaaaccgcagggttcaagg

SEQ ID NO: 31638 - DNA, 114 bp, Zea mays
  unsure (1)..(114): unsure at all n locations
  Clone ID: MRT4577_128865C.1
cccttcgagaggtcctactcagctgtgtctccaatcccgagcaggttgggtggntgagantacgaactctttctcagnacactattcgttnccttcnaggntaantntccgnnt

SEQ ID NO: 31639 - DNA, 1108 bp, Zea mays
  unsure (1)..(1108): unsure at all n locations
  Clone ID: MRT4577_128866C.1
caacgaaatcagacgagcgaattattttatcgatccaacaaaaaatattattttgttggcttaacgtagccgataaaaaagtttgtgttttttcgtcggttcttgagacccacgaaatagtttgactttatgaagggcagttcttcgtcctcagggacgcagaatcactaccgatggacttctcttcatcttccaaaagttgcatggagatgaacgacagttgttcctcggagcatttgtcaaccttgagattgttctgctccatttggtttttcagcccttccttcctttgctcctcccctgcctcgcctctctcccctctcctcgcctccagctcctgctcggcccgctcgcgtccagctgcgcgcgcgcctgcggtggccgtgaaggacagcccgaggcccgagggacgcgtcgggtgcactgatctgggggccgcgtgtccccggtggtggggcgaggcggcgccggcttccaggaatgtgagttcccgctacacaaggggtggtgccgtggtggggcagcttgtagtggctgtttcttttgcatatgcgctttctattgttgttgtcatttcaaaggaggccatagtcttctggattttgtatgccttgttatctggaattggtgaccatagatgtcatttcgtagcatagtccgtgatgttagggatggcttcggcagcttgtcaaggagaagctttgaggtgaccctcgcaagcatttatggccttactgggcatcacaaagggaagacccagagctcatcacatgtgctcgacgactcaccttccataattcgtgaaagtcgatgggcgaatctacctcctgaactcatccgtgatatcatacggagactggaggctgatgagagcacctggccagcgcggaagcacgtcgtttgcttcgcagctgtttgtaggacatggagagaaatgtgtaaagagattgtgttgagcccggagttttgtggcaagctcaccttccctgtgtctctaaaacagcctggtcctcgagatggaaatacaatgggtccagtgttttataaaggggaataagtcaaaatccacttaccatctctacctgtgncttttagcatgtgttacttc

SEQ ID NO: 31640 - DNA, 796 bp, Zea mays
  Clone ID: MRT4577_128867C.1
attcccttccttcctttgctcctcccctgcctcgcctctctctctctctcccctctcctcgcctccagctcctgctcggcccgctcgcgtccagctgcgcgcgcgtctgcggtggccgtgaaggacagcccgagggacgcgccgggtgcactgatctgggggccgcgtgtccccggtggtggggcgaggcggcgccggcttccaggaatgtgagttcccgctacacaaggggtggggcagcttgtagtggctgtttcttttgcatatgcactttctattgttgttgtcatttcaaaggaggccatagtctcctggattttgtatgccttgttatctggaattggtgaccatagatgtcatttcgtagcatagtccgtgatgttagggatggcttcggcagcttgtcgaggagaagctttgaggtgaccctcgcaagcatttatggccttactgggcatcacaaagggaagacccagagctcatcgcatgtgctcgacgactcaccttccataattcgtgaaagtcgatgggcgaatctacctcctgaactcatccgtgatatcatacggagactggaggctgatgagagcacctggccagcgcggaagcacgtcgtttgcttcgcagctgtttgtaggacatggagagaaatgtgtaaagagattgtgttgagcccggagttttgtggcaagctcaccttccctgtgtctctaaaacagcctggtcctcgagaatggaatacaatggtccagtgttttataagaggaatagtcaaaatcacttaccatctgtacct

SEQ ID NO: 31641 - DNA, 462 bp, Zea mays
  Clone ID: MRT4577_12886C.1
taaatttcatccatcaccatcgcgctactgcacgctaaaactcaacatcatgccaggcgaacacgaaaacatcaccatgttccagttctttgaatggtacactcctgcagacaggatgcattgggtccgcctcaaggaacaggctagcctgctgagctctctcggtctatcggctatttggatcccacctcccatgaaaggatgctccgaatgggatgtaggatacgctccctacgatctctgggactttggtgagttcgaccagaagggcatggtaccaacaaagtacggcaccaaagacgagctcaaggcagccattgacgagtgtcacaagtatggcatgaagatctaccttgacgccgtgctgaaccacaaggctggtggtgacgagaccgaggtcttcaaggctgtagctgtggctgacgatgaccgcaaccgcgagattgaagagcccatgacatc

SEQ ID NO: 31642 - DNA, 805 bp, Zea mays
  Clone ID: MRT4577_128870C.1
ctggccggggccgccccctggttcctctctctgtctccaaccgtctctctcctctcctctcttccctctgctctcacccacccacgcgcagctcccaaggatcgagccgccgcgccggagcttcagccagccgcgcgaccccggcctccccgcagcgcccagaaacgcagcgaccgcgccctgcagcccgagtcgaccgcgcctaggagcttccccgcaccgagcgccagctgctcattgtccagtcccgagcgcgccacagaccgaccgcgcgacccaggcgccgaccccgcgcagtgccgtgccaggaagccgagccaccgatgcctttcgccccgcgtccgtttctcctttgttaatggagatttaactcgtccgtttctctttctccattcaagctccttgaatgccatcaatggcatgatgtcggccgacctctcatctcctccctctcctctataaaaaccgagcctcggagctctctctccctactcgagctcgccccatctctctcccactctcttgctcgccgtcgaccgaactatccgccccgttgttcgtggaaccccatcggagctccgtccgcgcagcatctcgccggagccccgcccgacgtcaagaacccttgcccgcgtgcagcagcaccgccgctcgccgtcgtgcctcgccggagttcgtccacgccgttcgtcgtcgttcgttaacccaaggttgaagacaaccccaaaacatttgaattcatttttgaaatcatgtttttgaattaatttatgggatcttgtgaattatcggtgtaatatatgag

SEQ ID NO: 31643 - DNA, 461 bp, Zea mays
  unsure (1)..(461): unsure at all n locations
  Clone ID: MRT4577_128871C.1
tcgagcacctagcagcgacctgctcgatcatcagagtaaagtgtcgccaggagtctgtctctcttggtggctggttgcaacggtcatggcgacgtcgtctcgtcagctagcccttgctactgctgcgcctgttcgtgctggagtcctgctccttcgcggcgggcagcttgcaccaggagctggacatctcgcgtccccactgtcggtgcaaggtccttgacaactggcggctgctgacactgccactggaccgcacgtccggctccgggttccagtcccggcacgagtacctgttcagccacaccgacatgcaactgcggctggtgccaagcaactccgccgtgtccggcaccgcctactacctgtcntcncatggcggcgcgcaccacaagatcaacttcctactcctagccaacgtgtccggtgtaccctacactctgctcaccaacatgttctccctc

SEQ ID NO: 31644 - DNA, 397 bp, Zea mays
  Clone ID: MRT4577_128872C.1
tcgcccacgcgtacgcttcatgatactggttctttacccagagctgatactgtccagagtcttcctctacctgttactgataggggagtgctactaccggtggcgtctgaggcattcttgacacatggacacccgcctattccacgcggagactgttcaccccgacgagcttgaccaggagcttgacacctttcccactttacggccatgatacgtcttgcggatgcggttcgacaggctgctcatcgttgccttgaggatccagaccgtggtcagtgaccttgctactcagggcgagcggttgcagtcagtgctgagctggacggacccaatgtccaccggcctgttcgttgacctatgctttgttggcgccattttgctgtacgttacacccttt

SEQ ID NO: 31645 - DNA, 430 bp, Zea mays
  Clone ID: MRT4577_128874C.1
catgctctccttgacaaattcatggaaaatttaccaaaagggagccacatagctaaagggggatggcacgatggatcacaaatgccccatctaaaaagcttaacctgaatcatcatattattggaggagagcttctagaattgtcaaaaaatgaagtgcctcatgaagatattgttttccaccgtttatatttgaacaagactggcccagttaatcctaaggcaaagcggaaggactcagttcttgatgaatgaaaagtgtgaggagcttgttgttaatatcttgacaattaattcgtaattgtctctacataaatatagaaattaggaaaattgttttagaggaggactagaccaggcgaatggcttgccatggaaacaagagcagttgcagatgacgatatactatcaacgctatgaaaatgcttact

SEQ ID NO: 31646 - DNA, 269 bp, Zea mays
  Clone ID: MRT4577_128875C.1
ccctttcttccgttgacgcgagaagcgacgcactatgcctgagagtatatctatgtgagatgaaaaaattaattacacttttggatttaattaaatcatacatgatggtctgattttaaaccataacttatgcatttttaccaattaaaaatgtagtctttgatagtcaattatatatatacggtgatgaacctttttccctaaatacgttgttaaacatgagaaaaggttgtgtgtgattgctgaaaatatttcttctatagaggaga

SEQ ID NO: 31647 - DNA, 167 bp, Zea mays
  Clone ID: MRT4577_128876C.1
caccttgatcctctactggcatgaaaatcagacagtggttatccttttcgggagggggggtctttggtccatcggccacttgccacatgttgtctttcccttggctgctggctcctgtgggtcacactgcttcttatcctgaacacttgacatgttgagggcagaat

SEQ ID NO: 31648 - DNA, 303 bp, Zea mays
  Clone ID: MRT4577_128877C.1
tagcttacaaaagaggtggatgttaaatcatattctggaacatcagagccacaaattttactactttagttgaatggaaatgaccgctggtttatccagtgctacattctgaggtagaacaaagcttccattctaatgtactctttgtgctaattgtattgccattgccaaactgcagaaataggccacattgcttgtgtggccactcataacaggcaccaggataactggactcagaaataagcctacgcagccccattgatctggagcatataagctgattggcttagcagctcccaagcc

SEQ ID NO: 31649 - DNA, 327 bp, Zea mays
  Clone ID: MRT4577_128878C.1
ggggggggcaaaagcaaaaattttttttggggcatttaaagggggccgcataacatttcgttcaagatgcccaaaactcccggggggcgttttatgtacaacactggattttaaatgtgggaacggggaagggaaccgacttttctccggacaaaatttttcaagggctttgattttggcgggaagcggggaactgcatttcggggattttttttttgggaacacaaatcggttttccttcccaaggttgcaatttgcttttgcttgcccaagaacctgtgggggccccaccgggggctaaaaaatccttccgggggttgggagggg

SEQ ID NO: 31650 - DNA, 251 bp, Zea mays
  Clone ID: MRT4577_128879C.1
tcgcagaaaactagcaatgccctgggtaggttcatctcgattccaaccactcctggattccatttgattgacccggccgatccaaatcgaatctaatcagcagttttggagttgctaagggaaaaagaatagggaggggcattgataagtgctaaaaaggtgggagctactggtcacaaaggccagcaggaattactcatgcgagacatagtgattaacagcttgaggcagcaaagatggacaaaataaga

SEQ ID NO: 31651 - DNA, 368 bp, Zea mays
  Clone ID: MRT4577_12887C.1
aaaattaggaccactgaacggggatgaaaaggttaaaatgcaagccacaaccgtttaagggggtttccaacacaaccggaccacgcttcaacgttccccgcctgaaacgaggggggatgcccaggttttgcccggcagcattttatatggggggcccccaaattttcccgacaaaaaatcataacacgggtggtacaagcgttgcacccaaaaaaccaggggccaaaacacattgcatagggtcattagacagcagcaaacacttggttcttgcttttaggcacgtaaaggcgggtttactgccccttgcttgagtcgggcttgggcgcctccctgatctttttcgcagggtcctcccagatgtcaaa

SEQ ID NO: 31652 - DNA, 716 bp, Zea mays
  unsure (1)..(716): unsure at all n locations
  Clone ID: MRT4577_128880C.1
ggctttccgggatattctcggccacctcgagttgacaagctacaaaaggcccgcgaacacaggagaggggagagcccgagagcttcccttgccggcgagatccagtccggctcacgcgatctgactttcccggagggaattagctggtctggagtgaatactgaaccgaaatgcctctgctcccgtctgttctttaatcttacgttcttcaacagttgaaatccatcccaccccaatgtttccatgttcattccagaagcaattcttgcttgattcgtggacttctttcctaagctacagcttctttccaagtagagtaccagaaccagatacccgatctcaagggatgaagatagtgactgggccatgggaattcgaccgagaaagaaagggccaggttgagatatcgggggcaggttgcccttccggtgcctgaagggcaaacaaaatgtcataccaagtcaggctgctgcgcttttcctatgaattggccttctcgcaatcccttctgttttgcctcgcctcaatctgttgatggtccttgaatgtgatcgcatcatcgcagcagatccaggttaagcagatggctgacaacagcattgagcaagcattgatagagaatcctnctaatgtgctgaaatgggagccatcagaaagagctaaacggnttcgacgatgcaggtcaactccctcagatcccaccgatcaaaacctgc

SEQ ID NO: 31653 - DNA, 335 bp, Zea mays
  Clone ID: MRT4577_128881C.1
ctcctcaattccctaatccacccatcgggccgcgcattcaaaaaaaattcctttctatattccttcccttatcacacgactactctcatccccttctctaaagagcacttcttaacaaaggtgcttcttcttctactcctacctccctctccattcaaccaataactccctttttcctaagacaccccatcactttatcactcatattattataaaaaaactcataactcatcaaaccaacattctttcaaaaagtatatttaacaatttccaaatcaaactgttaaacctcaaatggttgtcatcactcctccatatatatttatttttaactc

SEQ ID NO: 31654 - DNA, 551 bp, Zea mays
  Clone ID: MRT4577_128882C.1
ccggccgggcaacactctgcggtcgtccgtggctctttgcgtccatgcctgaaatgatatcctcatcttccttgcgagtaaaacatacattttccgccatgggtcaagacaagcaaaaacttaacatgagcaagcattggacgcacagactcttactgcgtcacgcaacgcggctacgtcctatacaatgtagagcgtattgctaagctcctaatgctgagggttcagacaggatgctgctactatgaacatgcggccctttacgtctgctggcgtgctcgatgcgacaagcgctgagcgtcacaagcgtagcaacattgatagtgctctggaggagcatgctatctccaagtctcactgcaccgacatttatgccattcaacaccgtgactaagtaaagaacatcatcactgtttcctagcatgctgtctgcgcttgccaataaaaatatctccacagtgactggcacgatgcctgctatgccctaggaatcacaatacattgagcatgctgttctttggattagtattggagtgacacagatgagtggc

SEQ ID NO: 31655 - DNA, 502 bp, Zea mays
  Clone ID: MRT4577_128884C.1
gccggccgggtccgctcgccctcgcccgcctgtttaaacttgactgtctataacttagccgccgtgtccgcaccctcgaccacccagttcgcctggatcccgcttacccacgcttctttaacgcaccttcgcggataccgtacatgcgcagtcgcgccggatggaagcgtacgtacgagcacagactagactagaccgctccgatcagctgcgcacgccggacgcagagtgcttatgcccgagagaaggacgcgtacccgccgccgggatacccgcccgcgtgatatcctccgccggcgcagggctacccatcgcacggtctaaccgccgaatgcataacctcatcaaaaggaatatactactgcaacaaacacgtacatgtagtcgccgccgccgccgccgcctcgaaggccggatagcactacgtcctctgtcatgtagggatgattgcccgccccttgttggaggtgcctattgaaagcctggttctcatatctcaagg

SEQ ID NO: 31656 - DNA, 435 bp, Zea mays
  Clone ID: MRT4577_128886C.1
cggacgcgtgggtttccaagtagagtaccagaaccagatacccgatctcaagggatgaagatagtgactgggccatgggaattagaccgagaaagaaagggccaggttgagatatcgggggcaggttgcccttccggtgcctgaagggcaaacaaaatgtcataccaagtcaggctgctgcgcttttcctatgaattggccttctcgcaatcccttctgttttgcctcgcctcaatctgttgatgcagatccaggttaagcagatggctgacaacagcattgagcaagcattgatagagaatcctcctaatgtgctgaaatggaagccatcagaaagagctaaacggtttcgacgatgcaggtcaactccctcagatcccaccgatcaaaaacctgcagaaaacggatctgtgcttaaagccaaagagttattca

SEQ ID NO: 31657 - DNA, 766 bp, Zea mays
  unsure (1)..(766): unsure at all n locations
  Clone ID: MRT4577_128887C.1
cattgggtacctcgaggccggccggggtatactcctgcggcttccagcttgctttccatcgttcgatgtcaccgccgacgcagatggcttccctcgccgttctcgtttgcctcgtctgcgcagcgctcgcctccgatgcggcggccgtccgcgtggagctcacgcgcgtacacgccgaccccagcgtgaccgcgtcccagttcgtccgcgccgccctgcaccgcgacatgcaccggcacaacgccaggaagctagccgcgtcgtcgtctgacggcacggtgtccgcgccggtctcgcccaccaccgtccccggtgagttcctgatgacgctggccatcggcacgccgccgctgccgttcctggccatcgccgacacgggcagcgacctcatctggacgcagtgcgcgccctgcagccgccagtgcttccagcagccgacgccgctgtacaacccgtccagctccaccacgttcagcgcgctcccgtgcaacagctcgctgggcctatgcgcgccggcgtgcgcgtgcatgtacaacatgacgtacggcagcgggtggacgtacgtcttccaggggaccgagacgttcacgttcgggtcgtccacgccggcggatcaggtccgcgtccccggcatcgcgttcggatgcagcaacgcgagcagcggcttcaacgcctcgtccgcgtccggcctcgtcgggctgggcagggggagcctgtcgctcgtctccagctcgnggcccccagttctcctactggctcacggcgt

SEQ ID NO: 31658 - DNA, 579 bp, Zea mays
  Clone ID: MRT4577_128888C.1
cattgggtacctcgaggccggccggggactctcgttaccatcaaggcgagaatcggcaggacgttccctgcttgcgacttgggcctctgcctcgacgacattctcgcctaaccgctttgtttacccacggcgactgaagacgggcatgcagcaacgtgctcggaagtcctgctgacggaaacgggagaccctcgctccgaacacccctccagaaaagtccaccggctgctgactcccacgtgtgcactactgcagtgcgtgtctccaatattacatggactgcgcaattttctaaaaaaagggggacaaagggaagcaactctggtatcacctggagtatctgctgttaaagcttggaccagtgtaccagtttttttgtcacgcccgcccgccgcttcttagcgatgaaagtttcagaagaggaaaggcttgccacgcatacctaggcacacagagacgaggaagggcgtaaaagctacgaaatggttcagctcatctcaaaataagtatagattcgtagacaccctcataggcctctctgttgagctgcctgctgaattcatgtgcaaggaagacaca

SEQ ID NO: 31659 - DNA, 317 bp, Zea mays
  unsure (1)..(317): unsure at all n locations
  Clone ID: MRT4577_128889C.1
gatccgngaggnggtgaccctccctcctccccttgcttcgctcgtccagccctgaccacccgnatccccgttagtnatggtagnggnagnaggnggaggggcggtgcgtgcgctgtcncagaaggagaaggacaaaccgatgatgctcgtcgtcgacttccaccaagacaccaagaactgcaaattacagatggagagatatgcctttaaccgaacaaaagacggaatctacatcatcaaacttggaaagaaatgggagaaaatgcaaattgaagtgagggttaacgttgccatcgagaacccgcaggacatcatcg

SEQ ID NO: 31660 - DNA, 653 bp, Zea mays
  Clone ID: MRT4577_12888C.1
gccggccgggttcgtgtctgcggctccccctctttctcttcccaagtcccaacccattgcctactcttcctcttcccacccatcgccgtccccgtccggccgtccctcacaaaccatctttctcctctccatcaagtgaagtcctatccctccccttccctcttccttcctccccccgcctcccttcgtcccccagttcacatcacctttgctttgctttgctttgccttgctttcgtgccgcctttcaacgcaagaagccaacaagcacaagcaagcctccagtatcagcaagacaagaacgtcgcgagagaaaccgttgatcccaacaagccaaggagaaatccggctgaggattaagctgcgagaagcgaagaaacacaggaattcgccgcccccgtcgctgaagaagaaagcagcagccaccagccatggtgcggagcaaggaggcgccgaaaaagaagcccaaggacccgctcctgacgcccccgtccaagcccaggggcggcttcctggacgagggccgcccgtggaaccgcggcggcgcggccatgtccccggcgccggcgtcggtgcccagctacatgcggggcaccagcagctctgacgccaaggccgagcgccgagggcggcctgtggagttcgttttcgagt

SEQ ID NO: 31661 - DNA, 309 bp, Zea mays
  Clone ID: MRT4577_128890C.1
tgcagctgcaccatcaactcgggcatatggctgcttcctacccccagcaacatcttccatcccatctagtatcatcaatgaactctgctgctcatgtacagtagcaacaactactaccattcaggcagctagctgatgagagccctgctgccttcatgacacaacagcagtagctgcccttctacctacacgctatgcatagcgctttcaccctattaccactgcaacaattgctgccattcaaccaacttgctatgacgaacccagctgtgcactaccaacaacccatcattgagggtgccctctatt

SEQ ID NO: 31662 - DNA, 741 bp, Zea mays
  Clone ID: MRT4577_128891C.1
agcgtggtcgcggccgaggtacatcaacaataatctagctgagtgttggaatgcatggattaaacagctgaaggatctaccattgcattgcatggttgatgccattagagagaagggggtgtgttatttgagaagaggaggagcataacaagggcactagatggggtgatcttgccagctgttgtgcaacagttgaatgctgcctccaaaggactgaaccatttgaaagtgacaaagggtatacctgaccagactgaggtgacagtgatgtatagggatcaagaagtgaggaggcatgttgtatacttagagaaaaaggaatgcacatgtaggtagtggcaggtgacaaggaagccatgcccacatgctttcgttgtaatcactacttgcagacaacctcagctagaaccctacgtggacatggctttctttgtttcaatgctaagggcagcatatgacaagggatggcctaacattactgacatgtcacaatggcctaaggtggataaagatttcaaattgcagccaccaatattcaagaggagaggtgtgggaaggcagaagaaaaacagattcttatctcctctagagaggacaagtaaggctagaagacaagttaagtgcgccaactgtggtgaaaatgaccataggaagggaagttggaaatgcctctaactggaacgaaaaagaggttaagttatgaatgtttcatcctttgtacctgcccgggcggccgctcga

SEQ ID NO: 31663 - DNA, 316 bp, Zea mays
  Clone ID: MRT4577_128892C.1
cctcttataagcagcaccaagcaatcaacaattcttccttaagagcaacatcagatatagaccgacgcgggttacagctttctttgttccggactccaagctgttagaaacatgcgagctgctaaaaccgcggacgaacacagcattaacaactgagccaaagggccctcactgtcaaaaactcagtaggggaacataaaacacgacacgaacgaatataaaccctctgctcgtaggggaacaataccgcagaccacaatctaatttggccccgccggccacaacggtaaggttcttcaattccctaaggagaaac

SEQ ID NO: 31664 - DNA, 256 bp, Zea mays
  Clone ID: MRT4577_128893C.1
ggaaaacaaattttagacccaaaatgtttccggcatcgagcctattggatgggggtatgtttaagtcgggaccaccaattttggtggagcctaaaatcccaccgggtcgggcatggttcctagggattaaactttgttggatgacataaaaggggacacctgcttttccaaaggcttttttgcattttgccgccccacatttgctttagcaaggttatcagggggcagttagcccccctcccgcgctggctggtgg

SEQ ID NO: 31665 - DNA, 420 bp, Zea mays
  Clone ID: MRT4577_128894C.1
ggaatttccacctaggcgtacggtctccctcctcgcttgcgctctgtttcggtgtttcctgtttcggtgtttcctgtcggtggtggcgacgactgggcggccgacgctgccaccgccctacgccagaatgcagtggcggaaatttgatgagttagagcttattactggtctgatactcctatacgatgtcactgaaacttccaattccgcaagggctttccttcttaagaagtgttggatggtttgaggaccggaaggttgattcagcagccaaacagcagttatccccaacgttgaaactccagacagataaggagacgtacagacctggtgattcagtcactgtgactatcgaaatctgtagcccagctagtttgaaggatgatgttgggcaggcagtgtcaggcgaggatgccccct

SEQ ID NO: 31666 - DNA, 390 bp, Zea mays
  Clone ID: MRT4577_128895C.1
aaaacaacccgatcgacaccattaagggggttgttcgttgcccttggttctcttggctctagcttggaacgccaacttcaagcatacaaaccgcggcttccgcttgcaaccaacggcggcggttcatttaccggcggcggtgcattttccaacttcggttcaactggcaacttcggtgcattttccaacggcggtccaacttgcggcggcggttcaacttccaacggcggtccatgttccggcgtcggttcatctgccggcggcaccatgccactaccctatttaaccgccccgggctcagactcatacccagacacacccatgcccgtgccaacagacgcattcaaacccgtgccagatgcagggaacctgcggcgttggcagcacccc

SEQ ID NO: 31667 - DNA, 303 bp, Zea mays
  Clone ID: MRT4577_128896C.1
ggttgtactgagaaacggactatgcacatacatatagcttccagccttcactacacaaatgggtgtcatcacagcccctgttataacaactacttacatcccatctaggctcactaaccaagaagacacattaacacaagtgaatgttcttagagcgtgatggcgaatccagggacccctaaagaaagactgggttgcaggagcttggattaacattcctcttaggaaaagattcccgccacataaaccttaccgtggaatgggaggagcatgaattcatgtaaactactggtgaacttcggg

SEQ ID NO: 31668 - DNA, 2741 bp, Zea mays
  Clone ID: MRT4577_128897C.1
ggggtaccctccgggctcggccgggactcgtctccctcgtcgcttgcgctctgtttcggtgtttcctgtttcggtgtttcctgtctctggtggcgacgactgggcggccgacgctgccaccgccctacgccaggtgaccaggtctttcgtattcgggatcttcgccggcgtcgagcacccggccattggcggaaatttgatgagttagagcttattactggtctgatactcctatacgatgtcactgaaacttccaattccgcaagggctttccttcttaagaagtgttggatggtttgaggaccggaaggttgattcagcagccaaacagcagttatccccaacgttgaaactccagacagataaggagacgtacagacctggtgattcagtcactgtgactatcgaaatctgtagcccagctagtttgaaggatgatgttgggcaggcagtgtcaggcgagcacgccccgcgtccgcccacgcgtccgcccacgcgtccgcccacgcgtccgcccacgcgtccggttcagagcggcagcctagctacacagtgaacatcatgaggttgttgcggatcttcaccagacaagctttctattttccattcccattgatggccctatgtctttttgtacctcaaaggtcactgtacagtggtctcttcgatttgagttcttcacaactccggaaggaacagcccagctaggtacgagcacccactccttgttgataaaagagagaagggtgaatgggtgctcccggtaactgtttacacacctccattgcgcagacgagctactcatgagaggaatggtagatctgtctcacctggaaatatcttcaactcttgaagtgcactgttgccgaagtatagttactttcagctggaaaggatttacagactattctgactggtacaattgcatcaaaaggattttctcgctgtaaattgttataggatttgcaatgcgatgtctatttttttaatagagaacaaatggagtgaaatacttgacttgcaccaaatggatttattggaccagttgctggattgttaagcatcctctgtggtctagaccttaccagggtctaaacaaagacgaggtgaacatatgtttctggattgttcggcaccatcactggtctctaaagtaataattggtgcagggcgaacaaaaacgtacattgcacgtgtggagctcccaaagactttgccgccatcttataggggcatcagtatccgctatttttattatgttaggaccacattatttggaaggccagttatgttgggtaatggagaccaatataaaggtcttgtgaataatgcaattcatctggaagctagagtcccattgcagatacgtgtttcccagaaaagcagcagcctactaaatgaagaatctgcctttttcggtggtcaaccgagcatattttggaagggaaaagatgaagattcagaatggagcaaagcaaatgataatgttgatctagaagaaggatatgatagttctaaagatgaagtttcatctgtttcctcatacaatccttcaaaagcacatcctgaattctccctaaggagctcgttgtcaatgcattctctgtcatcacggctctccacgagtgagctattttacaatcaagtggaacgacctaatttcccatcatacaatccaattcctcgattgtcagtgtctgcgatctcgggggaccacctcggtgctttagtggcatctcaaaggaaactaaacattttgctaccagaccatacatcgaatgggcaaagggtttctccagattctgatcactcaaaagatgatgctggactcccccttacgccaaaaaatgttgatccagctggatctgaaggctttacgacaggaagatcttataatataagaattgatgaccaagttttgcttcggttttcaccaaagaattctgactcaacctattactttggtgatatgattggtggagcacttaccttctttcacggaactggaaaacggaggtgcctcgaggtatctatagccctggaaacatctgaaacaattaatcctcgcgcattacatccttcaagaaggggctcaccaacaataaccaagctacacagtgaacatcatgaggttgttgcggatcttcaccagacaagctttctgttttccattcccattgatggccctatgtctttttgtacctcaaaggtcactgtacagtggtctcttcgatttgagttcttcacaactccggaaggaacagacccagctaggtacgagcacccactccttgttgataaaagagagaagggtgaatgggtgctcccggtaactgtttacacacctccattgcgcagacgagctactcatgagaggaatggtagatctgtctcacctggaaatatcttcaactcttgaagtgcactgttgccgaagtatagttactttcagctggaaaggatttacagactattctgactggtacaattgcatcaaaaggattttctcgctgtaaattgttataggatttgcaatgtgatgtctatttttttaatagagaacaaatggagtgaaatacttgacttgcaccaaatggatttattggaccatttgtttcatcgatttgtatcccatgagagatgcatcctggcctttggtgtttaagatgccccccagaatatagtaactgtgacacaagcggcccaattttgataaaaaaaaactacgtggttccggtcct

SEQ ID NO: 31669 - DNA, 408 bp, Zea mays
  Clone ID: MRT4577_128898C.1
acacaggtagataccacaaccctgtgcagagttcttgcagtctcatcaaggtgacaggaacgacataggacatggaggccaccctgtgcccgaagccccatttcgtggtcatcccatggccagccaccagccacatgatccccatcgtggacatcggctgcctcctcgccgcgcacggcgccgcggtcacgatcatcaccacgccctccagctcgcaactcgtccagagccgcgtggaccgcgccgggcaagcctcagcgggggtcacggtcaccgcgatcccgttcccgggcgcggaggccggcctgccggacggctgcgagaggacggaccacatcccatcgcctgacctcgtgcccaacttcttcgtcgccaccgcgcggttcggcgaggccgtggcgcggcact

SEQ ID NO: 31670 - DNA, 378 bp, Zea mays
  Clone ID: MRT4577_128899C.1
gggcaaaaaaaatggactttcttggcgggaccaaggtctcaacccttatccctaaaaatttaaaaggggcgggggccccggctgagctgggaattaaactaacctccactggccttgccctaatcaagccctaatcaagggccctggggcccaccctttgcccaaggggccgctttttccctttgatgccctggttagcacgagcccgcaagcgtttcacagcccttcgatggccggttcccccctggcggggggttgggggggggccccgggggcccccttgggaaatccggcgctgtttggggggcccctctctccctaaccccttttctggttgaagggcgtctgggccccgcctcctgcggggcgcgttccttg

SEQ ID NO: 31671 - DNA, 2441 bp, Zea mays
  unsure (1)..(2441): unsure at all n locations
  Clone ID: MRT4577_12889C.1
gtccagaaccttccgagctccgcccggccacgaacgcgncgcgcggcctagaacgttccattcncctctgggcaggcctggagaagggtcaagccggtaggagtatttatcgccgccggcagccactttcccgcgcagcaggagaagagagacgacacagcagcttttttggtttccccttccctttccccgcgcggtgatcgctgggttctccgcgagcgaggcagggcactgcgcgtcctccgcgaccgcctggtgatcgctgggggttctggacgttggcgtttcatttggttggttggtgggtggcagcagccgtggcgagatggagctgatgctgccggtgacggtgaaggaggagtggccgccggaggaggaggaggaggaggaggaggaggaggaggaggacgtggacgcggacgcggacgcggacgcggacgctccgcggccgatggaggggctgcacgaggtcgggccaccgccgttcctgaccaagacgttcgacctggtggccgacccggccaccgacgaggtcatctcctggggccgcgccggcaacagcttcgtggtctgggatccccacgtgttcgccgccgtgctgctccccaggttctttaagcacaacaacttctccagctttgtccgccagctgaacacctatgtgagtgccccaagtactctgcttgctcagttgctgtcgtgtgaatttttgtttctggttggctttgtgctcgcgcgctgctctggttctgcagttcatctcgcctcttgcattggggagtacagtagcatgagcgatcagtcgacaagtctgtctctattattacttaccgaaagaacaagtctgtatatatataagcattttgtgtgattcacaatgacttggagctgatacaatcgttgaacgcgtattgctttttctttggcggcctagcaaatacaatggcaaaaatggccaaatgttttgaatggttcagaagcagaacgacaatgggggagattgcagaaccagcatctccatgacaagatgttaaattcctctgacatgctctttgttcgccttgttactgtgtagctagatggaccaggacaagggatgaacgaagctactacagcctacgagaaagaaacaaactgcttgtttgtcctaaagataaagaagactcactcctttgatcaccactcaccaccaagcaatatactgctagtgtataccactgcccgtgcctgtaaattcggtcgcaaaacttatgtgaaacctcaagttttacataaatttgccatcttgtcttgttaattggctcagcgcctcagcgtcggcatttgtcgattcttagtgtgtgatggcttctggaaatgcagcttactgaacgctgcgcgtgttcatcgctttgcgacgtgcagggcttcagaaagatcgacccggacagctgggagttcgcgaacgaaggattcctgaggggccagaggcatcttctccggctgatcaagcgtcggaggccggcgccgccgccgccgtacctccaggcgtcgcagtcgcaggggtcgtgcctggaggtgggccggttcggggggctggacggagagatggagcggctgaggcgcgacaaaagcatcctgctggcggaggtggtgaagctgcggcaggagcagcagagcacgcgggcggacatgcgggccatggaggagcggctgcggcacgcggagcacaagcaggtgcagatgatggggttcctggcgcgggcggtgcagagcccggacttgttccagctgctggcccagcagcagggcaggcggagggagctggagggcgcggcgctgctctccgccgcctcccggaagcggaggcggcccatcggcgccgcgccggccaacggcggcttgcagcagcaggaggaggagcagcagcagggcgacgacgacgaccccaccgccacgcgggcgctgttcgcggagctggacgagcgagggaccacgtcggagctggagaacctggcgctcaacatccaggggctcggcaagcgcaggcaggacgggagcgagaagcagggtggccgcgcgcggagccagcagcagggcgggttcgagacggcggagctcaccgacgacttttgggaggagctgctgaacgaagggatgaagggcggtgccgaggctgagacgctgccgccggagaggagacgaccggcttggtacgtcgacgcgctggcgcagaagttgagctccatgagcaataacaccacggcgaagtagagatgatctcgttaattaatcctatacgactagtaacagtagcttaattgtccctccgacaggggtcagtgaattctcttagcgatagctccattgttgtagattgtagtatataggagtgggatcgtgatggttacactgtgtcattttgtgcagagtgcagacgtgtagtgtatagtattcttggt

SEQ ID NO: 31672 - DNA, 295 bp, Zea mays
  Clone ID: MRT4577_1288C.1
gggaagaacaacagcggcacgtttttttttttttttcccggagaaagatgtttcaaagccttttagacaaaccgagtgtaaaaaggggccccttttttttcatgggaacgcccgcgggggtgtcagtctcttttctgttcgagtgggccccacctccgggcccccctttcggggggctgaacgcagggggctatttttgatgctacccaagaaccgaaggcggggcccccctttgccgggaatgtggccgagccgaaaaaaggggccttagccccatcctagggggggagcgccc

SEQ ID NO: 31673 - DNA, 563 bp, Zea mays
  unsure (1)..(563): unsure at all n locations
  Clone ID: MRT4577_128900C.1
gagnatccggatctaaaacgtctctgtaaaaatctaggtatctaccaaatgtactctaagtccatagggtgaggtcttattcattttatttccaaagcaagggagttggaccaaaatgaacaaggctgaaacgggngaagaatccactgggtgaactgggattgagatgaattaaagtaaaaccaaaagaagtgtttggtttgaggaatcaattaattctagatgagatggtgtattatttcattatgggtcttttccatagattaatagaataaacttaattctcatattattactaattattagactataaggaatgaaatgatgatggatcaattcatttcatttcacaaaccaaacaaaaaaaacgaccagtaacaaggtaatggaccacaccattccttagaccaaacacgttgaaattaagtcatctcttccttcgatggtcatccgcgtacggcgtaccacagttaccaaacgaaccatgggcttgtttggctcgcgactaactgtgcacattttgtctaaggttagtcgtctaaattgaaaaactaaatttaagc

SEQ ID NO: 31674 - DNA, 598 bp, Zea mays
  Clone ID: MRT4577_128902C.1
ggaaccttcatgcatgcatctgcttttatacgaccagtcgaccatagctgtcacatttgagctgatccattttctcatgattatcatacattccatttcttgttatagctttgatctgcagtttggatttacgaacaagaactcaccagctgctgatattttcagagatacatgatgattgcatttgaacgaaccttggttcttttcggcggttttggtttcaaatagaggttttctatagtggtggttgattattctggaggcaagggaaggtcatctgtacactcatggagccttttccctcgtaacaatagcgatgcgagttttttaagtcagctgtaattttatagttatatgggatttgcacgattatggtgcttctacttgagtacttgacactcgtttgctagctgtgttttcataaaagaaactgaatatcagctagactgacgggtgagagaaaaggactcatgctccgctgcaaaaatgaccctcattgttgcttcacgttaatagcttcttttgcacgtggcaaatagctggcatgtagcaggatattttcttttcaaatatttggggtacctgcccccgtttttcc

SEQ ID NO: 31675 - DNA, 290 bp, Zea mays
  Clone ID: MRT4577_128903C.1
acagaaaccttttaaatgaaggagccatcaaacgtcgggggccatataagggaaaacataccatcaggttattattcggatgccaaaaccaacccaaggaagcgcaaaacccccataagatggacaactcaaaggctaaattcacagaaggttcaacaaaaaaaaaaaaacaatcagagcccttttttccaacaaacccaaaattaccacaaactttaaagcctggacacaaaaaatgaaaaattatatcaggattactttatcaaaagtttgctaaacaagcctcctta

SEQ ID NO: 31676 - DNA, 537 bp, Zea mays
  unsure (1)..(537): unsure at all n locations
  Clone ID: MRT4577_128904C.1
agaaaagtattatcatgcgaagaaattttcttttccgagattcaattcttcttcaaacatgtttggacaaaattaggggtaattagcaggcagcgacaagcaagctcagaagagccactagttcttttcctataaccggaggggggccacaagttctctacacaatctcagaacaatttctcttccacattttgggagcgaattagcgagtacatccgagaaccattcgtcgcgcgttgtagctccaccttccaccatcccaataggatagaatttcaccgagataccgggttcagccatggatgagctcggagcacttggccttgatccagcggaaccccctgcggaacgatgccttgnctttgccctccaccgagtnggccttgtagctcgccacccgccgccgcctnttcatctccgggtcgctgaagcaccacgccgaccccgtcccttcgttgccgccgctcctggtggtttccggcggcgggggcggcggggacctgtcgggcggtttgtcgacgatgttgatgcgccggt

SEQ ID NO: 31677 - DNA, 152 bp, Zea mays
  Clone ID: MRT4577_128905C.1
tccacgcatgcggtctggtaattgtaatgagtactttctaaatcccttaacgagtatccatggaagacgcatgtctgatgccagcagccacaggaaaaatagttactatagcgtatacttaacttgtagcatttaagaagctcaaagatgca

SEQ ID NO: 31678 - DNA, 546 bp, Zea mays
  Clone ID: MRT4577_128906C.1
atttctatttttttgcgccttcgcgctaacagaggtgcttggtacatacgtagatccatacaaacatcaatcgtaggtatacatactccaacgtctatgataccttaggtgtggagttggtatagagagtcttccagtatgtatgcgtatcatgcacgtaccatactgattgcacaaggatccgtatatccggactgtacgtaccttaattattaggacaagatgagcttccatcaggcgagcctgatctgcccaatggtaccagtgagcgggccggaggttacacatcttcaccattgacagctcgaaggagctattaaacggggacgagctggacacaaaggttctgaccgtgctgaccgctctgacactggagaacaggttctggatcgagtgcattagccccttctgcgacagcagggtcttgtagtaggcgatgtcaaacacagtcggggacataggagacaaaggctccaggctgactttcgcacaacatggggtatttggactagagatacgtcccaaatgacctactgatgttccagt

SEQ ID NO: 31679 - DNA, 284 bp, Zea mays
  Clone ID: MRT4577_128907C.1
gattatggaactgatccagccatcacgtctcttcttaatactctggatatcttcctgctgcctggcaccaatcccgatggatatgtgttctcccaaaccaccaatcgaatgtggagaaagacccgttctaaaaggtcaggaagcggctgtgtcggtgtggatcctaatcggaactgggatgcaaatttcggaggacctggagccagtatcagcccttgctctgactcataccacggacgcaagcccaactctgaagttgaagtggaatccatagtggacttcat

SEQ ID NO: 31680 - DNA, 488 bp, Zea mays
  Clone ID: MRT4577_128908C.1
atgcgttcgttcatgtgttcggtgaagcggttttgggtgacagggaaggacatgatcgtgcggtggtgcgccagagaagcaacactggctcgccaagaagaacaccaagcgcatgatgagagctcccagatgctatggaagacagcttcagcgggggcgatggcagaaaggccgaggcgggagaggccaagtcctgccaagccacacccggacccgagctacacggcccgagagaaaatgaagcggagcacggcgtgcaaaggggagggccgggtcggggtggcgcgcttgatgaaattggcgaggaccagggactagggacaaccgggggaccccggcggtaagagtgggtgtcctgttcgagcatcagcaccgagcggccgaccgggagctccaagagagagagacgcctaagaaccgcatctgcgggaggggcccgtgaagacactgaagcgaagcgaccagaaaagacaacaaactgcgaaccg

SEQ ID NO: 31681 - DNA, 309 bp, Zea mays
  Clone ID: MRT4577_128909C.1
aaaaaaaaaggggggcttatttttaacaaaagaggtagcgcttttggggctccatgcttatatacataaaaatatgtggcgctgggggggctccccccttaaaatttagcgcttttgaacccccaggggtatatacataaaaagatgtagcgctggccctatcgttgtttttcgaacccgaaaatttggattttttcctttaggcaagatcttttaaaggctaccactttacttgggcttcttaggctatcaggcatcattttttgcttttggctggggagggggcacctttgatttttttgaattggg

SEQ ID NO: 31682 - DNA, 398 bp, Zea mays
  Clone ID: MRT4577_12890C.1
cgtagtaggcacccagacttaatctcctaacataagtcgagcaatctttttgctgtaaagccgtatattaaggcggtctcatacagcggcctggtgttactacttactcagattcaagagctttgtctccacatcaagaacctattttgttcaaccttggttggctttgcgtaatatttagctattagatgtgcatgattattatcaacaaggatcaatgatagtcttctgatcacattaatgctgaaagataacatacacttgtacgcatcctataacaaagtgaaaagaaccctgcacataatcgaccgactataccatatcatcataaacaccaaacaacgcaacgtgactgtgttgcggcttgctctatcccgataccatcatcatgaagctca

SEQ ID NO: 31683 - DNA, 777 bp, Zea mays
  Clone ID: MRT4577_128910C.1
gccggcagggtcgggaattgtcatcacaaccactctcttcgactctttcatccatctcaataaagtctttcagactcctcaatcacctcttttttaaccaaccaccccaaaccacccaaccttcaaaatgactggcggcggaaagtctggcggcaaggcctctggttccaagaacgcgcaatcgcgatcttccaaggctggtctcgcgttccctgttggtcgtgtccaccgtcttctccgaaagggcaactacgctcagcgtgttggtgccggtgctcccgtttacctcgctgccgttctcgagtacctcgctgccgaaatcctcgagttggctggtaacgctgcccgtgacaacaagaagactcgtatcatcccccgtcatctccagctcgccatccgaaacgatgaggagttgaacaagcttctgggtcacgtcaccattgcccagggtggtgtccttcccaacatccaccagaaccttctgcccaagaagacgggtaagactggcaagaacgctagccaggagctgtaaatggttcatttggttcttgtttttccatgcgatggctggttgtttgggttgtcatgacaaaggggtcacggttcaagggttcatacggttgtttttcatcagtttattcgcgcgttagggttgtacaataatcccccacggctatggtcatgaaataagaatacttcaaagatctaaaaaaaaaaaaaaaattttaataataatattattattaaaggtaaaaaaaaaaaaaaaaaaggccccta

SEQ ID NO: 31684 - DNA, 1216 bp, Zea mays
  unsure (1)..(1216): unsure at all n locations
  Clone ID: MRT4577_128911C.1
gccgttcggcacgagatcccttccttcactggctcactgcggtcccggcaaaagtcagtcaactcagccaacaagcgctgctgctcgggcacgggtggtttgggaggccggacgcaacgtcgggatgcagtcgctgcaggacaaggcgtcggagtggagcggggtggcggccgccgatgcctttgccatcgacgacgtcaacatattcgagtccctcggcggcactccgcagccattcgtcgacctctccaccaatttctacaccagggtttatgaggacgaagaggagtggtttcgggagatattcggggggtcgaagaaggaggatgccatccagaaccagtatgagttcctgatccagcgcatgggcggcccgcctctattctcccagaggagaggacaccctgcccttataggacgacaccgaccattcttggttacccaccgagctgcagagcggtggctacaccacatgcaacaagctttggacgcaactgaaagcatagatgtggactcaaaaacgaaaatgatgaacttctttaggcacactgcttacttccttgttgctggcaatgagatgacaaggcaacagggccatggagtagcctgcaaacatgcaacaagtaaaccagctgagtaaccattttagccgtggagctggtaaccattggaataattactgataagccttttatccagtgtgcctttatagcattccgtatacaatggagttgaaacaacctccacattcaaagaaacaatggcactgactctttgtaggctttatagccattcttgagcagagagtgtactcaaagtggatagttgtagcttctgccaatatgtttatccttcttcgtctcttgtgctcaagagttattcacagcagtttttcaaatttgacctcaccctagcaaggttaccacaccacatgttaaccatgccacacttatttaaggtcatatttgtttaattttcataagtttgggagccaaaaaaaaaattgcaaaattaggtcgctgccgagtagagcctagctggctggcagggacatgcgngaaaacttatttggttcattgaatcaaaaagatcaggctgagtggagcgtttgtttgtttggttgtactaggatatgttgaatcaaactgaaagaggaaacaatcactaagataatttttattttgcctgaatcgattgtataatacatattttcacc

SEQ ID NO: 31685 - DNA, 200 bp, Zea mays
  Clone ID: MRT4577_128912C.1
ccgccccggaggtaccggggggacccacgctcttctgacacggagcaccggaaagacccttgtgagatcacaggggagaacgccggtacccaacacacagagagcatagcatctaggggaaagaaaggaactggaaggagcgagcggagagggcaacgaacaacgcggacccgcgagggccaaacaccagcacagaagcg

SEQ ID NO: 31686 - DNA, 650 bp, Zea mays
  Clone ID: MRT4577_128913C.1
tgggtccctcgaggccggccgggccgggagcattcgttgacctctccaccaatttctacaccagggtttatggggacgaagaggagcggtttcgggagatattcggggggtcgaagaaggaggatgccatccagaaccagtatgagttcctgatccagcgcatgggcggcccgcctctattctcccagaggagagatggtctgcccaaaatgattgaagaaacgagtatcttcatgacaccctgcccttataggacgacaccgaccattcttggttacccaccgagctgcagagcggtggctacaccacatgcaacaagctttggacgcaactgaaagcatagatgtgggctcaaaaacgaaaatgatgaacttctttaggcacactgcttacttccttgttgctggcaatgagatgacaaggcaacagggccatggagtagcctgcaaacatgcaacaagtaaaccagctgagtaaccattttagccgtggagctggtaaccatcggaataattactgataagccttttatccagtgtgcctttatagcattccgtatacaatggagttgaaacaacctccacattcaaagaaacaatggtactgactctttgtaggctttatagccattcttgagcagaaaatgtact

SEQ ID NO: 31687 - DNA, 128 bp, Zea mays
  Clone ID: MRT4577_128914C.1
taacttctttccgtccgacgtgccagcggtacatgctagcgctgccactgatggacgaggcggatctcttccgcccccaaacgatcgatctaacgcatggcactaccagctagctccaaggggcgggc

SEQ ID NO: 31688 - DNA, 521 bp, Zea mays
  unsure (1)..(521): unsure at all n locations
  Clone ID: MRT4577_128915C.1
ggatgcgcttgcagtagggggttagaaacgtcacgtctcccagatctaactccccccgactcacgaatcccagagagcctccatggcgacgcaccgccactgcctcccactcctcctcgtggccgccgccctcgccctcgccgccgtccctgctcgcgcggcgctgggcggcggtcgcggccctgctctggggggctgggacccgctcgcgggggggggggccgcgcgcgccnggagacgggtccggaggggtctgctgcgggggcccatggcgctcatcaggaagctgcgccaggcgaaaaaggatgctcctgctggtgagaagccagagccagtgaggacacatcgccgtgccatgaccattgcccgggggaggattggaagctgtgttggggtttacgacgccaagaccttcgaccaggttgagatcgggcctgggatgatgggccagtaccttgcggggttgtccatgggctataggccggcgctggatggaggggccggccttggggtgccgcgct

SEQ ID NO: 31689 - DNA, 139 bp, Zea mays
  Clone ID: MRT4577_128916C.1
gggcactcgcacggacgagcgaggcagccccgcaggtcgtagccacaacccaagcgcagggatctggctccgctccgaataagctcccgccctgcctccgccttccattccgccgcgcggcgctgacgagagccgacga

SEQ ID NO: 31690 - DNA, 422 bp, Zea mays
  unsure (1)..(422): unsure at all n locations
  Clone ID: MRT4577_128917C.1
cgggtcgaccatgcgtccgcccacgcctccgaccggtttccaatcggttcgtctcaaaattctcaccaagctcttgagagatccaagaagccatctctacgaaggtgtacggtggctgtcgtcatgggcgacgacgacggcgcgaaggctgcgacgggcgccaagcagatggtgcggctgcgtttttgctgcacaagtggcagcacctgatggcgctggcggatcagaagcagcagcgggaggaggaggaggatgaccacgccgtcggcggcggcgtgccggaggaggcagtggcgccggcgatcccgccgctcgtggtgcggcgtctgcggcgcacggagacgggggaatccgtgtcggacgacgagagctgcggncacagnccggagccggcgccgncgncggcggacgttccccggggc

SEQ ID NO: 31691 - DNA, 108 bp, Zea mays
  Clone ID: MRT4577_128918C.1
atcatagagaatggagtttttagccaccacaaaggctttaaactccattctctatgatatgtccatttaacaagagagaatggagtttaaagcctttgtggtggctta

SEQ ID NO: 31692 - DNA, 403 bp, Zea mays
  Clone ID: MRT4577_128919C.1
tgccacctcaacccaggaacagagcgaggcgacccctcggcacctcttctccagggggggtgaatggcaaccggtgcaggggatcttatcttgcatgttttgaggaagaacaactccttccttgtgaagcggttcggcaacggcaatgccatggtgcatttcaccaaggaggcgaacaacctctacaacatccactccttcaaacactgggggttggcgaacaagaagactgtgacgatccagccagctggtaaggactcggctgggggtctcactactaccaagaccaagaaggagaacgcacctgggaagctcactcacaagtctgggatgcgcaaggagttccagaagatggccatggctgggaaaaaccaggtttgtgacatctactacagggctgttc

SEQ ID NO: 31693 - DNA, 406 bp, Zea mays
  Clone ID: MRT4577_12891C.1
tcgcgatctaggtggcatgtaaggtcgtcgacagacctgaaggggatcatgttatattatcagaaacattcaagggcattgatctacctaatgtggtaactgagtcagtaatcaacagcaaacatgacatgccaaataatggacagtactatttacatccaaaagctacttttggacaagatctgtgtcttggcagctataagattgttggagaaaatggggaagttccactatgcagctcaaccactgcgactacaactccagaactaactgtaaacacagagacaaagcatgagtttcatcaagctgtgtatcaggaaccatcgaattcattcaatagcagtgctgaagtttttggagatccactagctcccgactccagagatgatgcaccgtcagtcatctc

SEQ ID NO: 31694 - DNA, 492 bp, Zea mays
  Clone ID: MRT4577_128920C.1
gccaccgcgtccgggagcgagtccgtcctcccggccgtgctttgagtgcttagtacagcatctagcaatgcgtgccaacatgttcgcgagccacccggtggagcacccggtggacgtgcatgcgcccgagcatccggtgcaggacgcgctgcacgaacgacctgatgaaggacctggccactctgccgagggacgcccctaggcctcctgctgctcctcttgcaactcctcttggtagccatcttgctggccatcatgtacttcaccagcgacttcgccagtggctacttcttctgatacttaattacaacaaccgtgttgaaatgtacgtggagccttacggtaattattgcgcacatatatgagctgcttgtaaaacatcgtttaccaaatactctgtctgttactctatattgcattggagacagagtacgcaaaatattgatcttgctcttcatggtgctgtaaagaatcttttaagggctagtttgg

SEQ ID NO: 31695 - DNA, 338 bp, Zea mays
  Clone ID: MRT4577_128921C.1
cctatcccgaccccctgccgctccttgtctactccaacgccttcttcacctgccctgcgtacttccgcttcatccacgaggaccttcacccatggcgcgccgttgtgggctttacccgctccatgttctatcgttctcgcgctcattacaacttcctgcttttctgtcatttgtgtcctttcttattattgtgcatttttgttttctttttttttgttttacttttcccattgttgttatttttatattttttttttattttgttgtttttcttttttttttattttatttttatattttttttatgtttttttttttatttgttttctttctttttt

SEQ ID NO: 31696 - DNA, 571 bp, Zea mays
  unsure (1)..(571): unsure at all n locations
  Clone ID: MRT4577_128922C.1
gttctagnatcgcgacggccgcccttttttttttttttttggtcaaaactagtacaaaatccgaattgcattcccagtatagacttacagcgagcaggattaattaattgaattgcaagctaagagcacatagtcctaaacaacgcgtaaatacaaatgaggttgaagcataaatatccatgcatgcacgatgaacaagtcatcaaacaaccttgacatctagctagctagagaggcagaacgttatggaatcaattgactttgcatattcttccaagttccaactgaccccattagtgagcactcagcactgagggaagtcaggcggcggtggaggaagtgccgtctctggagttggcccgtcctgcacctcgaacgccattgccaaccctatcggcagatgagcatcgaagtggcaatgcaagatccacattcctgggttgttggcaacgaagcgaatgacagcccatccacccgtcggcacggcaagggtgttcctctggagcgggttgatgaggttgtactgcttctcggcggtttcccgtcgggagtttccgaacccctgcgccag

SEQ ID NO: 31697 - DNA, 279 bp, Zea mays
  Clone ID: MRT4577_128923C.1
ggcctctgagttttgtctattgcaactagggatggagcgcccaataaatgagatgtttttaaactggttttccaaaccaggttttaagcttgtcttttaaaaacccaaaattttaaaacaagggggtgttttaaaataacacttggatttgggcagggaaacccttttgtttcgtttaaaaaaaggtttttcactttccccaagaccctttaagggggtaaattttaggggggacccccttaaccccccgttaaaggaaaattttgggtttggcccccc

SEQ ID NO: 31698 - DNA, 448 bp, Zea mays
  Clone ID: MRT4577_128924C.1
ggaaaaaaaaaaaagaaaggtttttctttttggggaaaaaaacccattttacccaagggtccagggaatacaagctccgcacgggtaagggggttaaatttgcccgaaaagcattgggcggcagatgggaaaaaaaccgctttaggggggcaggcccccaggaaattttttctttggaaaccccgggggggttggggggggtgaaacccccccctggggcagttgttgggactggggcagctgcaacccaaaaagggaaaaatactggaaaacccccacccccagccggtttggacccccaaaaagccgaagaaaaaaacccccccattaaaaataaggtgggccacatatcacgggaacaaaccgggggggcgcccttgggggaaaaaatagggtcctactcgccggcccccaaaaaagctgccaaccctggccgtaaaggggcccc

SEQ ID NO: 31699 - DNA, 627 bp, Zea mays
  Clone ID: MRT4577_128925C.1
atggtgaaatccttcgtcatggcagtaaagaatgttgcacaaacttggtactcctctcttcggccaggaacaatcacatcatggcagaagctgaaggacatgctgatcaccagtttccaagggtttcagacaaaaccagttactgcacaagccttgttccagtgcacacaagaccacgaagaatacctccaggcgaagccccctcagacgctggagaagctgcttcagaaaatggatgagtacattcgggccgacaatgatttctgccaaagaagcgaggaagcttataggttttctgagatgactaggggcttcggaggaagaatccaccctaggcatgtcagatcaatccacagctccagccagagtgaggacagaggcagccaatttcaaaggccacagcatagctcacagtcttcagggcagcagcaaagctccttcaggccaccagctccaaggggcagaggcggcaggggcttcagaggaagatatggggatcagcccatgaaaatctatttcttattctgtggtgaagacaagagccacactacaagaacgtgtcaggttaccattcagaagcaaaaagagattgctgaagcagaagcccgacagaaccagccgaagtag

SEQ ID NO: 31700 - DNA, 507 bp, Zea mays
  unsure (1)..(507): unsure at all n locations
  Clone ID: MRT4577_128926C.1
aaaacaaactctgtatgaaacactggcatgttactcaacgagaacacgagcgcggccaaattactattaaataaaaaaaaacagtgctgcttgaaacactggcatgttactcagcgaaacacgagcgggccagcatttctattaaataaaaaaaaacatctgtatgaaacactgtcatgttactcaacgaaacacgagcggcccaacatttctattaaataaaaaaaaacatctgtatgaaacactgtcatgttactcaacgaaacacgagcggcccaacatttctattaaataaaaaaaaacatctgtatgaaacactgtcatgttactcaacgaaacacgagcggcccaacatttctattaaataaaaaaaaacatctgtatgaaacactgtcatgttactcaacgaaacacgagcggcccaacatttctattaaataaaaaaaaacatctgtatgaaacactgtcatgttactcaacgaaacacgagcggnccacatttctatt

SEQ ID NO: 31701 - DNA, 688 bp, Zea mays
  unsure (1)..(688): unsure at all n locations
  Clone ID: MRT4577_128927C.1
tggacgcctgcaggttccggtccggaattcccgggtcgacccacgcgtccggtttgcggtggagagcatccggaagaagcgcgtgcggaagggcaaagttgaatatctggtgaagtggaaaggatggccccccaagtatagcacctgggagccagaggagcacatcttggaccctcgccttgtcatggcctacgaggagaaggaggagagagaccgagcctcagggtataggaagagaggtccgaaacccaggcggcttctgctgcaggagtcagcagccccagacgttgtgcagacccccggagactgggagcctatggagcaggcccctgaagaggaggcagaagcagacctgaccaatgggccgcctccctggacacccacgctcccctcaagtgaagttaccgtgactgacatcaccgccaactccgtcaccgtcaccttccgcgaggctcaagccgccgagggcttcttccgagaccgcaacgagaagctgtgaatagcggcttcccctcttaaaactgtgcttcttggggcttgggtgaggatttccagagacaggaagggctgggagcagggtaaatatttttattttttaaaaaaagcagaatcacggngaagaccccagcacccgcccttgctccccgatggttgtttacaaagaggcctcanaacngggtgtgggggg

SEQ ID NO: 31702 - DNA, 414 bp, Zea mays
  unsure (1)..(414): unsure at all n locations
  Clone ID: MRT4577_128928C.1
gaaaaaatctttttttttatttaattttttcacttacccatagaaccggaaaattatttttactggggcaaccctaccggtttcaaattaacagagcgggggatcaccccttccggggggggaaaaggggctttcttattgcttggttccaatttttacggggttacaaaaaatttccttttccaggggaagggtttgaggtcttaacttccacgttaaagtctcagggccctgtggttttttgaaaaggaactttggttccaagcccattccggggaggtttgtaacctagcttcccaaaagaatccttttttagacattttccncnggttggaggaatataaaggtttccctgtcggcgcgaaggtaaattttttatcggacccctttgggggttccacgccaaagctttcc

SEQ ID NO: 31703 - DNA, 654 bp, Zea mays
  unsure (1)..(654): unsure at all n locations
  Clone ID: MRT4577_128929C.1
cctcgagccggcaggccgggaactaggaactactccgtctcacgcctctcctgtcccctctcgccgctctcgccccgcctctgcctccgcctccgcctcctccatcgcacccagctttcctccccaccccaccgccactccagtatttccaagacaacaatcatgggatccctacaagcttcttggtgttgatcaagatgcatctgaagaagaggtccggagtgcacggaattttcttctaaaacaatacgccggatatgaagaaagtgaagaggccattgaaggtgcttatgacaagataataatgaatagctacacagaccgtaagaaatccaaattcaatctgaaaagcaagctaaaagagcaagttgaaggatccccatcatggcttaaggcactgtttggatattttgaggtgccatcactagagatcatttcaaggagatttgccttttttgcgttctttgccgggtggagcattgcaacttctgctgagactgngcctgcctttcagcttgcgatgtcactcgcctcatgcatatacttcctcaatgagaagatgaagaatcttgtcagggcgtccaccacagggttcggaatctttgtgggtggctggatcttgggttctcttcttgttcagtgatcccagctttc

SEQ ID NO: 31704 - DNA, 213 bp, Zea mays
  Clone ID: MRT4577_12892C.1
ctaattctagcgatgcctaggcgagagataggaattcttcgtgacatgacgaaaatttcccctttttgaattcttctttagtatatgaagcaaaaagaacgaaatgatggctaaggattgtattctttaattatttctgtcgggtctattacttaatttacggattccacaaaatttgtattctatccgattggtttgtctcgattatttcga

SEQ ID NO: 31705 - DNA, 425 bp, Zea mays
  Clone ID: MRT4577_128930C.1
gttataatgccggcaggggggcccacttgacactcaaaaggactgaaaaagctggtagggtggttaacaggatcccaggactggtagatgttgtgaccacaaaaattgtagcttgggagacagaacgaagaaaggagttcacatatgatggtgtccacctgcggtctatgcttgtagactacataatcattctccatgagtgagagctatagaataagaagcacagggatcagaagaagatccaggatcaactgaaagctgagcacgaagcgctgtatggatgaaaaccaagtacatctaagactgaaagtgcgaacaaagtgcctagacaattcatgggtggtgcgaaccgaagactgtctattggtggaatcacaacgcaggcccccaaaactgatataatgcacttgaagacagcttgcgct

SEQ ID NO: 31706 - DNA, 1257 bp, Zea mays
  Clone ID: MRT4577_128931C.1
tcccttacctcgacccctttctcgattctccgtctcgtcatcctatccgatcccaactaggcaactactccgtctcacgcctctcctgtcccctctcgccgctctcgccccgcctctgcctccgcctcctccatcgcacccagctttcctccccaccccaccaccactcctaccccgccacgtcgtgtagtcgcggcggcggatatgcaggccgccgccgccttcaaccaggcagccttcaccgcccgctcgctgcatcgccccccgaggcccctccacctagctgttgcggaggatgcttttgcggggataagaggcgcgccttttacacggccccggtgctgcgggagcctctctgtcggcgtcggcagctacaacagcgagcacactccagtatttccaagacaacaatcatgggatccctacaagcttcttggtgttgatcaagatgcatctgaagaagaggtccggagtgcacggaattttcttctaaaacaatacgccggatatgaagaaagtgaagaggccattgaaggtgcttatgacaagataataatgaatagctacacagaccgtaagaaatccaaattcaatctgaaaagcaagctaaaagagcaagttgaaggatccccatcatggcttaaggcactgcttggatattttgaggtgccatcactagagatcatttcaaggagatttgccttttttgcgttctttgccgggtggagcattgcaacttctgctgagactgggcctgcctttcagcttgcgatgtcactcgcctcatgcatatacttcctcaatgagaagatgaagaatcttgtcagggcgtccaccacagggcttggaatctttgtgggtggctggatcttgggttctcttcttgctccagtgatcccagctttcgtcgtcccgcctacatggtcccttgagctccttacttcgctgacagcttatgctttcatgttcgtgggttgcactttcctcaagtgaaacttagcagcagttcaccaagtggaaattcctgcggtcatcacgaaggaaattgctcttgctaacatctccacagcagatcccaacttactgataagcggcctgcttcacaatttttttttgtccgagagagtatgatgatctttacgttattgttgttgttgttacatgtataatataacattttagcaaccagacaatttcgatggatattgaaaagggatacacgttggattcttccaaaaaaaaaaaaaaaaagcggcc

SEQ ID NO: 31707 - DNA, 208 bp, Zea mays
  Clone ID: MRT4577_128932C.1
accggaactgaaggggcggctcggcctcggccttttttttttttttttttactgaataatttaatcttttttttaacatttatggtttcttttttccagggtgggtctctttaaatgaaggggggggcccctaaatagaacatacacatttgcatttaccaagtgtacaaattgttgatggtttattaaaccaaaccattgcttttcc

SEQ ID NO: 31708 - DNA, 202 bp, Zea mays
  Clone ID: MRT4577_128933C.1
tatgcttaggcttggcttcttcacagtgtatcaggtaagaatacaataaacaagactttacatgctgcgtcaccgacaatacgacgaatagtaagcgaggtcatatatataaaaatagccagttaatgaatgttacgaccattacgatacctaaaaagcagaagctagtgcaggggtggtgaagataaagtttattcttaca

SEQ ID NO: 31709 - DNA, 287 bp, Zea mays
  unsure (1)..(287): unsure at all n locations
  Clone ID: MRT4577_128934C.1
gctctccagtaattccataatatcaacagtataatctcccccaacaagatccacaacattgagagataaaaaccggtacaaaaagatcggatgaattctattgaatgctcaaagatacaaaaattggatatcaacaatagaactcccccacgcgtccgcccacgcgtccgcccacgcgtccgcccacgcgtccgactagttntagatcgngagcggncgntngngntntngnnctngtnggccgcgtgggcggncgcgtgggcggncgcgtgggcggtcgcgtgggg

SEQ ID NO: 31710 - DNA, 241 bp, Zea mays
  unsure (1)..(241): unsure at all n locations
  Clone ID: MRT4577_128935C.1
acacaacaccaacaactaacacaattangaaaaaagctanattccctaccagtccatacatccaccaccaaaaaactcctgtaaactatattaataaactccacttatccaacattgacattgtcataaacaactaattacacagatccatttgtacttccaatacctccttatgaaaggaaaaaaacagctccagcgaaagttcaacaatcataaataaatcgtggaatcaatgaccaaa

SEQ ID NO: 31711 - DNA, 1181 bp, Zea mays
  Clone ID: MRT4577_128936C.1
cagctattctcctatccaagcccttctcgctcaatggagcaggtacgccccctccatctccgcctcaaggtccatcgaggtcgagcggtggaggtcccacttcctcgtcgctgaaccctgcagaggtcgccaagttcgcctccatcgccgagacctggtgggattctagtggcccattcaaacctttgcatgtgatgaatccaacccgactgtcttttatccgctccactctctgtagacatttcaggagggatccaaattcatctaagccacttgaaggtctcaaagttattgatgttggatgtggaggtggcattctgtcagagcctcttgctcgaatgggtgctacggttactgcaattgatgctgttgacaagaatataaagattgcaagtattcatgcggcatctgatccaacaactgcttctattgagtattgttgtgcaacagctgagggactggtaaaagagaaaaggctgtttgatgctgtaatttctcttgaggtgattgagcatgtcgccaatcctttggagttctcgggcaacctctcttctttatctctttcttaagtgttgattatctgttccaccactttgcctttgtccaagtctactctgcattctttgaactataaccaaagacactagcaaataatgttagtccaaatggttatgatgaaacaccaaaactttaaatatcaatgaacatcggaacatcaacgcctattagttcagctcggaacattgcacatgctattactaattagtttaatagattttacaaatatggcttaatataatgtaagtaattgtttgaaggtaacattttatcatgatgtttgtgcaatccctttcgggtgttttgagtgcaattatagactgtaagaagtgcttctttgttctgtgatcaatctggaaaagggtgttaaaataattctatcttctggattgcagcctcttgctcgaatgggtgctacggttactgcaattgatgctgttgacaagaatataaagattgcaagtattcatgcggcatctgatccaacaactgcttctattgagtattgttgtgcaacagctgagggactggtaaaagagaaaagctgtttgatgctgtaatttctcttgaggtgattgagcatgtcgccaatcctttggagttctgtgaaatccctctcgctt

SEQ ID NO: 31712 - DNA, 628 bp, Zea mays
  unsure (1)..(628): unsure at all n locations
  Clone ID: MRT4577_128937C.1
ctgcaacctgcatttcctctccctctccctctccctctcggctcctctgcagcaccgccggccacgtcctcgaggaccacactggaggtggatcggcgagctcatgaagatatgctagtcctcttgctgatcctagagcaatcctgagcctcttcttccaatccagttcatcaaaagaaaagaaccttgctcctttcagctgtggagcacctccactatcttttttagcgattccccatgaagctaaaaattgaatatgcatngagaaaattacacttgctgcagtccgggtaaggtaaagatcctgttgggaatctgaccatacagtcctccagaagctattgctctgcatgttaggattttataacgtgatatggtttcactaaatgagaaaatatagtacattgagcattgtagtgcatgtcttaaacaactcacactgaagctagtgttttcagtgtcagcatccaggttggtatggcagacggatcaaatgaattgttgcttaaatcactggatgtgaaaagaaaattcattagtacttgcaccatgtttatatgttatgacagtgtagaatagaagacaagggcgatatcttacaccacattaagttttgtcaggttactga

SEQ ID NO: 31713 - DNA, 452 bp, Zea mays
  Clone ID: MRT4577_128938C.1
tgcacgccgcgtacgctcgctatacgtctcgcgaacgacatcctgatcaacaattcattcgccaagaactccccttatcaactgtctgaagggagtgcaaacatgttgctctgcaaaaactccagatataacaatataacaaagatcactagagcctgccatcaaaaataaaggacttccatatagccgacactaggaaagaactccaggcattcagtttccacatgctttgaataaacaacacaagcaatgcgtatctgccagtgagaacacatgccactgatacaaaaacaggtgtaaccgctccccaaaggtaattggcaagcacctatgcaatcgttgacctgctgacaaaaatagatgggaaaatttcagggtgataataggacatgacccctaaagatggaccaggggagaaacactattttttctgtcgatcaccgacaactaag

SEQ ID NO: 31714 - DNA, 776 bp, Zea mays
  unsure (1)..(776): unsure at all n locations
  Clone ID: MRT4577_128939C.1
tggacgcctgcggtaccggtccggaattcccgggtcgacccacgcgtccggcattgtaggctgtacaaaaggtaggcataatagtgagaagccacctgaaccggtcaagcctgaagtcaagactactgagaagaaggaactatctgaattaaaacccaaatttcaggagcacatcattcaagcccctaagccagtagaagcaataaaaaggccaagcccagatgagccaatgacaaacttggagttaaaaatatctgcttccctaaaacaagcacttgataaacttaaactgtcatctgggagtgaagaagataaaaaagaagaagacagtgatgaaattaagattgggacttcctgtaaaaatggagggtgttcaaagacataccagggtctacagagtctagaagaagtctgtgtatatcattctggagtacctattttccacgaggggatgaaatattggagctgttgtagaagaaaaacttcagattttaatacattcttagcccaagagggctgtacaagagggaagcatgtatggactaaaaaagatgcagggaaaaaagttgttccgtgtagacacgactggcatcagactgggggtgaagttaccatctcagtgtatgctaaaaattccctgccagaactcagtcaagtagaagccaacagtactttggtaaatgtacacattgtatttgaaggagagcaagaatttcatcaaaatgtgaaactgtgggggtgtaattgatggtaaacgaanctatgtgactatgact

SEQ ID NO: 31715 - DNA, 331 bp, Zea mays
  Clone ID: MRT4577_12893C.1
ggcagatgtggtttgggaggcaatggttgaacgaatcattgccccagctacatgaataactatgctgctagtggctgatgctgacattgctggctgccagggacacacttttggcgcagatgatgacatagctgctagtgcggtcggtggatatgcatacatattgcctacgttgaacagcgattagatacctctatggatggatgaatacccgctcctgctggctatcgcagctggcatcttacctttatcacccttgttccttcaacaatcatcagccctattacagcagttacctttggtgcattaattggcacaaaacatcagggca

SEQ ID NO: 31716 - DNA, 125 bp, Zea mays
  Clone ID: MRT4577_128940C.1
gtccttccaaattccgggtgcgacccacgctccggctatcaccggtaccttccttttccgctgctcgctatgtcgtcctgtctcttactactcgcggactgaccaactcctagttcactgcctac

SEQ ID NO: 31717 - DNA, 764 bp, Zea mays
  Clone ID: MRT4577_128941C.1
cccagcgtccgcccagcgtccgcatctgctcgcacctccatttcccacggtgtgtccatgagcaaggatggctcattctttgttttctgtgaaggatcgcgcggcaggttgagcagatactggttgaaaggcgagaaggcaggcactgtggatcttttcgctatcttgcctggcttcccagacaatgtgagaacgaatgagaagggcgagttctgggtggcaatccactgccgccgaggtctgtacgcccggcttatgagccgccatgtcaagctgaggaagtttttgctcagcctcccgatccccgccaagtaccactacctgatgcagatcggtggcaggctccacgcgctcatcatcaagtacagcccagagggccaggtgcttgacatcttggaggacaccaagggcgaggtggtgagagccgtcagcgaagtggaggagaaggacgggaagctctggatagggtccgtcctgatgccgttcatcgctgtctttgacctcgcgaaggcgtcttagccgcctcaagtttgattggaaacattgttgctttaagacatgaagtccatggttaccgctgcacgcttctctgagaggatcagtgatcccaataatgctccagcttcttttagtagcaaatgtaagttgctgacatgttctttagattgtcactagaactatgaacgaacagctcgtgcttccgagtccagaattaccagatgtgcttcttgagtttgatccgtttttatttttatttgggcaac

SEQ ID NO: 31718 - DNA, 870 bp, Zea mays
  Clone ID: MRT4577_128942C.1
caggttgagcagatactggttgaaaggcgagaaggcaggcactgtggatcttttcgctatcttgcctggcttcccaagaaaatgtgagaacgaatgagaagggcgagttctgggtggcaatccactgccgccgaggtctgtacgcccggcttatgagccgccatgtcaagctgaggaagtttttgctcagcctcccgatccccgccaagtaccactacctgatgcagatcggtggcaggctccacgcgctcatcatcaagtacagcccagagggccaggtgcttgacatcttggaggacaccaagggcgaggtggtgagagccgtcagcgaagtggaggagaaggacgggaagctctggatagggtccgtcctgatgccgttcatcgctgtctttgacctcgcgaaggcgtcttagccgcctcaagtttgattggaaacattgttgctttaagacatggagtccatggttaccgctgcacgcttctgagaggatcagtgatccaaataattcggttctggtgcaacctggagctgtatataatgctccagcttcttttagtagcaaatgtaagttgctgacatgttctttagattgtcactagaactatgaacgaacagctcgtgcttccgagtccagaattaccagatgtgcttcttgtgtttaaaaaaaaaaaaaaaaaaaaaaaaaaaaaatccgaaggatgggtgatggtaccaaggtccaagcttcttttaggagcaaatgtaagttgctgacatgttctttagattgtcccaaaaacaatgaacgaacagctcgtgcttccgagtccaaaattaccaaatgtgcttcttgagtttgatccattttgatttttatttgggccccc

SEQ ID NO: 31719 - DNA, 154 bp, Zea mays
  Clone ID: MRT4577_128943C.1
cagaaagcacttaactgccttctcgtcagttaacacgaagaactagaggtgaccaccaggcagatccaggcgcagtagagttcaccatagattcatctcagcacacagctgatgcctgctgagctgaccctagatgagcttcgtagtccataca

SEQ ID NO: 31720 - DNA, 288 bp, Zea mays
  Clone ID: MRT4577_128944C.1
ggcaggaacaagacacactaaggaaagaaacaccaaagggatgaaaagaggcactgcaacaggagagcgcacacatggccatgctggcgggggaaggaaggcgaccatgggagaagggggcagtgcaggagcgcatcaaaaactgcgagggtgaatgacgccaaaggcaggacagctggatctggggctgccggcaagaaggctttcaccgcaggcagagtataagactaagggccatgaggaggcgatatagcgacggcgttgagcggtaaaaaaacggccttctag

SEQ ID NO: 31721 - DNA, 2413 bp, Zea mays
  Clone ID: MRT4577_128945C.1
gtcgaagtgatgacccctcgttccatccgtcctcactgagcggcagcaaagcacgccgtgccattcccatcactaagcgcttgcgcgcggcggagaaacccaagcgaagccccgcaagagcgaggcgagggagagtggggcgagtgggtgagccgctggctagcgggatggcgtcgccgggggtggtggccgcggcgctgctggtggcggtcctggcggcattctgtggcacggatccgctgcggatgggcagcatggcgggcttcccggggttcgaggcgcacttcgtcgacctccccgatcccgccgagatgccgccgcacgcggacgagcgggagcggctccgcggggccgaggtgcggttccgcggcgatgtgcagggtcccgagagtgtcgccttcgaccctcagggtcgcggcccgtacacgggcgtcgccgacggccgggtcgtcttctgggacggcgagcggtgggtccccttcgcgactgcctccccgcgctggacgcaggagctctgcggcgggcctaaagcctcgccggtggagtacctccccaacgagcacatctgcggtcgcccgctcgggctccgcttcgataagaagaccggggacctgtacatcgccgacgcctacttcggcttgcttaaggtcggtcccgaaggcgggctggccacgccgctcgcaacggaggccgagggcgtgcgcctcaacttcaccaacgacctcgatctcgacgacgagggcaatgtgtacttcacggactccagcatccactaccagagacggaatttcatgcagttagttttctcgggggatccctctgggagacttctgaaatataacccacagacaaaggaaacgacagtactgcatcgcaacctccaatttcccaacggtgtgtccatgagcaaggatggctcattctttgttttctgcgaaggatcgcgtggcaggttgagcagatactggttgaaaggcgagaaggcaggcactgtggatcttttcgctatcttgcctggcttcccagacaatgtgagaacgaatgagaagggcgagttctgggtggcaatccactgccgccgaagtctgtacgcccggcttatgagccgccatgtcaagctgaggaagtttttgctcagcctcccgatccccgccaagtaccactacctgatgcagatcggtggcaggctccacgcggtcatcatcaagtacagcccagagggccaggtgcttgacatcttggaggacaccaagggcgaggtggtgagagccgtcagcgaagtggaggagaaagacgggaagctctggatagggtctgtcctgatgccgttcatcgctgtctttgacctcgcgaaggcgtcttagccgcctcaagtttgattggaaacattgttgctttaagacatggagtccatggttaccgctgcacgcttctctgagaggatcagtgatcccaataatttggttctggtgcaacctggagctgtatataatgctccagcttcttttagtagcaaatgtaagttgctgacatgttctttagattgtcactagaactagaactatgaacgaacagctcgtgcttccgagtccagatttaccagaaatacatcttgagtttgatccgtttttaaatttaattgggcaactttgactgcctagaattaagagaagtttctcagaaagaacaaacccaaagaacaaagatcaacttttcgtcgttgttgaaggtgccaaagaacctgctgaaatcaagggattttcaagaggagtgtattctttcagcgattcagattctatcagcacattttgcccagtggagttaccatgtttccttcccagaagtagccaccattcctcttgtcctcttgaagaggctacatgagcagacaactgttgaatcacttcgccgtcctattaagcgtttgatagaccaggtgacggagaacaaggattttatagaaaggaaaagagaggttgtatccttttcaccaaatgataaggcgtcagttgatagcttccttcaggaggagaaggtcagcagaaccgcttcattcactcggttctatgcatccgtagctgaaaaccgtcaaccaaaatggagaaaaacactttaaaataccaagggaatttctgagagacatctggaattggttggtttccaagtgagggccacgaagaaccacatcaatgtagaacattttagtgcagatatacgccgaggcagctattgtgtaacctctagtgagactgattcctacgagtcctcgagtgctcaacaattttgtacgattgtaaccttaattccgaagtgagttgtcaagtgatgaatgaaatttgctgttgcttttgaaaaaaaaaaaaaaaaaaagcggccatcatcccactgtaccaaagaaagtcaactaaccacc

SEQ ID NO: 31722 - DNA, 643 bp, Zea mays
  Clone ID: MRT4577_128946C.1
gcttctcgtcatcttcttcgtttcgtccttcttctgccgcagccgccgtcgccgtcgccgcagctaggggttttgcctttttggatatggacgcgacgggacagcaggagcagcatacaggaagtgtaggcggagatctctacggagtgcttctttactacaagtacgccgaggtgcctgacgccgccgcgctcgccgcgttctacgaggcgcactgccgcagccttgcgctcgtcggccgcgtccgcgtcggccccgacggagtaaacgcgacgctcggagggcagatgaacgcgctggagaagcatatcgcggagatgagctccaacgacttgttcgtgggcacagatttcaagctggcgtcctgcgacgaccctgccgacgagagggtcgcccgggagtgcggcttcacctcactctccgttcgggtcgtcaaggagctagttaccctgtgctgcaaccccgcattggcacccccagaatgttgctgggactaattatgctgtggcatctgcggagaagaaggaagtggttgtcttgcatgcaaggaatgtatatgagactcggatcggcaagttcaatgtggcaaatgcgaagaccttagatcctgaaattaggcaatacagtgacctgccctcttgga

SEQ ID NO: 31723 - DNA, 279 bp, Zea mays
  Clone ID: MRT4577_128947C.1
agtggggtattatgaaagcgcatggttcacatgtggtgatactcgtacatctgaacaaacaaactctggttacctagctaccgatgaacattagtctatctaccggctgacactactctagccctcctatgtacatcggccggaccgggagcggtgaaccccaaaacccatgtctcgggctaagactatcaactagggacacagcggaaccacatctacgagttactaacccactgcttttacagcgattgctaattcccttgacggagaatgaataac

SEQ ID NO: 31724 - DNA, 2283 bp, Zea mays
  unsure (1)..(2283): unsure at all n locations
  Clone ID: MRT4577_128948C.1
tgattgggtccctcgcggccgggccgggctcttctcgtcatcttcttcgtttcgtccttcttctgccgcagccgccgtcgccgtcgccgcagctaggggttttgcctttttggatatggacgcgacgggacagcaggagcagcatacaggaagtgtaggcggagatctctacggagtgcttctttactacaagtacgccgaggtgcctgacgccgccgcgctcgccgcgttctacgaggcgcactgccgcagccttgcgctcgtcggccgcgtccgcgtcggccccgacggagtaaacgcgacgctcggagggcagatgaacgcgctggagaagcatatcgcggagatgagctccaacgacttgttcgtgggcacagatttcaagctggcgtcctgcgacgaccctgccgacgagagggtcgcccgggagtgcggcttcacctcactctccgttcgggtcgtcaaggagctagttaccctgtgctgcaaccccgcattggcacccccagagatttcgagtgctgggagacacttgtctgcggccaagttccattcggtgctccagaatgttgctgggactaattatgctgtggcatctgcggagaagaaggaagtggttgtcttggatgcaaggaatgtatatgagactcggatcggcaagttcaatgtgccaaatgcgaagaccttagatcctgaaattaggcaatacagtgacctgccttcttggatagacaagcatgctgagcagctgcatgggaaatcaattcttatgtactgcacaggaggtatacgctgtgaaatggcatcagcttatattcgctcaaaaggtgaaggatttgagaacgtttttcagctatatggaggcattcagcggtatctggagcaattcccagatggtggctattttgaaggaaagaattttgtatttgaccacagaatatcagtgggaagccttaaggaaaacatactcggtgcatgtttgatatgtgattcttcttttgatgactattcgtcacgctgtcggtgtagccattgcagaatgttggtcttagtgtgcccaacatgtcaggattctactgaggaatatgcatgcgagctgtgccaaaagaatggaaaagaaccgtgccaactatcaacaggacaagactgcaaaatacagagaggactatctgaaagctttgaaaagccatccataagctatcacaatgtgacctccaaagtttcctggagtgatggtaaggtagcgagcaactgaaaaggttgaggatcctctgcttgcatggtttccgccagaacgcatccagttttaagggaagaacgtcagcactttccaagaagctgaagcatatcactgagcttgtctttgtcgacgcgcctcatgagctttcctttgtatatcaaccaatccggggacactgctccgacaaaccctcacctctgtctgttacaccgaaacggaaattcgcatggctcattgctccaaactcccactgcaaccctgaacaaaactggagggctgcagatgtgccgtttgaccctcttcagtaccagcaacaaaccgaaggcttcgaggaatcatacacctatcttgaaaatgcaatctctcacatggggaaatttgatggaatcctgggcttctctcagggcgctgccatggctgccttattctgcaggcagcagcagaagatgtgcggctttccaaagttcaggtttgggatgttctgctctggatatccagcacctgtgggcgattttggcaacgaaccaatcaagctcccctcgctccattgtttcggcaatggggatggtcatgataggcagatagcgaacagggcaagcgctgaacttgctggtttgttcgagcaggattgctgctccgttgttgagcatgatatgggccacataatccccacccggtcgccctacatcgatcggataaaggattttctttccagtttcctgtgaaatgttttgaactgactattgcgttgtaagttggtatacacaagttgggttctgaatggcattgactgtgtttgctgatcattagtattttgcgtctgattgtgctaaacaaattgggattctcctctctcgccgactctgagaggactacttgtgccacgacatcagaatgttttgaaataatatatttttggtattggtatttttcaagtcgacgaaccgtccaagtcacccaccctttattgttccaatttgtattcttcgaacaaatacatgtcaataccactttctnnnnnnnnnnnnnnaaaaaaaaaaaaa

SEQ ID NO: 31725 - DNA, 252 bp, Zea mays
  Clone ID: MRT4577_128949C.1
acccacgcgtcggactcatccactggctgatcgtcatggagttccccaaggccccgcgccagcggagagcagatgatcgcacctacctaaacactcgccaccgttctcgctgatggcagatgcaagaagaacatgtcgcattcagacgaccacctacacagtttcagtgcaccgggacgaggagactttaagaaattaaggtgtgctgggtgctgcggtactacctgattctacatgactgaagacaaggac

SEQ ID NO: 31726 - DNA, 995 bp, Zea mays
  Clone ID: MRT4577_12894C.1
tccggccggttgagaagcatctgggccgcaacacttccggtcttatattacctatcaaccgaacgggcccttagtatctaaataatccctggccccagaacagaagcatctgatttactgacaagttattacgttgtgcctcatcacccttctgctaaaattgcaattgacatgtgttggcctgcaggcttcattaaatccacgcgttaggactagtcgatgcctgaaccttaatcttattttgttcgctaacgtttccgcctacaacaactgaactctgttctccttagatacgcttgtttggtggctgaagaagctgaggcaggcgaccagccgtcaaaggcaccatatgagaagatcgtcggggttgtggattgcacggtgcaggacgaagacggcatcctaaagcaccttcgaggaggcgcggatgaatacctctacgtgtcaggaattacagtcttgccatcattcaggtgacctctaacacgtgttttctcgcagctctacttgcccaatgggtccaagaccataacactcaggaaaatcagttcttgacgctagatgcgtgtgcttcgtgcacgcttgtgcaggaggaggaaggtagggaccgcactgctgaaggcctgcgaggcactggggctccaatggaggcacgtgttcatggttctgagggcgtacgaggatgacgacggcgctcgaggcctctactccaaggcagggtacagggtcgtgtcaagggatccagactgggtctcctgggtggggaggaggaggcgagttgtcatggtaaaggagctgccggttcacgatgatcaatgacgccggcacggttttgttgaatatgtgtgtgtgtgtcaccagctaatttgtactgtttcttgcccatattcgcggcatcatgcatgtcttttggacaatagaggagagacagttgcctatcttcccaccaaacacaaaatgaaaattgagaagttacagttgacaagtcccgtttc

SEQ ID NO: 31727 - DNA, 150 bp, Zea mays
  Clone ID: MRT4577_128950C.1
atccgactcaaaccgcgcgtaccccgtgtccgcgcctagcaagccgtgccaataccccaagagccagctactcggtactccacgcagcggcgcagaaagtgactactggcagcaacggcaatcacatctccacccgcacgccgccgaccc

SEQ ID NO: 31728 - DNA, 218 bp, Zea mays
  Clone ID: MRT4577_128951C.1
attttgggttgacacgcgtcggacaggagcgggtgaagcagagtgcgatatcatgcttagctatgcctcatgccgatcctggcggggtttggcctgtcttacccacacggtctaaggcctggcttgtacggttttattggtggctgtcaaagcacttctctgggccatataggttcctaatgatcgtgcttatatagacgaagtgatgcatatgaata

SEQ ID NO: 31729 - DNA, 438 bp, Zea mays
  Clone ID: MRT4577_128952C.1
caagcatcacagttcgttactttgttcctgtacaatttgttgatgtcactggaatcacgggggggaaaggttttgcagtatgtattcttcttgtcctaattttctgtgatttcacttgtcaagacagttcactactttgctgtaaacgagataagctatcaccagggttttagttgtgtttcttactttctttctgcaacatctctatttgattagttgaaatgacaccagagtgaattatgcaagagatatttgtaatacttaagtttctagtttatgccctgaatttaaattgctccatttcaaacatttatttgattaaaattggtctctcgcaatttatatgttagcttttctgataaaaaaagaaacactgtatgtgtttctttcagttggtgtaatattttctgtagtgcatgtgagcacgataccccttgg

SEQ ID NO: 31730 - DNA, 604 bp, Zea mays
  Clone ID: MRT4577_128953C.1
gttctctcgtcaagcagatcttcgtccacgggcggcatggatggcccgagaggcctcgcgccggggcgcgggcgcgggcgtggggaagggcggacggtgccgccggaatggatcggcggttccgggtccgggcagggcgccgtccccgatggctcgtggagttacagctgggggtggacatcgggccccgaaggtggctggggctatggccacggctcggcgcagccccccgcggcgctgcagacgggtttgcctacggcggcagcggtggtggaggaagcgggcgtggcggaattgaattcagcttcggtggcctatctggcggtttcggctggggagccggtggcgggccgtttggggttggaggaggccacggcagctggagcgcgcgtggtggtgggttcagcggcggcgggaggcagcggccaccgcgaggccgcggacgtggcagcaactgaagaaggcctattagcatctgggagcatagtctatactggttgtggcatcatggcatgaatgactgtacccgtaaccgtaagcaatacgcctttgcttcaaactgtgttcaacagttgacactcttctaatatatattactccatct

SEQ ID NO: 31731 - DNA, 401 bp, Zea mays
  Clone ID: MRT4577_128954C.1
aaaaacaaatatctaaaaacccctggttcataggggggagacgacgatcatggaccaaaccaggggcttaataatcttaaaaaaggggttccagcccaaaaaaacctccctccagatcggggccaacagggccaaaacctggggcaatttcagggacacccctcagggcataaactgggctattttggggcgggccctcaacatactcaggaccaggatggggtggggccaaccccctaaactaataagcggaaactggcaggggtcaaaggacgtcaaaaaaaccatcccaaactttatttaatctctccccccccaatccaaaaggaagaaggggattctttcccacatcagtttggccaatccaaatcaaaaaggccccggacgctaaaacaaatggg

SEQ ID NO: 31732 - DNA, 271 bp, Zea mays
  Clone ID: MRT4577_128955C.1
caaggtattgttcatccttatgcatctcttgctttgcctgcgcaacgcccatgctgtcattatgcgagaatgctcacaggcatcatgccctaagattacacaggccctcctaccatctactttagacggctaccatcaaccacctatgcaagcctatagggtacaccaagcagtagggccgagcgcgtgacaacaaccaatgtcacagctgaaacaacactccttgccacagctgacaatacaatccatagcccggcaacatcgacagcaa

SEQ ID NO: 31733 - DNA, 267 bp, Zea mays
  unsure (1)..(267): unsure at all n locations
  Clone ID: MRT4577_128956C.1
aatgggggagaaaattttgttaataaagaaaacaaaaaggggataaataagtatggttaaaaaatttgtggaatagcgttaaatttggaattgaaatgacaagagaaatattttaatatctgtaatcagctacaaccatgggcatttacattaataaaatgaaataatgggcaggccagcacaataatgctcgaaagcttaaatacttnttaagggagaaatggagggtaactgtttggaactaaaaagggtgctaagggcggtttt

SEQ ID NO: 31734 - DNA, 396 bp, Zea mays
  unsure (1)..(396): unsure at all n locations
  Clone ID: MRT4577_128957C.1
accgaacngangcgcatatatcgccacggcaggataatttatatggcagataaccaaactatctaaattagatgacacaatgctaaacagatagcaacactgctaagatcaagatcagggacataagccttttctactatgtgtaaccttcttatctttatcatatgtaacttctgacttctaacacattgctggattcgagtgtataaaatcccttacaaacttgtggctacatcacaaataatctctaactagatatatacatggaggcgtgcatgtaccatagtctgtataatgagatgcaagttcaatttggtcgccgagaatgactaatactgctgcttgcgacggaggaggatccaatgatgtcaacaacagcatcgccattgactacac

SEQ ID NO: 31735 - DNA, 1538 bp, Zea mays
  Clone ID: MRT4577_128958C.1
gaagctcgctattttgctccagctagcttattacctgccatctggacttatattttgtagttagcaaggccgagcattccttgccccaacagtacattcacgcgttcaaagacggacaatttacgacatctccagtgtctcattctggggcttgattgtctgcacgactgccatttcttatttccttttgtttacatcagctagcttattacctgccatctggacttatattttgtagttagcaaggtaacccactgcacaacccgctgctccgcctcgagcgcatgtgctgagagtggctcggcgtcatcttcgagtgggagggggtcatcgttgaggatgatgccgaattggaaaggcaggcgtggttgaccctggcacaggaggagggcaagtcgctgcctccctcttttgtgttgcggagagtcgaagggatgaagaacgagcaggcgatttctgaggttctctgctggtctcgggatccctccgagcttagaagttttatcacagtattgcgagtcatggagtagagatgatgctcaaaggcagtacattgtagaacttggtataccagaagaatggatgcatgaagctctggctctttatcacgaatactatggagataaacagggcgcactggagaatttgattcagtgtggcaactggaagaaagctcatactattttcgtgacttctgttgctcattctatgtttctgtcatctaaccatcaggaggtctggaggatcacaagtgccttggagaaccacaagtatgaaattgctgactgggaccttggtgccggaatatacatagacttctacgttctgaagaactcaatgcaagaaagaaatgccatggatgattcgggttcactcgaggagatgagtgaatcatgcagaagtttctttggccgattaaacgagtcgttgttagtctggggaagcaaattacctgttgagtcaagggcatgctactcgaagatggtagaggagctatgcgcgcttctggtggacaccccaagcgagacgctgaacctacccatggggtgtcttctaatgatgctcaacgctccagttccggacgagagcaggtcgtcgtacctgcaggacgcactctccgtcttcaccgaaatcctttgcagcgatccgtagcacaagggtccacggtgttgccataatctgggtgaagggaagtgaagcctacaggcaacacgccgaagagtttgtacgtctcatgtttggtacttgtagaaaaaattaggaatgtataactatgacctgatgttgctccggtgaatttgtaactccgtctgaagacatgtgtcgggattttcgttgtatgtgagtaccaggtcttgtgaaacgttgacttgcgagctgtaccaatagggagtgatttcctgggcttcatttcctgtgtatccgtgtgtgtgtttgtgtgattattacagggaagggcagcgtcacggtgaatttgtaactctgtctgaagacatgtgtcgggattttacccctattaattaatgaatgtttgctat

SEQ ID NO: 31736 - DNA, 1124 bp, Zea mays
  Clone ID: MRT4577_128959C.1
tgggtacctcgaggccggccgggctccagtcgcgcggacgcgcgtccgtgccgtcccgcgctcgcgctgccgcctgggcatcagcgcctggcccggccccacgcgcccccacatgaccccttgccttcccacgccacggaacggtcgcgccccttcccttcgtctccccccactcactccattgatggaagaaacaaccggtgccgtaattggcagccgccagctctccctctcccatcccggcgcagtctctcctctctctctctctctataaaagcaagcgccaagcccccttggtctgtccctcacccgagcttgatctcttcctcactcctctctctccctcacctgcgctcgctggagccgctagattggaccgtccgccgctcgccagaccatccgccgtcgtcgccgcaccgtccgtgccctgcctcgctgcacccacgcctagcctcagccgcgcccgtgctcttgccgctgttcgccgtggacgaccccacccctccgttcgtcgattgaagttgatttcgtggtagaagaccaaaatacgtttgaagacgatccacaagacacctttgagcaagaagctgatgaggaagattgtgatgatggtgacgatgagtactaagtctagcgatgcgcaagtcatcttcctgtggaagattgcccatgttatatatctgttgtaatttgatgatgatactatttgagacttataagtctggatgatgtaataaagttactatgctctcttttacgccttaaaagaaaaatcattcgatatattacacttgtgaaagcagcatatctaaaaaatatttgaaagcaacaatgatgatgcgattggtatggccctctccctgcagatgccctcaggaacattgtcgatgtccctttgtgaacagcctcttctagtaaataaataatgtatggagaagaacaatgaagggcccagtcttgttggaagtacgaataatgtacagttacaggaatgtgtgctaccatatatttcgtcgcatcagtttgagttgtggttgtgtgaacctaccatatatttccttgcaaaagaacaatgtatacttccagtaatgtgtgctatctcaatcagaatgcaggacggaaaa

SEQ ID NO: 31737 - DNA, 220 bp, Zea mays
  Clone ID: MRT4577_12895C.1
tcgggcacttattcccaggttcgcctacaggacccacgcctaccaagcgcgggagcagggggagcacgagagcctgcaccgggacatgatggtcggcttcggcaagtggagctggagcccgctggagctggaggacccggttcccgacggcgacggcaaggtgcacctgtggcaccgcgccgaggaccttattgtgcccgtggggctgtcgagggccctt

SEQ ID NO: 31738 - DNA, 1439 bp, Zea mays
  Clone ID: MRT4577_128960C.1
agctcggaattcggctcgaccggtacacgcttcccaccaaaagcaaccctgaccctgacctgcgctgcctgtgaccccgccgatccgagcgtctccatggccgcttcgtcctccgaggctgccacagccacgcccacgaccaccgtcggactcggagggagcgggaccccaggccctccgccgccaacgccatcgaaccaccacgcggcgccgtcctccgcggctggtggggccacggacgcctcgctctctgctttcctgcaccgcctcctcctctcgtccccggctccacagctacggtctccactcgcagctcggtcgcaggcgtcgccgccctcgcttccgcctctcgtctcgctcgagtcccccgaccagcgcgccctccgcaacgccgccgacgtgggctacttccacctcgccggccacggcatcccttcggggctaccgtcgtccgcgctcgccgagctgtcccggatcgacgcgtccacgcgcctggagtctaatcttcgcacgctcggcttctccgtggaggaaggggaagagcaggatgtggacggcggcgccgacgatcccgcggtagtgttcgacgcctgcgagggggacttggacgcgctcccggctgcggcggagtacgcgcgtcggatgaaggacgtgggcatgcgggttgtcgcgcttctctccgggtgccccgacacgggcttccgggagaagcccttcgcggaggggaggaggaagccgcggtgcctgctgtgggcctcccgggtctccaccgccgatacggcacctccggccgtcgggaaggcgaaggcgtacccgtacgtcgtggcgcttcattgccagtgggaggcatcagggcaggaagaggcgccgccaagctgggttatgaaccacggcggcgagtggacggcagtggccgcccgcgacgacgcgatgcttgtcaccgtcggcgacattgcccaggtgtggagcaatggcaagttgaagaaagtgagagggatggctcgccccacatccgcaccacccatggcggcgcagcatggcgagaccgaccgtctgtcgctgacggtccttatcactctgcctttggacaacatcgtctcgcccttggtcccgctctccaatcggccggtgaaggccgcgaggccgaggcaaacggtgccggagccgacgacgaggatggatggaggtttcactctttcctactggaggactatgcgtggagggtgtacaaccagcggcttcagttcaaggatccattggtccggtatcggatatgatatttgccgcgatgatctatagcgcttctttttttccttttggtgtgccaatatgcaactcatgtcatgtgtgacttcgtgttgtgatctactatttgccttcggagtggtttgagtacatcccgccttgggttccaaaaaaaaaaaaaaaaaatttgacca

SEQ ID NO: 31739 - DNA, 412 bp, Zea mays
  Clone ID: MRT4577_128961C.1
aatatttttttttttttttttttttttggcctgcaagaaccatattccttgacataattaactacaattttacattagtaagaaaaaaaaagaagaccatgcatttttattctggtcgatgatgatgatgatgatgtgacaagtgagcacgcgcgcgggatcataaggtttcagacgatggtgcaggcattggggttctcctcgctgaagatggtggtgaggcggccgttggcgtcggtggcgaagctgttgatgccctcgcgcaccggcgtcgggtagtaccagcggtactcgctggagaagtactcgtgccgcctcggcgtgcccagcatctcccaccgcgggagcggcgacggcgcgtactgcccgtacccgtacccgtacccgtgtgatgccggcggtggcgcggggg

SEQ ID NO: 31740 - DNA, 380 bp, Zea mays
  Clone ID: MRT4577_128962C.1
acctgctggcgaagagacagttaatgtttgaatataagtgcttgcgtccatatctcacattgagaccttgccttataaaaccacaaggagattaaaaatgatcaagcttactggcagatatttacatcctgcaaatcctagcgataacctttgtgtaataccaaggttagtgggtggttgccgacgtccacttgatgatttagcttatttgcgtaacttgctccctctaaatccaaccagactgatttaaccgcccatattggggggatagcccgtgtttggggttggcccgtgtcgttttgcttttctctcggatacctttgggctcttcttgaagggtatgacggacttgaattttccgcgagtgtgaccattgacat

SEQ ID NO: 31741 - DNA, 1793 bp, Zea mays
  Clone ID: MRT4577_128963C.1
ccggccggggtgagagactgccaatcttaatcagtgtcttctggtttctactccagcttatctcaagctatatcaccagggaatttcatggcacgaggccgtgcgcgccctgctgctggggctcggtgaggacgaccgccgcgcgggcctgctccggacgcccacccgcgtcgccaaggccttccgcgacggcacccgaggctacaggcaaaaagtaaaagacatagtgcaaggtgctctgtttccacaggttggtgtggataaaaggactggatctgctggtggaactggcgggcaagtagttgttcgagacattgaacttttctcctattgtgagtcatgcttgcttccattcagcatacagtgccatgtcgggtatgttccctcaggtggaagagtggttgggttaagcaagctttctagagtatctgatgtctttgccaagagattgcaaaaccctcaaagactagctaatgaaatctgtggtgcactgcatgctagcattcaacctgctggtgtggctgttgctctgcagtgctggcacattcctttaccagaaaacttggaatgcaagactttggaaggttggattagaacttcacattcatctcgctctggagtctttgaaggtgaaagcagcactttctggagtgacttcttggctcttgttaagcttaggggcatagacgtggaggctaaggaccgtactgtttctattccttggtgccctttaaggtctcatgaggttccactctctaacgggctctgcaagaaaaactcaactaatggcatggtttctgctgttacctcgatgctcttatcactcggagaggaccccctcaggaaagagcttttaggcactcctcagcgttatgtgcagtggctgatgaagttcaaagcatgtaatctactagacgtgaagctgaatggttttacacttagtaatgttagcttatatgagaggacaggtggaggcacaactgatcatggagcaatccgatcggagctgcacttgccattttgtgctcaatgtgaacaccatcttctgcccttctacggagtagttcacattgggtactttggcaatggaagcggagaaggcattgatcggtcgcattttcaggcgttggttcatttctacgggtgcaagcttcaggttcaagaaaggatgacaaggcagatagctgaagcggtttattcagtttcgcacaatggggccatggtcgttgttgaggccaaccacatttgcatgatctcaagggggatagagaaaataaggagcaacacggcaacaattgcagttttgggccagtttttggccgacccttctgccaaggcgtgcttcttacagaatgttttggattctgttggttctgcggtatgaatcgtatcgcaagcagcaaagaaaaaaaatgtctagttggagtactatccagcaattgaaatttttagcaatctactggtctagcatgattcttctcgggtgcaaatttgtcacctgtgggactgtaccgaggatgtcacaagaaagcaccaaaagggttttggttctctcgtgttgtaccatgtcacttgtaaggcacttcaaataaaaaagaaatagtaatagttacaactgtgccaagaaggatatagtcattcgtacttttagatgttgtcaaaattgccatttgttcttgaaattttagtggagattactctggcttttgttgttgtaccgttgaatttgatgttacgccgatcgagatcagtaaaaaaaaaaaactcagatatctgttcgcttgaaaagtcga

SEQ ID NO: 31742 - DNA, 335 bp, Zea mays
  Clone ID: MRT4577_128964C.1
aggttacccccgcagaagaagcgaagccgttcccggggggggatgataaacgaggaggggcatttctccacacgcggacctcgaagaccacctgctgggcgacatcgaaggccagcacatcagcgccggcgtcatcgccgggcacgacgggcgcgtctgggcacagcccgagaactttccccagataaagcctgaggaggttgctgggatgataaaggactttgatgaacctggaactatagcaccaaccgggctttctgggggagggacgaagcacatggtgacccaaggggaacctggagttggcatccgaggaaagaaggggacctggggca

SEQ ID NO: 31743 - DNA, 828 bp, Zea mays
  Clone ID: MRT4577_128965C.1
cctcgaggccggccgggccggggttcctttttttccatttgcgtcccttcgtcgctataggagcgcctcgcctaataatagtcgccgcgggcagtggacaccgcgaccgccaccgtcatgggagcgctcgagggggcccacctcgcggccgtcgcttgcgcgtgtgacgatgacgaggagcaaagcgactgcatccccctgctcgcaggggacgccgcgacggcggccgacgccatggagccggcggtgcgcgctctcctgctggggctcggcgaggacgaccgccgcgagggactgcgccggacgcccaagcgcgtctccaaggccttccgcgacggcacccgaggttacaggcaaaaagtgaaggacatagtgcagggtgctctgtttccagaggttggtgtggacaaaaggaccgggtctgctggtggaactggcgggcaagtagttgttcgagacattgaacttttctcatactgcgagtcatgcttgcttccattcagcatacagtgccatgttgggtatgttccctcaggtggaagagtggttgggttaagcaagctttctagagtgtctgatgtctttgccaagagattgcaaaaccctcaaagactagccaatgaagtctgtggtgcactgcatgctagcattcaaccagctggtgtggctgttgctctgcagtgctggcacattcccttgccagaaaacctggaatgcaagactttggaaggttggataagaacttcacgttcatgtcgatctggactatttgggggtggaagcagcactttctggagtgacttcttggctcttctttagcttaggggc

SEQ ID NO: 31744 - DNA, 281 bp, Zea mays
  Clone ID: MRT4577_128966C.1
gtgacactatagaagagctatgacgtcgcatgcacgcgtacgtaagctcggaattcggctcgagactagttctggatctcgagagcctcgtcacgttatagggcgtcctgtgttggtaggtgcacatcatattggctctgcctcgctggttatatatgagagagagagacagacaccacacgcgcgactctgtattattcagagcggcgcagtgtgtatatagaaggtgtggtggtgcacacgcttacacatgagtgtacactgtggtctgtgcacacaca

SEQ ID NO: 31745 - DNA, 499 bp, Zea mays
  unsure (1)..(499): unsure at all n locations
  Clone ID: MRT4577_128967C.1
gtgtttttttttttttttttttttttttttgtttggtttaaccaggcagtgtttggggtggttttnagggggcaatactggaccggnnctttagcaagacaagcgggtgtggaacttagaaaaaacatgtccaaacgggngcatttgagtggggggggggggcattgngagctcaagcttgaaactaacagaaacaggtttggtcacctcgccgaacttaaacaaaaatgccttttggagtggtacagggccccgggtttgacagttcacaattgctggtcgctgggttgggatagcactacttggggggccattaactttacttgggggcctcatcggcggggtcagcaccaccgggggagttgagttggttgagcctttttatgggggggggctttctttggtcatatgtcagcttcttgggggggggacccttatgctcctttgggggatggttggttggctttacaatggaagggtcgggccgggtgggaccttg

SEQ ID NO: 31746 - DNA, 300 bp, Zea mays
  Clone ID: MRT4577_128968C.1
accacgcgtgcgtaatatgtacccaaatttttaaaggatatgaagaggactcacccaagggttttctagccggctacccaatatttgactttccatctgttcttcttgatggctcatatcaccatgtcgattcaagtagtcttatcatttcaaattgcagtcatatgatcttttcctgagggaatgaggaaaatctgtccaaggcttctacagcctataatgaaagttgaagtgataactctctaacatcatatgtgtgatgtctattgcttatttgaactctaaatgaagacacgtcaa

SEQ ID NO: 31747 - DNA, 265 bp, Zea mays
  Clone ID: MRT4577_128969C.1
gctggcgccgcaatggaagcggctacagtggaggtggtggaagctacagcgatggtcgtggaggctacggcagcggagggggataccgaggtgcaaaccgggggggcgggtacagaaacaaccacgggaactggacgaactgagccgtggggagcgctcaggcctagataacttgggaggttctgctaccgcattcaccctagtatagaggggggggatcttagcctgtggacatcccgagggcgtacgttaagctccccgtctt

SEQ ID NO: 31748 - DNA, 1292 bp, Zea mays
  unsure (1)..(1292): unsure at all n locations
  Clone ID: MRT4577_12896C.1
acatcagtcgccgaaatccgaatccatggccgtcctccgcgcgtcgccgccgccctttctcccccatccgctctcgcgcccctctcagtgcaagcggcgccccacctgccgcgtggtcgcagccacagccagacccagtcctgctccttccaggcccaggagcggcggcgtccatggaggccgccccaagagggggcttcttgcggcaaggagaaggccgggggaggggcgggtgccctgcttgcgggccacggaggcgggggtcggtgcggcaggcgtcgcgaaggaggaagacgagtacctggcgcgggaggccgggtggggcgtgcggcggatggcacgggttggggaggagatgcggcgggtggcgcaggtccaggccgaggccttccacgtccccgtcgcgctcttcaacgacttcttcttcgacttcttcaaagccgaggtgctgtcggcgctcatctacagagtgaggaactcgccgcctgacagatacgcttgtttggtggctgaagaagctgaggcagccgaccagccgtcaaaggcaccatatgagaagatcgtcggggttgtggattgcacggtgcaggacgaagacggcatcctaaagcaccttcgaggcgcggatgaatacctctacgtgtcaggaattgcagtcttgccaccattcaggtgacctctaacacgtgttttctcgcagctctacttgcccaatgggtccaagaccataacactcaggaaatcagttcttgacgctagatgcgtgtgcttcgtgcacgcttgtgcaggaggaggaaggtagggaccgcactgctgacgacctgcgcgcactggggctccaatgcgtgcacgtgttcatggttctgccatcattcaggaggaggaaggtagggaccgcactgctaaggcctgcgaggcactggggctccaatggaggcacgtgtncatggttctgagggcgtacgaggatgacgacggcgctgaggtctctactccaaggcagggtacagggtcgtgtcaagggatccagactgggtgtcctgggtggggaggaggaggcgagttgtgatggtaaaggagctgccggttcacgatgatcagattggacatcaatgacgccggcacggttttgttgaatatgtgtgtgtgtgtgtgtgtgtgtgtgtcaccagctaatgtgtactgtttcttgtccatattcgcggcatcatgcatgtctttttggacaatagaggagagacagttgctatcttcccaccaaacacaaaatgaaacctgaagttacagttgac

SEQ ID NO: 31749 - DNA, 685 bp, Zea mays
  unsure (1)..(685): unsure at all n locations
  Clone ID: MRT4577_128970C.1
gggtacctcgaggccggccgggtattggttcaactgttatcgaatggttgctcttttattttctctcacttggcttttattttgcatctactcacatttttgtaatgcaacagatatttccaacatgacttagggaaaactagctaatgaaaagtcacgtatcaaaacatgttctgccaaactatgtcattgtgatccactacactgtttaatggagccagagtcatatgtctcatccagttatcagtgacattaattatggtgccaaacattagttagtgtaatttctcccacacatggcatcaactctagtcacgagttttcattcttccatgagtatttactatctaggttaactactggttacgtactttaactgtttgatcttgtacttttatccctgtgcacaagtagacagcaggtactgagaaggaaacatctatgtttgggaacatagtatttccttagtcccaagacaacactgtggtatttgagcataccatggtattttagactanaatatgtttgggagcacatctaaaaactctgtattttanaccatggttttaccaataccatgngtattntgtgnngtanaaaaaactttgatctagaccaaaagttttttgtttgcacacggctatagtcttctcttctcctacgctacaactgaaatactatgtct

SEQ ID NO: 31750 - DNA, 335 bp, Zea mays
  Clone ID: MRT4577_128971C.1
gaatataataattttactgtgggtttttgtattaacatgtggactacaaaaagcattacttttattttatggaaagaacggcattgggggcccacactgggaggaacaatgtttgtttacaggacacgtgagggaagtaccaacacctggatatttcatgattgcacgtgacgcctcacaaaccatccggaacgggtgacagatctagggcgcattggccatcaggaagctgttggcccgaggcaccctattgaagaagccggggaccttttcggttttcgggacgctgttggtgccaatcaacgggaagttaccggaggaggatgcggccattt

SEQ ID NO: 31751 - DNA, 297 bp, Zea mays
  Clone ID: MRT4577_128972C.1
accgtccggattccaggtggcgtacgtcgtcccgttctactcctactcccgtgtgtgccttttcttaaccctgatcctgaaacggcgcgaggcctttaccgtgcgcaacagagtctcaattgtcccagactactacaagaccaagtacaccagcatcgggtccgccatcgagtacaccgtgtgcgccctcaaagaggaagtccttgtagtcatccaacacaactactgcctttgcattcgggctctggtattactacaggaccgtgcacccgacaactttcacttcggactgaaact

SEQ ID NO: 31752 - DNA, 1756 bp, Zea mays
  Clone ID: MRT4577_128973C.1
ctcgagggccggcccgggaaaaaaaaaaaaaaaaaaaaaaaagagacttcagtttactactgaagcacgcaccgcagcgtctcccccttctgctcaacctccgtccctccgtcggaagggccggcgctaagggacgatccctccgtccgcccgtcccgacgggacctcgactcgtttcgtcggtcgctgtggcgacgggtgatggaacggcgatatgaggcggtggttatgttgtaactgccactatgacgttgaggaagatggccacgccaaggaacaggccaaagctcagagcaataagatcgaccccaagcagaagtcttcaaaacctcctggtagtcaacctgagccagagttctcccctccaacaattgatgtccctgaattgtctttggatgatttgaaactaaagactgatgattttggatcaagtgctctgattggtgaaggttcttatggacgagtatatcatgccactttggacgatgggagacaagcagcagttaaaaaacttgatgcatctgaaaatgagcctaatgatgagttcctcaaacaggtctcactggcatcaaagctaaaacatgaaaatcttgttgagatgttgggttattgtgtggatgggaattatcgtatacttgcttatgaatttgcaaccatgggttcgcttcatgatgttttacatggaagaaaaggcgttcaaggcgcgcagcctggccctgtgcttgactggatgcagagggtcaaaattgttattgaggctgcaaaaggtatagaatatctgcatgaaaaggttcagccttcaatcatccatcgggacatcagatcaagcaatgtactgctgtttgaggatttcaaggcaaaaattgcagacttcagtcttttgatccaagcaccagatagggcagctcgtctccattcaactcgtgtattgggaacttttggatatcatgcacctgagtatgctatgactggccagctgacacaaaaaagcgatgtctacagctttggcgtggtccttttggaacttttgactggaaggaaaccagtagatcacacaatgcctcgaggacaacaaagtttagtcacatgggctactccaaggttgagtgaagacaaggtgaagcaatgtgtagatcccaggttgaagggagaatatcctccaaagggagtcgctaagcttgctgcagtggcagcactgtgtgtgcaatacgaagcagagttcaggcccaacatgagcattgttgtgaaggcgctttcgcctctccttcaacaaagacctgcaccaggcaccgcagagccagccccgcaacctgtgagctgaatccagtcacgtgtgatgggacctcgcagcatcaggcatctccgcgatcattcaatcagcaagtcattgagagtattttgaatatttgttctgtagcattctgttcctggcttgatgttggcgctgcacaatgacaatggtatatgcagtaggtttgatttttctttttcttttaccttctctataccagtaccaagttaccaactgttcgtagattttcagaattcgctgcttgaagaatagatgcaggatgatctggattttttttttggtctggcgtggcgttgctgccttctcttccatggttaccaaataccatgattgaaatcaagtcacttctactttgtttgaagtcaaaattcttatactttgaaaaagttcgtagaaaaaaccccaaaaaaaaaaaaagaagggcggccgccaacaagtgagctc

SEQ ID NO: 31753 - DNA, 318 bp, Zea mays
  Clone ID: MRT4577_128974C.1
ggaaggtagcaagccaacctaatggaggtagctagagatacccgctcccgctaccctaccctccgacaaaggcagctgacgacacaacacgctattttttcagttcggaacactaagccatggccattgccggcgctctactccaactgcggggactattcgcgcggaaagacgctggcggcggatggcagaccccgcactccccatactactgcggcggagacgcgtgcggcacaaagggcggcgcttgcggggacggcaaccatgggcagaacggggtgaccgcacgagcacagtggcgcctcagcacggaagctg

SEQ ID NO: 31754 - DNA, 1310 bp, Zea mays
  unsure (1)..(1310): unsure at all n locations
  Clone ID: MRT4577_128975C.1
aggtgtttcgtgagggatgttgggtcgtttcttttgactctttcggctttgtctatagngnngaccattgggaaggtgactgtttggggagctatgatgtttgtgtcgatttatgtggtctatgcatttgttgttgctgcaaatgaggtattgaggaagcatgccaggaggctgaagtttgatgtgttcacaccgttgttgcctgtgagggcaagtatatttgaacaaggagcagagcaggatgagtcagcatacagttcacttcttgaggaggatgcagatggtgaggtaacccaaatgaatacatccgtgcctcagtggatgtgggcttctcatgtagccatctactcaaatcatggaaatagagatggttcgcctggcagctcaaggccattatggggttggagtgagggagaagtggataactccacattcaatatttacaagctgttctcgtttatggagcttcccttgacgataccaagaaagttgacaattcctatagtggaggaggaccgctggtccaaagaatatgctgttgcaagttcttgcttggcgcctgttcttttggcatttttatggagcagtcaggatacagtattcacaaaggttagcatagcagcatatgttatggctgtcatgttggggattgcactagctgctctggttttcctgttcaccagtaatgaacgtcctccacggaggtttttgtttccatgggtttttggaggctttgtgatgagcatcatctggttctacatcatcgctaatgaactggttgcacttttggttgctttgggtgtgatactgngaattaatccttcaatacttgggctaacagtgttagcatggggaaattcaatgggtgacttgatgtcaaatgttgctttagcgatgaatggaggcgacggcgtgcagattgccatgtctggatgttatgcaggacctatgtttaatacacttgctggtttgggtatatcaatgctgcttggagcttggtcaacggcacccaattcgtatgttcttccgcaagaccactctcttatttacacaatgagctttcttgttgctggattgatctgggctcttgttatgctgcctagaggtgacatgcggcctaacaagatacttggagttggcctcatttctctttactcagtttttctttttattagggtaagcaatgctgtcggcatattgccactgcctggcttgagttagataattatttgcctgtaaagttgggattgacatcaatgtacttgctcatggctgccattttatataaatgaaatgtagttatacagtgt

SEQ ID NO: 31755 - DNA, 1940 bp, Zea mays
  Clone ID: MRT4577_128976C.1
cggcccggggcccgggcgccgggtggccacgggaccgcgcctcgcacgcgtccgaagacagaaaaaaaagaaagggaaaaaagggggtctgctgtggactgtgtggtcccgcaggtcgcaccattctcccctcgtcttccgccgagacaccctgcacggctcgccgagacttcagtttactggagcacgcaccgcagcgtctcccccttctgctcatcctccgtccctccgtcggaagggctggcgctaagggacgatccctccgtccgcccgtccgttcgacgggacctcggttggtttcgtcggtcgctgggaggacaggtgacggaacggtgatatgaggcggtggttatgttgtaactgccactatgacgtcgaggaagatgaccacgccaaggaacaggccaaagctcagagcaataagaccgactccaagcagaagtcttcaaagcctcctggtagtcaacctgagccagagttctcccctcctacaattgatgtccctgaattgtctttggatgatttgaaactaaagactgatgattttggatcaagtgctctgattggtgaaggttcttatggacgagtatatcatgccactttggacgatgggagacaagcagcagttaaaaaacttgatgcatctgaaaatgagcctaatgatgagtttctcaaacaggtctcactggcatcaaagctaaaacatgaaaatcttgttgagatgttgggttactgtgtcgatgggaattaccgtatactcgcatatgaatttgcaaccatgggttcgcttcatgatgttttacatggaagaaaaggcgttcaaggtgcgcagcctggacctgtacttgactggatgcagagggtcaaaattgctattgaggctgcaaaaggtatagaatatctgcatgaaaaggttcagccttcaatcatccatcgggacatcagatcaagcaatgtactgctgtttgaggatttcaaggcaaaaattgcagactttaatcttttgaaccaagcaccagatatggcagctcgtctccattcaactcgtgtattgggaacttttggatatcatgcacctgagtatgctatgactggccagctgacacaaaaaagcgatgtctacagctttggtgtggtccttttggaacttttgactggaaggaaaccagtagatcacacaatgcctcgaggtcaacaaagtttagtcacatgggctactccaaggttaagtgaagacaaggtgaagcaatgtgtagatcccaggttgaagggagaatatcctccaaagggagtcgctaagcttgctgcagtggcagctctatgtgcacagtacgaagcagagttcaggcccaacatgagcatcgttgttaaggcgctttcgcctctccttcaacaaagacctgcaccaaccaccgaagagccagctccacaacctgggagctgaaaccagtcacatgtgatgggacccctaggcataagccatctccgcaaccattcaatcagcacattctataaatcattgagagtattttgggtatttgttctgtagcgttctcagttgggtatagcatacatgaacttgcccctgctgtttgtggccacctagttcgtggcttgatgttggcgccgcacaatggtatatgcagttggttcgaagtttttttttaccttctctataccaataccaagtgaccaactgtttgtaggttttcataattcgcggcttgaagaatagatgcaggatggtctggattttttttgtttgtccgtggcgtggtgttgctgcctgacctacgtgatgtacttcctctcttccaaatcccaattcaccttttcttgttctaagctagaattatcaaactttgacttgtttatataaatatatttatggacgtccgaaaaaaaaaaaaaaaaacaaaaaaaaaaaaaaaaaagcggcc

SEQ ID NO: 31756 - DNA, 460 bp, Zea mays
  Clone ID: MRT4577_128977C.1
gttcctatgaacactgcgcaagggcggtggccaagagactgtccaatcttcctaaccccaatcactaagccaccgggccagcgcttgcacctaatctggaaaaacgctacaggggcggccgcgggcccgagcaccagggccagaggggcccccttacaagaaaagaaggagaaccggatccccgggaccccggggccccccggcgccacccaaacacgctagggcgggccggggggcccgcaccccctcgccccctggggcagggggcccaattcgcccccggcggcgggccgccggggcccccccacggggaaccacagaacgcccccattctcgaaagcgcgagaccgaaaccctgccaccaggagaccaggggagtccctgaccccgggaaaccggaaagggccagaggcggtaaccgtttacaaggggacaggggccaagactctaaaggtggagc

SEQ ID NO: 31757 - DNA, 871 bp, Zea mays
  Clone ID: MRT4577_128978C.1
ctcgggccggccgggacatccattttcatccctagctgtggtcccacaggtcgcaccattctcccctcttcttccgccgatacacacgccctgcacgggggctcgccgaggcttcagtttactactgaagcacgcaccgcagcgtctccaccttctgctcaacctccgcttccgtaggtgccggcgctaagcgaggatccctccgttcatcggtcccgacggcacctcgactcgtttcgtcggtcgctgtggcgacgggtgattgactgcgatatgaggcaatggttatgttgtaactgccactttgatgacgaggaagatggccatgacaaggaacaggccaaagctcagagcaataagatagaccccaagcagaagtcttcaaaacctcctgttagtcaacctgagccagagttctcccctccaacaattgatgttcctgaattgtcattggatgatttgaaacaaaagactgatgattttggatcaagtgctctgattggtgaaggttcttatggacgagtatatcatgccgctttagatgatgggaggcaagccgcagttaaaaaacttgatgcatctgaaaatgagcctaatgatgagttcctcaaacaggtctcactggcatcaaagctaaaacatgaaaatcttgttgagatgttgggttattgtgtggatgggaattatcgtatacttgcttatgaatttgcaaccatgggttcgcttcatgatggtttacatggaagaaaaggcgttcaaggcgcgcagcctggccctgtgcttgattggatgcagaaggtcaaaattgttattgaggctgcaaaaggtatagatatcctgcatgaaaagggtcagccttcaatcatccatc

SEQ ID NO: 31758 - DNA, 583 bp, Zea mays
  Clone ID: MRT4577_128979C.1
gctctttccggcatactggtttacatcggggcatactcaattggaatgggtcctgtcccttgggttgtcatgtctgagatattctcaatcaacatgaaagcaactggtgggagcttggtgacccttgttagctggctgggctccttcgcgatttcttactcgttcagcttccttatggactggagctctgcaggtaccttcttcatgttctcttcagccagcttgatcactgtactcttcgtggcgaagctggtccctgaaaccaaaggaaggacactagaggagatccaggactcactaaacaccagaagatagtaatgaatttacttcacactacagaataattaattctaagatggaaaaatgggaatttacaggacacagcagaataattccaagatggaaaacgaatgtaccgtcagacctctgctcatcgatagatatgtatacaagaaacaatatatataattctcacgtcctcccgcttcccctccctttctctcccgcaccacctccgtgtaatacgtagtgtactgtgtaccctatgtaagttaaggaatgctgcagattcagattacgcatt

SEQ ID NO: 31759 - DNA, 185 bp, Zea mays
  Clone ID: MRT4577_12897C.1
ttggtgaaactataagtaaatggtaattgcacaaacacgcacctaaagcgcaggcaaaccggattggttacctacagataaacattgtgggcccttatgaagcaagaaagattatgatccaagcctaactttgatgccaaaaccattgaaaaaaaggcgagcacttggggttacctgtgccgcca

SEQ ID NO: 31760 - DNA, 519 bp, Zea mays
  Clone ID: MRT4577_128980C.1
aagcacaattaccacaataaaatagaggaacatacaacatattttatttttttttttttggcagacaccgcttaataaaattagggtctaacctcccaccaatcctgattgggaaatgacacaaatttccaaaccttgggccaactcccaggtgactagcttatcatgggggacaaatttaaccttccatccaggggctagtgagactactaatttcttagggacccaaccaggcacaaaaaaaaaataccaatctttatcacacataggctcatacaaaaaataaacatttagcatatagatcactgaaagataaaactacagctcacgaactaaatataacccaaggtccttggtgccttaaacgggacagcagcaaaatatcttggaccctatgacaacaaaagggaacctcacaacacgacactggtattgagcatctacacggacaccgtacatccacggctacgcaagggctgcaaagaaaggctctaaagagaggggattcgacatacatgg

SEQ ID NO: 31761 - DNA, 297 bp, Zea mays
  Clone ID: MRT4577_128981C.1
gcttaagctaaatgatacatgtttttaaaataaaatcagattataaatttagtttttggtgattcattaaattctttactattatagttattttctagctgttcatcttttagctaaatttgttccaatgaagcaaaagtttggtttctactaagttctggattctggatgggagattgcactgtgtgtgacatgcaagtttcatggtgtgggagattgcagagcatttgggttactgcttttactctttggaagctgttatcatctgtatctgctttaaataaagttaaagatttg

SEQ ID NO: 31762 - DNA, 454 bp, Zea mays
  unsure (1)..(454): unsure at all n locations
  Clone ID: MRT4577_128982C.1
tnaatanttgtttggtaacattttttctctttttagttttttttttctctacacgcaaccaatgaaatacaggcacgtgttaacactgagcgtcacaggttctaaatggctaactagatcataaacaccgcgttcctactactagttcatgggtctacatgaaaaacctacgacgacctgcttcaagtgacgactactccgcgtaaccagaaagggtcccgatttaacgagggctaagagaacatggcgaaaaagaaaaaaacacaggggtggttctaacactacgatggcttgattcaaaataactataacttgttgaaaatcacccaccccctagccggggaagtgtccattcagcatggggaggaaagctaacaggaagggtccttgctggactgacacaaaaatgcagggctttccgatgtgtgacatcatctacacctcctgtccggtg

SEQ ID NO: 31763 - DNA, 253 bp, Zea mays
  unsure (1)..(253): unsure at all n locations
  Clone ID: MRT4577_128983C.1
taaaaaaaggccccaacaagccaacaagagcggcggcaaccatggagacgatggtcggttnttactgccaccggcaacttctcctgtttctcctcgtggccgacgcgtcagccttcctctgcttcgcggcagcgcattaattcttatcttgagagggctacacaatatcttgccgcgttaagatccattgcattagcctgaaaggcttttgtctttcaacaaagacattaaacacaaaagttatacttaattg

SEQ ID NO: 31764 - DNA, 258 bp, Zea mays
  Clone ID: MRT4577_128984C.1
aacgcaccccaccaactcatacccataccagaggctctgtgatattacttctccgcggtacatcggcagatcgagcgaacgaggcacacggagctagctatacacgagcacacgggtatacaagcaagatgtcggacggcacggacacctgcatcgacatcatcctcgccatcatcctgcagccgctcggggtcttgttcaagttcggcagccgggttgagatctggatgtgccttatcctcgcgttcgtcggctacc

SEQ ID NO: 31765 - DNA, 578 bp, Zea mays
  unsure (1)..(578): unsure at all n locations
  Clone ID: MRT4577_128985C.1
gggtttccctggtctctcgctctcgaagccgccgccgcccaacggactcccttctcttcctcgcgcaaacatcggagccccatcctctacctcgcgcagaacaccctcgcgaaacttcgctgccacccatcgtagcctcctcctcttcgtcgcgcctcctcagctcgcgcccccgacgtctcactggtcacagcttccggatctgaagaagcaaatcacctcaactgcttctcgtgacacagacaaatctgccatcaagttcctgcaatatcttcaatctccgctgtcgcctgtcctaggtaagaatcacgtgctcctagcctctgatgttgcgttctgattttgctttctaacgtctctgtcctaggtgcgagtgcatttatctgtgcgtattcggccatatttttgtattgtcgtgtaaagtagctagtaatcatagtcttggatttaggttttagctgttaagatcttcgataaaactggactaaagcatttgatctaaattaaggaagtcgatgagcccctttgtgcagtatctctgcaaccaacacccnttgtaattntatggccaacatgtt

SEQ ID NO: 31766 - DNA, 405 bp, Zea mays
  Clone ID: MRT4577_128986C.1
acgcaaccgccgaggcgtgggcggacgcatggacacggtatctacaatgactcattttctgtttcttcatgccacgaggaataccgggggctggtggtggtattgatgcttgccatatgccaaccctgcaccgaaatctttggagataactaccgattacaatttgccggctgaacactaggacatccccgggaagatgcacctggagcagcaactaatcaagtggctatagaagcctgggtacaagctcataacgaagggcgcgagcctgctcatgaaggtaaggaaagcatcaaagcaactcgcacatggaggggtgaactagccacagctggtgaaatatcgaatgaaatcaaataagatggtatcaaagcgactgttaccatatcctctaacaaaaaatac

SEQ ID NO: 31767 - DNA, 498 bp, Zea mays
  unsure (1)..(498): unsure at all n locations
  Clone ID: MRT4577_128987C.1
cgccatcccctgtttggccgccatcccctccccctaattccctctctcttgtgcagcaccccccatcccctcaaccctagccgccacccccctcccatctccttctccaagtgatgtccttcctcgccggatcttcttcgtgtgggtgcaagttccgattggagaattggtgggaggaaggaaggaggaaaggaggaacccaaggtggtggacttccggatcgtacttagtaccattccaaattcccggtgaaggtacttgatatatgttgggaatgaggggagtagcagcacgtccactttcactctcatattaaggctgcccaagcgcatccatgatttaattagaaacttgatgtcaaaggatgtttgtttttttactagtcatgcgcactggttaattcagttcatgtcgtatgtttaactttcctttgctagccgtttaataatacttagtatgtttttttgccncactacttnaccnntcccntcaataaaa

SEQ ID NO: 31768 - DNA, 398 bp, Zea mays
  Clone ID: MRT4577_128988C.1
ccagtccatatgttctttttttttttttttttataaaaaaaaaaacgcccccaggcctactaacctagacaaaaaaaccccaaaaacaacgaaaatcctctttcaaaaaaaaaacagcaggggccacggggggcacatctcaaaaaaaaaaaaggggcacaaccacctttgcacccactgcaaagagaacatgccccccaaccagaaaacctggaaacgcaccttggcccaagggagggccatcctacaagaggaagcccgaacaaaggatcaaggtacccctcatgagtaaaaagaacagagggcaaacacaaaatgactccacaccaaggctggctaacacagatatagtcttaaaaaaacacctgcaaaagccaggaaacccagctaatgtctgg

SEQ ID NO: 31769 - DNA, 360 bp, Zea mays
  unsure (1)..(360): unsure at all n locations
  Clone ID: MRT4577_128989C.1
gcgtccgctcttccgtcgtgtcttctcggtcttgccatggcacgagnaccatcacccccgncctctgtaagcttcccttgacgtcgtcgtcgtcatccatggagagcaaggacggcacccacgatcccgccacgacggccgcgccaccggccggcgcgccgcagcccgcgatgccttcgggggggggggggcggtnnngcacgcggcagatgggcccgccggcggcccccggggcgcacccggagaaccaggaggcggcgcggtggacggtcgtgcgcggggaccaggagctgtcggcgtacgttataattggtgagcccgtgggggtgttgtttgtgtcacaggagtggggtaaggggg

SEQ ID NO: 31770 - DNA, 164 bp, Zea mays
  unsure (1)..(164): unsure at all n locations
  Clone ID: MRT4577_12898C.1
tcccactctttcncccacacntncttcctcttctccctcnctccacatctcccttgggagccgnccaaggaccccgggacagggcnnnanatnnctcatcangaggccccacttgcacttgaggcaccaaccccacttcttggagagccaatggactttatgac

SEQ ID NO: 31771 - DNA, 443 bp, Zea mays
  Clone ID: MRT4577_128990C.1
cccgggccgatgcacgcctctacactgagtcgtattatctcgtcgagagtagctagccgcccttgtgcagacatgccaccgctccgagctcgacgtgccgcccacgcacgagagccccgcactgcaagctcgctccgccgcgccgttcttgctcgaggttcgccatcgcggaacgaatccctgcaccagccgagctcgatccgacgtaaaaccgttggtcgttccttcattttctctccgctgttccctcctctctgttgcctgctcatcgatgagggatatacgtgtacatctgggccaacacgctggcccgaagcacgatcatacacagcctaggtgttggtggccttcatcttcgccgaaggtcttctaagcacagacactttccgcaggactatctgcaggcttacatcacgtgaacgtataggccgaatctacaattc

SEQ ID NO: 31772 - DNA, 436 bp, Zea mays
  Clone ID: MRT4577_128991C.1
taaagcctgaaatcttccagttttgtccatgtttgggcgtatggctgtttgccttgttcaaagcctgaagccatgtccatggacgtataggcgtatggctgttgcctgtttatccactgcagttcaaagtccgaagccatgtccaaaccctaatctccctcccatcttgatctcgcgtcgcattggcgatgtatcctgttcccggcttccggcggctcgacggcgatgagcggctccgtgcatcagtgatgccgcgtcacggtggccaagacgtgcgggccgtggctgcagcggcggtgcgcccctcggcatcggcgagccacactgcgcatccgcgattccacaccaagttggacaaaagcggcgcaaagaacatgcatccttggaagtccaatcaaccatgtagatttcaccgagttttttgggcttttgttag

SEQ ID NO: 31773 - DNA, 217 bp, Zea mays
  Clone ID: MRT4577_128992C.1
caacaatgtgttttacgatatccccactacaacttttttttaacacgatattatcactataacttgatatgtgtggtgggctgaaaaacggtttccttcgcccttgtgggtcctcggcgataagggtgaacaagccctggtcttctcaaaaaaaaaagagagtggaggagtgtgagaggaggaaagagaggagttagggggtgaaagagagggtgtg

SEQ ID NO: 31774 - DNA, 195 bp, Zea mays
  Clone ID: MRT4577_128993C.1
ggggcgagcagccgcccttttttttttttttagcaatctgtttcttaattttcatgtcttaacatttcggtacttccaggaccaggagtgttactgtaataacataaattctacattgtccttatataggattatatgatgtacctagtcaacatttcagctgtaaattgtaataataagaagtatttttctgcc

SEQ ID NO: 31775 - DNA, 287 bp, Zea mays
  Clone ID: MRT4577_128994C.1
cggccggggagcgcaaggcgtcttcgtcgtcgtagacggcggcaatgacggcccccaggcagctagggtggtcaactcagcgcctggatgacaccgtaaggccgccacgtggacaggctgttcccggggcacctccacctcgggaacggggtcgtgctcgccggccagtccctttataccatgcatgccaagggcacgcccatgatcccgttagtgtccacggacggcatcaattcctggacgcccgacacgggcatggggaaaatcgtggtgtggatgttcggagc

SEQ ID NO: 31776 - DNA, 283 bp, Zea mays
  Clone ID: MRT4577_128995C.1
caagccagaagcaccagccgccgcacgcatcttcgccagaaagcagaaagctcctgtccttctcctcgtcggcatacggcgtcgagctgccgtcctgccgccccagccacctgtcgctgccgcactgccgccccagccacctgccgcactgccctgctcctcgtcggcgtacaactgccgaagtgccgaccctgctcctcgtcggcgtccgacgtcccttgctttgagcagtagcagcactgctgcacgcctgagcagccagcaagcagtagcaatattattg

SEQ ID NO: 31777 - DNA, 293 bp, Zea mays
  Clone ID: MRT4577_128996C.1
actggctaccttggtgctcacaccatatgctatgaacccagcctctctctctccgtctagcagcctattacatttatggaccagatcatgatttgcatcaatgcgcgccattggatctgctggctggcggccagggctgctcctgcatagcgacgacgcagagctcgctctcggaacatacgccttgtcaggacacaataatgtacctcatgctcaagtatgacactggagtcagacactgcaatgaccatgatgcctgtgagtatgactcatataccgtgctcattggccat

SEQ ID NO: 31778 - DNA, 1747 bp, Zea mays
  Clone ID: MRT4577_128997C.1
gtacccttcgaggccggccgggaggccgctttgattctctagcgcggctggggactgggggtctagggtttaggcttccaaaaatcaagcaaagaaaatattcgcagtgttgcgcattgcgtgcctcgaggccggccggggggcccccaaaaatacgtaaaagcagagtctgcccctccccgcgccgttctttttggttccccactccccagtccccgccgccgccgaaacccgcagatggaggtcgtcgtcgccgcgaagcagaaggcgaagaaacacatacacctcttctactgctcagaatgcgaggagctcgccctcaagatcgccgccagctccgacgccatcgagctccaatccatcaactggcggagcttcgacgacgggttcccgaacctgttcatcaacaaggcgcacgacatccgtgggcagcacgtggcgttcctggcctccttcagctcgccgtcggtcatattcgagcagatctccgtcatcttcgcgctgcccaagctattcattgcctcattcactctcgtgctgcctttcttccccacgggctcattcgagcgcgttgaggaggagggcgatgtcgccaccgcgttcaccctcgcgcgcattctctcgatgatccccaagtcgcgcggcgggcctaccagcgtcgtcatctacgacatccacgcgctccaggagaggttctacttcggggacgacgtcctgccatgcttcgagacagggatcccgctcctgctgcagcgcctccgccagctcccggacgcagaaaatatcaccattgcctttccagatgacggtgcgtggaagcggttccacaagctgttacagcactttccaatgatagtctgtaacaaggttcgggaaggtgacaagagaatagttcgtataaaggaaggactacctgaaggccgtcatgttgttattgttgatgatttagtgcaatctgggggaactcttagagaatgccagaaagttctagctttgcatggcgctgcaaaagtcagtgcttatgtgactcatgctgtgttccctaagcagtcatatgaacgtttcatggcgtctagttctgctgggccaggcgaccaatttgcttacttctggatcacggactcatgcccacacacagtaaaagctattgggcaaagacctccatttgaggttctgagcctcgctggctcaattgcagatgctcttcagatatgagcgtacactggtagatgggcatgggcttgaattgttgatgcccaccagattgaaacttgtactatgaggtggaatgctcccgcttttcctaaatgtaagagttggtttccagttcctggaaaagcaaataatgtgtagtaagttaagtacctgaaggttccataaacagccctgtggtttgtaataaaatcaggcattggatactcaattgttgacagctgtgtatttgtcaatgttcacttctgtttgaagtgcgcgagaccagtgctttactttcctgacccgtcggagtatcggtttagcaacttcaggtactgggctttgttgtgaacaaatagtgcaatgtaactgaacatgaacctaattgaatttctattagattggatggtcatattgcaaccatgaggggggggaccttattcgattttcctaaaaaacggagggcccttggggcaccccataattttaaaacgccccccccccgggggggcccccccttttttttccttttaagggggggaaaaaataaaaa

SEQ ID NO: 31779 - DNA, 289 bp, Zea mays
  Clone ID: MRT4577_128998C.1
ccctcttgcttgcgaactataatagctttttttatcgggtcaccttaaatccaattcactacccccccttttgttgtggtggggggggggggaggaaaccccttacaatctcccaatttattccccctttcatcacaaccccttttccccatttaacttctctacaaaaaagcccttcccaatcccctttcccaacaattccccatcctaaatcccaattggaaccccccttttaccctctctttaagcgcgggggctctcgtttttactttttttttgcccgttacct

SEQ ID NO: 31780 - DNA, 1229 bp, Zea mays
  Clone ID: MRT4577_128999C.1
attgggtacctcgaagccggccggggcgccgttctttttggttcccctgtccccgccgctgccgaaaaaccgcagatggaggtcgtcgccgctgccgccgccgcgaagcagaaggcgaagaagcatatacacctcttctactgctccgaatgcgaggagctcgctctcaaggtcgccgccagctccgacgtcatcgagctccagtctatcaactggcggagcttcgacgacgggttcccgaacctgttcatcaacaaggcccacgacatccgggggcagcacgtggcgttcctggcctccttcagctcgccggcggtcatattcgagcaggtctccgtcatcttcgcgctgcccaagctcttcatcgcctcgttcacgctcgtgctgcccttcttccccacgggctccttcgagcgcgtcgaggaggagggcgacgtcgccaccgccttcaccctcgcgcacatcctctccatgatccccaagtcgcgcggcgggcccaccagcgtcgtcatctacgacatccacgccctccaggagaggttctacttcgacgacgtcctgccatgcttcgagacggggatcccgctcctgctgcagcgcctccgccagctcccggacgcagagaatatcaccattgcctttccagatgatggagcgtggaagcggttccacaagctgttgcagcactttccaatgatagtctgtaacaggttcgtgaaggtgacaagagatagttcgtataagggaagaaatcaattgggcaaagacctccatttgttgttctgagcctcgctggctcaattgcagatgctcttccgatatgagcgtacactggtagatgggcatgggcttgaattgttgatgcccaccagattgaccacttgcactatgaggtgggagcatactagcgcgagtagttttcattttcacccctgcctctgtatccgagcatactagcggatcctggcccgatccctcttcccaccccacccacctccgcttctctccaagtgaggaaccccaagtcctcgccatggcgtcgcggatcctggcccgatccaaggcccttcccctcttttttttcctcacccccgccgctgccaaagcaacaccgcctatcgccggagctcgcgcgctctcgtccctgccccgctacccgtctgccccgctgccccctgggctcggaaaggctctggcatatgatacaacatctcacctcagtggaccac

SEQ ID NO: 31781 - DNA, 683 bp, Zea mays
  unsure (1)..(683): unsure at all n locations
  Clone ID: MRT4577_12899C.1
cctagtcacacgggagtacgggacacggctgcttgcctgcgccccttggtcctttccccgcttgcctttgcctttttcgggtgggctcctcccctccacccctctctctctctctctctctcatggcccgccccaggaaggcgaaaccgccgccgccgccgcctagggcggcggcgccgtccatcgccgaggcgctgctgatggncacgatctgcatggtgggtctggccgtggaggtgcggntncgcgacggatccacctactccgncgnnctccacaccgnctgcgnnnatggcgnnnacggtggcgtgctanagaaagcnnagaagattgcnaacgnnaaggnagatgcnantctgncnctgnnatcgnntgtggacnctcttggtggtcatccanatgancttggtcnagtgattgctaaggncctttcactccccngttaaaggtgtttgtaaacctcttgactccaacgtggtggcttccaatgggtccttgaagcgtcaaaattcacatgcaaatgaccccaaaatggctaaacctgaaaatatatctccacttatgcaaactgagaaatgcacctctgtggggcaggggaaaaatacttctgttaagaaaaatggtcaaaatagtggtagcgttaacaagtttaaggttcttctaccggacttatgggggcatgt

SEQ ID NO: 31782 - DNA, 397 bp, Zea mays
  Clone ID: MRT4577_1289C.1
ttttttttttttttttttttttttttggtttttggttttttttgttttttttttttttttttttttttttttttttaaaaaaaaaagggggtcctgatataggggaacaagtttttggattacataaaaatacttctagcaaaccaaaccaaaatcacttggcttttctcatttaggatcaacaaacaaaagaaggggggaaaatagactttttcttgggcacaaaacccattcaacttttagttccccttcacacaaaacttttacacaacaccccaagaaagacttttcaaggggcctttctttgaaaaaattctttgggaaaaccaacacccacttttggcctttcaccctcagggaagggtgaaaccttaagcattgggcctaatatttgcat

SEQ ID NO: 31783 - DNA, 387 bp, Zea mays
  Clone ID: MRT4577_128C.1
tgcacgcgtccccacttagacctaacgcaccattcatgtatcggacatgggccgaactgagtgtaaaagcgcattgatctaccagcctcctagcctggtgcctgctgtcacactacccaaggggccgcctgccgcgttcatgagacacaccgcaagcaggctgtgcaagaggcattggcatatgcacgccacggtactgctaatgtaccactagtgatactcaaggcactcttacttgtcggacaacttaacttcacaggcccttgttagggcgacgtgaccatccagctggattgcagtctgattacgaccacggacctaatccagtacatggaccatggtaattggatcgagattatacgtgctgataacctgttcatcacccgc

SEQ ID NO: 31784 - DNA, 992 bp, Zea mays
  Clone ID: MRT4577_129000C.1
cctcctcgcgccgttctttttggttccccactccccactccccagtccccgccgccgccgaaacccgcagatggaggtcgtcgtcgccgcgaagcagaaggcgaagaaacacatacacctcttctactgctcggaatgcgaggagctcgccctcaagatcgccgccagctccgacgccatcgagctccaatccatcaactggcggagcttcgacgacgacgtcctgccatgcttcgagacagggatcccgctcctgctgcagcgcctccgccagctcccggacgcagaaaatatcaccattgcctttccagatgacggtgcgtactgtctttactacaagcgtttatcacactttcagttgataaatatgagtgttaatcgggaacatgacaagagaataggcatatatactctgtcttccaaagaatcacttaatctgcttacattacctgacactttttttttaaaaaaaatatgtcttgttttgcagaaagttctagctttgcatggcgctgcaaaagtcagtgcttatgtgactcatgctgtgtttcctaagcagtcatatgaacgtttcatggcgtctagttctggtaattggcagtttatccaacttagcaattccgaatttttcttgttgcttattatgtgttaatcacagctgggccaggtgacagatttgcttacttctggatcacggactcatgcccacacacagtaaaagctattgggcaaagacctccatttgaggttctgagcctcgctggctcaattgcagatgctcttcagatatgagcgtacactggtagatgggcatgggcttggattgttgatgcccaccagattgaaacttgtactatgaggtggaatgctcccgcttttcctaaatgtaagagttggtttccagttcctggaaaagcaaataatgtgtagtaagttaagtacctgaaggttccataaacagcccgtggtttgtaataaaatcaggcatggat

SEQ ID NO: 31785 - DNA, 1493 bp, Zea mays
  Clone ID: MRT4577_129001C.1
cctcgaggccggccgggattacttcatttcgttttgggcccaagggtacaacaacatactacacaggacaggaggaggataggctgttgtaaatcaccatcccaccagtcaggaggataggctgcatgcttcgtgatggcagggccatggagatggagaaaaccaacgcgtccttgactccttgagcaagtagcccgtcgcgttcagccggcggcgcgctccatgccgatccgtctcggcgtcgcatacggcatatgccagtcgccttcgcgtcggtctatataccggggaaattcgcgttatcttcatccccactttgttcgcctcgccgcatcttcgcatcgacgggccgccttgtttcaatagcgcgccgctggggactggggtagtggggtatagagtttaggctcgcaaaaatattccgtctcgataaagccgacatcaaaacaattcggcacgagcagccgcccctccccgcgccgttctttttggttcccctgtccccgccgctgccgaaaaaccgctgatggaggtcgccgccgccgccgccgccgcgaagcagaaggcgaagaaagcatatacacctcttctactgctccgaatgcgaggagctcgctctcaaggtcgccgccagctccgacgtcatcgagctccagtctatcaactggcggtacgcgaccctccccttcctctctctctctcctcttgctcgttccgcctcaccgatttcatggagcaagctgattcgtcgagtcctttgtgacgctgcaccacgccacctggagcttcgacgacgggttcccgaacctgttcatcaacaaggcccgcgacatccgggggcagcacgtggcgttcctggcctccttcagctcgccggcggtcatattcgagcaagtctccgtcatcttcgcgctgcccaagctcttcatcgcctcgttcacgctcatcctgcccttcttccccacgggctccttcgagcgcgtcgaggaggagggcgacgtcgccaccgcgttcaccctcgcgcacatcctctccatgatccccaagtcgcacggcgggcccaccagcgtcgtcatctacgacatccacgtgctccaggagaggttctacttcgaggacgacgtcctgccatgcttcgagacagggatcccgctcctgctgcagcgcctccgccagctcccggacgcagagaatatcaccattgcctttccagatgatggagcgtggaagcggttccacaagctgttgcagcactttccaatgatagtctgtaacaaggttcgtgaaggtgacaagagaatagttcgtataaaggaaggaaatcctgaaggacatcatgttgttattgttgatgatttagtgcaatctgggggaactcttagagaatgccagaaagttctagcttcacatggcgctttcaaaagtaattgcttatgtgacccatgctgtgtttccctagcagtcatacgaaaatttcatggcatgtaactctg

SEQ ID NO: 31786 - DNA, 327 bp, Zea mays
  Clone ID: MRT4577_129002C.1
ggggggggatttcaagagccattttttttttggcaaaatgccgggggcccaaaatgttttttaaaaacccatttttgggaaaaaacaaatgccttgggtttttggggaaaacctttgaacttggccttttggaacaaaccccttttttggcgaaaattcccccatgtcaagccttgaaaacttttgggaccccaatttttttttttcaaaaccctgttttaaaccctttaaaacccctgggggggccttggaccttctggctttgggctcacccggggggaagggttcattttttcccatcccgcttttaaaaaaccgaaggggggt

SEQ ID NO: 31787 - DNA, 772 bp, Zea mays
  unsure (1)..(772): unsure at all n locations
  Clone ID: MRT4577_129003C.1
attcgccctcccggccgacatcacgaccgcccgatccggccggagcctctccctaccccttccgcgcctccgcgctgacgaccgtcgcggcgtccgcccctcgagtccaaccccaattctgccgtggccgcggctctctgaatccccaattttttcacttcccccaagggccgcggggatgaaccggatcccgtccgtctcgctgcggggcggcggggcgaacgaggacgccgcggcggcgtcgccgccccccgatcccgcggcgctgtcgcggtgggtgcgggccttctgtgtcatccggttcgacctggagcgcgggcagctggtggaggcctgcttccctcccgacgcgctgacggcgcccggcagcggcctcgaccgcctcgtcgccttctcgtccttcccggactccatgtctcaccacctcccgcgccaccgctcctccgtccacgactcgctcttctccttccgcatccccgacccgtcctccccacgccgcgccttcctctacggcttcgttttcaaccgccagcgccaggacgagcgcctcccccgcggcggcgagcagaagtccgtagtcatcctctcccacgccccctactcctcgctcttccgcctgctgctgcagatcctcggcccgctctgctttgacgtcggcccttccgcactggccatggtggcgtcgcacgttgccgtgtggccggcgccggcgccagggcacccaatggagcttccanttggcagtgccgcgctgcgcgtgcacctcccgcct

SEQ ID NO: 31788 - DNA, 672 bp, Zea mays
  unsure (1)..(672): unsure at all n locations
  Clone ID: MRT4577_129004C.1
cgtggtcaccgttggtggcttcgtgcaggtgcaagaggaggtcgaggcagggctcaggctcatgcagagcctgcgctacatcgagagggcgccggcggagacgccggcggcggaacgggcggcgtggaagctggtgttccggacgccgccgcagctgccgatcttcacgggcagcaagatcgagggcgaggccgggaggccgctggaggtggtcctcgtggacgcgtgcaccggctcgcccgccgcgcccccggtcccgcgggcgctgcgcgtggagctggtcccggtgttgggcgacttcccgccggacgggcgcgaggactgggccgcggacgagttggagaggagcgtcgtgagggagcgcgagggcaggcgcccgctcctgaccggcgacgtcggcctcaccctgagggacgggcgcgccacggtgggcgagctccggttcacggacaactcgtcctgggtccgcagccgcaggttccgcatcgccgcccgtgcggcccgcggcagcggcggcgcgcgggtccaggaggccgtgacggaggccttcgtggtcagggaccacaggggcgagcggtgccgcaagcactacccggccgccctcacgnacgacgtgtggaggctggagaagaccgcatgggaggcgtgttccacacgaggctgatgtgccgc

SEQ ID NO: 31789 - DNA, 220 bp, Zea mays
  unsure (1)..(220): unsure at all n locations
  Clone ID: MRT4577_129005C.1
gttgtctcggcgatatggcgagcgattgtggcaatgctggcgctgctgttgctgtttgtggccactgcgatgaggttctctgccgctgcggcccggattcccggtgtttactgcgnctgaggcttgcagatctcgcactgcacggtctagtgctgcatcgacgctgctggtactattggtcgtccctgcgtcgattgcaacgtgtacatctaggggtact

SEQ ID NO: 31790 - DNA, 495 bp, Zea mays
  Clone ID: MRT4577_129006C.1
aaaaaaaaaaaaaaaaaaaaaaaaaaaaaaaaaaaaaaaaaaaggttaaacaaaaaacgaaaccacacataaagaacaaaattatgaaaaaaaccataaaactagaaaaaacaactccaacatacataaaaaaggaccaaaattggccctctcgtgggccggaccccccttagggggacttttggggatttcccttccaactgggggccccctggccttccccaagggggcccccttccccctttttcgcgtttttatacctgtctttggccccttttttccccccccgttccctgttaaaaccggtggctccccctttttggcgactggacgccccctccccctttccctcatgggctgagtgggtgggggcccccccagcgcccttttacacttgccccccccctaatggccaattgtccccctcctttcccctccttttacgcccgggggggggggggttcccgccacgcgttgcccggtccttttcccttc

SEQ ID NO: 31791 - DNA, 451 bp, Zea mays
  Clone ID: MRT4577_129007C.1
tccctatttttaaaaacaaagactcgcctagacattcacaatgggacgtcccgacggcccccgcgaccccatcgccggccccgacaccccccaaccacccttccccctcaaactccggggtcccgtaatcaaaggcttcggacgcggcagtaaagaactcggcatccccaccgccaacatccccctctgcgggctctcaatcggcggcaacgaagacctcgactcaggcatctactacggctggtgcaccctcgacccctccaccatcccttcttcttcctccccaccctccaacgccacaacaccctcagactcaacaccctcagactcaacaccctccgcacccccctccacatcctccaaccacgccgtcctcgacctaaactaccccacctcccccgcccccttaccgtaaacactctaccccaccgtcctgtccatcgtctacaac

SEQ ID NO: 31792 - DNA, 542 bp, Zea mays
  Clone ID: MRT4577_129008C.1
attccggccgggctcaaacagaacgccatagcgcagctgagagagagaacagaagggaggagagagggcctcgccggcgaccttcgctccggccttgatgtgggtgcccagttcctcgctgggcagtgccgagcgtacaccgagaaggtcgcgctctcgccggtcaagtctggaggacgagctgctcagaatgcgtcgtcagcattgagagaagtcatgggctcctacacaaatgcaatccgccgtcgtctacgtctcgaccaacgcgtgaggttacgagccacctgaagaacaagttggtagctggaatctcaagtcccaggtcaagaacaggtaccgcaggatgaggcgcttggaggatgctgcgatgtgttcgtgagaggtctaggtcgtcgtctcccagtcaactttgggttgctggaccgttgtctccatataatgtaataatttatttactttgtacagaactccgattatatagtaaagatgtgacattcgatcaaaaaaaaaaaaaaaaaatttgcggacaaaaagtcgacgcg

SEQ ID NO: 31793 - DNA, 154 bp, Zea mays
  Clone ID: MRT4577_129009C.1
cccttccaaaaggcgttgcctatgatgaaagtggaaggtattcgaacattaagagaccggtccagagcttcaaaagcattggtttcgatgaccacttcgatattatgtttgatgaactgatggagagcaccaagaagctgatccaagcaacatt

SEQ ID NO: 31794 - DNA, 486 bp, Zea mays
  Clone ID: MRT4577_12900C.1
aggaagcataaactctttatagacctatctctatttttttctcctattaaggaatgcaacgcaatgcactaagctcattcaaacggaggaaatatggcacctggttggcatatcgatccaattatatatgaccggcttactgacaaccaattggcacccatttcctgatgggacccaaaccaacgaccctctgattatgcagcacagctccttatcttgaaccggcacagcatattcttctttcttgactccgcactggtcacgcccaaaaccatcttgccaatctcagccgacttaaatctgcccttcatgaagggctccttttaaacggggaccttgcaaatcttctgcacaaagaccgtgtaccctaccttcgagttgggggtgaactccaagcgcttaactcacctcccaccccagcacgacttaattcccacaccacagtgttagttcatcaaccgctgggatctcccaaactctactttg

SEQ ID NO: 31795 - DNA, 597 bp, Zea mays
  Clone ID: MRT4577_129010C.1
tcgccggcgaccttcgctccggccttgatgtgggtgcccagttcctcgctgggcagcgccgagcgtaccccgaaaaggtcgcgctctcgccggtcaagtctggaggacgagctgctcagaatgcgtcgtcagcattgagagaagtcatgggctcctacacaaatgcaatccgccgtcgtctacgtctcgaccaacgaacgccatagcgcagctgatcgagagagagaacagaagggaggagagagggcctcgccggcgaccttcgctccggccttgatgtgggtgcccagttcctcgctgggcagtgccgagcgtacaccgagaaggtcgcgctctcgccgatcaagtctggaggacgagctgctcagaacgcgtcgtcggcattgaaagaagtcatgggctcctacacaaatgcaatccgccgtcgtctacgtctcgaccaacgcgtgaggttacgagccacctgaagaacaagttggtagctggaatctcaagtgctaggcaagttgtgcccttgatcacttatttttacccactcatgttctaattaatcataatgatctgcatagggtaattttgatgggtcctaataggata

SEQ ID NO: 31796 - DNA, 1146 bp, Zea mays
  unsure (1)..(1146): unsure at all n locations
  Clone ID: MRT4577_129011C.1
tcgtagtcctccacctctgtccctcccacgtgtactctcacctcctttctctcccctccgacccccacgttactgcctgccacgttcttggcgcttcgtttctcttcgtcccatcccatgccgtccagttagttccgttggcctgataacattgtttcttggagctttcatcctctgccaaaagctcgagcggccacgaacgcttccggcgtggctcggagctggcaaccgtcgtggatttgatcttcccggggcgcctcgagctcgccggcgccagggaaggtggtgacgccagcgtccacggtcaggagatgacgaccgcgcggcagtggtggcggcgcgccacggcggcagtcaaggacaggaggagcttgtacctgagacgcgtggcggcactgcgaccacggccggcctccggggtggccgcggcggtgctgtggagccccgagctggaggcggccgtgatccgcgcgactagccatgacgagcggtctgtagactacgggaatgcggcgcgggtcttcgccctggcgcgcgcgtcgccggtgtcggtgcagccgctcatgtgggcgctggcacgccgcgccgggcggacccggtgctgggccgtggcgctcaaggcgctcatgcttgcgcacggcctacttctgcggcccgacctcgcgccacgctcggtgcgcctcggccgcattcccttcgacctcgctgacttccgcgaccgctcgtcgccgccgtccaaatcgtcgggcttctccgccttcgtgcgcgcctacttccgcttcctcgacacccgctccctcttcatcgcccaggatctagatgccgtcgccgacacgggcgagaccgacggcgaggacgcgaggctggatcacgtgaccaagcagcagcacctgctgcacctgctcctgcaaatccgaccgtacggggacggcatggagctgggcctcatcttcgaggcgatggactgcgtcgttatcgagatcttcgaggtctacagcgagatatgcacgggcattgcccggttcctcgtcgccgttctcggctcggccccgatgacgccacgggcacggncgggagagacgttggcggcagcgaggcggccgaaggcagtgcaagggatgcgggtactggaaaatgcccgcgagc

SEQ ID NO: 31797 - DNA, 394 bp, Zea mays
  Clone ID: MRT4577_129012C.1
caaacataaaggctctgttaatgctgttactttcaaggctgctgacccatgcacgggtaggattctttatgattactgccctgattgctatgagtttatcgctgccgacactttggagggagatgttctggaggaaggtaaaggccatctcagatactcatggatcttgtgcattcataaaggatcaaattacagaactggataatcaaagtactggctgtgccataggtggaacaccctgaattaggcataatacaaattccgagaagaaaagcataccttggtgtcaactagattcctaatgagagccacatgcgggatgaatatacactgttgcaatgagaacggataatgactgcatatggttctattcttcaggatgctgatcttaagg

SEQ ID NO: 31798 - DNA, 226 bp, Zea mays
  Clone ID: MRT4577_129013C.1
tgacgttgtgttgatacttttgtccttgaggcttgcagtctggtatctttgcttcctgttggggtcatgagttgtggttagctcgtatagttggatggcgttttgaggatctccaaggcttaattaatttatgatgggttgatcttgcaggtgaaaattttataactggatttttctaacatctgggaatttatgtaaaaggaacatgctacacagtctttgttgt

SEQ ID NO: 31799 - DNA, 725 bp, Zea mays
  Clone ID: MRT4577_129014C.1
tcggcaccggcgacgcccggtccgacctgcagtcctggctgagcggcgcgctcgggaaccaggacacctgcaaggaaggcctggacgcgaccggctccgtgctgggctcgctggttgccgcggggctggacgccgtcacgtcgcttctggccgacggcctcggccaggtcgccggcggcgacgacgcgaccgctccggcgtcgtcgttgccgccctcctcctcccgccgcggcgccgccccgccgcggtggctgcgcgcgagggagcggcggctgctgcagatgcctgtggggcccggaggcctggcggtggacgccgtggtggcgcaggacgggagcggcaacttcacgacggtgggcgcggccgtggaggcggcgcccgcgcagagcgcggcgcggtacgtggtgtacgtgaggaagggcgtgtacagggagacggtggaggtgaagaagaagaagtggaacctgatgctggtcggcgacggcatgggcgccacggtcatctccggccgccgcagctacggcgacggctacaccacctaccgcagcgccaccgtcgctgtgaacggcaagggcttcatcgcgcgggacctgacgttcgagaacacggcggggccggcgaagcaccaggccgtggcgctgcggtgcgactcggacctctccgtcttctaccgctgcgccttcgaggggtaccaggacacgctgtacgcgcactcgctgcgccag

SEQ ID NO: 31800 - DNA, 818 bp, Zea mays
  Clone ID: MRT4577_129015C.1
gtcgtccccccttccatcattctcccaaaacgacaccgccgaattccccggccgcgccgatacccaccctacaccattccgcgattctaccaccggaaacggcggggagcgccatggcgtacatgtgcgccgacagcggcaacctcatggccatcgcgcagcaggtgatccagcagcagcaacaacagcagcagcaagagcaccagaggcaccaccaccaccacctaccgatgccgctcccgctcccgcccccgccgcgccaggcgctgcctatgccaccggccacggcgcccccgcacggccagatcccggcggcgtccctgccatacggcggcggcgcgtggccccaggcggaccatttcttccctgacgccttcgtgggcacgtccgcggccgatgcggtgttctcggacctcgccgccgccgcggacttcgactccgatgtctggatgaacagcctcatcggggacgcgccggtcttcgcggactccgacctcgagcgcctcatcttcaccaccccgccgccgccgccgcccgtacccgctcccgctcccgctcccgcttctgctgtggcccccgtcgacgcggcggcccagcccgaggccgccaccccggcgtcgcttccccagcctgccgcttccgacgatggggacgcgtcggcctccgtggcgtcccacttcccgcgcctgctcccccgccggctcgcagtccccggcggcctggtcccgccaaccctcgccggcacggggctcgcgcttcgcccccgaccgacccacgctctgctacaaacgctccaagacggctgcccctactccagg

SEQ ID NO: 31801 - DNA, 303 bp, Zea mays
  Clone ID: MRT4577_129016C.1
ccactcgacaaccgcatatacaggcgtgtttgtactcgcctatctgcgtgacccaaagcgttcccccttctaccattcttctctcatttctcaccaccgccgacggtaccccctttcgacaacaccatgagggagtgcctctcgatccacatagggcaagccggtattcaggtcagaaactcgtgctgggagctgtactgcctcgagccttgcattcaagctgatggttaaatgccccgcgaccagaacattgggggaggggatgaagaattgaacaccttcttcagagagaatggaactggg

SEQ ID NO: 31802 - DNA, 984 bp, Zea mays
  unsure (1)..(984): unsure at all n locations
  Clone ID: MRT4577_129017C.1
cgcgcagctacttcaagtgcacgcatcccaactgcctggtgaagaagaaggttgagcgctcgcacgaggggcacgtcacggagatcatctacaagggcacgcacaaccacccgaagcccacgcagagccgccggccaggcgcaggcgcgcacccgttgggcggcggtgcgcaggcggacgcagccgacaacctgcaggggtcacaggcaaacgcggcggaagccaaccagccgtggcgtgcgggtgtccaggatggcgtggacgcgacgtcgcccccgtcggttcccggtgagctctgtgactcggcggcgtcgatgcaggtcgactgcgcggcccggtttgggtcccccgagggcgcggacgtgacgtctgccgtgtctgacgaggtggacggggacgacagggtgactctgactcatggcggtgccaacgcggcggagggcgacgaactggaatctaaacgaaggaagctggagtcatacgccattgacatgagcactgcgtcgagagctgttcgcgagcctcgagtggtgatccaaacgacgagcgaggtggacatgctggatgacggctaccgctggcgcaagtacgggcagaaggtcgtcaagggcaacccgaatccaaggagcttctacaagtgcacgcaacctntctgtatggtgcggcctcttttttccgcgcgctttttacgctcttatgctcttctttccttttttccgtccctcggcctcctttttttttttttttccttggcttcttccccttttttttttttctcctctttccctcttttcccccccccgctttttcccttctttcccccctttttccgtcccttttccctcccctttccccttttcttcccttttcctccctccccgtttcgccttttctctcgtttccctcccttttccttcctttcctcccctttctctcccgttttccttccccttttcctccccgttcctttccgtttctttcttt

SEQ ID NO: 31803 - DNA, 167 bp, Zea mays
  Clone ID: MRT4577_129018C.1
tcggggagacgttgtaccttcagcgccgtcgttgatgatagggagctgggggccttacgcgcattcaacgagagctagcatcatttgcggccgctatatagcagtttcggctccgcaagggtgctgtagaactagccttgattctgaatgtggaggtgtactctgat

SEQ ID NO: 31804 - DNA, 724 bp, Zea mays
  unsure (1)..(724): unsure at all n locations
  Clone ID: MRT4577_129019C.1
ggggttctaagtcccttacgaattttaccccgaaccccctatctttcctggtaaatgaggcccagtccagtgctgatttaaattgaataaatgaattagaaaatagatttttaatataaaataagtgctagaatgtgtataattcatagaaaattcatatgaactccgaattgatccattccagtttctaaaattttgtaaaatattatctagcacttagaatctctgttttgacatgaaaacggtaagaaaaataatttctcacttaatcctattttaagcacataaaatctttgaaaattcatatcttaaaatctataactccaaaaattatgattcctgttcctaggattttattttaatgtgtagtttattattatgtattttgtttacatgtttggtgtgatgttaattttctctatatattgtgcttgtttgtattgtggcgagtagaagagcctgtgactgaggatcctggtgcccagcagatagaagtagctgagcaggagctcattgaaggcaagttgtgcccttgaccacttttgttacccaataatgttctttataatcatttaccatgcattgacttaattttgatgggacccgataggtcaccctagattgtttatctctntaccttgntatccctgaatcacttgngtagttttgctattgctttacatgngtttggggatatattttgttatatccatgttctagttat

SEQ ID NO: 31805 - DNA, 676 bp, Zea mays
  unsure (1)..(676): unsure at all n locations
  Clone ID: MRT4577_12901C.1
ggggccggaaggcgaatttcctggttactgatgacctgcgtgttcttccactctcattagcatccactgttaagattgttagtgattccaaaatccagacctcgaatcttgtggtcaaagaaatcacattaacaaagtccaaggtatctatatctgctacataactcacattatttgcattgtgctagactacctattcacttggtcttgtgtaactgaatcttggaacaggttatggagctacagagggctgtcctgctgctgagtcgcaacatactcagctccgtgcttctgcatcctaagaagaacaagaagcttcaccattaccatcgcatgtattagccgtcgttgttgctttactctatgattagccacaatgataactatgtatgtctgtttttctgctgaatttgtaagttatcattttggccactggtattcggtaactactataacagttcgagcatataataaatataaacatttgattcgagggttggtagggtcactcggaagcttgctcctctactaaaaattgagacgtccaattttttttgttgcaaatacggcaaggtcttgggccactttgcaattggcccttgcctttatctgntttggatgatctttagatgctaaaaattctttttatgagacttttatatctgtgtcacgatga

SEQ ID NO: 31806 - DNA, 978 bp, Zea mays
  Clone ID: MRT4577_129020C.1
ctcgaggccggccgcgaacgactcttgggtaccagagccggacctcctaaccgcacacagtcgaacattgttgcttgctcggcccagatctccaatggccgccgcacccgtcgctccgccgctagcctccacggacgacgagatcgtctacgagtccatgccctgcattcgcgtctacaagaaacgcgtggagcgctacttcggtaccgagttcgtcgccgcctccacggacgccgccaccggcgtcgcctccagggacgtcgtcatctcccccaacgtctccgcgcgcctctacctcccccgcctcgacgacgagagcgccaagctccccatcttcgtctactaccacgggggcggcttctgcctcggttccgctttcaaccccaccttccactcctacttcaacagcttcgcgggccttgccaacgttctcgtcgtctccgtcgagtaccgcctggcccccgagcaccccgtccccgcgcctactacgaccggctcagggccagcggatggtccggcgaggcagagatttggcaggcgcccaacaagggacacacgttccacctcctggagccgtgctgcgacgaggccgtcgcgcaggacaaggtcatcagcgacttcctcaaccgctgactcgcatcgccggtgatggcggcgttgttgggcttggatcaaatttagcttcgttcattgtatacctggagattggaataactgcagcttcgtcaccggtgaagaatgctggcgctacactacactcctactagtacgtttcaggttcaaagttgtgtttgtattatttgaaattgggtctaaggatgaagggggctttgccattgttagtaatttgggtacgatgatacagtcatatgtcatacacatgaaattatacttgttagacacacgtaatttgttgaaacatttattccatctttcactacttacaagtacaactgaaatgaaaatcgcctcattatt

SEQ ID NO: 31807 - DNA, 428 bp, Zea mays
  Clone ID: MRT4577_129021C.1
caagagttctcggcttctcgcgagtcgcgacagataaagaggtcgagaaagaggcggatgttcggttaagatgcatagcagcagcatgaatagggagatcagctaggcctacgacaccattctctttggcatcaacgcctgcttcaaagtcgaccttgccacgtcgtatctgttctagtctactatccaatctgagactaagttctggtctgacatgattaagttcgttactgattctatatactgatctgttttaatatccttaagttttttattcataatttgtcttttgttttcattattttttttgtgttatgctcttatttttatttttatacctttttttatatatctttttttttttttattttcttttgttttttttttttttttcttttttctttatttttataattatttttttattt

SEQ ID NO: 31808 - DNA, 2450 bp, Zea mays
  Clone ID: MRT4577_129022C.1
ctgtgataagattaatgtgcccaataagtcagataaggagaatccgctattgaaggcaaagtgcaaatattgtaacaagctttatagttgaaggcaaagtgctattgaagaactgtcccaagtatcgaaagcatattgaagaaaagctagatcaaacactgttgaactttgctccttcaaaggcaggtgaatctggttgtggtctccctactatctcatctcctagagaatataatcatgaacaagtctaaaaattaaatgctaagatgattatagttcatgagtacccgtttagaatggttgagcacacatggtttaatattgtcatgaagtatatgaatctgttgtatgaatttattggtagaaagaccataagagctgaatgtataaaggtttatgagtctgaaaaagaatcattggctaaggcccttaaaggtgtggatttcatttccttgaccactgatttatggacatctaatcaaatgttgtcctatatgtgtttggttgcacactacattgataaagattggaaaatgcaatattgtgtgctgaatttttttgagttagaccctccaaaggacatgtgataggacaagctgcatatgttgtgttactgcatggaaaatagaagataagattatttctttcactctagataatgttgcaaacaatgacagtgctatacgtggtctgagggctagatttgcagctagaaaggggaatgctttcatttcaaaatacttccatgtctgttgttgtgcacacatcatcaatttggttgtcaatgatggagccgctgcattagcttctttgatagaaaacctaaggttaacagtcaagtaccttaagaagtctccatcttgtatgcataagtttgttgacatttgtagatctcctgcaattcaaattggagaagggatgaggcttgatgtctcaacgaggtggggttcaacatataagatgttgcgcactactatagcttacaaagaagctataaagacataggctgattcagatttgaattataagtggaaacctacattagaagaatgagatttgtttgctgcaattgagccaattctagcctctttaggaaccactacactgtcaacttcttcctaccccaccgcaaacctattctatccccataatgtggatgtcaaaattgcattgagagcagcaatggtttctactaattttaatatgaaaaaatgggtattgcgatgatggagaaattcaacaagtattgggaataaaggaacaatgttatggtgattgctactatcctagatccaaggtataagatgagatatattgagtggtgttttggtaagattttttatgtagaccaagttggatttgagatagaagaatttagagacgaattggaaaagttgtatgaagactatgagatgcaacatagagagagaaaagctgctcaaagcaagcttagtgcatcatcatcattggcaatgaatagatcttgtagtttgcctactgcatcatgtgagtttcagtcatacttatcatctactgaagtgaatccatcaaaaagtgagttgctcatctattggatgaaacaatgtgagtttggctgataaggattttgatttgctaagctggtgcaaggttaactcacatagatttccagtggtgtcgaggatggcaaagttcttaattgtgcccgctacctctgtgtcttcagagtctacttttcgcactgggggtcgaactctagatgactatcgtagctctctaagcccttctatggtagaggcattgatatgctcctctagttggattcgaagtgcacatgatgggagtcatatgtattgtagtatgatattcttctacttttttattctagtgtgttttctatttttttatcaatgtaatgctctatttattttttggagcaagatgaagaagacgatattgaaaacaatgcatttccaaaaagtttggtggagagcaactagatcttgatatcttttggacaattggatggttgatcacatagcaagtcgcatggatgatggactcatcagtcatcactcatggacatgttcacatggatgagcacacaacaagtggcatttgattctggaattttggatggtggtagttgcatgccacttgtatttgtgtaactgtgggctgtcacctgttaggttgtgcggctgtggcatggttctttacttcttttgtttatctcttcactgtttagacttgagaatttgtagttgcattcgtattgcagactttattgtcttactgttggagatggtagtgatgttactgaatactgaggtagtgtaactgttggagttggcagactttattgtcttgcacttttgctattggagttggtattgcagacttaagtgttatttcagtttgtgagtaatgtgactatgtccccttatgtttattcaagtcataaagtattc

SEQ ID NO: 31809 - DNA, 773 bp, Zea mays
  Clone ID: MRT4577_129023C.1
ccggctcgagccggccgggccgggcctagccgccgccgccccctcctcttcgtcctgcaagcagcgccgccgccttccaccggcccgagctccagccttcccttcaaccatggctgacgttgatgtcgaccccgaggtggcggccgccggccccaagaagaggacgttccgcaagttcagctaccgcggcgtggacctcgacgctctcctcgacatgtccagcgaggacctcgtcggcctcttccctgcccgcgcccgcagaaggttctcgaggggtctgaagaggaagccgatggcgctcgtcaagaagctgcgcaaggcgaaaagcgaagcccctgctggtgagaagcctgagcaagtgaggacccacctccgcaacatgattatcatgcctgagatgatcggaagcgtcgtgggcatctacaatggcaagtgcttcaaccaggtggagatcaagccggagatgattgggcactacctggcagagttctccctgtcgtacaagccggtgaagcacgggaggcctggtatcggtgccacccactcgtcgaggttcattcctctcaagtgagaatatggtcaggaaaattgtctgagatgtctggaatccagtgttcttatcctagtcaaatgtagcacctgatataccgtctgtcagtctagtggtggagcagctccctttgaaccttgaactaatccagttccagattttgaagttatcatgaggaggatcgaacatgtttctctccaaaaaaatgaaatctgttgctcta

SEQ ID NO: 31810 - DNA, 301 bp, Zea mays
  Clone ID: MRT4577_129024C.1
cggctgtaggattcctgatgcaagctcccagactaatcgctgccctgagcattataggcaggacgatcgaatgagtgctattctcaaacagcaagagggcatgggaccatctgaggatgggtctgactttgatggatatgctctggacaacatacctgtctagtacaaacccttaccgattgaagttgccagcgtaaatagtctgttacacaagcacatgctcatcctgcagttagctattttggaactgagtcgagattggttgatgacagatatcagacttctgggagtagtagtgtat

SEQ ID NO: 31811 - DNA, 505 bp, Zea mays
  Clone ID: MRT4577_129025C.1
gacttaacacaacatgatgaatgcttgtgtattagagagtttatggtgattaacctacctcatgatatacaattaagttcaaaatgtctttttctactgcagattacggcctctttcgtgccatcccataagcggtttacaacagggctgatattttgcctacaaagtttacccatttttcatggaacgtaggcagtcttgtctcccctctcgaagcgtgtagcactctattattttccctattgtacctgcgcctgcgggtatggaaattccgtcatcttgtgcatgagtggaaggatgtctaatcgaaactattcctcttgctttctctaacttgccaaaggctagtttcatgcaacttgcattatacgccatgtgttactataagcttatgtgctgatttggttaaagatatcagggcttcctgtgccaacttaatcgaccattcacgctttgcacaggtctagaattataatccaattattgcatgaaaagttgcataaac

SEQ ID NO: 31812 - DNA, 1150 bp, Zea mays
  Clone ID: MRT4577_129026C.1
tctctcttcttttggtactttccggacagtggagtagagggcgatagatagggcagcatggcggcaaccttctgcgctgggcccgccgcatccgcggcagtaaaccctagctccgccggctgccgaccccagaacctaactcgggctgccgtgctgtctgcttgctggcggcccagcaggccgactcccgctttcgtctccctccggcgcccaaatgccgagctgcggccgctgcgcgtggccgccggctccggcgttgacccgaaggttgtcaacggggaagattttcctcccatgaaggacctaattcagctatacaggacagcttttctagaaagaaatgaggaggttcttggcgtagttgagaaggcaatcactgctgtgcaaaaagagaagagtacgatagcttcccaatttgaaagtactacaaccgaaataacttctgggaaggaaaagtttattcgcttaaatgccgacctggagaatttccggaaacagactgaaaaggaccgtgcaaagttaacatcaaatatacgggtggaagttgttcagagtctgttacctctagttgatagttttgagaaaataaatctagagaacaccccagagactgagaaggagcaaaagatcagcgcaagctatcaaggcatatacaagcagttagttgaaacactaagatatttgggtgtgggagttgtggaaacagttggcaagccatttgatccttcggtccatgaggccatctcacgagaagcatccatgcaattcaaggcagggattgtcatgcatgaagtccgcagagggttccatttgaaggagaggctgctaaggcctgctactgtgaaggtctctactggctctggcaaacaaagtgcaagctcataggcgggggacaaagatgctgctttgtgaatctgatcaaacgaccaacaggaactgatagacacacatttttctgttcataacatgccgaatgtgtttgatctcaaatgagacgggatcagctatgtatggtgttgacagggagcaccagcttgaagttttgctgttacttgtaatctgctagaattttgtccaccagaagagtgagaatgaaacattggacattcataccggatttatattgagttccttgctcacttcattggcc

SEQ ID NO: 31813 - DNA, 266 bp, Zea mays
  Clone ID: MRT4577_129027C.1
gggaaataaattacctaatataaatttgctgatcaagcccaaaatggcttcattctcgtgcgatccacacgtcaacacacaaaagactgtgaaaatagattacggagatcactagaagctagcggaagactgtttggcatataggccttactctcgctaattcacatattcattgcccttatcacaatcctacatcaactgcttacactacactcaaaaacctctttaatctatgtaataacgaacagccttttctatacactctg

SEQ ID NO: 31814 - DNA, 175 bp, Zea mays
  Clone ID: MRT4577_129028C.1
gcagctagcctagcagagccttgaagcttcagcacagagggtatacccaggggccccacccactcaggagagaaggggaggagggatgggagaagactgtgggaggggcaatccggaatgggcagtgagcaggatgtaatgtgaataagtaaaaagaaaaaaaaaggggggccgc

SEQ ID NO: 31815 - DNA, 731 bp, Zea mays
  Clone ID: MRT4577_129029C.1
gagccggccgggtttttcctttctatattagaaaccaaagctgccaattttcttggataggttgtaagtacggtgctcataactttggaggtggatagtcagtttgttggttctagcattctctccatatcttgatgcacattacatcgatattctctgccatcatatttttcacgaattcctcacactgaatgtgacatcggtgaataccgctcccttagttggtaggatgacttatggtctcgcgtgcatcactgtgatgtttgtcaccacctgtctgatgtcattggtcatcatcttcgtgtggcaaaagaatctcctcatctccttgctattcttcgtattctttggggcactcgaaggcgcctacctgtctgcagcagtgatgaaggttccccagggaggctgggctccgatcgcgctatccgccgtgttcatgttcatcatgtacgtgtggcactacggcacgcggcggaagtacctgttcgacctccagaacaaggtgtccatgagatggatcctgaacctgggcccgagcctgggcatcgtgcgcgtgcccgggatcggcctcatctacacggagctggtgacgggcgtgccggccatcttctcccacttcgtcaccaacctgccggcgttccaccaggtgctggtcttcgtgtgccgtcaggctccgcctgccggtgacgtgcccatggaccagcggtaccttatcgggcggatcgggccca

SEQ ID NO: 31816 - DNA, 777 bp, Zea mays
  unsure (1)..(777): unsure at all n locations
  Clone ID: MRT4577_12902C.1
cattgggtacctcgaggccggccgggagcattacaacccacctccacgttcccacatatccacatacccactattctctccgcttacttgaggggttttctggagaatcgacctgactatcgggctcacacgctataaagaccaccaaacttcctccgctatcaactcgccacagcctccaaactccaccttccacaggagatcgttttctagcaaaccttcgtgattggaacaaattttgtacaaaactaccttacaccatgtcggcacctcttgcagttcccgtagcgggaagcggtttcgtgcgtcgcctctcagcagtagaggctacccgcgagaatatcaacatgggcccgaccgtcgttgtgcccccacaacatctcatggccccatccaaacagtcggaaattgccagcggcttcgagactgccagacgtcaccttgatgctgtcgcccctggatcacctgatctgactcctcctgaaacatctgtcacggacaaatatgcatttgcttttgacattgacggtgtcctcattcgtggtggccgtcccattccagaagccattgaggccatgaagatgctcaacggtgacaatgaatatggcatccaagtcccatacattttcgtcaccaatggtggcggcaagaccgaagctgagcgatgcatccaactgagcaagcagctagagattgaagtctcgcctggccagttcatttgtggactactccaatgagggagatggccgagaagtatggtactgtgnctggtcgtcg

SEQ ID NO: 31817 - DNA, 327 bp, Zea mays
  Clone ID: MRT4577_129030C.1
aattccatgacccttaaaacctataaacaatgcactaggagagtgcaacaccccaggaggctataaacaactcacaccttgctgctataatttatagtcgctgcccacatgaacatagtcaactgccacattttgcctcatagacaactgacacctaacgcattccacctaataagagatgctgagcggcacgacaattgcagtttgtagacatgagcaccagtcctactgttaccatacgatcactgacatgaatgacactagacaagcaaaatacacttattgaatttatattatccaagtgaagccatcaacagtagaccagca

SEQ ID NO: 31818 - DNA, 602 bp, Zea mays
  Clone ID: MRT4577_129031C.1
gggatagttccaccacgttacttccatatatttcccttggattggatcgtcggcgcccaaacgaatactaatccggcaatggagtcttcacgagggaagctgtctgccgccgccgtcctcctgctaatgacgctcctcatggtggccgccatgcgggcggttgaggcacgcgactgcctgacgcagagcacccggttaccggggcatctgtgcgtgcggtcggactactgcgcgatcgggtgcagggcggagggcaagggctacacgggcggcaggtgcctcatctctcccatcccgctcgacgggattctctgctactgcgtcaagccttgcacatccaccacgacagaatgatgagacaagacaagagcggtgggtgcagtgcaggctgaccggggggttatcagttatatatggacatcctaccgtgtctgttaataacttgtaaatgtcttgggaaagtttgtggtgataagttttaaatgtcttggaataaagtgggttctatacagacttctactcgttaagttgttggattactactactgctgttttttatttgaggaattactgctttgtttttaaaaaaaaaaaaaaaaaaa

SEQ ID NO: 31819 - DNA, 354 bp, Zea mays
  Clone ID: MRT4577_129032C.1
gcttgaacttctctcaaaaggggggcaaaaacaccctccatttttttcaaaaaacgggaacgaaactacccacacaacaaatctatcaatttgggataaaaccaaaatggatagacccatcacaaaacccgacctggtccaattactaacacacgtgtaaacccaccccatgggcaaaaccagtccttttaaacaaagggccaccaaactaggctcacaacataatcacaaacaatggaccatatgcgtccaacctttttttaaaagcatgccccaagcaagtaaccattaaaccccagcatttgccaagaaccttgcagttaatccaaacaccttctttttgcaaactgggca

SEQ ID NO: 31820 - DNA, 517 bp, Zea mays
  Clone ID: MRT4577_129033C.1
tccctgacgctaactcttccgatgttcactataatgactgacacgctgctcgttatttcgccgaatggctcatcgagagtcgaaggatataactatcataaacatatatgcaaatcgcacacaatgtgaaggaaggctaaaaactctaaagacagaaaaaaagattgagttggtgctagaacagccgttgtgaaacataattaaaaaaaacagtgatttactttagaataactcctagataacgatgcatatatgaatcattcaatgcaaatatatatataattatgctatttaaaggatgtcttaatataaatttgtagatattatttcttacataaactaataggatcatactataatcaaacaaaacattgaaacatatttactcttacagaaattatataaaataagacaaaatgaagcgaaacaattcactatgtataacaacaaacctgtatcatatctaattcataattgaaatacctaataaactaatgctggattacattacatgaat

SEQ ID NO: 31821 - DNA, 2544 bp, Zea mays
  Clone ID: MRT4577_129034C.1
gacaaatctcatacccaagagaccttaaagggattcttgagacgggctcaaaatgagttcggcttaaggatcaagaaaattagaagcgacaatgggacggagttcaagaactctcaaatagaaggcttccttgaggaggagggcatcaagcatgagttctcttctccctacactccacaacaaaatggtgtagtggagaggaagaatcgaactctattggacatggcaagaaccatgcttgatgagtacaagacaccggatcggttttgggccgaggcggtcaacaccgcttgccacgccatcaaccgattatatctacaccgaatcctcaagaagacatcctatgaactcctaaccggtaagaagcccaatatttcatactttagagtttttggtagcaaatgctttattcttgttaagaaaggtagaaaatctaaatttgctcctaaaactgtagaaggctttttactaggttatgactcaaacacaagggcatatagagtctttaacaagtcctcaggacttgttgaagtttcttgtgacgttgtgtttgatgagactaacgtctctcaagtagagcaagttgatcttgatgagataggtgaagaacaggctccatgcacagcgttaaggaacatgtccattggggatgtgtgtcctaaggaatccgaagagccaccacatgcacaagatcaaccatcctcctccacgcaagcatctccaccaactcaaattgaggatgaggctcaagatgttgaacaagaaggtcaagaagatgagccacctcaaattgacggcaacgatcaagggggagatgcaaatgatcaagaaaaggaggatgaacaagaaccaaggccgccacacccaagagtccaccaagcaatccaacgagatcaccccgtcgacacaatcctcggcgacattcataagggagtaactactcgatctcgggttgcacatttttgtgaacattactcttttgtttcctctattgagccacacagggtagaggaagcactccaagatgcggattgggtgatggcgatgcaagaggagctcaacaatttcacaaggaacgaggtatggcacttagttccacgtcctaatcaaaatgttgtaggaaccaagtgggtcttccgcaacaagcaagacgagcatggtgtggtgacaaggaacaaagctcgactcgtggccaaggggtattcacaagtcaaaggcttggattttggtgaaacctatgcacccgtagctaggctcgagtcaattcgcatattattagcctatgctacttaccatggcttcaagctttatcaaatggacgtgaagagtgccttcctcaatggaccaatcaaggaagaggtctatgttgagcaacctccaggctttgaagacagtgagtatcctaatcatgtctataggctctctaaggcgctttatgggctcaagcaagccccaagagcatggtatgaatgccttagagatttccttattgctaatggcttcaaagtcggcaaagccgatcctactttattcaccaaaacacttgataatgatttgtttgtatgccaaatttatgttgatgatattatatttgggtctactaacaaatctacatgtgaagaatttagtaggatcatgacacagaaattcgagatgtctatgatgggggagttgaagtattttctaggatttcaagtcaaacaactccaagagggcactttcattagccaaacgaattatactcaagacattctaagcaagtttggaatgaaggatgccaagcccatcaagacccccatgggaacaaatgggcatctcgacctcgacacgggagggtgtaagattaataggaagagcacatcggggacttgccagttcttgggaagatccttggtgtcttgggcttcaaagaagcaaaattcggtcgctctttctaccgccgaagccgagtacattgccgcaggccattgttgcgcgcaattgctttggatgaggcaaaccctgcgggactacggttacaaattaaccaaagttcctttgctatgtgataatgagagtgcaatcaaaatggccgacaaccccgtcgagcatagccgcactaagcacatagccattcggtatcattttcttagggatcaccaacaaaagggagatatcgagatttcttacattaacactaaagatcaattagcagatatctttaccaagcctcttgatgaacaatcttttaccagacttaggcatgagctcaatattcttgattctaggaatttcttttgctaacttgcacacatagctcatttgaatacctttgatcatatctcttttatatgctatgactaatgtgtcttcaagtctatttcaaaccaagtcataggtatattgaaagggaattggagtcttcggcgaaaacaaaggcttccactccactccataactcatccttcgccatcgctccaagcatctctccatttttggtataatcttcactcgtattttatttgccaaaggagagataggggagaaatgagactttaaagcaaa

SEQ ID NO: 31822 - DNA, 528 bp, Zea mays
  Clone ID: MRT4577_129035C.1
attgtttaacattcgcatgatttcgatttcacgacatatataaatttaaacatcatatttgttgcaggaaatcttaaactaaatcaaacatagttttgaaaatagaacacaaaatttgtgtcatcttcaaccttgctccactagttcttgcgctgggacgaaatcgaagagcggggggtttgtcagggagcaggggcgcggtcacgacaacaggggagacggtcgacgtgggcgcggcgtcgaggtctccggcgtcctcgacggcgggcaactccggcggcgagcaggggctccagcgagcttcggacgacggcgcggctccggtcagcggcgagcgccgcgagagaggagagggcgcgggagagggaggaggcacgggaaccggatccatggggcttggcgtcagctttatagagagaagggaggacagagaacgccgggggagagggagagccggtcgacggcttcaaaagccattaatggtgtcggtttcgtggcagagaaaaaaaaaaaaaactcgactcgtgc

SEQ ID NO: 31823 - DNA, 3991 bp, Zea mays
  Clone ID: MRT4577_129036C.1
atggagaccggcgacaagcccactacaagccacgggaaggcttcatcggaagagtcccgcaaaaagggaaaagggaaggagaagaaagcatcttcccacaagtcgcatcagagtggcgacaagaaaaagaagatgaggaaggtggtctactacgagaccgatacttcatcaccttccacctccggctccgacgcgccctccgtaacttctaagcgccatgagcgcaagaagtttagggatgaagattatgatgaggatgaagtggcccaaatcgagcacttcaactcccaagccacaacaatactcctcgcctctctaagtagagaggagtacaacaaggtgcaaggattaaagagcgccaaggaagtttgggacgtgctcaaaaccgcgcacgagggagatgagctaaccaagatcaccaagcgggagacgatcgagggggagctcggtcgcttccggcttcgcaaaggggaagagacacaagacatgtacaaccggctcaaaaccttggtgaaccaagtgcgcaacctcgggagtaaaaagtgggatgaccacgagatggttaaggttattcttagatcacttattttccttaaccctactcaagttcaattaattcgtggtaatcctagatatacactaatgactcccgaggaagtaatcgggaattttgtgagctttgagtatatgatcaagggctcaaagaaaatcaatgagctagatgatccctccacatctgaagcacaaccggttgcattcaaggcaacggaggagaagaaggaggagtctacatcaagtagacaaccaatcgatgcctcaaagctcgacaatgaggaaatggcgctcgtcatcaagagcttccgccaaatcctcaagcaaaggagcgggaaagattacaagccccgctccaagaaggtttgctacaagtgtggtaagcccggtcactttatagcaaaatgccctatttctagtgttagtgacaggggcgacgacaagaaggggagaagaaaggagaggaagaaatactacaagaataagggtggcgacacccatgtatgccgcgagtgggactcggacgagagctcctccgactcctcctccaaagaggacgtcgctaacatcgccgtcaccaagggacttctcttccccaacgtcggccacaagtgcctcatggccaaggacggcaaaaagaagaaggtttatgcatccgggggctcaagttggatcatcgatagcgggtgcacaaaccacatgacaggggagaagaagatgttctcctcctatgagaaaaatcaagatccccaacgagcaatcacattcggggatggaaatcaaggtgtcactgtctttagaaggagtgatgattcagtagcatttaagggagtgttagagggtcagctatacttggtagattttgatagagctgaactcgacacttgcttgattgctaagactaacatgggttggctatggcaccgccgactagcccatgttgggatgaagaattttcataagcttctaaagggagagcacattttaggattaacaaatgttcattttgagaaagacgggatttgtagcgcatgtcaagcagggaagcaagttggtgctcatcatccgcacaagaacatcatgacgactaacaggccactggagctcctacacatggatctattcggcccgatcgcttacataagcatcggcgggagaaaaatctcaaacccaagagaccttaaagggattcttgagacgggctcaaaatgagttcggcttaaggatcaagaaaataagaagcgacaacgggacggagttcaagaactctcaaattgaaggcttccttgaggaggagggcatcaagcatgagttctcctctccctacactccacaacaaaatggtgtagtggagaggaagaatcgaactctattggacatggcaagaaccatgcttgatgagtacaagacaccggaccggttttgggccgaagcggtcaacaccgcctgctacgccatcaaccggttatatcttcaccgaatcctcaagaagacatcatatgaactcctaaccggtaaaaagcccaacatttcatattttagagtttttggtagcaaatgctttattctcgttaaaagaggtagaaaatctaaatttgctcccaaaactgtagaaggctttttacttggttatgactcaaacacaagggcatatagggtctttaacaagtccactggactagttgaagtctcatgtgacgttgtgtttgatgaaactaacggctctcaagtagagcatgttgatcttgatgagataggtgaagaacaggctccatgcatagcgctaaggaacatgtccattggggatgtgtgtcctaaggaatccgaagagcctccaaatgcacaagatcaaccgtcctcctccatgcaagcatctccaccaactcaaaatgaggatgaagctcaagttgatgaagggcaaaatcaagaagatgagccacctcaagatgatggcaatgatcaagggggagatgcaattgatcaagaaaaggaggatgaggaagaaccaaggccgccacacccaagagtccaccaagcaatccaacgagatcaccccgtcgacaccatcctcggcgacattcataagggggtaactactagatctcgggttgctcatttttgtgaacattactcctttgtttcctctattgagccacacagggtagaggaagctctccaagattcggattgggtggtggcgatgcaagaggagctcaacaacttcactagaaatgaggtatggcatttagttccacgtcctaaccaaaatgttgtaggaaccaaatgggtcttccgcaacaagcaagatgagcatggtgtggtgacaaggaacaaagctcgactcgtggccaaagggtattcacaagtcgaaggtttggatttcggtgaaacctatgcacccgtagctaggcttgagtcaattcgcatattattggcctatgctacttaccatggctttaagctctatcaaatggacgtgaaaagtgccttcctcaacggaccaatcaaggaagaggtctatgttgagcaacctcccggctttgaagacagtgagtatcctaaccatgtctataggctctctaaggcgctttatgggctcaagcaagccccaagagcatggtatgaatgcctaagagatttccttatttctaatggcttcaaagttggcaaggccgatcctacactctttactaaaactcttgaaaatgatttgtttgtatgccaaatttatgttgatgatattatatttgggtctactaacgagtctacatgtgaggagtttagtaggatcatgacacagaaattcgagatgtctatgatgggggagttgaagtattttctaggattccaagtcaaacaactccaagagggcaccttcatcagccaaacgaagtacactcaagacattctaaccaagtttggaatgaaggatgccaagcccatcaagacacccatgggaaccaatgggcatctcgacctcgacacgggagggtgtaagattaataggaagagcacatcggggacttgccagttcttgggaagatccttggtgtcttgggcttcaaagaagcaaaattcggtcgctctttccactgccgaagccgagtacattgccgcaggccattgttgcgcgcaattgctttggatgaggcaaaccctgcgggactacggttacaaattaaccaaagtccctttgctatgtgataatgagagtgcaatcaagatggccgacaaccccgtcgagcatagccgcactaagcacatagccatttggtatcattttcttagggatcaccaacaaaagggagatatcgagatttcttacattaatactaaagaacaattagccgatatctttaccaaaccacttgatgaacaatcctttaccagacttaggcatgagctcaatattcttgattctagaaatttcttttgctaa

SEQ ID NO: 31824 - DNA, 1844 bp, Zea mays
  Clone ID: MRT4577_129037C.1
cttaacatgttttttattttccttgattaggaagtcctcttgggagtccaagagatcatccttctcatggatggcactaattagttcatttaatttctccttttgttccatgttaaggttggcaaaaagagtacgcaaattatcttcctcaccactagcattatcatcactggaagactcatatttagtggaggagttggatttgaccttcttctttttgccgttctttgccatgaggcacttgtggccgacgttggggaagaggagtcccttggtgacggcgatgttggcgtcgtcggaggagtcgctagagctttcgtcggagtcccactctcgacaaacatgggcatcgccgcccttcttcttgtagtacctcttcttctcctttcttctccccttcttgtcgtcgcccctgtcactatcacttgataatggacatttagcaataaagtgaccgggcttaccacacttgtagcaaaccttcttggagcgggacttgtagtctttccctctcctttgcttgaggatttggcggaagctcttgatgacgagcgccatttcctcattgtcgagcttggaggcgtctattggttgtcgacttggtgtagactcctccttcttgtcctccgtcgccttgaatgcgacgggttgagcttcggatgtggagggatcatcaagctcgttgatcttcctcgagccttcgatcatgcactcaaaacttacaaaatgcccgattacttcctcgggggtcattttagtatatctacgattaccacgaattaattgaacttgagtagggttaaggaaaataagagatcttagaataaccttaaccacttcgtggtcatcccactttatgctcccgaggttgcgcacttggttcaccaaggtcttgagccggttgtacatgtgttgtggctcttcccctttgccaagccggaaccgaccgagctccccctcgatcgtctcccgcttggtgatcttggtgagctcgtctccctcgtgtgcggttttgagcacatcccaaacctccttggcactcttcaacccttgtactttgttatactcctctctacttaaagaggcaaggagtatcgttgttgcttgagagttgaagtgctcgatttgggccacctcatcctcatcataatccttatcccctacggacggtacctgtgcaccaaactcaacaacatcccatatacttttgtggagtgaggttagatgaaatctcattaaatcactccacctagcataatcttcaccatcaaagttggtggtttgcctaatgggacggaaagtagaggtgcatgtttagaaatgcgagaatagtgtagggggatcttactaaacttcttacgctcttggcgtttagaagttacggagggcgcatcggagtcggaggttgatgttgatgaagtgtcggtctcgtagtagaccactttcctcatcctcttttgcttgtccccgcttcgatgcggcttgtgggaagaagatttttccttcttctctttgtggtgagaagaagatttcttctccttccctttgttggaggagctcttcttcttctccctccttttggtgcgggactcttccgatgaagtgctcccgtggcttgtagtgggcttttcgccggtctccatctccttcttggcgtgatctcccgacatcacttcgagcggttaggctctaatgaagcaccgggctttgataccaattgatagtcgcctagaggggggggggggggtgaatagcccactacaagccacgggagcacttcatcggaagagtcccgcaccaagaggaaggagaagaaggactcctccaaacggaaggagaaaaag

SEQ ID NO: 31825 - DNA, 5322 bp, Zea mays
  Clone ID: MRT4577_129038C.1
atgtcgggagatcacgccaagaaggagatggagaccggcgaaaagcccactacaagcaacgagaaagctctatcgggagagtcccgcaacaaggagaagaagaaggagaagaagaaggaaaagaagacttcttcccacaagtcgcatcggagtggcgacaagataaagaagatgaggaaggtggtctactacgagaccgacacttcatcaccttccacctccggctccgacgcgccctccatgacttctaagcgccatgagcgaaagaagtttagtaagatccccttacactatcctcgtacttctaaacatactccattactttccgtttcattaggcaaaccgccaacctttgacggtgaagattatgctaggtggagtgatttaatgaaatttcatctaacctcactccacaaaagtatatggaatgttgttgagtttggagcacaggtaccatccataggggatgaggattatgatgaggacgaggtggcccaaatcgagcacttcaactcccaagccacaacaatactcctcacctctctaagtagggaggagtacaacaaggtgcaaggattaaagagcgccaaggaagtttgggacgtgctcaaaaccgcgcacgagggtgatgaactcaccaagatcaccaagcgggaaacgatcgagggggagctcggtcgcttccgtctacgccaaggggaggagccacaagacatgtacaaccggctcaaaaccttggtgaaccaagtgcgcaacctcgagagcaaaaagtgggatgaccacgaggtggttaaggttattctaagatctcttattttccttaaccctactcaagtacaattaattcgtggtaatccaagatatacactaatgactcccgaggaagtaatcgggaattttgtgagctttgaatttatgatcaagggctcacggaagatcaacgagctcgacggtccttccacgtccgaagctcaaccggtcgcattcaaagcgacggaagagaagaaggaggagcctacaccgagtagaacacccatcgacgcctccaagctcgacaacgaggagatggcgcttgtcatcaaaagctttcgccaaatcctcaagcaaaggagggggaaggattacaagccccgctccaagaaggtttgctacaaatgtggtaagcccggtcactttatagctaaatgtcctatttctagtgacaggggtgatgacaagaaggggagaagaaaggagaagaagaggtactacaagaagaagggcggcgatgcccatgtttgtcgtgagtgggactccgatgaaagctctagcgactcctccgacgacgaggacgccgccaacatcgccgtcaccaagggacttctcttccccaacgtcggccacaagtgcctcatggcaaaggacggtaaaaagaagaaggttaaatctaaatcctccactagatatgaatcctctagtgatgaaaatgctagtgatgaggaagataacttgcgcactctttttgtcaacttaaacatacaacaaaaggagaaattaaatgaattaattagtgccatccatgagaaggatgatctcttggactcccaagaggacttcctaatcaaggaaaacaaaaagcatgttaaaattaaaaatgcttatgctctagaagttgaaaaatgtgaaaaattatctagtgagctaagcacttgccatgagacaatcgacaaccttagaaatgaaaatgctaatttattagctaaggttgattcaaatgtttgtgatacttcaattcccaatcttaagaatgataatgatgattggcttgctaagattgaagaattgaacatatctcttgctagccttaggattgagaatgaaaaattgcttgctaaggctaaggattttgatgtttgcaatgctactatttccgaccttagaactaaaaatgatatattgcatgctaagcacacttctatatgtactagatgtagagatgttgatgttaatgttattcatgatcacatgactttaattaaacaacaaaatgatcatatagcaaaactagatgctaggattgccgagcatgacttagaaaatgaaaaatttaaatttactagaagcatgctctatagagggagacgccctggcattaaggatggcattggcttccaacagggaggcaatgtcaaacttaatgcccctcctaagaaattgtccaactttgttaagggcaagactcccatgcctcaggataacgagggttacattttataccctgccggttatcccgagagcaaaattaggagaattcactctaggaagtctcactctggccctaaccatgcttttatatataagggtgagacatctagttctaggcaaccaacccatgctaagttgcctaagaagaaaactcctagtgcatcaaatgaacatgacatttcatttaaaactcttgatgcatcttatgttttaactaacaaatccggcaaagtagttgccaaatatgttgggggcaagcacaaggggtcaaagacttgtgtttgggtacccaaagttcttgtttctaatgccaaaggacccaaaaccatttgggtttatgcatccgggggctcaagttggattatcgacagcaggtgcacaaaccacatgacaggggagaagaagatgttctcctcctatgagaaaaaccaggatccccaacgagctatcacattcgaggatggaaaccaaggtttggtcaaaggtgtcactttctttagaagaagtgatgattcagtagcatttaagggagtgttagagggtcagctatacttggtagattttgatagagctgaactcgacacttgcttaattgctaagactaacatgggttggctctggcaccgccgactagcccatgttgggatgaagaatcttcataagcttctaaagggagaacacattttaggattaacaaatgttcattttgagaaagacaggatatgtagcgcatgccaagcaggaaagcaagttggtgcccatcatccacacaagaacatcatgacgaccgacaggccactggagctcctacacatggacctattcggcccgatcgcttacataagcatcgacgggagtaagtactgtctcgttattgtggatgattattctcgcttcacttgggtgttctttttgcaagaaaaatctcatacccaagaaacattaaagggattcttgagacgggctcaaaatgagttcggcttaaggatcaagaaaattagaagcgacaacgggacggagttcaagaactcacaaattgaaggcttccttgaggaggagggcatcaagcatgagttctcttctccctacaccccacaacaaaatggtgtagtggagaggaagaatagaactctattggacatggcaagaaccatgcttgatgagtacaagacttcggatcggttctgggccgaggcggtcaacaccgcttgttacgccatcaaccggttatatcttcaccgaatcctcaagaagacatcgtatgaactcctaaccggtaaaaagcccaatatttcatattttagagtctttggtagcaaatgctttatacttgttaaaagaggtagaaaatctaagtttgctcctaagactgtagaaggctttttactaggatatgactcaaacacaagggcatatagagtctttaacaagtcctctaggcaagttgaagtttcttgtgatgttgtgtttgatgagactaacggctctcaagtagagcaagttgatcttgatgagataggtattgaagaggctccatgcatcgcgctaaggaacatgtccattggggatgtgtgtcctaaggaatccgaagagcctccaaatgcacaagatcaaccatcctcctctacgcaagcatctccaccgactcaaaatgaggatgaggctcaagttgataaaggagaagatcaagcaaatgagccacctcaagatgacgacaatgatcaagggggagatgcaaatgatcaagacaaggaggatgaagaaccaaggccgccacacccaagagtccaccaagcaatccaacgagatcaccccgtcgacaccattctcggcgacattcataagggggtaaccactagatctcgtgttgcacatttttgtgagcattactcttttgtttcctctattgagccacacagggtagaggaagcacttcaagattcggattgggtggtggcgatgcaagaggagctcaacaacttcactaggaatgaggtatggcatttagttccacgtcctaatcaaaatgttgtaggaaccaaatgggtcttccgcaacaagcaagatgagcatggtgtggtgacaaggaacaaagctcgacttgtggccaagggatactcccaagtcgaaggtttggatttcagtgaaacctatgcacccgtagctaggcttgagtcaattcaaatattattggcctatgctacttaccatggcttcaagctttatcaaatggacgtgaaaagtgccttcctcaatggaccaatcaaggaagaggtctatgttgagcaacctcccggctttgaagatagtgagtaccctaaccatgtttataagctctctaaggcgctttatgagctcaagcaagccccaagagcatggtatgaatgcctaagagatttccttattacaaatggtttcaaagtcggcaaagccgatcctacactctttactaaaactcttgaaaatgacttgtttgtatgccaaatttatgttgatgatattatatttgggtctactaacgagtctacttgtgaagagtttagtaggattatgacacagaaattcgagatgtcgatgatgggggagttgaagtattttctaggattccaagtcaagcaactccaagagggcaccttcattagccaaacgaagtacactcaagacgttctaaccaagtttgggatgaagaatgccaaacctatcaaaacacccatgggaactaatgggcatctcgacctcgacacaggaggtaagtccgtagatcaaaagtctatttcaaaccaagtcataggtatattgaaagggaattggagtcttcggcgaagaaaaaggcttccactccgtaactcatacttcgccatcactccgagcaactctctcttctttgggggagaaatgagcatcaaggaaaaggacttcatccttgggggagagagtaaaagctcaaaagcaaaaggaccggatttcgtctttggtataatcttaactcatttacttatgaccaaaggggaagaaactactccgagggctctaatgatttcgtttttggcgattcatgccaaaaagggggagaaatga

SEQ ID NO: 31826 - DNA, 4942 bp, Zea mays
  Clone ID: MRT4577_129039C.1
atgtcaggaaatcacgccaagaaggagatggagaccggcgacaagcccgctacaagccacgggaaggtttcatcggaagagtcccgcaacaaaaagaaagggaaggagaagaaagcctcctcccacaagtcgcatcggagtggggacaagaaaaagaagatgaggaaggtggtctactatgagaccgacacctcatcaccatctacctccggctccgacgcgccctccataacttctaagcgccatgagcgcaagaagtttagtaagatccccttacactaccctcgcacttctagacatactacattactttccgttccattaggcaaaccgccaacctttgacggtgaagattatgctaggtggagtgatttaatgaaatttcatctaacctcactccacaaaagtatatggaatgttgttgagtttggagcacatgtaccatccgtaggggatgaggattatgatgaggacgaggtggcccaaatcgagcacttcaactcccaagccacaacaatactcatcgcctctctaagtagggaggagtacaacaaggtgcaaggtctaaagagcgccaaggaagtttgggacgtgctcaaaaccgcgcacgagggtgatgaactcaccaagatcaccaagcgggaaacgatcgagggggagctcggtcgcttccgtctttgtcaaggggaggagccacaagacatgtacaaccggctcaaaaccttggtgaatcaagtgcgcaacctcgggagcaaaaagtgggatgaccacgaggtggttaaggttattttaagatcacttattttccttaaccctactcaagtacaattacttcatggcaatccaagatatacactaatgactcccgaggaagtaatcgggaattttgtgagctttgaatttatgatcaagggctcacggaagatcaacgagcttgacagtccttctacgtccgatgctcaaccggtcgcattcaaagcgacggaagagaagaaggaggagtctacaccaagtagaacacccatcgacacctcgaagctcgacaacgaggaaatgacgcttgtcatcaaaagctttcgccaaatcctcaagcaaaggagggggaaatattacaagccccgctccaagaaggtttgctacaagtgtggtaagcccggtcactttatagcaaaatgtcctatttctagtgacagtgacaggggcgacgacaagaagggaagaagaaaagagaagaagaggtactacaagaagaagggcggcgatgcccatgtttgtcgcgagtgggactccgacgaaagctctagtgactcctccgacgacgaggacaccgccaacatcgccgtcaccaagggacttctcttccccaacgtcggccacaagtgcctcatggcaaaggacggcaaaaagaaaaaggttaaatctaaatcctccactagatatgaatcctctagcgatgataatgctagtgatgaggaagataatttacgtaccctttttgccaacttaaacatgcaacaaaaagagaaattaaatgaattaattagtgccatccatgagaaggatgatctcttggactcccaagaggacttcctaatcaaggaaaacaaaaagcatgttaaagttaaaaatgcttattctctagaagttgaaaaatgcgaaaaattatctagtgagctaagcacttgccatgagactatagacaaccttagaaatgagaatgctaatttgttagctaaggttgattctattgcttgtaatatttcaatttccaatcctagaaatgataatgatgatttgcttgctaggattgaagaattgaatatatctcttgctagccttagagatgaaaatgaaaaattgcttgctaaggctaaagaactagatgtttgcaatgttacaatttccgaccttagaactaaaaatgatattttgcatgctaaggttgtagaattgaaatcttgcaaaccctctacatctaccgttgagcacactactatttgcactagatgtagagatgttgatattaatgctatacatgatcatatggctttaattaaacaacaaaatgatcatatagctaaactagatgcaaaaatcgccgagcatgaaattgaaaatgaaaaatttaaatttgctcgtagtatgctttataatgggagaggtcatggcattaaggatggcattggcttccaacagggaggcaatgtttatgcatcagggggctcaagttggatcatcgatagcgggtgcacaaactacatgacaggggagaaaaagatgttctcgtcctacgagaaaaaccaagatccccaaagagctatcacattcggggatggaaatcaaggtatcattgtctttagaagaagtgatgattcaatagcatttaagggagtgttagagggtcagctatacttggtagattttgatagagctgaactcgacacttgcttaattgctaagactaacatgggttggctatggcaccgtcgactagcccatgttgggatgaagaatcttcacaagcttctaaagggagagcacattttaggattgacaaatgttcattttgagaaagacaggatttgtagcgcatgccaagcagggaagcaagttggtgctcaccatccacacaagaacatcatgacgaccgacaggccactggagctcctacatatggatctattcggcccgatcgcttacaaaagcatcgacgggagtaagtactgtctagttattgtggatgattattctcgattcacttgggtgttctttttgcaggaaaaatctcacacccaagagaccttaaagggattcttgagacgggctcaaaatgagttcggcttaaggatcaagaaaattagaagcgacaacgggacgaagttcaagaactctcaaattgaaggctttcttgaggaggagggcatcaagcatgagttctcttctccctacacgccacaacaaaatggtgtagtggagaggaagaatagaactctattggacatggcaagaaccatgtttgatgagtacaagacttcggatcggttttgggccgaggcggtcaacaccgcctgctacgccatcaaccggttatatctacaccgaatcctcaagaagacgtcatacgaactccttaccggtaaaaatcccaatatttcatattttagagtctttggtagcaaatgctttattcttattaaaagaggtagaaattataaatttgctcctaagactgtagaaggctttttactaggatatgattcaaacacaagggcatatagagtctttaacaagtcctctagacaagttgaagtttcttgtgacgttgtgtttgatgagactaacggctctcaagtagagcaagttgatcttgatgagataggtgatgaagaggctccgtgcatcgcgctaaggaacatgtccattggggatgtgtgtcctaaggaatccaaagagcctccaaatgcacaagatcaaccatcctcctccacgcaagcatctccaccaactcaaaatgaggatgaagctcaagttgatgaaggagaagatcaagcaaatgagccatcttgaaagggcattcatcccttttgtgagttttggtgatttggataacaacacatttaaagtctgtcagtcagactggcaaacaggtcgccaggagctatcaggggcggttcaaccggtgttggtcaactttgaccagtctgcggcaactttcacatctcaagatgacggcaatgatcaagggggagatgcaaatgatcaagacaaagaggatgaagaacaaaggccgccacacgcaagagtccaccaagcaatgcaacgagatcaccccgtcgacaccatcctaggcgacattcataagggggtaactactagatctcgtgttgcacatttttgtgagcattactcttttgtttcctctattgagccacacaggatagaggaagcacttcaagattcggattgggtggtggcgatgcaagaggagctcaacaacttcactagaaatgaggtatggcatttggttccacgtcctaatcaaaatgttgtaggaaccaagtgggtcttctgcaacaagcaagacgagcatggtgtggtgacaaggaacaaagcccaacttgtggccaagggatactcccaagtcgaaggtttggatttcggtgaaacctatgcacccatagctaggcttgagtcaattcatatattattggcctatgctacttaccatggcttcaagctttatcaaatggacgtgaagagtgccttcctcaatggaccaatcaaggaagaggtctatgttgagcaacctcccggctttgaagatagtgagtaccctaaccatgtctataaactctctaaggcgctttatgggctcaagcaagccccaagagcatggtatgaatgccttagagatttccttatcactaatggattcaaagtcggaaaggccgatcctactttatttactaaaactcttgaaaatgacttgtttgtatgccaaatttatgttgatgatattatatttgggtctactaacgagtcaatatgtgaagaatttagtaggatcatgacacaaaaattcgagatgtctatgatgggggagttgaagtatttcttaggatttcaagtgaagcaactccaagagggcaccttcctaagccaaacgaagtatactcaagacattctaagcaagtttgggatgaaggatgccaaactcatcaagacacccatgggaaccaatgggcatctcgacctcgacgagggatgtaaatccgtagatcaaaagaaagagcacatcggggacttgccagttcttgggaagatccttggtgtcttgggcttcaaagaagcaaaattccgtagctctttctaccgccgaagccgagtatattgccgcgggacattgttgcgcacaattgctttggatgaggcaaatgcttag

SEQ ID NO: 31827 - DNA, 232 bp, Zea mays
  Clone ID: MRT4577_12903C.1
ttttctttttttttttttttatcttttaaatgaattataataagcttccatgtttgttgtgaacatagacagttagagtattttttaaaattcctaaacagtttccataaatactattttgttataaaatactagcagtgagcttttatacttttaaattgagttttattcaaaccaatttgttacaaatttccgcacaaccaattatttattgatcaaatatttgttctta

SEQ ID NO: 31828 - DNA, 1809 bp, Zea mays
  Clone ID: MRT4577_129040C.1
atggcttacataagcatcggcgagaaaaaatcacagacccaagagaccttaaaaggattcttgagacgagctcaaaatgagtttggattaagaataaaaaagataagaagcgataatgggacggagttcaagaactcacaaatcgaaggctttcttgaggatgagggcatcaagcatgagttctcttctccctatacacctcaacaaaatggtgtagtggatagaaagaatagaactctactggacatggcaagaaccaggcttgatgagtacaagacaccggaccggttttgggccgaggcgattaacactgcctgttgctccatcaaccggctctaccttcaccgaatcctcaagaagacatcatatgaacccctcaccagttgtagaaggtttttacttggttatgattccaacacaagggcatatagagtcttcaacaaatccactggactagttgaggtttcttgtgacattgtgtttgatgagattaatggctcccaagtggagcaagttgatcttgatgaattagatgatgaagaggctccatgcgtcacgctaaggaacatgtccattggggatgtgtgtcctaaggaatccaaagagctcacacaagcacaagatcaattgtcatcttgcatgcaagcatgtccaccaacccaagatgaggatcaggctcaagataatgaagatcaggaggatgatccacctcaagaggaggacaatgatcaagggggagatgaagacaaggaagatgagcaagagattcagggtcaaagaccgccacacccaagaatccaccaagcaattcaacgagatcaccccgtcaactctattcttggtgacatacataagggggtaatgactagatctcgagttgcacattttcgtgaacattactcttttgtgtcctctattgagccatacagggtggaggatgcactaagagatccggattgggtgttggcaatgcaagaggaactcaacaacttcacaaggaatgaagtatggcatttagttccatgtcctaatcaaaatgttgtaggtaccaagtggatattccgcaacaagcaagatgagcatggtgtggtgacaaggaacaaagcccgacttgtggccaaaggttattcacaagtcgaatgtttggattttgatgaaacttatgcacctgtagctaggcttgagtcatttcgtatattacttgcctatgctacttaccatggctttaagctttatcaaatggacatgaaaagtgccttcctcaatggaccaatcaaggaagaggtctatgttgagcaacctctcggctttgaagatagtgagtaccctaaccatgtgtataaactctcaaaggcgctttatgggctcaagcaaaccccaagagcatggtatgaatgcctgcgagatttccttatcactaatggcttcaaagtcggtaaagccgatcctacactctttactaaaactattgcaaaagatttgtttgtatgccaaatttatgttgatgatatcatatttgggtctactaacaaatctacttgtgaagagtttagtaggatcatgatacaaaaattcgagatgtctatgatgggggagttcaagtatttcctaggatttcaagtcaagcaactccaagacggcaccttcatcagccaaacaaagtacattcaagacatacttaacaagtttggaatgaatgatgccaagcccatcaagactcccatgggaacaaatgggcatctcgacctcaacacgggaggtgtgcaaggttccaagccgatcctaaggaagttcaccttagggccgtga

SEQ ID NO: 31829 - DNA, 5454 bp, Zea mays
  Clone ID: MRT4577_129041C.1
atggcgctcgtcatcaagagctttcgccaaatcctcaagcaaaggagagggaaagactacaagtcccgctccaagaaggtttgctacaaatgtggtaagcccggtcattttattgctaaatgtcctatatcaagtgacagtgaccgaggcgacgacaagaaggggagaagaaaggagaagaagaggtactacaagaagaagggcggcgatgcccatgtttgtcgggagtgggactccgacgaaagctctagcgactcctccgacgacgaggacgccgccaacatcgccgtcaccaagggacttctcttccccaacatcggccacaagtgcctcatggcaaaggacggcaaaaggaagaaggtaaaatcaagatcctccactaaatatgaaacctctagtgatgaaaatgctagtgatgaggaggataacttgcgtattctttttgccaatcttaacatggaacaaaaggaaaaattaaatgaattaattagtgctattcatgaaaaggatgaccttttggattcccaagaggactgtctaattaaagaaaacaagaaacatgttaaggttaaaaatgcttatgctctagaaattgagaaatgtgaaaaattatctagtgagctaagcacttgccgtgagatgattgacaaccttaggaatgaaaatgctaatttaaatactaaggttgattcacatgtttgcaatgtttcaattcctaatcctaaagataataatgatgatttgctttctaggattgaagaattaaacatttctcttgctagccttagagtagaaaatgaaaatttaattgctaaggctaaagaactagatgtttgcaatgctaccatttccaatcttagagataaaaatgatattcttcatgctaagattgttgaacttaattcttgcaaaccctctacatctattgttgagcatgtatctatttgtactagatgtagagatgttgatgttaatgctattcatgatcatatggctttaattaaacaacaaaatgatcatatagcaaaactagatgctaaaattgccgagcataacttagaaaatgaaaaatttaaatttgctagaagtatgctctatagtgggagacgccctggcatcaaggatggcattggcttccaaaggggagacaatgtcaaacttagtgcccctcctaaaagattgtctaactttgttaagggcaaggctcccatgcctcaggataacgagggttacattttgtaccctgccggttatcctgaaagcaaaattaggagaactcattctaggaagtctcactctggccctaatcatgcttttatgtataagggtgagacatctagctctaggcaaccaacccgtgccaagttgcctagaaagaaaactcctagtgcatcaaatgatcatgacatttcattcaatacttttgatgcatcttatgtgttgactaacaaatccggcaaggtttatgcatccgggggctcaagttggatactcgacagcgggtgcacaaaccacatgacaggggagaagaagatgttctcctcctacgagaaaaaccaagatccccaacgagctatcacattcggggatggaaatcaaggtgtcactgtctttagaagaagtgatgattcaatagcatttaagggagtgttagagggtcagctatacttggtagattttgatagagctgaactcgacacttgcttaattgctaagactaacatgggttggctctggcaccgccgactagcccatgttgggatgaagaatcttcacaagcttctaaagggagaacacattttaggattaacaaatgttcattttgagaaagacaggatttgcagcgcatgccaagcagggaagcaagttggctctcatcatccgcataagaacataatgactaccgacaggccactggagctcctacacatggatctattcggcccgatcgcttacataagcatcggcgggagtaagtactgtctagttattgtggatgattattctcgctttacttgggtattctttttacaggaaaaatctcaaacccaagagaccttaaagggattcttgagacgggctcaaaatgagtttggcctaaggatcaagaaaataagaagcgacaacgggacggagttcaagaactctcaaatagaaagcttccttgaggaggagggcatcaagcatgagttctcttctccctacacgccacaacaaaatggtgtagtggagaggaagaatcgaactctattggacatggcaagaaccatgcttgatgagtacaagacttcggatcggttttgggccgaggcggtcaacaccgcctgctacaccatcaaccggttgtatcttcaccaaatcctcaagaagacatcgtatgaactcctaaccggtaaaaagcccaacatttcatattttagaatttttggtagcaaatgctttatccttgttaaaagaggtagaaaaactaaatttgctcctaaaactgtagaaggctttttacttggttatgactcaaacacaagggcatatagggtctttaacaagtccactggactagttgaagtctcatgtgacgttgtgtttgatgaaactaacggctctcaagtagagcaagttgatcttgatgagataggtgatgaagaggctccatgcatagcgctaaggaacatgtccattggggatgtgtgtcctaaggaatccaaagagtctccaagagcacaagatcaaacattttcctccatgcaagcatccccaccgactcaaaatgaggaagaggctcaagttgatgaagaagaagatcaatcaagtgagccacctcaagatgacggcatagatcaagggggagatgtaaatgatcaagacaaggaggatgaagagcaaagaccgccacatccaagagtccaccaagcaattcaacgagatcaccccgtcgacaccatcctcggcgacattcataagggggtaaccactagatctcgtattgcacatttttgtgaacattactcgtttgtttcctctattgagccacatagggtagaggaagcacttcaagattcggattggctggtggcgatgcaagaggagctcaacaacttcactaggaatgaggtatggcatttagttccacgtcctaaccaaaatgttgtaggaaccaaatgggtcttccgcaacaagcaagatgagcatggtgtggtgacaaggaacaaagctcgacttgtggccaagggatactcccaagtcgaaggtttggatttcggtgaaacctatgcacccgtagctagacttgagtcaattcgcatattattagcctatgctacttaccatggctttaagctttatcaaatggacgtgaaaagtgccttcctcaatggaccaatcaaggaagaggtctatgttgagcaacctctcggctttgaagacagtgagtatcctaaccatgtctataagctctctaaggcgctttatgggctcaagcaagccccaagagcatggtatgaatgccttagggatttcctcattgctaatggcttcaaagtcggtaaagccgatcctacactctttactaaaactcttgaaaatgacttgtttgtatgccaaatttatgttgatgatattatatttgggtctactaacgagtctacatgtgaagagtttagtaggatcatgacacaaaagttcgagatgtctatgatgggggagttgaagtattttctaggtttccaagtaaagcaactccaagagggcaccttcattagccaaacgaagtacactcaagacattctaaccaagtttgggatgaaggatgccaaacccatcaagacacccatgggaactaatgggcatctcgacctcgacacgggaggtaagtccgtggatcaaaaggtataccggtcgatgataggttctttactctatttatgtgcatctcgaccggatattatgctttccgtatgcatgtgtgcaagattccaagccgaccctaaggaagctcaccttacggccgtaaaaagaatcttgagatatttggcttatactcctaagtttgggctttggtatccttggggatccacatttgatttgattggttattcggatgccgattgggcggggtgtaaaatcaataggaagagcacatcggggacttgccagttcttgggaagatccttggtgtcttgggcttaaaagaagcaaaattcggtcgctctttccaccgccgaagccgagtatattgccgcaggccattgttgcgcgcaattgctttggatgaggcaaaccctgcgggactacggttacaaattaaccaaagttcctttgctatgtgataatgagagtgcaatcaaaatggccgacaatcccgtcgagcatagccgcactaaacacatagccattcggtatcactttttgagggatcaccaacaaaagggagatatcgagatttcatacattaatactaaagatcaattagccgatatctttaccaagcctcttgatgaacaatcttttaacaaacttaggcatgagctcaatattcttgattcgcgcaatttcttttgctaagattgcacacattgctcttttatatacctttaatcatgtctcttttatatgctatgcctaatgtgtttttcaagtctatttcaaaccaagtcataggtatattgaaagggaattggagtcttcggcgaaaacaaaggcttccactccgtaactcatacttcgccatcactccaagcaactctctattccttggggagaaatgagcatcaaggacttcgtctttggtatactcttaactcattcattcatgaccaaaggtgaagaaagcacttcgagggctctaacgattccgttttggcgattcatgccaaaaagggggagaaatgagcccaaagcaaaaggaccgcaccaccaccaatttcaaaaacttagtgttttccaagaagtatttatcaattggtatcctattatgttcaaaagggggagaaagtagtatttcaaaaatgatatatcaaaaccctcttgaacactaagaggaggatctcctttagggggagtaaggagagtctttgtttagtcaaaggaaaagcatttgaacaggggaagaaaatttcaaatcttgaaaatggtttgcaaaatcctattcatttacctttgaccatttgcaaaagaactttgaaatggatttacaaaaagaatttgcaaaaacaaaacatgtggtgcaatcgtggtccaaaatgttatacaaagaaacaattacaaaaaaaaaccaaaaaattaatactaaaaaattccaaataaacaatcagacctaaataaaaacaaaaaaaaattttcctaaaacacaataaaaaaaaagacagataactacaatataaaatatacacaatactacataaaaataaaaaaaaaataaacaaattattttaaaataaaatactaaaataaaacatt

SEQ ID NO: 31830 - DNA, 272 bp, Zea mays
  unsure (1)..(272): unsure at all n locations
  Clone ID: MRT4577_129042C.1
ttttcccccccccccttttcacccacagggggaggggtaaatttaaaaccccggaccaccccaaccacaagtaagagatgagatgatcttggaaacaggagaatgtgacgagactgcgttcacgcaaactcatactacaccatgatacnaaacctctttttgtgattttttgagacaaaccaagtatttgaagcaattatgatgttatagaattgcgatgcaacacataatgaacatacttgttatggagatatatcttataataatactac

SEQ ID NO: 31831 - DNA, 6531 bp, Zea mays
  unsure (1)..(6531): unsure at all n locations
  Clone ID: MRT4577_129043C.1
atgtcgggagatcacaccaagagggagatggagaccggcgacaagcccactacgagtcacgggaacacttcatcggaagagtcccgcaccaagaggaaggagaagaagaaggactcctccaacaaagggaaggggaaggagaagaaatcttcttcccacaagtcgcatcggagaggcgacaagcacaagaggatgaggaaagtggtctactacgagaccgactcttcatcaccatcgacctccgactccgatgcgccgtccgtaacttctaagcgccaagagcgcaagaagtatagtaagatccccctacgctacccccacatttcaaagcgtactcctctactctccgttccattaggcaaaccaccggtttttgacggtgaagattataatatgtggagtgacaaaatgaggcaccatctaacctcactccacacaagcatatggaatgttgttgagtttggtgtacaggtaccatccgtaggggatgaagactacgactcggacgaggtggcccaaattcaccactttaactcccaagccaccactatactcctcgcctctctaagtcgagaggagtataataaggtgcaagggttaaaaagtgcgaaggaaatttgggacgtactcaagaccgcacacgagggagacgaggtgacaaagatcaccaagcgggagacgatcgagggggagctcggtcgcttcatgcttcaccaaggggaggatccacaagctatgtacaaccgcttgaagaccttggtgaatcaagtgcgcaacctcgggagcgaaaaatgggatgaccatgagatggtcaaggttattcttagatccctcgtatttcttaatcctacacaagttcaattaatccgaggtgatcctagatataagctaatgtctcccgaggaggttatagtaaaatttgtgagctttgagctaatgattaaaggctcaaataaaatcatcgagcaaggcacctcctccacgcccgaggcacaaccggtcgcattcaaggcgacggaagaaaagaaggaggaggctactccaagtcgaacacccatcgacgcctccaagctcgacaacgaggagatggcgctcatcatcaagagcttccgtcaaatcctcaagcaaaggagggggaaagactacaagccccgctccaagaaagtatggtacaaatgtggtaagcccgatcattttattgctaaatgtccattatctagtgatagtgacaggggcgacgacaagaaggggagaagaaaggagaagaagagacactgcaagaagaagggtggcgatgcccacgtgtgccgtgagtgggactccgacgagagctccaccgactcctcctccgacgaggacgccgccaacatcgccgtcaccaagggtcttctcttccccaacgtcggccacaaatgcctcatggccaaggacggcaaaaagaagaaggtcaaatccaaatcatccactaaatatgagtcctctagtgatgataatgctagtgatgaggaagataatttgcgtaccctttttgccgacctcaacatgcaacaaaaggaaaaactaaatgagctaattagtgccatccatgagaaggatgatctcttggactcccaagaggacttcctaatcaaggaaaataaaaagcatgttaaggttaagaatgcttatgctctagaaatagaaaaatgtgaaaaattatctagtgagctaagcacttgccatgagactattgacaaccttaaaaatgaaaatgctagattaactgctaaggttgattcacatgtttgtgatgtttcaattcccaatcttagaaatgataatgttgatttgcatgctaagattaaggaattgaatgattctcttgctagccttagaattgaaaatgaaaaattaatgctaaggctaaagattttgatgtttgcaatgttactatttctaaccttagaaatgagaatgacatactacatgctaagatgtagagatgttgatattaatgctattcatgatcacatggtcttaattaaacaacaaaatgatcatatagcaaaattagatgctaaaattgccgagcataacttagaaaatgaaaaatttaaatttgctagaagtatgctctataatgggagacgccctggcatcaaggatggcattggcttccaaaggggagagaatgtcaaacttagtgcccctcctaaaagattgtctaattttgttaagggcaaggctcccatgcctcaggataacgagggttacattttgtaccctgccggttatcccgagagcaaaattaggagaattcattctaggaagtctcactctggccctaattatgcctttatgtataagggtgagacatctagttctaggcaaccaacccatgctaagttgcctaagaagaaaactcctagtgcatcaaatgatcatgacatttcattcaaaacttttgatgcatcatatgtgcttactaacaaatccggcaaggtttatgcatccgggggctcaagttggatcatcgacagcgagtgcacaaaccacatgacaggggagaagaagatgttctcctcctacgagaaaaaccaagatccccaacgagctattacattcggggatggaaaccaaggtttggtcaaaggtgtcactgtctttagaagaagtgatgattcaatagcatttaagggagtgttagagggtcagctatacttggtagattttgatagagctgaactcgacacttgcttaattgctaagactaacatgggttggctctggcaccgccgactagctcatgttggaatgaagaatcttcataagcttctaaagggagagcacattttaggactaacaaatgttcattttgagaaagacagtatttgtagcgcatgccaagccgggaagcaagttggcactcatcatccacacaagaacatcatgacaagtgacaggccactggagctcctacacatggatttattcggcccgatcgcttacataagcatcggcgggagtaagtactgtctagttattgtggatgattattctcgcttcacttgggtgttctttttgcaggaaaaatcccatacccaagagaccttaaagggattcttgagacgggctcaaaatgagttcggcttaaggatcaagaaaattagaagcgacaacgggacggagttcaagaactcacaaatagaaggcttccttgaggaggagggcatcaagcatgagttctcttctccctacaccccacaacaaaatggtgtagtggagaggaagaatcgaactctattggacatggcaagaaccatgcttgatgagtataagacaccggatcggttttgggccgaggcggtcaacaccgcctgctacgccatcaaccggttatatctacaccgaatcctcaagaagacatcctatgaactcctaaccggtacaaagcccaatatttcatattttagagtttttggtagcaaatgctttattcttgttaagagaggtagaaaatctaaatttgctcctaaaactgtagaaggctttttactaggatatggctcaaacacgagggcatatagagtctttaacaagtcctcaggacttgttgaagtttcttgtgacgttgtgtttgatgaaactaacggctctcaagtagagcaagttgatcttgatgagataggtgaagaacaggctccgtgcatcgtgctaaggaacatgtccattagggatgtgtgccctaaggaatccgaagagcctccacatgcacaagatcaaccatcctcctccacacaagcatctccaccaacccaaaatgaggacgaggctcaagttgatgaaggagaagatcaaagagatgagccacctcaagatgacagcaatgatcaagggggagatgcaaacgatcaagacaaggaggatgaagaaacaaggccgccacacctaagagtccaccaagcaatccaacgagatcaccccgtcgacaccatcctcggcgacattcataagggggtaaccactcgatctcgtgttgcacatttttgtgagcattactcttttgtttcctctattgaggcacacagggtagaggaagcacttcaagattcggattgggtgatggcgatgcaagaggagctcaacaacttcactaggaatgaggtatggcatttagttccacatcctaatcaaaatgttgtaggaaccaagtgggtcttccgcaacaagcaagacaagcatggtgtggtgacaaggaacaaagctcgacttgtggccaagggatactcccaagtcgaaggtttggatttcggtgaaacctatgcacccgtagctaggcttgagtcaatttgcatattattagcctatgctacttaccatggcttcaagctttatcaaatggacgtgaagagtgccttcctcaatggaccaatcaaggaagaggtctatgttgagcaacctcccggctttgaagatagtgagtaccctaaccatgtctataggctctctaaggcgctttatgggctcaagcaagccccaagagcatggtatgaatgcctaagagatttccttatagctaatggctttaaagtcggcaaggccgatcctactttattcactaaaactcttgacaatgatttgtttgtatgccaaatttatgttgatgatattatattttggtctactaacgaatctacatgtgaggaatttagtaggatcatgacacagaaattcgagatgtctatgatgggggagttgaagtattttctaggatttcaagtcaagcaactccaagagggcaccttcattagccaaacaaagtatactcaagacattctaaccaagtttggaatgaaggatgccaagcccatcaagacacccatgggaaccaatgggcatctcgacctcgacacgggaggtaaatccgtcgatcaaaaggtatacccgtcgatgattggttcattgctttatttatgtgcatctcgaccggacattatgctttccgtttgcatgagtgcaagattccaagccgaccctaaggaagctcaccttacggccgttnaaagaatcttgagatatttggcttatactcctaagtttgggctttggtctcctcggggatccacatttgatttgattggttattcgggtgccgattgggcggggtgtaagattaataggaagagcacatcggggacttgccagttcttgggaagatccttggtgtcttgggcttcaaagaagcaaaattcggtcgctctttctaccaccgaaaccgagtatattgccgcaggccattgttgcgcgcaattgctttggatgaggcaaaccctgcgggactatggttacaaattaaccaaagttcctcttctatgtgataatgagagtgcaatccgcatggcggataatcccgttgagcacagccgcactaaacacatagccattcggtatcattttcttagggatcaccaacaaaagggggatatcgagattgcatacattaacactaaagatcaattagccgatatctttaccaagcctcttgatgaacaaacttttaccaaacttaggcatgagctcaatattcttgactctagaaatttcttttgctaatttgcacacatagctcataaatatacctttgatcatgtcttttttgtatatgctatgactaatgtgttttcaagagtatttcaaaccaagtcataggtatattgaaagggaattggagtcttcggcgaagacaaaggcttccactccgtaactcatccttcgccgtcgctccaagagactctccatctttgggggagagaacaaaaggacttcgtctttggtataatcttaactcatttatttatgaccaaaggggaagatagcacttcaagggctctaatgattccatttttggcgattcatgccaaagggggagaaaggttgagcccaaagcaaaaggaccgcaccaccaccaatttcaaaaacttagtgctttccaagagtctttatcaattggtatcctattgtgttcaaaagggggagaaagtagttttcaaaaatggtatatcaaaaccctcttgaacactaagaggtggatctcttttagggggagttttgtttagtcaaaggaaaagcatttcaaatagggggagacaatttcaaatcttgaaaatgctttgcaaactcttattcatgtacctttgactatttgcaaaagatctttgaaatggatttacaaaaggttttgcaaaaacaaaacaagtggtgcaaacgtggtccaaaatgttaaataagaaagaaacattccattcttatcttgtgagtagttttattggctcaattccaagcaacctttacacttacattatgcaaactagttcaattatgcacatatctatttgctttggtttgtgttggcatcaattaccaaaaagggggagattgaaagggaattaggcttacacctaggtcctaaataattttggaggctgaattgtccaacacaaatatttgggctgactagtttgcccaagcgtatagattatacaggtgtaaaag

SEQ ID NO: 31832 - DNA, 545 bp, Zea mays
  Clone ID: MRT4577_129044C.1
gtttatcttttttgtaccaaaaaactactaggtcccaatacgcgcggcatgcactcgcttcttaaccacattacagcaacgtcccaagcccagcgccctacccaagcacagctgggcatcaataatcataaggcggaacccaaccaggaccaggacgggcaaatgaatggcccaagggtaaaagtcaccccttggatacacagacttttttggtttgtcgacttaccagatgatggaaaacttgacggtgtataagtatgcctatgaaagagtcaaggtgctccatctccattgtctcatggatattgaagatgacccagataccaccagacaacctgtggcggaacgacggtgacatcttgaaactggccattcatttgcacatgactggcctgctaatacgataggataatgccgacgatcagaccatagagggctggtgcttctgcttactattgatgaggatcatgccagcgcgcaacttcggatgctgagctatcgccctgacaccagcatcgccaacgatgccaatggccatgcctgct

SEQ ID NO: 31833 - DNA, 401 bp, Zea mays
  unsure (1)..(401): unsure at all n locations
  Clone ID: MRT4577_129045C.1
cccacacgcccgcctctctcccttcgaaccatcacatccagccagccaacaaaaatgtcgcgcgtcacagcctgcggagctcttctacatcctcgccgttgctgccctcagcgcggccgaggccccggcagagncaccttaggtttcggtggcctgacagtgttcaagagncagccaagagatctggggnccccgccgccccacccgaaggcggacccaccccccccgtttttgttgccccatggccgcggtctaggaagtctggtccagctaccgcgccagccaccgcctctacacccccttcttccacggacgaggagttgagccctttcccgccagcatccaccgtcgtggtgttctctgcggctgagggaccggctgctgatgacttcgacggtgct

SEQ ID NO: 31834 - DNA, 2127 bp, Zea mays
  Clone ID: MRT4577_129046C.1
atgggctacaattgtctttttacggatataagtgttactgtctttagaagaagtgatgattcagtagcatttaagggattgttagagggtcagctatacttagttgatttcaatagagctgaacgcgacacttgcttaattgctaagactaacatgggttggctctggcaccaccgactagcccacgttggaatgaagaatcttcacaagcttctaaagggagagcacattttgggactaaccaatgttcattttgagaaagacaggatttgtagcgcatgtcaagcagggaagcaagttggtgctcatcatccacacaagaacatcatgacgaccgacaggccacttgagctactccacatggacctattcgacccgatagcttacataagcatcagcgggagtaaatactgtctagttattgtggatgattattctcgcttcacttgggtgttctttttgcaggataaatctcaaacccaagggaccttaaatggattcttgagacgggctcgaaatgagttcggcttaaggatcaaaaagattagaagcgacaatgggacagagttcaagaactctcaaattgaaggctttcttgtggacgagggcatcaagcatgagttctcttctccctacacaccacaacaaaatggtgtagtagagaggaagaatagaactctacttgacatggtgagaaccatgcttgatgagtacaagacttcgaaccggttttgggcggaagcaatcaacaccgcttgctacgccatcaaccgtctctaccttcaccgaatcctcaagaagacattatatgaactcctcaccggtaaaaagcccaatgtttcatattttatagtctttggtagcaaatgttttattcttgttaaaagaggaagaaaatctaaattttctcctaaggctatagaaggctttttacttggttatgactcaaacacaagggcatatagagtctttaacaagtccactggactagttgaagtctcttgtgacattgtgtttgatgaaactaacggctctcaagtagagcaagttgatcttgatgagctagatgatgaagaggctccatgcgtcgcgctaaggaacatgtccattggggatgtgtgtcctaaggaatccgaagagcctccacaagcacaagatcaaccatcatcttcaaatcaagcatctccactaactcaagatgaggatcaagctcaagatgatgaaaatgaagatcaagaagagccacctcaagaggaggacaatgatcaagggggagatgtcaatgatcaagacaaggaagatgatcagggtccaagaccgcctgacccaagagtccaccaagcgatacaacgagatcaccccatgaactccatcctcggcgatattcataagggggtaaccactcgatctcgtgttgctcatttttgtgaacattactgttttgtgtcttctattgagccatactgggtggaagatgcattaagagattcagattgtgtgttggcaatgcaagaggaactcaacaacttcatgaggaatgagtgggttttccgcaacaagcaagatgagcatggtgtggtgacaaggaacaaagcccgacttgtggccaagggatattcacaagtcgaaggtttggattttggtgaaacctatgcacccgtagctaggcttgagtcaattcgtatattacttgcctatgctagttaccatggctttaagctctatcaaatggacgtgaaaagtgacttcctcaatggaccaatcaacgaagaggtctatgttgagcaacctcccggctttgaagatagtgagtaccctaaccatgtgtataaactctctaaggcgctttatgggctcaagcaagctccaagagcatggtatgaatgcctaagagattttcttatcactaatggcttcaaagttggcaaaaccgatcctactctctttactaaaactattgcaaatgatctgtttgtgtgccaaatttatgttgatgatattatatttgggtctactaacatatctacttgtgaagagtttagtaggattatgattcaaaaattcgagatgtcaatgatgggggagttgaagtatttcttaggatttcaagtgaagcaactccaatag

SEQ ID NO: 31835 - DNA, 4920 bp, Zea mays
  Clone ID: MRT4577_129047C.1
atgtcgcgagaacacgccaagaaggagatggagaccggcaacaagcccgctacaagccacgggaaagcttcatcggaagagtcccgcaacaaagggaaggggaaggagaagaaaccctcttcccacaagtcgcatcggagtggggacaagaaaaagaagatgaggaaggtggtctactacgagaccgacacctcatcgccatctacctccggctccgacgcgccctccgtaacttctaagcgccatgagcgcaagaagtttagtaagatccccttacactatcctcgtacttctagacatactccattactttctgttccattaggcaaaccgccaacctttgacggtgaagattatgctaggtggagtgatttaatgaaatatcacctaacctcactcaacaaaagtatatggaatgttgttgagtttggagcacaggtaccttccgtaggggatgaggattatgatgaggacgaagttgcccaaatcgagcacttcaactcccaagccacaaccatactcctcgcctctctaagtagggaggagtacaacaaggtgcaaggattaaagagcgccaaggaagtttgggacgtgctcaagaccgcgcacgagggggagctcggtcgcttccatcttcgccaaggggaggagccacaagacatgtacaatcggctcaaaaccttggtgaatcaagtgcgcaacctcgggagcaagaaatgggatgaccacgaggtggttaaggttattctaagatcacttattttccttaaccctactcaagtacaattaattcgtggcaatcctcgatatacactaatgactcccgaggaagtaatcgggaattttgtgagctttgaatttatgatcaagggctcacggaagatcaacgagcttgacggtccctccacgtccgaagcacaaccggtcgcattcaaagcgacgaaggagaagaaggaggagtctacaccaagtagaacacccatcgacgccttcaagctcgacaacgaggaaatggcgcttgtcatcaaaagcttccgccaaatcctcaagcaaaggagggggaaagattacaagccccgctccaaaaacgtttgctacaagtgtggtaagcccggtcactttatagcaaaatgtcctatttccagtgacagtgacaggggcgatgacaagaaggggagaagaaaggagaagaaaagatactacaaaaagaagggcggcgatgcccatgtttgtcgcgagtgggactccgacgaaagctctagcgactcctcctccgacgaggacgccgccaacatcgccatcaccaaggcacttccaacgtcggccacaagtgcctcatggcaaaggacggcaaaaagaaaaagtgccatccatgagaagtacgatctcttggactcccaagaggacttcctaatcaaggaaaacaaaaggcatgttaaagttaagaatgcttatgctctagaagttgaaaaatgtgaaaaattatctagtgagctaagcacttgccatgagactatagacaaccttagaaatgagaatgctaatttgttagctaaggttgattctattgcttgtaatgtttcaattcccaatcttagaaatgataataatgatttgcttgctaagattgaagaattgaacatttctcttgctagccttagagatgaaaatgaaaaattgcttgctaaggctaaagattttgatgtttgcaatgctaccatttccgaccttagaagtaaaaatgatatattgcatgctaaggttgtagaattaaaatcttgcaaaccatctatatctaccgttgagcacactactatttgcactagatgtagagatgttgatatcaatgctatacatgatcacatggctttaattaaacaacaaaatgatcatatagctaaactagatgcaaaaattgccgagcatgaaattgaaaatgaaaaatttaaatttgctcgtagtatgctttatagtgggagacgccctggcattaaggatgacattggcttccaacagggaggcaatgtcaaaattaatgcccctcctaagaaattgtccaactttgttaagggcaaggctcccatgcctcaagataacgagggatactttttgtaccctgtcggttatcctgagaacaagattaggagaattcattctaggaagtctcactctggccctaatcattcttttatgtataagggtgagacatctagctttaggcaaccaacccgtgctaagttgcctaagaagaaaactcctagtgcatcaaatgatcatgacatctcatttaaaacttttgatgcatcttatgttttaactaacaaatccggcaaggtttatgcatccgggggctcaagttggatcatcgacagcgggtgcacaaaccacatgacaggggagaagaaaatgttctcctcctacgagaaaaaccaagatccccaacgagctatcacattcggggatggaaatcaaggtgtcactgtctttagaagaagtgatgatttaatagcatttaagggagtgttagagggtcaactatacttagtgaattttgatagagctgaactcgacacttgcttaattgctaagactaacatgggctggctctggcatcgccgactagcacatgttgtgatgaagaatcttcataagcttctaaagggagagcacattttaggattaaccaatgttcattttgagaaagacaggatttgtagcgcatgccaagcagggaagcaagttggtgcccatcatccacacaagaacatcatgacgaccgataggccactggaggtcctacacatggatctattcggcctgatagcttacataagcatcggcgggagtaagtattgtctagttattgtggatgattattctcgcttcacttgggtattctttctgcaggaaaaaactcatacccaagagacattaaagggattcttgagacgggctcaaaatgagttcggcttaaggatcaagaaaattagaagcgacaacgggacggagttcaagaactcacaaattgaaggcttccttgaggaggagggcatcaagcatgagttctcctctccctacacgccacaacaaaatggtgtagtggagaggaagaatagaactctattagacatggcaagaaccatgcttgatgagtacaagacttcggatcggttttgggctgaggcggtcaacaccgcttgctacgccatcaaccgattatatctatatcgaatcctcaagaagacatcatacgaactccttaccggtaaaaggcccaatatttcatattttagagtctttggtagcaaatgctttattcttgttaaaagaggtagaaaatctaaatttcctcctaagaccgtagaaggctttttactaggatatgattcaaacacaagggcatatagagtctttaacaagtcctcgggactagttgaagtttcttgtgacgttgtgtttgatgagactaacggctctcaagtagagcaagttgatcttgatgagataggtgatgaagaggctccgtgcatctctctaaggaacatgtccattggggatgtgtgtcctaaggaattcgaagagcctccaaatgcacaagatcaaccatccccctccacacaagcatctccaccaactcaaaatgaggttgaggctcaagttgatgaaggagaagatcaagcaaatgagccacctcaagacgacggcaatgatcaagggggagatgcaaatgatcaagacaaggaggatgatgaagaacaaaggccgccacacccaagagtccaccaagcaatccaacgagatcaccccgtcgacaccatcctcggcgacattcataagggggtaaccactcgatctcgtgttgcacatatttatgagcattactcttttgtttcctctattgagccacacagggtagaagaagcactccaagattcggattgggtagtggcgatgcaagaggagctcaacaacttcactaggaacgaggtatggcatttggttccacgtcctaatcaaaatgttgtaggaaccaaatgggtcttccacaacaagcaagacgagcatggtgtggtgacaaggaacaaagcccgacttgtggccaaaggatactcccaagtcgaaggtttggatttcggtgaaacctatgcacccgtagctaggcttgagtcaattcgtatattattggcctatgctacttaccatggcttcaagctttaccaaatggacgtgaagagttccttcctcaatggaccaatcaaggaagaggtctatgttgagcaacctcccgcctttgaagatagtgagtaccctaaccatgtgtataaactctctaaggtgctttatgggctcaagcaagccccaagagcatggtatgaatgccttagagatttccttatcactaatggattcaaagtcggaaaggccgatcctacactcttcactaaaactcttgaaaatgacttgtttgtatgccaaatttatgttgatgatattatatttgggtctactaacgagtctacatgtgaagaatttagtaggatcatgacacaaaagttcgagatgtctatgatgggggagttgaagtacttcttaggatttcaagtgaagcaactccaagagggcaccttcctaagccaaacgaagtacactcaagatattctaagcaagtttggaatgaaggatgccaaacccatcaagacacccatgggaaccaatgggcatctcgacctcgacgaaggagataaatccgtcgatcaaaagggtgtaagattaatagaaagagcacatcggggacttgccagttcttgggaagatccttggtgtcttgggcttcaaagaagcaaaattcggtcgctctttctaccgccgaagccgagtatattgccgcaggccattgttgcgcgcaactactttggatga

SEQ ID NO: 31836 - DNA, 887 bp, Zea mays
  Clone ID: MRT4577_129048C.1
ttgggtacctcgaggccggccgggatcatgcccagttgacttgctcactgcggtcaacttgtagcaagtgtataccgtttcaattacagtttgatatttacttgaaccatcaaaatgacgattccggacgaggttgatattatcgtttgtggtggaggatcatgcggatgtgtcgttgctggccggttggccaatcttgatcataacctccaggtcctcttgattgaggctggtgaaaataatctcaacaacccatgggtcttccgtccgggtatctatcccaggaacatgaagttggacagcaagactgcttccttctactactccagaccttcggaatggctcgatggacgccgtgctgttgtaccctgtgcgcacatccttggaggtggatcctccattaatttcatgatgtacactcgtgcctctgcttccgattatgatgacttccaggccaagggctggactaccaaggaactccttcctctcatgaagaagcatgagacttatcagcgagcctgcaacaaccgcgacattcacggattcgagggacccattaaggtttcttttggtaactacacatatcctatcaaggaagacttccttcgtgccaccgaatcccagggcattcccaccaccgatgatcttcaagatttggtcaccggccacggtgctgagcactggctcaagtggatcaaccgtgataccggacgtcgctctgactctgctcacggctacatccacagcacccgcgccgttcaccagaacttgcacttgttgaccagcaacaaggttgaaaagttattctcgagggtgaccgtgctgtcggcgtcaagtcgtccctaccagcctgttcacccggacaggttactccaggacattgcgcc

SEQ ID NO: 31837 - DNA, 543 bp, Zea mays
  Clone ID: MRT4577_129049C.1
cagaaataagaagttacatttccagattctaaaaaaaaaaaaaaaaaaaaaagcttggtccaaaaaaaaaaaaaaagcttggtccttccccggcgggccgttgaaaggggcaattcccaccccctggggggcggtacttggggaacccggcttgggacccaacttgggggaatcatgggcattggttgttcccgggggaaaatggtattccgttaccattcccccccaccttccaacccggaggcttaaggggtaaacccgggggggcttatgggggggctaacctacattaattggggtgggcttactggccggtttcccagcgggaaacccggcgggcccgctggcttaatgaattgggccaccccccggggggggggggttggggtttgggggctttttccctttctcccttaattacttccttggcttgggccgtcgggttgcgggagggggtttaacttacttaaaggggggaataccggttttcaccaaatcccggggttaccgcggaaagaacatttgaaccaaagggccaccaaa

SEQ ID NO: 31838 - DNA, 251 bp, Zea mays
  Clone ID: MRT4577_12904C.1
taaaaaaaaaaaaaaaaaaaataaaaaataaaaaaaataaaaaaggtttaaaaaaaaaagggaaaaaaaaaaaagtagaaggggtgcggcctttttaaacttccattcttacctcccccttcttccttcgggccccttcttttatagggcctccctaattttatccactggccgttttttaacatcgttgttgttggaaaacctttgtctttccccaacttaactcttttagcaaaacttcctcttttccc

SEQ ID NO: 31839 - DNA, 578 bp, Zea mays
  Clone ID: MRT4577_129050C.1
tgggacctcaggcggcgggcgggattctcatctaacctctaagcctactctcctccggctgctgaggatgtcaggactatgcaccatgaggtagtgagagcgaagacctctaccatttgacggctgagatctctcatactcgctctcactctgcatctgaagcgtctactgcaactatgagtccctactccgatagatcatcttgaactcttctgatgcagctggatgagatgagcgactcgaggtgtctcattgactcacataaagttccatgcctacgccgactgttgcatcctcctctgcgccacacaaggtgaccaacgcgctctccatcatctacagcgaggacgacatgagcatctcccaccttgtctacatcctggtgaacatcgtcactcccgaggaccacagaaatcatgccagtccgtggtgccgctgctgatgtgcccatgacagcgcagctcggagacggctgctactctgcctacctaggcaccgatacacgtgaccggaccacgagctgcacgatgacaatctgtacccgtagagaatgcaagcctcgacgcgatctctgctac

SEQ ID NO: 31840 - DNA, 315 bp, Zea mays
  Clone ID: MRT4577_129051C.1
agcccacgcgtccgagctgatccgtcgtctcccgtcttcccgacccgggtcccgcctcgcccgtcgccgccagatccgacgcgctggatcgccagcggcctgctgctgtcgatccgacgtgcggcagtctgctcttcctgccgtttcactgcgcttgaggtccataatagcacgcatctgggcgggtcaagagcaaaatggattcggacggaagaaggcgccggtgccggctccccctcaacgatggccaagggtccggaaaagaccgacgacttcaaagaaggcgtccgaatcgccggaatcccccaagggtac

SEQ ID NO: 31841 - DNA, 1300 bp, Zea mays
  Clone ID: MRT4577_129052C.1
ccggccgggattggactcctcaaagaaagcccccccagcccccgctgctgctggagaaaagagaagggtgggtgggtgggagaagcgaacaaaaactcaagtagctagagagagaaagcaaaggcagcaggctcagctagctccgtgtgagtgagtgagtgaggtatagagagagagagagagagtgaggaagggaagccattgttgcagttgcacaggaaagaaagaaggaaggaacgagcgagagtggaaaagttggtgagtgaaacttacccactgctgcagctagctgctcccacttcctcgctgcgtcgtcctccctcacgcacctcgcctcgtctcctgcctcctggctccggcacgcgtaccatctcctctcggtctaaagcggtggaggaggaggaggaggaggatggaggagagagcgggcgagccgtcggaggtggaggagcagggctgcgcagcgaggccagccaaaagtagattcggcgccgtgggcccgccgtcctccagctgaggaggaaaggcagctatcggcgaggaagggtggtggactggtggtgctagcggtggtggtggtggtggtggtggaggatcccctctcacgtcaagcgctgtgtggaaagcataaaggcgggaggaggaggagagggcgaaggcgcagagcttccccgccgcacaaagcgaaaaggcttcagaaagaagaaagcttccgccttgggagggagagcgaggcatcctgcgtgtgagcgtgcgataaatagcggctccaggtccaggctgagggagagcgcgtctctggtgctctcgcaaccaccgtgcgcttgctttcctcctgctctactccgttgcacacttgtactaggcctggaggtcctgtagctcgcctggtgctgtgtcggagacggtggcaatggcattgcaggagcaggaggcggacggcgacgagggcggggaggaagacgacgaaggcgaggatgagcggatgacgggatacggtgtgggggagctgatatctgcttgtcccgaggcgtgctgtccgcttgcggcggtgtaggagtaagatattggcgcaataggctcaatcatttttttttttttgcttctctctttctctttttcccttttcttccttgtttgatgtggcgtgcttgttttatttttgttgcctttttttgtttctgattgatgagaccaatgttgattatatgatgaagagttgattggtaagaacgctaaaaaaaaaaaaaaaaaaaaactagttctagatcgcgagcggccgctcgcgatctagaactag

SEQ ID NO: 31842 - DNA, 464 bp, Zea mays
  Clone ID: MRT4577_129053C.1
tagggcggagggaaatgccgtggagactaactttacctcgatcacgccgcccgtcgagaaatagccggcttcaccgcgcgctaccccctccactagagcatgtaagcatgcactttacgacgaagaccttgctgcgctccccaacaacatatccctcgttaagacatcgacggtatcttctactcgaaagacgcttccacgaaggaagtccccgtccccagtatacgctgtatggatgatgcatttcaacccggatgacccgacataagggcaattgacagctgtcccccacgccattgctcacctcgtcggacacactctatgcaaaaaggtgcgaaatgtaaacctcgtcagcaacttagtgtcaccaaatattgtcacagacgttgcagatgtggcacaggaggttgaccttgcgcactctgtctgcaataatggcggtaaactacgccgacaccctgctg

SEQ ID NO: 31843 - DNA, 354 bp, Zea mays
  Clone ID: MRT4577_129054C.1
ggttgggcttattacaggtatgcggtgctcctaagcaaaatgctgcatagtggaggcaaagggattctataggtactgatggatctgtaaaaggacccacacccataatgcagcgtatggcctgctgaatgggatctatttcactagggggtctcaataatgggtacctagtgacagtcgctatacgagccgcaggtgatgtattaatattgattttactgacgactaccgctttaaggctgcaaaagtgaactgccaaacacaagtttataacacaaacatcaactctaatgggagcatttgactatgaatcctcatggatccagggcaccttgctctgaccatattaaaggt

SEQ ID NO: 31844 - DNA, 232 bp, Zea mays
  Clone ID: MRT4577_129055C.1
caaccatccggttcttattcactgcaagcgaggataggtaagcagcttgactatgtcatgcagtcagtctgttccccatgtagtatgtatgagcctgacgtttgaaacatgaaccaagatttgcagcatcgaaccgggtgtgtggttggatgctttaggcaattgcaacgctggtgtcgaacttcaatatttgacgaataccagcgtgttgctgcatgccagaacaagagtt

SEQ ID NO: 31845 - DNA, 474 bp, Zea mays
  Clone ID: MRT4577_129056C.1
aaaagggaatgggaattgaatgaaggaggcccgggagaatttcacacgggacccggaaaggggggggaaactgcgggggggggcctaaaaaaaaagaaacacggaaaaacagggcgggcccaaaccccgcccgcctttcctgaattacagcacaccgaaaaaccatggggggggaaaaaaacccctaaccggcagggctaaccaaaaaaaagttagcacaccatcagggggagcaaacccccccgagggggcgaacccagaaggagttaatccaacagaaacgggaccaaacccacgggaaaccggggagggcgaaagccctaaaagaggaggaccgggccaacaaaaacgagaaaccgcaacctgcaaaagcctggggtgggggggcccttaaaaacggaaaacaaacccttaaagatgtggctgggttcccccacaggccccccaagggaagaaaccagcccctcaacaccc

SEQ ID NO: 31846 - DNA, 405 bp, Zea mays
  unsure (1)..(405): unsure at all n locations
  Clone ID: MRT4577_129057C.1
atgcgcaaacagggacactcgggtttatttcattaactattgaggcgtatggctctggacatgttgattacacagcattgtcttgagccccagagattatttagatttaataggtctaaacccagaacttggtggggcaacatataccgggtctatactatgtaggatgtccttcatatttttgcgtggaacgacctacatttatgaactttagggaatgcatgcggtccccctaatgatgaggggggttgttcattaggccctcgatttttgtgctgggaaaccagcggggtgaattatcaattctgtccatcagcttccttcccgggtttatgcccttcgtggagctcgttccttcattgcttccancnncttcggcggccgggtgggtggttgtgcctttgg

SEQ ID NO: 31847 - DNA, 247 bp, Zea mays
  Clone ID: MRT4577_129058C.1
gtttaattcaataaaggactcatgatttgaaggaatgatttagagggtagagcacgttgtttatagcgtgcctaaactttaagtttgaaaaagtcaagataagacttatagaatgtaaaaactaagttgactataagtacaatggcgtaaagactatttcatttataaagaaattgcacaagaacgatgagacaccacatgactagaagatacggtgccatcgccattaagaataatgaaatgatgt

SEQ ID NO: 31848 - DNA, 1103 bp, Zea mays
  Clone ID: MRT4577_129059C.1
aagtttaagagtataagactaacaacagcaccaagaagaagacccaagatgacaggccttggctcaccatgtggtgcgtgcaagttcctacgcaggaagtgtgtgaaggggtgtgtcttcgctccatatttctgtcatgagcacggggctgcgcactttgctgctatccataaggtctttggggctagcaatgcctcaaagctcctaatgcatctgccaataagtgaccgttgcgaggctgcagtcactatgtcatatgaggcgcaagccaggcttcaagatccaatatatggctgtgttgctcacatcttttctctgcaacaacaggtggtcaggctgcaagcagaactagagtctttcaaagctctagcaatacaaggatgtggagatgggtccttgacatcaaaccctcagaaagaaaactgtgaaagattagcaccttatattcaagacgggcagctcttttaccaaccaacaatggcaaacaattcttcagtaaagagtgagaggcagttatactttgcaaacgattgcttcacatcaacgtcaactcaacattctgaaggttatgagccagatatatgcatgcctgactactacaacaacagcaatccttcttggaccacgcaagggagtgggtatcatgatattgatgagcttcaatcagtagcctttgcatatctggacaatgcttgacaaaacgaggaatttgatagttattgtacaagtttgaatagttttggtaacaataccttacagatgtcaatcaagttttctagcatgggcattgagttactgaagaagctgtgtgttgatgtactcataactaaaacttcaaactgcacttttgtagtttagaaatcctagtttcttcatgatgattcctgcagaagaattaaattggaattgttcaataagaaacacatcatttggtgcagataaatagaagattgaaacgaaatagaccgtaacggtattgcatttcagtctgttatgtggagaccaaaaggttcttgagtgtataattgtaattttagtgcttgtactgaacatctgtttaactctgtaagcaagtatatttagccaaaaaaaaaaaaaaaaaa

SEQ ID NO: 31849 - DNA, 275 bp, Zea mays
  Clone ID: MRT4577_12905C.1
ggtggtttttttaaaagggtggggggggtttttttttatttttaatgtcccattttattctggtaacagattcccatgctttctttcggccctctgatagaatcagcatatggtcacagaatagacttgaattacaaacagctggacaaaaaatacaagacgcagaattaacatgggacacaaaaaccaatgtattaaatatccttttctaaaaaccatactgccttaaaaaaaaaagactggcggagcttcgggcgcacaaagaaagctttaac

SEQ ID NO: 31850 - DNA, 365 bp, Zea mays
  Clone ID: MRT4577_129060C.1
ggctctgaccaaacgaactctctgggcacacggggcgcatactgacattgtgactggttaaccagaagctagcaccaagcgggagagggtacagcgctccgccgagcaatgaaacacatatggctcagaggatctccaccgtacccatgctggacgccgcccggggcgctgtaggcattcagaccaacctgccccccgacgactgactggacgcgccccctggctatggcgtcaccggcgtgtccaggcagcaccttcgccctgacgccctgtctgccgtcgatgaccttacgctggacgtcttccacctgcatatgctgttgagccactacatccataaggggctgttcttccaggcacccgat

SEQ ID NO: 31851 - DNA, 1117 bp, Zea mays
  unsure (1)..(1117): unsure at all n locations
  Clone ID: MRT4577_129061C.1
cgcgacgggcgccgctacctgnccgccggaatcctgggacatcttgccaaacggaaacaggaagagcgactcgcacgcatcctcctcgctgcgtccgatgccgaggaggccgtgctcgtcttcgtcgtcgtcgatccgacactcatcgagcccgtcttccccttcctcatcctcctagtcgtcgtcctcctcctcctcctcgtcttcgaattcgtcctcctcggcgtcctcgtagtcgctgacgttgccgctgccggcgaacttgctgtacctgtggttcaaggggaaggcctcggacttggtgcactccgacgcctgcatccaccccttctcgctgctatccccaccatcctccggatcggcttcctcgccgtcgtcctccgggatcggggccgcctcgaatgtggtgacgttggggtcgaatgtcaccttcttcttcacgagggccaggcacatctcgtccgtggagtccctcaactcgaggagcgtcgctagtagcggcgcggcggcggagacggcctccccatccagatcaaccttgttcggcgtaacccgcggcaaggcccgggcacggccgttgggggactgtgagggcgaccgcttgcggcggcggcggcggcgctccttggcccccccgaagcagccaaggaagcagcccatcggccgcggcgagaggcagcagaaagtgtgtgggagtgggagggcagcgcggggaagtggtgactagtgatgaggaggcggcatttgggggagcgggaaggaaaggaaaaaaccccggccggcctcgatgtgcccaatgtacgactaggtcgccagccacttcgtgaagcgcacatttcagcttcccaagaggcggtaagttctgattaggcttcgcaggatgcttgtttaatcggtgtggccagtgtcggtgtcgaagtgtgtgtgtattacgatggagttcgcggtcaggataaacagcaggctcccggtggcatagaagtccacgatcgctgagcttcggtgcaccatggactgcgccatgaccacctcctcgatctgccgcttcagccgcagtaagccgtcggtcgagaagcaccggaacgtgccgccgatcgtcacggagcccgggaccacg

SEQ ID NO: 31852 - DNA, 186 bp, Zea mays
  Clone ID: MRT4577_129062C.1
gatagcccttttatgtggggggggaacatggaaatcctatgcttccactggaagggagaattaaaaacaacattccggcttaattttttcagattgaccaattgtttggaaaactgcaaaaaaaaccaatcttaaaaaatcttttttcgcgctgatcacaagacagcggcccaactcctgaaaact

SEQ ID NO: 31853 - DNA, 817 bp, Zea mays
  unsure (1)..(817): unsure at all n locations
  Clone ID: MRT4577_129063C.1
atacaacacaaaacaacaatcaaacggagtacacatcttacaaggttagtaagaaggttgttcatagtcgaccaatatggctggcgtctccaccaatgccattgcccttgtgcttgtgacactcctctccgtgcttgtcacgtccgtccgttctgcggccaactacgacaccgccgccgctagatcctacaactccggctggctccccgccaaggccacctggtacggtgcgcccaccggcgccggccccatggacaacggcggtgcttgcggcttcaagaacgtgaacaagtaccccttctcctccatggcgtcctgcggcaacgagcctctgttcgacggcggcgcaggctgcggcagttgctacgagattcgatgcatcgccgccaacaacccttcctgctccggccagccgaggacggtcgtcatcaccgacatgaactactaccccgtggccaggtaccacttcgacctcagcggcactgcgttcggggccatggccaaatacggcctcaacgacaagctccgccacgccggcatcatcgacatgcagttcaggagggtgcgctgcaacttcccgggcatgaaggtcaccttccacgtccagcgtggatccaaccccaactacctcgcagtcctcgtggagtacgccaacgtcgacggcaccgtggtccgcatggagctcatgcaaaccaggaacgggcgcccaacggngtcctgggagccaatgcgccgctcctggggatccatctggcggatggacaccagccgcccgctgcaggggcccttctccatgcgtatcacagcgactcccgga

SEQ ID NO: 31854 - DNA, 290 bp, Zea mays
  unsure (1)..(290): unsure at all n locations
  Clone ID: MRT4577_129064C.1
ggacgggaggcaacaagcagcggcggcagcatggaccggaacctgagcgggttactgatcgattgcctaggagcagccgtgaccctcctgaggtaccagcagatactgctacctacaacgcagaggctgcatgcacggctaggcgcaacatcagcagaagcagggcgccatgatgactgcgctcaaggccgcgacggccgcgaccttcagcgggtcgatgctggtgctgtccgggctgatcctggccggcaccgtgatcgcgctcacngaggccacccccgtgctggtga

SEQ ID NO: 31855 - DNA, 507 bp, Zea mays
  Clone ID: MRT4577_129065C.1
tttttttttttttttttttttttttttttttttttttttttttttttttttttttttttggaaccggtggtttttatccgaaaaccggattccggaaccttaccgtttcccattccccctattagagagggcatttaaaactgggggtaaaaaaggaaaaacgtgtcccggggggaaagggggtttcggcccaaaataaaacaccacacaccagcggaaaaaaaaaactaaaaagccgggggggaaaaaagagagggcaaacccacgtaaagtgggtggggcaaaattcccgttttacactgggaaaacccctcccgcgagggaaataaggaaacccccccaccccaggggagggggatttcgccttcggggccccagggggatttttctttaacacaggggagagggggaaaaacttaatggccctccccccccggggcctttaaaaaagggaaaaacggggaaaacgctggtttcccccaaccgcaaaaattatttttgtggggg

SEQ ID NO: 31856 - DNA, 443 bp, Zea mays
  Clone ID: MRT4577_129066C.1
ggacccaaacagcagagaggttcaagaaatcggaagcacaaacatttagggttttcgataaaaaaagacatacattagttgggcagaacctggagcgccttaagcaaaggcaaggggaaacacgattaaactggcaatcatttaaaaacaaaaagatggggatgggggatcttgacaaaagcctggacttttaaaaaaacaactgcaaaaatctgacgggcccttggggcgggtgctttgggtacaaaaattttcccaagttccaagggtacctttttgacctcacacagaaccctaatttgatcggggtcttccgatagcccaaacatcaaattcagggacaccttttgcaaaaaagggagttttcttccaaaagtattttttttaaaataattttgttggccaaaatgacatcatcaaaatccacagttccgtataggggc

SEQ ID NO: 31857 - DNA, 340 bp, Zea mays
  Clone ID: MRT4577_129067C.1
attcggctcgaggctacttatgagcttgttggctgctgcggagcccaaaaacgatggggaggttgtacatgcggccgatgggatgctgctgccagagttcaaggacaaccatctagtactgtgcgatgaaccgagaaatgctcggttggcactgagtgctattggagtgaacccattagctgagtggagcaggaaagcatagcccagtggcacgagtgatcactcaccatctacaatcttgcttcatggtagatgcacaaacggaagtacattttggtaaccatacttattattggacctacacaacctgccgttgacatgtggcttttactggcgccct

SEQ ID NO: 31858 - DNA, 280 bp, Zea mays
  Clone ID: MRT4577_129068C.1
tccgggcacaccaagaaccggcgcatctccaaccaaccaattttttttctacgaaccacacacaacccacaggggggggggttaaatttacaaactatatcaaacactccctagtcaaaaagaaaaaacacaacactactcgagaccacgaagaactaacatgacagaaccaaaatcataaccatttccatcaattgaaaccagcgactaccccagccagcgcttatcttgcaaaaacaaaaatctgacatggttatcgctcaaaaacagtagcatatcc

SEQ ID NO: 31859 - DNA, 540 bp, Zea mays
  unsure (1)..(540): unsure at all n locations
  Clone ID: MRT4577_129069C.1
gngcnnnttggnggggccggcggtgtngtntantagtcttgcncnnnngctgcgtgtgacngattgtttcttacnccctacccaaccccatgtgaacatcgaaaaatttccntttaacttgttcgnggcnccgccgccgttatgagttacactattcttcgnnnccctncttttctcccgcctggggtggggtttttttctctatctctgtgtgttttngggggttgggngtnnngcncgtgcccggcccgntggtnggggccccggngccctgtgtggtttggnntgcctttgccgggttgggcccttgggttcttgggtgtcgctgtgtggggtgcgttggtgcggccggcggggggggggggggcctggggggtcggtgggcgggcggcgcggggggggtggtggggggggggtggggggcgcggggggggggcggggggggggcgtggccgggtccnggtggggggggggggggggcgggcgggggggcgggggggngcggggggggggggggggggggggggcgccggggggggg

SEQ ID NO: 31860 - DNA, 516 bp, Zea mays
  unsure (1)..(516): unsure at all n locations
  Clone ID: MRT4577_12906C.1
gcgatagcaacatatataagttcttattaatagaatagtatagatatataatactaataggtagtccttgcattattgagcatttgagaaaccacggtagagtggcgcactgatgatgagtaatgattgatccgtaacagccagctagacgacgagacccgaacccctgaacttgtctgcagtgatcgcgtcaatgcggcgcgccatttccggtgacaggtggttcacccagtcccccaccacgccctgccggaaaaaggagctgttgggcaccacgccgatcgggaactcagtcctgccacccttggtcggcgccatgcccctcatgcgctcgaacgagcacagccccacgacggcatccaccacgccgccgtcctcctcctcggagctgaatgggaggccgacgaactccgccagcctgcggacgtgcgccgcggggtccctctgcatctcctcgtacctgaagaagacaccttgtcggggtccgcgcggtgcgcgcgccagcccacgcgtncg

SEQ ID NO: 31861 - DNA, 313 bp, Zea mays
  Clone ID: MRT4577_129070C.1
ttttaaaaaaaaccccaaaggccaaaagcggaccaaaaatagcattccccgcggtcaaagaagggaacaaaacaccaacccctaacaaacgggcccccccctaaaaaacattatagccacaaagcgcaaacactttcccaaagcaaaaaaacccattttccccgttaaaggagggcccttaaataaaaagaaacccgacaaaatttcccttccataaaaaaaaaaatgcgaaaccaaaccttcagcccgctaaaacaaatccaccctacccaaaattaacttacgggacccacgaaaaaaaaaaacaaccccc

SEQ ID NO: 31862 - DNA, 4023 bp, Zea mays
  Clone ID: MRT4577_129071C.1
atgtcgggagcatccgccaagagggaaatcgggactggcgagaagcccgccacaagccatggcaaggctccatccggggagtccgccaacagggtgaagggatccccttcacacgacaagtcgcgtcggagcggtgacaagaagaagaagatgaagaaggtggtctactacgagaccgactcttcgtcgccatccacctccggcttcgacacgccgtccgtaacttctaagcgccatgagcacaagaagtttagtaagatccccctacgctaccctcacatttccaaacgtactccattgctttccgtcccattaggcaaaccacctatgtttgattgtgaagattataatatgtggagtgataaaatgaggcatcatctaacctcactccacactagcatttgggatgttgttgagattggagtacaggtaccatcaccgggggatgaagactatgattcggacgaggtcgcccaaattcggcacttcaactctcaagccaccactatactcctcgcctctctaagtcgagaggagtataacaaggtgcaaggattgaagagcgccaaggaaatttgggacgtgctaaagaccgcgcacgaaggagacgaggtgaccaagatcaccaagcaggagacgatcgagggggagctcggtcgcttccggcttcgccaaggggaggagccacaagatatgtacaaccggctcaaaaccttggtgaaccaagtgcgcaacctcgggagcaaaaaatgggatggccatgaaatggtcaaggttattcttagatcactcgtttttcttaaccctacgcaagttcaattaattcgtggtgatcctagatatacactaatgtctcccgaggaagtgataggaaaatttgtaagctttgagttaatgatcaaaggctcaaagaaaatcatcgagcaagacggcccctccacgcccgaagcacaaccggtcgcattcaaggcaacagaggagaagaaggaggagtctacctcaagtagactacccatcgacgcctccaagctcgacaacgaggaaatggcgctcatcatcaagagtttccgccaaatcctcaagcaaaggagggggaaggactacaagccccgctccaagaaagtgtgctacaaatgtggtaagactggtcattttattgcaaaatgtccactatctagtgacagtgacaggggcgacgacaagaaaggcaagaggagagaaaagaggaggtactacaagaagaagggcagcgatgcccatgtgtgccgcgagtgggactccgacgagagttcctccgacgaggacgccgcccacatcgccgtcaccaagggactcctcttccccaacgtcggccacaagtgcctcatggcaaaggacggcaaaagaaagaaggtaaaatcaagatccttcactaaatatgcatcctctagtgatgaagatcattttagtgatgaggaagataatttgcgtattctttttgccaaccttaacatgcaacaaaaggaaaaattaaatgaattaattagtgctattcatgagaaggatgaactcttggactcccaagaggactttctaattaaggaaaataagaagcatgtcaaggttaaggatgcttatgctctagaagtagaaaaatgtgaaaaattatctagtgagctaagcaagtgccatgatattattaccaaccttagaaataagaatgctagtttaatagctaagattgattcaaatgtttgtgataattcaatttccaatcttagagatgataatgcaaatttgcttgctaggattgaaaaattgaatgattctcttactagccttagaaatgaaaatgaaaatgaaaatttgattactaaggctaaagacttagatgtttgcaatgttaccatttctaaccttagaagtgaaaatgatatattgcatgctaagaaaatgaaaaaaattaaatttgctagaagtatactctatagtgggagacgccctggcatcaaggatggcattggcttccaaagaggagacaatgtcaaagttaatgcccctcctaaaagattgtctaattttgttaagggcaaggctcccatggctcaggataacgaaggttacattttgtaccctgtcggttatcccgaacacaagattaggagaattcactctaggaagtctcactctggccctaatcatgcttttatgtataagggtgagacatctagctctaggcaatcaacccgtgcaaaattgcctaaaaggaaaactcctattgcatcaaatgattctaacatttcatttaagacttttgatgcatcttatgttttaactaacaaatccggcaaggtttatgcattcgggggctcaagttggatcatcgacagcgggtgcacaaaccatatgacaggggagaaaaagatgttctcctcctacgagaaaaaccaagatccccaacgagctatcacattcggggatggaaatcaaggtgttactgtctttagaagaagtgatgattcaatagcatttaatggagtgttagagggtcagctatacttggaaaaatctcatacccaagagaccttaaagggattcttgagacaggctcaaaacgagttcggcttaaggatcaagaaaattagaagcgacaacgggacggagttcaagaactctcaaattgaaggcttccttgaggagaagggcatcaagcatgagttctcttctccctacacaccacaacaaaatggtgtagtggagaggaagaatagaactctattggacatggcaaggaccatgcttgatgaatacaagacttcggatcggttttgggccgaggcggtcaacaccgcctgctatgccatcaaccgagtctttggtagcaaatgttttattcttgttaaaaaaggtagaaaatctaaatttgctcctaaggttgtagaaggctttttactaggatatgactcaaacacaagggcatatagagtcttcaacaagtcctctgggcaagttgaagtttcttgtgacattgtgtttgatgagactaacgactctcaagtagagcaagttgatcttgatgagataggtgatgaagaggctccgtgcgtcgcgctaaggaacatgtccattggggatgtgtgtcctaaggaatccgaagagccaccacatgcacaagatcaaccatcttcctcaatgcaagcatctccaccaactcaagatgaggatgaggctcaagataatgaaggagaagatcaagaagttgagccacctcaagaggagagcaataatcaagggggagatgcccatgatcaagacgaggaagatgaacaagctccgagaccgccacacccaagagtccaccaagcaatccaacaagatcaccccgtgaacaccatcctcggcgatattcaaaagggggtaactactcgatctcgtgttgctcatttttgtgaacattactcttttgtttcctctattgagccacacagggtagaggaagaactacaagattcggattgggtggtggcgatgcaagaggagctcaacaacttcactaggaacgaggtatgtcatttggttccacgtcctaatcaaaatgttgtaggaaccaagtgggtcttccgcaacaagcaagacgagcatggtgtggtgacaaggaacaaagcccgacttgtggccaagggagattcacaagtcaaaggtttggattttggtgaaacctatgcacccgtagctaggctagaatcaattcgcattttacttgcctatgctacttaccatggctttaagctttaccaaatggacgtgaaaagtgccttcctcaatggaccaatcaaggaagaggtctatgttgagcaacctcccggctttgaagatagtgagtaccctaactatgtatataaactctctaaggcgctttatgggctcaagcaagccccaagagcatggtatgaatgcctaagagactttcttatcactaatggcttcaaagttggaaaggtcgatcctactttatttactaaaactcttgacaatgatttgttt

SEQ ID NO: 31863 - DNA, 5391 bp, Zea mays
  Clone ID: MRT4577_129072C.1
atgtcgggagatcacgccaagaaggagatggagaccggcgacaagcccacaccaagccacgggaaggcttcatcagaagagtcccgcaacaaagggaaggggaaggagaagaaaccctcttcccacaagtcgcatcggagtggggacaagaaaaagaagatgaggaaggtggtctactacgagaccgatacttcatcaccttccacctccggctccgacgcgccatccattacttctaagcgtcatgagcacaagaagtttagtaagatccccttacgctaccctcgcattcctaaacatacgcctttactttccgttccattaggcaaaccaccaacgtttgatggtgaagattatgctaggtggagtgatttgatgcgatttcatctaacctcactccacaaaagtatatgggatgttgttgagtttggtgtacaggtaccatccgtaggggatgaagattatgatgaggatgaagtggcccaaatcgagcacttcaactcccaagccacaactatactcctcgcctctctaagtcgagaggagtataacaaggtgcaaggattaaagagcgccaaggaagtttgggacgtgctcaagaccgcgcacgaaggagatgagctaaccaagatcaccaagcgggaaacgatcgagggggagctcggtcgcttccgtcttcgccaaggggaggagccacaagacatgtacaaccggctcaaaaccttggtgaatcaagtgcgcaacctcgggagcaaaaaatgggatgaccacgaaatggttaaggttatttttagatcacttattttccttaaccctactcaagttcaattagttcgtggcaatcctagatatacactaatgactcccgaggaagtgatcgggaattttgtgagctttgagttcatgatcaaaggctcaaggaagatcaacgaacttgatggtccctccacgtctgaagcacaaccggtcgcatttaaggcgatggaggagaagaaggaggagtctacatcgactagaacacccatcaatgcctccaagctcgacaacgaggaaatgtcgctcgtcatcaaaagcttccgccaaatcctcaagcaaaggagggggaaagattacaagcgccgctccaagaaagtttgctacaagtgtggtaagcccggtcattttattgcaaaatgtccattatctagtgatagtgacaggggcaacgacaaaaaggggagaaaaaaggaaaagaagaagtactacaagaaaaagggcggcgacgcccatgtatgccgcgagtgggactcggacgagagctcctctgactcctcctctgacgaggacgccgccaacatcgccatcaacaagggccttctcttccccaacgtcggccacaagtgcctcttggcaaagaacggcaaaaagaagaaggttaaatccaaatcctccactagatatgagtcctctagcgatgataatgctagtgatgaggaagataatttgcgtactctttttgccaacctaaacatgcaacaaaaagaaaagttaaatgaattaattagtgccatccatgagaaggatgacctcttggacacccaagaggacatcctaatcaaggaaaacaaaaagcatgttaaggttaaaaatgtttatgctctagaagttgaaaaatgtgagaaattaactagtgagctaagcacatgccatgatgttatcaacaaccttagaaatgaaaatgctagtttaattgctaaggttgattcaaatgcttgtgatgttccaattcccaatcttagaaatgataatgatgatttgcttgctaagattgaagaattgaacatatctctagctagccttagaaatgaaaatgaaaaattaattgctaaggctaaagattttgatgtttgcaatgctaccatttccgaccttagaagtaaaaatgatatattgcatgctaaggttgtagaattaaaatcttgcaaaccctctacatctaccattgaacatacttctatttgcactagatgtagagatgttgatattgatgctattcatgatcatatggtattaattaagcaacaaaatgatcatatagcaaaattagatgctaaaattgccgagcatgaacttgaaaatgaaaaatttaaatttgctcgtagtatgttttataacgggagacgccctggcattaaggatggcattggcttccaacagggaggcaatgtcaaacttaatgcccctcctaagaaattgtccaactttgtaaagggcaaggctcccatgcctcaagataacgagggttacattttgtaccctgtcggttatcctgagagcaaaattaggagaattcattccaggaagtctcactctggccctaaccatgcttttatgtataagggtgagacatctagttctaggcaaccaacccgtgctaagttgtctaagaagaaaacacctagggcatcaaatgattctaacatttcatttaagacctttgatgcatcatatgttttaactaacaaatccggcaacgtagttgccaagtatgttgggggcaaacacaagggatcaaagacttgtgtttgggtacccaaagttcttgtgtctaatgccaaaggacccaaaaccatttgggtttatgcatccgggggctcaagctgggtaatcgacagcgggtgcacaaaccacatgacaggggagaagaagatgttctcctcctacgagaaaaaccatgatccccaacgagctatcacattcggggatggaaatcaaggtgtcactgtctttagaagaagtgatgattcaatagcatttaagggagtgttagagggtcagctatacttagaaaaatctcatacccaagagaccttaaagggattcttgagacgagctcaaaatgagttcggcttaaggatcaagaaaattagaagcgacaacgggatggagttcaagaactcacaaatcgaaggcttccttgaggaggagggcatcaagcatgagttatcttctccctacactccacaacaaaatggtgtagtggagaggaagaatagaactctattggacatggccagaaccatgcttgatgtgttggattacggggaggctacgctagcgcaaaacaaaattttcaaccccataaaaccaagaactactgcggttataggtcatggaattaccactagacgcgcagagcagcggaagacgtctcgatgtagacgaacgcgtcgagcagtgccgtgcagtcatcgacgtccttcacgtcctcgcacggttcgtcctagtgctccagatgcagcacctccgaggtatccacacgtacagggaggaagcgccgcgtaccgaactgctaggttcgcgacggcggcttggcgagggcgagaggcgagcggctactcgtttgttggtggcaaattaggagtctttggtagcaaatgctttattcttgttaaaagaggtagaaaatctaaatttgctcctaagactgtagaaggctttttactaggatatgattcaaacacaagggcatatagagtctttaacaagtccactggacaagttgaagtttcttgtgacgttgtgtttgatgagactaacggctctcaaatagagcaagttgatcttgatgagataggtgatgaagaggctccgtgcatcgcgctaaggaacatgtccattggggatgtgtgtcctaagcaatacgaagagcctccaaatgcacaagatcaaccatcctcctccacgcaagcatctccatcaacccgaaatgaggatgaggctcaagttgatgaaggagaagaacaaagagatgagccacctaaagatgacgccaatgatcaagggggagatgcaaatgaccaagacaaggaggatgaggaaccaaggccgccacacccaagagtccaccaagcaatccaacgagatcaccccgttgacaccatcctcggcgacatccataaggggggtagaggaagcactgcaagattcggattgggtggtggcgatgcaagagagctcaacaacttcactaggaacgaggtatggcatttggttccacgtcctaatcaaaatgttgtaggaaccaagtgggtgttccgcaacaagcaagacgagcatggtgtggtgacaaggaacaaagcccgacttgtggccaagggatactcccaagtcgaaggtttggatttcggtgaaacctatgcacccgtagctaggcttgagtcaattcgtatattattggcctgtgctacttaccatggcttcaagctttatcaaatggacgtgaagagtgccttcctcaatggaccgatcaatgaagaggtctatgttgagcaacctcccagctttgaagaaagtgagtaccctaaccatgtctataaactctctaaggcgctttatgggctcaagcaagccccaagagcatggtatgaatgccttagagattttctcatcactaatggattcaaagtcggaaaggccgatcctacactctttaccaaaacacttgaaaatgatttgtttgtatgccaaatttatgttgatgatattatatttgggtctactaacgaatctacatgtgaagagtttagtaggatcatgacacaaaaattcgagatgtcaatgatgggggagttgaagtatttcttaggatttcaagtaaaacaactccaagagggcaccttcattagccaaacgaagtatactcaagacattctaaacaagtttgggatgaaggatgccaagcccatcaagacacccatgggaaccaatgagcatctcgacctcgacacagaagatattatgctttccgtatgcatgtgtgcaagattccaagccaaccctaaggaagctcaccttacggccgtaaaacgaaccttgagatatttagtttatactcctaagtttgggctttggtatcctaggggatccacttttgatttgattggttattcggatgccaattgggaggggtgtaagattaataaaaagagcacatcggggacttgccagttcttgggaagatccttggtgtcttgggcttcaaagaagcaaaattccgtcgctctttctaccgccgaagccgagtacattgccgcaggacactgttgcgcgcaactactttggatgaggcaaacccttagggactacggttacaaattaaccaaagttcctcttctatgtgataatgagagtgcaatccgcatggcggataatcccgttgaacatagccgcactaaacacatagccattcggtatcactttttaagggatcaccaacaaaagggatatatcgagattgcatacattaatactaaagatcaattagctgatatcttcaccaagccacttgatgaacaatcctttaacaaacttaggcatgagctaaatattcttgattctaggaacttcccc

SEQ ID NO: 31864 - DNA, 364 bp, Zea mays
  Clone ID: MRT4577_129073C.1
attcctgggcaagcgcccctcatcaccacaaaagactttattattgagctatccctcatattcaaatcttacaggagggcaccacgcaatgatgggctggcaggtagaactgctgcagggttggtcatagcacgttggttggagcggctgacattgttgcccttggaagagggtgccagccgcaggcgcagcgtgccggcagcaccgacacacctggggttgagtacacgaaggtactacggttaacaccagctagctgtctgattggaacaagttgctgctgctgacaataatcatgatagttcaatgctgccagttgcatgaatggaagaaattgctgggcggtccgcagcaaatagctggc

SEQ ID NO: 31865 - DNA, 314 bp, Zea mays
  Clone ID: MRT4577_129074C.1
tcttctactctgggatgacactctcccacatcaaattgtgctccttttatgaggacaccatcacccttcacattaaccatctctattccaaattttcagatctacacagaatttagaacaattccatccacgtaaaacatctctgatcttgttacaccaaatgctcgtactttctcacctcatacatccactacaaatacaactgatacaacctcggacatttcagctatacatatacattataccactacccctagatcgacattatccacttcaacaagcatatgctgctctcactttgatttgtcttaccc

SEQ ID NO: 31866 - DNA, 4347 bp, Zea mays
  Clone ID: MRT4577_129075C.1
atgtcgggagatcatgccaagaaagagatggggaccggcgagaagcccattataagccacgggaaggctccatcgggagagtcctacaacaaagggaagggaaaggaaaaggaatcctcttcacacaagtcgcgtcgaagcggtgacaagaagaagaagatgaggaaggtggtctactacgagaccgactcctcgtcgccatccacctccggctccgacacgctgtccgtaacttctaagcgccatgagcgcaagaagtttagtaagatccccctacgctaccctcgcattcctaaacatacgccattactttccgtcccattgggcaaaccaccaatgtttgatggtgaagattatgctaggtggagtgatatgatgcgatatcacctaacctcactccacaaaagtatatgggatgttgttgagtttggtgtacaggtaccatccgtaggggatgaagactatgatgaggacgaagtagcccaaattgtgcacttcaactcccaagccaccactatactcctcacctctctaagtcgagaggagtataataaggtgcaagggttgaagagcgcaaaggagatttgggacatgctaaagacccgcacgaaggagacgagtaatcctagatatacactaatgactcccgaggaagtgataggaaactttgtgagctttgagttgatgatcaaaggctcaaagaaaatcaacgagctagatggcccctccacgcccgaagcacaaccggtcgcattcaaggcaacggaggaaaagaaggaggagtctacatcaagtagacaaccaatcgatgcctcaaagctcgacaatgaggagatgtcgctcatcatcaagagcttccgccaaatcctcaagcaaatgagagggaaggactacaaatcccgctccaagaaaaagggaaagaggagagaaaagaagaggtaccacaagaagagaggcggcgatgcccatgtgtgccgtgaatgggactccgacgagagctctagcgactcctcctccgacgaggatgccgccaacatcgccatcaccaagggactcctcttccccaacgtcggccacaagtgcctcatggcaaaggacgacaaaaggaagaaggtaaaatcaaaatcctccactaaatatgaaacctccagtgatgaggaggataatttgcgcatcctttttgccaaccttaacatgcaacaaaaggaaaaattgaatgaattaattagtgctattcatgagaaggatgaactcttggacacccaagaggacttccttattaaagaaaacaagaagcatgttaatgttaaaaatgcttacgctctagaagtagaaaaatgtgaaaaactatctagtgagctaagcacttgccatgacactattgccaaccttaaaaatgaaaatgctaaattaattgctaaggttgattctaatacttatgatgtttcaattcccaatcttagagatgataatgttaacttacttgctaagattgaagaattaaatgtctctcttgctagccttaaaaatgaaaatgaacaattgattgctgaggctaaagattttgatgtttgcaatgttactatttctaaccttaggagtgaaaatgatatattacatgctaaggttgtagaattaaaatcttgcaaaccctctacatctaccgttgagcatacttccatttgtactagatgtagagacattaacattgatgctattcatgatcacatggctttaattaaacaacaaaatgatcatatagcaaaattagatgctaaaattgccgagcatgacttagaaaacgaaaaatttaaatttgctagaagcatgctctatagtgggagacaccctagcataaaggatggcattggcttccaaaagggggacaatgtcaaacttaatgcccctcctaaaagattgtctaattttgttaagggcaaggctcccatgcctcaggataacgagggttacattttgtaccctgccaattattccgagagcaaaattaggagaattcattctaggaagtctcactctggccctaaccatgcttttatgtataagggtgagacatctagttctaggcaatcaacccatgcaaaattgcctaagaagaaaactcctaaggcatcaaatgattctaacatttcatttatgacctttgatgcctcttatgttttaaccaacaaatccggcaaggtagttgccaaatatgttggaggcaagcacaaggggtcaaagacttgtgtttgggtacccaaagttcttgtgtctaatgccaaaggacccaaaaccatttgggaaaaatctcatacccaagagatcttaaaaggattcttgagacgggctcaaaatgagttcgggttaaggatcaaaaaaattagaagcgacaacgggacggagttcaagaactcacaaatcgaaggcttccttgaggaggagggcatcaagcatgagttttcttctccctacacgccacaacaaaatggtgtattggagaggaagaatagaactctattggacatggcaagaaccatgcttgatgagtacaagacttcggatcgttttgggccgaggcgagtatttggtagcaaatgctttattcttgttaaaagaggtagaaaatctaaatttgctcctaagactgtagaaggctttttactaggatatgatttaaacacaagggcatatagagtctttaacaagtcctcaggactagttgaagtttcttgtgatgttgtgtttgatgagactatcggctctcaagtagagcaagttgatcttgatgagatgggtgatgaagaggctccgtgcgtcgcgctaaggaacatgtccattggggatgtgtgtcccaaggaatccgaagagcctccaaatgcacaagatcaaccatcctcctccacgcaagcatctccacgaactcaaaatgtggatgaggctcaagttgatgaaggagaagatcaaagagatgagccacctcaagatgacgacaatgatcaagggggaaatgcaaatgatcaagacaaggaggatgaagaaccaaggccgccacacccaagagtccaccaagcaatccaacaagatcaccccatcgacaccatcctcggcgacattcataagggggtaaccactagatctcgtgttgcacatttttgtgagcattactcttttgtttcctctattgagccacaaaaggtagaggaagcactaaaagattcggattgggtggtggcgatgcaagaggagctcaacaacttcactaggaatgaggtatggcatttagttccacgtcctaaccaaaatgttgtaggaaccaagtgggtcttccgcaacaagcaagatgagcatggtgtggtgacaaggaacaaagcccaacttgtagccaaggggtattcacaagtcgaaggtttggatttcggtgaaaccgatgcactcatagctaggcttgagtcaattcgtatattacttgcctatgctacttaccatggctttaagctttaccaaatggacgtgaaaagggccttcctcaatggaccaatcaaggaagaggtctatgttgagcaacctcccggctttgaagatagtgagtaccctaatcacgtttataaactctctaaggcactttatgggctcaagcaagccccaagagcttggtatgaatgcctaagagattttcttatcactaatggcttcaaagtcggaaaagccggtcctactttatttactaaaactcttgacaatgatttgtttgtatgccaaatttatgttaatgatattatatttgggtctactaacgagtctatatgtgaggaatttagtaggatcatgacacaaaaattcgagatgtctatgatgggggagttgaagtacttcttgggatttcaagtgaagcaactccaagagggcaccttcattagccaaacgaagtatatttaactaaaatcaagaactaaacttgttttgtaggtttatgcatccggtggctcaagttggatactcgacagcgggtgcacgaaccacatgaccgggaggatgttctcctcatatgagaaaaacaaagatccccaacgagcaatcacattcggggatggaaatcaaggtttggtcaaagatgtgggagttaaatgcgaatggaaatctcgtgagcagctattcaagattatgtgccacagtggaatcaatggacgaaggaggtaatggtggaggtcgggcatggattgcaactggaagtgaaggagaaatctatctcgcgttcttcaatctcgactccatgagcaggaagatgaccgttgaaatatcagaccttggaaaggttctcggaagataccttttggagaaaacccatgt

SEQ ID NO: 31867 - DNA, 210 bp, Zea mays
  unsure (1)..(210): unsure at all n locations
  Clone ID: MRT4577_129076C.1
atggggggggggggttttttaaattttattttgttgttnggtttaaacccttaaaactttaaacttcatttttacggcaacaaagggttgtcaaccttgtcctttataagggactttgtttttttttattacattaaaattgcctcggtcaacaggttttaaaaacgtaaaaacattggcgttgtttttatcaggccaaccatttttttt

SEQ ID NO: 31868 - DNA, 3513 bp, Zea mays
  unsure (1)..(3513): unsure at all n locations
  Clone ID: MRT4577_129077C.1
atgaagcaactgaccagcggggccatcctgccagagggagcgagcgcgcgagagagagggcggctgatgggtggggacaccttgccagcgagagaggtgcggggcgaggagcgggctggcgcgcgcgcgtggaggcaggccgaagatgggccgaaagcggaggagcgcgggcgcgtgggaaagggggagggattcttgagacgagctcaaaatgagttcggcttaaggatcaagaaaataagaagcgataacgggacggagttcaagaactctcaaattgaaagcttccttgaggaggagggcatcaagcatgagttctcttctccctacacgccacaacaaaatggtgtagtggagaggaagaatcgaactctattggacatggcaaggaccatgcttgatgagtacaagacttcggatcggttttgggcggaggcggtcaacaccgcctgctacgccatcaaccggttatatctacatcgaatcctcaagaagacatcttatgaactcctaaccggtaaaaagcccaatatttcatattttagagtctttggtagcaaatgctttattcttgttaaaagaggtagaaaatctaaatttgctcctaagactgtagaaggctttttactaggatatgattcaaacacaagggcatatagagtctttaacaagtccactggacacgttgaagtttcttatgacgttgtgtttgatgagactaatggctctcaagtagagcaagttgatcttgatgagataggtattgaagaggctccgtgcatcgcgctaaggaacatgtccattggggatgtgtgtcctaaggaatccgaagagcctccaaatgcacaagatcaaccatccttctccacgcaagcatcttcaccaactcaaaatgaggaagaggctcaagttgatgaagaagaagatcaatcaaatgagtcacctcaagatgacggcatagatcaagggggagatacaaatgagcaagaaaaggaggatgagcaagaaccaagaccgccacacccaagagtccaccaagcaattcaacgagatcaccccgtcgacaccatcctcggcgacatacataagggggtaactactagatctcgggttgcacatttttgtgagcattactcttttgtttcctctattgagccacacagggtagaggaagcactccaagattcggattgggtggtggcgatgcaagaggagctcaacaacttcactagaaatgaggtatggcatttagttccacgtcctaatcaaaatgttgtaggaaccaaatgggtctttcgcaacaagcaagatgagcatggtgtggtgacaaggaacaaagctcgacttgtggccaagggatactcccaagtcgaaggtttggatttcggtgaaacctatgcacctgtagctaggcttgagtcaattcgcatattattggcctatgctacttaccatggctttaagctttatcaaatggacgtgaaaagtgccttcctcaatggaccaatcaaagaagaggtctatgttgagcaacctcccggctttgaagacagtgagtatcctaatcatgtctataagctttctaaggcgctttatgggcttaagcaagccccaagagcatggtatgaatgccttagagattttcttattgctaatggcttcaaagtcggaaaggccgatcctacgctctttaccaaatcacttgagaatgacttgtttgtatgccaaatttatgttgatgatattatatttgggtctactaacgagtctacatgtgaagagtttagtaggattatgacacagaaattcgagatgtctatgatgggggagttgaagtatttcttaggattccaagtgaaacaactccaagagggcaccttcattagccaaacgaagtacactcaagacattctaaacaagtttgggatgaaggatgccaagcccatcaagacacccatgggaaccaatgggcatctcgacctcgacacgggaggtaagtccgtggatcaaaaggtataccgatcgatgataggttctttactctacttatgtgcatctcgaccggatattatgctttccgtatgcatgtgtgcaagattccaagccgaccctaaggaagctcaccttacggccgtaaaacgaatcttgagatatttggcttatactcctaagtttgggctttggtatcctaggggatccacatttgatttgattggttattcggatgccgattgggcggggtgcaaaatcaatagaaagagcacatcagggacttgccagttcttgggaagatccttggtgtcttgggcttcaaagaagcggaatttggtcgctctttccaccgccgaagccgagtacattgccgcaggccattgttgcgcgcaattgctttggatgaggcaaaccctgcgggactacggttacaaattaaccaaagtccctttgctatgtgataatgaaagtgcaatcaagatggcggataatcccatcgagcatagccgcactaaacacatagccattcggtatcattttcttagggatcaccaacaaaagggagatatcgagatttcttacattaatactaaagatcaattagccgatatctttaccaagccacttgatgaacaaacttttaacaaacttaggcatgagctaaatattcttgattctaggaatttcttttgttaacttgcactcatagctcatttatataactttgatcatatgttatgattaatgtgttttcaagtctatttcaaaccaagtcataggtgtatcgaaagggaattggagtcttcgacgaagacaaaagcttccactccgtaactcatccttcatcgtcgctccgagccactctctatctttgggggagagagcatgcagtcaaagcaaaaggactccgactttggtataatcttcactcatttatttatgaccaaagggggagtaattcttaagggctctaaatgactctgtttttggcgattcatgccaaagggggagagagtattagcccaaagcaaaaggaccgtaccaccacctaattttaaaaagagttcttcaatttataaatttcaaattggtatcttattatgttcaaaagggggagaaagtagtatttcaaaaatggtatatcaaaaccctcttgaacactaagaggtggatctcttttagggggagttttgtttagtcaaaggaaaagcatttgaaacagggggaggaaatttcaaatcttgaaaatgcttttgcaaactcttatttatttaccttgactatttgcaaaagatctatgaaatggatttacaaaaaggttttgcaaaaacaaaacaagtggtgcaaacgtggtccaaaatgttatataagaaagaaacattccttgcatatcttgtaagtagttatattggctaaattccaagcaacctttgcacttattttatgcaaactagttcaattatgcacttctatatttgctttggtttgtgttggcatcaatcaccananagggggagattg

SEQ ID NO: 31869 - DNA, 790 bp, Zea mays
  Clone ID: MRT4577_129078C.1
gatattcttgtcatgtcacagttattattaggaaggaagacagcaagatcgaaagccatgcgtggccgtcaggataagatcaaacaagcatgcaaggcgcgcgccgcgacagatcgaatcgacgtgcatttatgccacaccggtgtctcgtgcagtgccgtgccatcaatcattcttctgctctcccgactcgtcgccgtcaccgtcgccgtcgcgtccgtcaccgccctggtcgtcggtgtcaggcggaccaccacccggcaccaccgccagcagctccgtgcgctccgccgggccctccccgtcctcgacgccgaacagctgcctccggagcacgccgtggaggccgtcgaagagcctcctcttgacggcgcccagggcccagtcgaggcggtggagcagctcggtggagttgtcgttgtacatgaagagggcgttgtataggtcgaagctgtcgcggcacgtgttgtccaccagccggagcagcgtctcgtaccccctggtgtcgacgggcgtcgcgcggagctccagcgccgccagcatcctcccgacggtgtgcgtcaggaactgcgtctcggcggcgtgcgcgtcgtgctcggcgcaggacatctccaccatccggcacccttcccgcgcgaacacgccgaggaacgcctcggcgcgggcgcggcgcgccgggcacgagtcccccacgcgcaccctgtcgaacacgaacgggaggcccgtccagtcgctgtgcgacgactccggcccgaacatcgggtgcgtgcagatgatgtccatctcctcc

SEQ ID NO: 31870 - DNA, 4828 bp, Zea mays
  Clone ID: MRT4577_129079C.1
atgtcgggagatcacgccaagaaggagatggagaccggcgaaaagcccactacaagccacaggaaggcttcatcggaagagtcccgcaagaaaggaaaggggaaggagaagaaagcttcttcccacaagtcgcatcggagtggcgacaagataaagaagatgaggaaggtggtctactacgagaccgacacttcatcaccttccaccttcggctccgacgcgccctccgtaacttctaagcgccatgagcgcaagaagtttagtaaaattcccctacgctaccctcgcatttctaaacatacacctttacttttcgtcccattaggcaaaccaccaacttttgatggtgaagattatgctaggtggagtgatttaatgcgatttcatctaacctcactccacaaaagtatatgggatgttgttgagtttggtgtacaggtaccatccgtaggggatgaagactttgatgtggatgaagtggcccaaatcgagcacttcaactcccaagccacaaccatactcctcgcctctctaagtagggaggagtacaacaaggtgcaaggattaaagagcgccaaggaagtttgggacgtgctcaagaccgcgcacgagggtgatgagctcaccaagatcactaagcgggaaacgatcgagggggagctcggtcgctttcgtcttcgccaaggggaggagccacaagatatgtacaaccggctcaaaaccttggtaaaccaagtgcgcaacctcgggagcaagaaatgggatgatcacgaggtggttaaggttattctaagatcactcattttccttaaccctactcaagtacaattaattcgtggtaatcctagatatacactaatgactcccgaggaagtaatcgggaattttgtgagctttgaatttatgatcaagggctcacggaagattaacgagcttgacgatccttctacgtccgaagctcaaccggtcgcattcaaagcgacggaggaaaagaaggagtctacaccaagtagaacacccatcgacgcctccaagctcgacaacgaggaaatggcgctcgtcgtcaagagcttccgccaaatcctcaagcaaaggagggggaaagactacaaaccccgctccaagaaagtatgctacaaatgtggtaagcccggtcattttattgcaaaatgtcctatttctagtgacagtgacaggggcgatgacaagaaggggagaagaaaagagaagaagaggtactacaagaagaagggcggcgatgcccatgtttgtcgcgagtgggactccgacgaaagctcaagcgactcctccgacgacgaggacgccgccaacatcgccgtcaccaagggatttctcttcgccaacgtcggccacaagtgcctcatggcaaaggacggcaaaaagaagaaggttaaatccaaatcctccactagatatgagtcctctagtgatgataatgctagtgatgaggaagataatttgcgtactctttttgccaacttaaacatgcaacaaaaggagaagttaaatgaattaattagtgccattcatgagaaggatgatctcttggactcccaagaggacttcctaatcaaggaaaacaaacagcatgttaagggcaaggctctcatgcctcaggataacgagggttacattttgtaccctgccggttatcccgagagcaaaattaggagaattcactctaggaagtctcactctggccctaatcatgcttttatgtataagggtaagacatctagctctaggcaaccaacccgtgctaagttgcctaagaagaaaactcctaatgcatcaaatgatcatgacatctcatttaaaacttttgatgcatcatatgttttaactaacaaatccggcaaggtttatgcatccgggggctcaagttggataatcgacagcgggtgcacaaaccacatgacaggggagaagaaaatgttctcctcctatgagaaaaaccaaaatccccaacgagctatcacattcggggatggaaatcaaggtgtcactgtctttagaagaagtgatgattcaatagcatttaagggtgtgttagagggtcagctatacttggtagattttgatagagctaaactcgacacatgcttaattgctaatactaacatgggttggctctggcaccgccgactagcccatgttgggatgaagaatcttcacaagcttctaaagggagagcacattttaggattaacaaatgttcattttgagaaagacaggatttgtagcgcatgccaagcagggaagcaagttggtgcccatcatccacacaagaacatcatgacgaccgacaggccactggagctcctacacatggatctattcggcccgatagcttacataagcatcggcgggaaaacattaaagggattcttaagacgagctcaaaatgagttcgacttaaggatcaaaaagattagaagcgacaacgggacggagttcaagaactcacaaattgaaggctttcttgaggaggagagcatcaagcatgagttctcttctccctacaccccacagcaaaatggtgtagtggagaggaagaatagaactctattggacatggcaagaaccatgcttgatgagtacaagacttcggatcggttttgggccgaggcggtcaacaccgcctgctacgccatcaaccggttgtatctacaccgaatcctcaagaagacatcatacgaactcctaaccggtaaaaagcccaatatttcatattttagagtctttggtagcaaatgctttatacttgttaaaagaggtagaaaatctaaatttgctcctaagactgtagaaggctttttactaggatatgattcaaacacaagggcatatagagtctttaacaagtcctctggacaagttgaagtttcttgtgacgttgtgtttgatgagactaacggctctcaagtagagcaagttgatcttgatgagataggtgatgaagaggctccgtgcatcgcgctaaggaacatgtccattggggatgtgtgtcctaaagaatccgaagagcctccaaatgcacaagatcaaccatcctcctccacgcaagcatctccaccgactcaaaatgaggatgaggctcaaatggatgaaggagaagatcaagcaaatgagccacctcaagatgacggcaatgatcaagggggagatgcaaatgagcaagacaaggaggatgaagagcaaaggccgccacacccaagagtccaccaagcaatccaacaagatcaccctgtcgacaccatcctcggcgacattcataaggggggtagaggaagcactacaagattcggattgggtgatggcgatgcaagaggagctcaacaacttcacgaggaacgtggtatggcatttagttccacgtcctaaccaaaatgttgtaggaaccaagtgggtcttccgcaacaaacaagacgagcatgatgtggtgacaaggaacaaagctcgactcgtggccaaggggtattcacaagtcgaaggtttggattttggtgaaacctatgcacccgtagctaggcttgagtcaattcgcatattattagcctatgctacttaccatggcttcaagctttaccaaatggacgtgaagagtgccttcctcaatggaccaatcaaggaagaggtctatgttgagcaacctcccggctttaaagacagtgagtatcctaaccatgtctataagctctctaaggcgctttatgggctcaagcaagccccaagagcatggtatgaatgccttagagatttccttattgctaatggcttcaaagttggcaaggccgatcctactttattcactaaaactcttgacaatgatttgtttgtatgccaaatttatgttgatgatattatatttgggtctactaacgaatctacttgtgaagaatttagtaggatcatgacacagaaattcgagatgtctatgatgggggagttgaaatattttctaggattccaagtcaagcaactacaagaaggcaccttcattagacaaacgaagtatactcaagacattctaaccaagtttggaatgaaggatgccaagcccatcaagacacccatgggaaccaatgggcatctcgatctcgacacgggaggtaaatccgtcgatcaaaaggtataccggtcgatgataggttcattgctttatttatgtgcatctcgaccggacattatgctttccgtttgcatgtgtgcaagattccaagccgaccctaaggaatcacaccttacggccgtaaaacgaatcttgagatatttggtttatactcctaagtttgggctttggtaccctcggggatccacatttgatttgattggttattcggatgccgattgggcggggtgtaagattaatagaaagagcacatcggggacttgccagttcttaggaagatccttggtgtcttgggcttcaaagaagcaaaattcggtcgctctttctaccgccgaagccgagtatattgccgcaggccattgttgcgcgcaattactttggatgaggcaaaccctgcgggactatggttacaaattcaccaaagttcctcttctatgtgataatgagagtgcaatccgcatggcggataatcccgttgagcatagccgcactaaacacatagccattcggtatcattttcttagggatcaccaacaaaatggggatatcgagattgcatacattaatactaaagatcaattagccgatatctttaccaagcctcttgatgaacaaacttttaccaaacttaggcatgagctcaatattcttgattctaggaatttcttttgctaa

SEQ ID NO: 31871 - DNA, 343 bp, Zea mays
  Clone ID: MRT4577_12907C.1
ttttcggttcagctatcaaggaaaggaaggggggcgtgctcatggcaccgggcgccactaacatcagcctcgttgtgggcctcaacaagcgcattgtgagcaccaagctccagctggctccccggccgggccaccgcaaggtgaaactaacgaagagcgtgtatatggacaccggcctggacatagactctgttgggaccgctgcttataacaagcgaatcagtgtgcttgtgatgggtgccaaggacaagcatgacctgaagcttgtttagataaagcctgatactcacaaaatggcaaataataatagagaggagatggcgggcgttctcacgaagatgat

SEQ ID NO: 31872 - DNA, 843 bp, Zea mays
  unsure (1)..(843): unsure at all n locations
  Clone ID: MRT4577_129080C.1
aattcggcacgaggccacctcctgcctgcccacgcacccgtagccatgttggatccaccgccccaccacgggtagctgaaggggcggcggcggcggcgcggcagagggatgaagaacttcctcaggaagctgcacatcggtgactccgccgccggggatggcgcctcgtcgccttcggctcggcccgaggcgccaacgaaaaagggcgggggcatcgagcataggcacgcctccgggttgtcgggctggctgagctccgtgaccagccggccgcacccacctacgccgctttctgcttctgctgcaccggcagcggcggcgccggaggtggaggagtcggcgttgacgactgcgttggcttcgtctgttgaggagaagagggtagccgaggaggacgaggagagggcgaggcgggagtcccggaaggaggcggagatggagaagaaagagaaacagcaggcggagctggagaactatcacatgcagctggccctcgagatgagcgtgagggaggacccggaggcgatgcagatcgaggtggccaaacagatcagcctcggctcctgccccatccagagctcgcccgcagaggtcatcgccttccgatactggagtttcaatgcccttagctatgacgacaaaatattgngatggtttctatgacatttgtgccactgnnggatgagcttgcaatgtcaaccataccttctctgatggatctgcaagcactgccattttcacatggaggcaaaactgatgctgntattggtcgacagagcactggattctgagctcgtagctcttgacagaaggctgttatcatgggctgtagaatttcgctcg

SEQ ID NO: 31873 - DNA, 5403 bp, Zea mays
  Clone ID: MRT4577_129081C.1
ctagccgttgggccattctgctgagcgcggacggtccgccctcctggtgcggacggtccgccccggacggtccgcgccagaggccggacggtccgcgcaagggctcggacggtctttgcttttcctccggacagtccatagcacagacttggatttttgcattggttctgtccgagggttattcttgtgtcgcggacggtccgccgcaagggcccggacggtccgcgcttggcctgtttttccaaaaagcttctcctgtccggaataatctacggtattccggacagtcgatttagcatagttatagatgaacttttggcacttctcccccttgttggcatgaatcgccaaaaacggaatcattagagccctcgaagtactttcttcccctgcggcaatgtactcggcttcggcggtggaaagagcgaccgaattttgcttctttgaagcccaagacaccaaggatcttcctaagaactggcaagtccccgatgtgctcttcctattgattttgcaccctcccgtgtcgaggtcgagatgcccattagttcccatgggtgtcttgatgggtttggcatccttcatcccaaacttagcaagaatgtcttgagtgtacttcgtttggctaatgaaggtgccctcttggagttgcttgacttggaatcctagaaaatacttcaactcccccatcattgacatctcgaatttctgtgtcatgatcctactaaactcttcacatgtagacttgttagtagacccaaatataatatcatcaacataaatttggcatacaaacaagtcattttcaagagttttagtaaagagtgtaggatcggccttgccgactttgaagccatttgcaataaggaaatctctaaggcattcataccatgctcttggggcttgcttgagcccataaagcgccttagagagcctataaacatggttaggatactcactgtcttcaaagccgggaggttgctcaacatagacctcttccttgattggtccgttgaggaaggcacttttcacgtccatttgatagagcttaaagccatggtaagtagcataggctaataatatgcgaattgactcaagcctagctacgggtgcataggtttcaccaaaatccaaaccttcgacttgtgaataccctttggccacgagtcgagctttgttccttgtcaccacaccatgctcatcttgcttgttgcggaagacccatttggttcctacaacattttggttaggacgtggaactaaatgccatacctcatttctagtgaagttgttgagctcctcttgcattgccaccacccaatccgaatcttgaagtgcttcttctaccttgtgtggttcaatagaggaaacaaacgagtaatgttcacaaaaatgtgcaacccgagatctagtagttacccccttatgaatatcgccgaggatggtgtcgacggggtgatctcgttgaattgcttggtggactcttgggtgtggcggtcttggttcttcctcatcctccttttcttgatcatttgcatctcccccttgatcattgccgtcatcttgaggtggctcatcttcttgattttgcccttcatcaacttgagcctcatcctcattttgagttggtggagatgcttgcgtggaggaggatggttgatcttgtgtatttgaaggctcttcggattccttaggacacacatccccgatggacatgttccttagcgcgatgcatggagcctgttcttcacctatctcatcaagatcaacttgctctacttgagagccgttagtttcatcaaacacaacgtcacaagagacttcaactagtccagtggacttgttaaagaccctatatgcccttgtgtttgagtcataaccaagtaaaaagccttcggttaggagttcatacgatgtcttcttgaggattcggtgaagatataaccggttgatggcgtagcaggcggtgttgaccgcttcggcccaaaaccggtccggtgtcttgtactcatcaagcatggttcttgccatgtccaatagagttcgattcttcctctccactacaccgttttgttgtggcgtgtagggagaagagaactcatgcttgatgccctcctcctcaaggaagctttcaatttgagagttcttgaactccgtcccattgtcgcttcttattttcttgatccttaagccgaactcattttgagcccgtctcaagaatccttttaaagtctcttgggtttgagatttttcctgtaaaaagaatacccaagtgaagcgagaataatcatccacaataactagacagtacttactcccgccgatgcttatgtaagcgatcgggccgaatagatccatgtgtaggagctccagtggcctgtcagtcgtcattatgttcttgtgtggatgatgagtgccaacttgcttccctgcttggcatgcgctacaaatcctgtctttctcaaaatgaacattggttagtcctaaaatgtgctctccctttagaagcttatgaagattcttcatcccaacatgggctagtcggcggtgccagagccaacccatgttagtcttagcaattaaacatgtgtcgagctcagctctatcaaaatctactaagtatagctgaccctctaacacacccttaaatgctattgaatcatcacttcttctaaagacagtgacacctttgaccaacccttgatttccatccccaaatgtgatagctcgttgggggtctttgtttttctcatatgaggagaacatccttttctccccggtcatgtggtttgtgcacccgctgtcgagtatccaacttgagcccccggatgcataaaccttgccagatttgctagtcaacacataagatgcatcaaaagttttaaatgaaatggcatgatcatttgatgcattaatagttttctttctaggcaacttggcatgggttggttgcctagatctagatgtctcacccttatacataaaagcataattagggccagagtgagacttcctagaatgaattttcttaatcttattctcaggatacccggcagggtacaaaatgtaaccctcgttatcctgaggcatgggagccttgcccttaacaaagttagacaagttcttaggaggggcattaattttgacattgtttcccctttgaaagccaatgccgtccttaatgcccgggcgtctcccattatagagcatgcttctagccaatttaaatttttcattttctaagtcatgctctctaattttagcattaagttgtgctatgtgatcattttgttttttaattaaggcaaggtgatcatggatagcatcgacattaatatctctacatctagtgcaaatggacacatgctcaatagtagatgtagagggtttgcaagactttaattcaataaccttagcatgcaacaaatcattcttagttctaaggtcagaaatagtagtattgcaaacatcaaaatccttagccttagcaattaatttctcattctcatttctaaggctagcgatggaagcattcaattcatcaatcctagcaagcaagtcaacatcatcatttctaggatcaatgcaaacatgagaatcaaccttagccaacaaattagcattttcatttctaaggttgtctaaaatctcatggcaagtgcttagctcactagataatttttcacatttttctctttctagagcataagcatttttaaccttaacatgtttcttgttttccttgattaggaagtcctcttgggagtccaagagatcatccttctcatggatagcactaattagctcatttaatttttctttttgttccatgttaaggttggcaaaaagaatacgcaagttatcctcctcatttttatcatcctcatcactagatgtttcatatttagtggaggactttgattttaccttctttttgccgtccttggccatgaggcacttgtggccgacgttggggaagaggaggcctttggtgacggcgatgttggcggcgtcctcgtcgtcggaggagtcgcttgagctttcgtcggagtcccactcccgacaaacatgggcatcgccgcccttcttcttgtagtacttcttcttctccttccttttgcccctcttgtcgttgtccctgtcactgtcacttgataatggacatttagcaataaagtgaccgggcttaccacatttgtagcaaaccttcttggaacgggatttgtagtccttccccttccgttgcttgaggatttgccggaagcttttgatgattagggtcatctcctcgttgtcgagcttggaggcgtcaattggttgtctacttggtgtagactcctccttcttctcctccgttgccttgaaggccacgggttgcgcctcggatgtggaaggctcatcaagctcgttgatcttcttggagcccttaatcatgcattcaaaactaacaaaattcccgatgacttcctcgggggtcatttgtgtatatctaggattgccacgaattaattgtacttgagtagggttaaggaaaataagggctctcagaataaccttaaccacttcgtggtcatcccattttgtgctcccgaggttgcgcacttggttcaccaaggtcttgagccggttgtacatgtcttgtggctcctccccttggcgaagacggaagcgaccgagctccccctcgatcgtttcccgcttggtgatcttggtgagttcatcaccctcatgcgccgtcttgagtaggtcccaaatctccttggcattcttcaacccttgtactttgttgtattcctccttgcttaaagaggcaaggagaatggttgtggcttgggagttgaagtgctcgatttgggccacttcgtccgtgtcgtagtcctcatcccctacggatggtacctgtacaccatactcaacaacatcccataatcttttgtggagggagattagatgaaattgcattaaattactccacatagcataatcttcaccattaaaagttggtggtttgcctaatgggacggaaagtaaaggtgtatgtttaggaacgcgagggtagcgtagggggatcttactatacttcttacgctcttggcgtttagaagtgacggacgccgcgtcggagccggaggtggaggtcgatgaagtgtcggtctcgtaaaagaccaccttcctcatccttttgtgcttgtccccactccgatgcggcttgtgagaagatttttccttcttctccttatggtgagaagaggaagatcttttctccttccgcttggaggatttcttcttcttctctcttctcttggtgcgggactcttccgatgaggatgaagtgctcccttggcttgtagtgggcttgtcgtcgccggtctccatctccttcttggcgtgatctcccgacat

SEQ ID NO: 31874 - DNA, 382 bp, Zea mays
  Clone ID: MRT4577_129082C.1
cggctcgagtgaaaagatggtgatgcaaaaatcccgattgtcactaccatatattgttttggctcaaatatatggtgccagatgtaagtgggaaaaaatggctggagtgtggaggtcaatggaaaatcaaagagcaaagaaggttcagtcatgcagctggctttgcatcaagaatcatatttatgtttttacgtcggaacagatattgcaccatggaaaaggagccacctatgaggttttggatcttctattttgggacatgatgaatcataaatatgctcctagttttgtagagcccaataacttggactaggttgtgtccagctgtccctcgaccaacctgcttgcttaacttaccttgcctgtactaaaggtttgcagt

SEQ ID NO: 31875 - DNA, 4965 bp, Zea mays
  Clone ID: MRT4577_129083C.1
atgtcgggagctcacgccaagaaggagatggtgaccggcgagaagcccgccacaagccacggtaaggctccatcgggagagtccgacaacaagaagagggaggaatcacctccccgtgtcaagtcgcaccggagtggcgacaagaagaagaaaatgaagaaagtggtctactacaagaccgattcttcgtcgccttccacctccagctccgacgcgtcgtccgtcacttctaagcgccatgagcgcaagaagtttagtaagatccccttacgctatcctcgcatttccaaacgcacccctttactttacgtcccactaggcaaaccaccggaaccatccgtgggggatgaaggctatgactcggacgaggtagcccaaatccggcacttcaactcccaagccactactatactcctcgcctctctaagtcgagaggagtataataaggtgcaagggttgaagagtgccaaagagatttgggacgtgctaaaaaccgcgcacgaaggagacgaggtgaccaagatcaccaagagggaaacgatcgagggggagctcggtcgcttcatgcttcaccaaggggaggagccacaagccatgtacaaccggctcaagaccttggtgaaccaagtgcgcaacctcgggagcaccaaatgggatgaccatgaaatggtcaaggttattcttagatcactcgtttttcttaaccctactcaagtacaattaattcgtggtgatcctagatataaactaatgtctcccgaggaagtgatagggaagtttgtgagctttgagctaatgatcaaaggctccaaacaaatcattgagcgaggcgccacctccacacccgaggtgcaacctgttgccttcaaagcaacggaggagaagaaagaagagtctacatcaagtaggctccccatcgacgcctccaagctcgacaatgaggagatggctttaatcgtcaaaagctttcgccaaatccgcaagcaaaggaggggtaaggactacaagccccgctccaagaatgtttgctacaagtgtggtaagcacggtcatttcattgctaaatgtccattatcaagtgatagtgacagaggcgacgacaagaaggggagaagacaggagaagaagtattacaagaagaagggcggcgatgcccatgtttgtcgggagtgggactccgatgagagctccaccgactcctcctccgacgaggacgcggcaaacatcaccgtcaacaagggtcttctcttccccaacgtcggccacaagtgcctcatggcaaaggacggcaaaaagaagaaggtaaaatctagagcttccactaaatatgcaacatctagtgatgaggctagctctagtgatgatggggatgatttgctcaccctttttgccaacttaaacatgcaacaaaaagaaaaattgaatgaattgattagtgctattcatgagaaggatgaactcttggatagccaagaggacttccttattaaagaaaataagaagcatgttaaagttaaaaatgcttatgctcaggagatagaaaaatgtgaaaaaataactagtgagcaaagcacttgccataacactatttccaaccttagatttgaaaatgataaattgattgctaaggttgagaaattaaatgatagtgatgattctcttgtcaaccttagaaatgataatgctaatttgattgctaagattgacaaattgaatgcatctctctctagccttaaaattgagaatgaaaaattaatttctaagcctaaagattcaaatgtttgcaatgtttctatttccaatcttagagatgagaatgctattttacatgctaagattgttgaattaaatacttgcaaaccctctacatctactgttagtcatgtctctatttgcactagatgtagagatgttaatgttgatgctattcatgatcacattgctatgattaaaaaacaaaatgatcatatagcaaaattagatgctaaagttgccgagcatgaattagagaatgaaaattttaaatttgctcgtagtatgctttatagtgggagacgtcctggcattaacgatggcattggcttccaacagggaggcaatgtcaaactcaatgcccctaaaagattgtctaactttgttaagggcaaggctcccatgcctcaggataacgagggctatattttatatcctgcaggttatcctaaggataagattaggagaattcatgctaagaagactcattctgtttcacaccatgcttttatttataagaatgaggcttctagctctaggcgttctacccatgttaaaatgcctaaaaagaaatctcctattgcattaaatgatcataacatttcatttaagacttttgatgcttcatatgttttaactaacaaatcaggcaaagtagttgccaaatatgttggggccaaacacaagggctcaaagacttgtgtttgggtacccaaggtgcttgtttctaatgtgaaaggacccaagaccgtctgggtttatgcatccgggggctcaagttggatcatcgatatcgggtgcacaaaccacatgaatggggggaaaaggatgttctcctcctacgagaaaaaccatgatccccaaagagctatcacattcggggatggaaatcaaggtgttactatctttagaagaagtgatgattcagtagcatttaagggagtgttagagggtcagctatacttaattgattttaatagagctgaactcgacacttgcttaattgctaagactaacatgagttggctctggcatcgccgactagcccatgttgggatgaagaatcttcacaagcttctaaagggagagcatattttaggactaacaaatgtttattttgagaaagacaggatttgtagcacatgtcaagcaggaaagcaagttggtgttcatcatccacacaagaacatcatgacgaccgacaggccgcttgagctactccacatggatctattcggcccgatcgcttacataagcatcggcgggaaaaccttaaagagattcttgagacgggctcaaaatgagttcggcttaaggatcaaaaagattagaagcgacaacgggacggagttcaagaactcacaaattgaaggctttcttgaggatgagggcatcaagcatgagttctcttctccctacacaccacaacaaaatagtgtagtggagaggaagaatagaactctacttgacatggcgaggaccatgcttgatgagtacaagacctcggaccggttttgggtagaagcagtcaacaccgcttgctacgccatcaaccgtctataccttcaccgaatcctcaagaagacatcatatgaactcctaaccggtaaaaagcccaatgtttcatattttagagtctttggtagcaaatgctttattcttattaaaagaggtagaaaacccaaatttgctcctaaggctgtagaaggctttttacttggttatgactcaaacacaagggcatatagagtctttaacaagtccactcggctagttgaagtttcttgtgatattgtgtttgatgagactaacgactctcaagtagagcaagttgatcttgatgagctagatgatgaagaggctccgtgtgtcgcgctaaggaacatgtccattggggatgtgtgtcccaaggaatccgaagagcctccacatgcacaagatcaaccatcatcttcaaatcaagcatctccacctacccaagatgaggatcaagctcaagatgatgaaaatgaagatcaagaagagccacctcaagaggaggacaataatcaagggggagatgccaatgatcaatataaggaagatgatgagggtcccgcaccaccacaccgaagagtccaccaagcaatacaacgagatcaccccgtgaactccatcctcggcgatattcataagaggagggtggaagatgcattaagagattcagattgggtgttggcgatgcaagaggagctcaacaacttcacgaggaatgaggtatggcatttagttccacgtcctaatcaaaatattgtaggaaccaagtgggtcttccacaacaaacaggatgagcatggtgtggtgacaaggaacaaagctcgacatgtggccaaggaatactcccaagtcgaaggtttggatttcggtgaaacatatgcacccgtagctaggcttgagtcaatttgtatattacttgcttatgctacttaccatggctttaagctttaccaaatggacatgaaaagcgccttcctcaatagaccaatcaaggaggaggtctatgttgagcaacctcccggctttgaagatagtgagtaccctaaccatgtctataaactctctaaggcgctttatgggctcaagcaagccccaagagcatggtatgaatgcctaagagattttcttattgctaatggcttcaaagtcggaaaaaccgatcctactctctttactaaaacaattgcaaatgatttgtttgatcatggttcaaaaattcgagatgtccatgatgggggagttgaagtatttcttaggatttcaagtcaagcaactccaagaggcaccttcattagccaaacgaagtacattcaagacatactcaccaagtttgggatgaaggatgccaagcccatcaagacacccatgggaactaatgggcatctcgacctcgacatgggagggtgtaaaattgatagaaagagcacatcagagacttgccagttcttggaaagatctctggtgtcttgggcttcaaagaaacaaaattttgtagctctttctaccgccgaagccgagtacattgccgcaggccattgttgcacgcaattactttggatgaggcaaacccttagggactatgattacaagttaatcaaagttcctctcctatgtgataatgagagtgcaatccgcatggcggataatcccgtgagcacagccacactaagcacatag

SEQ ID NO: 31876 - DNA, 5284 bp, Zea mays
  Clone ID: MRT4577_129084C.1
atggagaccggcgaaaagcccactacaagccacgggagcacttcatcggaagagtcccgcaccaagaggaaggagaagaagaatatctcctccaacaaagggaaggagaagaaatcttcttctcaccacaaagagaagaaggaaaaatcttcttccctcaagccgcatcgaagcggaaacaagcaaaagaggatgaggaaagtggtctactacgagaccgacacttcatcaacatcgacctccgactccgatgtgccctccgtaacttctaaacgccaagagcgtaagaagtttagtaagatccccctacactaccctcgcatttctaaacatgcacctttactttccgtcccattaggcaaaccaccaacttttgatggtgaagattatgctaggtggagtgatttaatgcgattccatctaacctcactccacaaaagtatatgggatgttgttgagtttggtgcacaggtaccatccgtaggggataaggattatgatgaggatgatgtggcccaaatcgagcacttcaactctcaagcaacaacaatactcctcgcctccctaagtagggaggagtttaacaaagtacaagggttgaagagcgccaaggagatttgggatgtgctcaaaaccgcgcacgagggagacgagctcaccaagatcaccaagcgggaaacgatcgaaggggaactcggtcggttccggcttcgcaaaggggaggagccacaacacatgtacaatcggctcaagaccttggtgaatcaagtgcgcaacctcgggagcgtaaagtgggatgaccacgagatggttaaggttattctaagatctcttattttccttaaccctactcaagttcaattaatccgtggtaatcctagatatactaaaatgacccccgaggaagtaatcgggcattttagcttccgccaaatcctcaagcaaaggagagggaaagactataagtcccgctccaagaaggtttgctacaaatgtggtaagcccggtcattttattgctaaatgtcctatatcaagtgacagtgaccgaggcgacgacaagaaggggagaagaaaggagaagaagaggtactacaagaagaagggcggcgatgcccatatttgtcgggagtgggactccgacgaaagttcaagcgactcctccgacgacgaggacgccgccaacatcgccgtcaccaagggactcctcttccccaacgtcggccacaagtgcctcatggcaaaggacggcaaaaggaagaaggtaaaatcaagatcctccactaaatatgaaacctctagtgatgaaaatgctagtgatgaggaggataacttgcgtaccctttttgccaatcttaacatggaacaaaaagaaaaactaaatgagttaattagtgctattcatgaaaaggatgaccttttggattcccaagaggattgtctaattaaagaaaacaagaaacatgttaaggttaaaaatgcttatgctctagaaattgagaaatgtgaaaaattatctagtgagctaagcacttgccgtgagatgattgacaaccttaggaatgaaaatgctagtttaaatgctaaggttgattcacatgtttgtaatgtttcaatacctaatcctagagataataatgatgatttgtttgctaggattgaagaattaaacatttctcttgctagccttagagtagaaaatgaaaatttaattgctaaggctaaagaacttgatgtttgcaaagttacaatttccgatcttagagataaaaatgatattcttcatgctaagattgttgaacttaattcttgcaaaccatctacatctaccattgagcatgtcactatttgtactagatgtagagatattgatgttaatgctattcatgatcatatggctttaattaaacaacaaaatgatcatatagcaaaactagatgctaaaattgccgagcacaacttagaaaatgagaaatttaaatttgctcgtagcatgctttataatgggagacgcccgggcatcaaggatggcattggcttccaaaggggagacaatgtcaaacttagtgcctctcctaaaagattgtctaactttgttaagggtaagactcccatgcctcaggataacgagggttacattttgtaccctgccggttatcctgagagcaaaattaagaaaattcattctaggaagtctcactctggttctaaccatgcttttatgtataagagtgagacatctagctctaggcaaccaacccgtgctacgttgcctaagaagaaaattgctagtgcatcaaatgagcatgacatttcatttaaaacttttgatgcatcatatgtattaactaacaaatccggcaaagtagttgccaaatatgttgggggcaagcacaaggggtcaaagacttgtgtttgggtacccaaagttcttgtgtctaatgccaaaggacccaaaaccatttgggattatgcatccgggggctcaagttggatactcgacagcgggtgcacaaaccacatgacaggggagaaaaggatgttctcctcctacgagaaaaatcaagatccccaacgagctattacattcggggatgggaatcaagattacaacttgctttctgtatctcaattatgtcaaatgggctacaactgtctttttactgatattggtgtcactgtctttagaagaagtgatgattcaatagcttttaagggagtgttagagggtcagctatacttggtagattttgatagagctgaactcgacacttgcttaattgctaagactaacatgggttggctctggcatcgccgactagcccatgttgggatgaagaatcttcacaagcttctaaagggagaacacattttaggattaacaaatgttcattttgagaaagacaggatttgtagcgcatgccaggcagggaagcaagttggcacccatcatccgcacaagaacatcatgacgaccgacaggccactggagctcctacacatggatctattcggcccgatcgcttacataagcatcggcgggagtaagtactgtctagttattgtggatgattattctcgcttcacttgggtattcttcttacaggaaaaatctcaaacccaagagaccttaaagggattcttgagacgggctcaaaatgagttcggcttaaggatcaagaaaataagaagcgacaacggaacggagttcaagaactctcaaatcgaaggcttccttgaggaggagggcatcaagcatgagttctcttctccctacacgccacaacaaaatggtgtagtggagaggaagaatagaactctattggacatggcaaggaccatgcttgatgagtacaagacttcggatcggttttgggccgaggcggtcaacaccgcttgctacgccatcaaccggttatatcttcaccgaatcctcaagaagacatcatatgaactcctaaccgactgtagaaggtttttacttggttatgactcaaacacaagggcatatagggtctttaacaagtccactggactagttgaagtctcatgtgacgttgtgtttgatgagactaacggctctcaagtagagcaagttgatcttgatgagatagatgaagaagaggctccatgcatcgcgctaaggaacatgtccattggggatgtgtgtcctaaggaatccgaagagccttcaaatacacaagatcaaccgtcctcctccatgcaagcatctccaccaactcaaaatgaggatgaggctcaaattgatgaaggacaagttcaagaagatgagccacctcaagatgatggcaacgatcaagggggagatgcaaatgatcaagaaaaggaggatgagcaagaaccaatgccgccacacccaagagtccaccaagcaatccaacgagatcaccccgtcgacaccatcctcggcgacattcataagggggtaaccactagatctcgtgttgcacatttttgtgaacattactcgtttgtttcctctattgagccacacagggtagaggaagcactacaagattcggattgggtggtggcgatgcaagaggagctcaacaacttcactaggaatgaggtatggcatttagttccacgtcctaaccaaaatgttgtagggaccaaatgggtcttccgcaacaagcaagatgagcatggtgtggtgacaaggaacaaagctcgacttgtggccaaaggatactcccaagtcgaaggtttggatttcggtgaaacttatgcacccgtagctaggcttgagtcaattcgcatattattagcctatgctacttaccatggctttaagctttatcaaatggacgtgaaaagtgccttcctcaatggaccaatcaaggaagaggtctatgttgagcaacctcccggctttgaagactgtgagtaccctaaccatgtctataagctctctaaggcgctttatgggctcaagcaagccccaagagcatggtatgaatgccttagggatttccttattgctaatggcttcaaagttggaaaggccgatcctactctctttactaaaactcttgaaaatgacttgtttgtatgccaaatttatgttgatgatattatatttgggtctactaacgagtctacatgtgaagagtttagtaggatcatgacacagaaattcgagatgtctatgatgggggagttgaagtattttctaggattccaattcaaacaactccaagagggcaccttcattagccaaacgaagtacactcaagacattctaaccaagtttgggatgaaggatgccaagcccatcaagacacccatgggaaccaatgggcatctcgacctcgacacgggaggtaagtccgtggatcaaaaggaagagcacatcggggacttgccagttcttgggaagatccttggtgtcttgggcttcaaagaagcaaaattcggtcgctctttccaccgccgaagccgagtatattgccgcaggccactgttgcgcgcaattgctttggatgaggcaaaccctgcgggactacggttacaaattaaccaaagtccctttgctatgtgataatgagagcgcaatcaaaatgggcgacaatcctgtcgagcctagtccgacttagcacatagccattcggatttaatttattagggatcaccaacaaaagggggatttcgtgattttcttctttatcattaaagatcacttcttcgatttttgtactaagtcatttttttgatcaattattttctaaaccttactgcatgatcttatttttctcttatct

SEQ ID NO: 31877 - DNA, 331 bp, Zea mays
  Clone ID: MRT4577_129085C.1
tcctggtagctgttggcgaggagttcgcgatcggggtggtgctctccgccaaaaccccctgggggaggagttcgagggccatatcgtggccttcaatcgaccctgcaacctcctcgttatccaggatggcgtggggagggcatgagagcggggagcggcagaacgtgaggttgctgaaggcgaactagatccgggagatctatggactcataaaggaaaacgatcctctcgatcctgcctgttgcatgctggaccttaaatgcatgatgccctgtaggatgctgtactactgaaataacttctgtaagaagctgctggaaggaagctccct

SEQ ID NO: 31878 - DNA, 4808 bp, Zea mays
  Clone ID: MRT4577_129086C.1
atgtcgggagatcacgccaagaaggagatggagaccggcgaaaagcccactacaagccacgggagcacttcatcggaagagtcccgcaccaagaggagggagaagaagtcgagctcctccaacaaagggaaggagaagaaatcctcttctcaccacaaagagaagaaggagagatcttcctcccacaagccgcatcggagtggggacaagcacaagaggatgaggaaagtggtctactacgagaccgacacctcaccaacatcgacctccggctccgatgcgccctccgtaacttctaaacgccaagagcgtaagaagtttagtaagatccccctacactatcctcgcacttctagacatactcctctactttccgtcccattaggcaaaccgccaacctttgacggtgaagattatgctaggtggagtgatttaatgcgatttcatctaacctcactccacaaaagtatatgggatgttgttgagtttggtgcacaggtgccatccgtaggggatgaggactatgatgaggacgaggtggcccaaatcgagcacttcaactctcaagcgacaaccatactcctcgcctctctaagtagggaggagtacaacaaggtgcaagggttgaagagcgccaacgaggtttgggacctcctcaagaccgcgcacgagggtgacgagctcaccaagatcaccaagcgggaaacgatcgagggggagctcggtcgcttccggcttcgccaaggggaggagccacaacacatgtacaaccggctcaagaccttggtgaaccaagtgcgcaacctcgggagcgtgaagtgggacgaccacgaggtggttaaggttattctaagatcgctcattttccttaaccccactcaagttcaattaattcgtggtaatcctagatatactcaaatgacccccgaggaagttatcgggcattttgtgagctttgagtgcatgatcgagggctccaggaagatcaacgagcttgatgatccctccacgtccgaagctcaacccgtcgcattcaaggcgacggaggagaagaaggaggagtctaccccgagtcgacaaccaattgacgcctccaagctcgacaatgaggagatggcgctcgtcatcaagagctttcgccaaatcctcaagcaacggagggggaaggactacaagtcccgctccaagaaggtttgctacaagtgtggtaagcccggtcactttatcgctaaatgtcctttatcaagtgacagtgaccggggcgacgacaagaaggggaggaggaaggagaagaagaggtaccacaagaagaggggcggcgatgcccacgtgtgccgcgagtgggactccgacgagagctccaccgactcctccgccgacgaggacgccgccaacatcgccgtcaccaagggacttctcttccccaacgtcggccacaagtgcctcatggcaaaggacggcaaaaggaagaaggttaaatctagatcctccactaaatatgaatcctctagtgatgataatgctagtgatgaggaggataacttgcgtaccctttttgccgatcttaacatgcaacaaaaggaaaaattaaatgaattgattagtgctattcatgagaaggatgacctcttggactcccaagaggactgccttattaaggaaaacaagaagcatgttaaggttaaaaatgcttatgctctagaggttgagaaatgtgaaaaattgtctagtgagctaagcacttgccgtgagaccattgacaaccttaggaatgaaaatgctagtttaaatgctaaggttgattctcatgtttgcgatgtttcaattcccaatcctagagataataatgatgatttgcttgctaggattgaagaattaaacatttctcttgctagccttagagtagaaaatgaaaatttgattgctaaggctaaggaccttgatgtttgcaatgccaccatttccgatcttagagataaaaatgatattcttcgtgctaagattgttgaacttaattcttgcaaaccctctacatctaccgttgagcatgtgtctatctgtactagatgtagagatgttgatgtcaatgctattcatgatcacatggctttaattaaacaacaaaatgatcatatagcaaaactagatgctaaaattgccgagcacaacttagaaaatgagaaatttaaatttgctcgtagcatgctctatagtgggagacgccctggcatcaaggatggcattggcttccaaaggggagacaatgtcaaacttagtgcccctcctaaaaggttgtctaactttgttaagggcaaggctcccatgcctcaggataacgagggttacattttgtaccctgccggttatcctgagagcaaaattaggagaactcattctaggaagtctcactctggccctaaccatgcttttatgtataagggtgagacatctagcgctaggcaaccagcccgtcccctggtgcctagatagaaaactcctagtgcatcaaatgatcatgacatttcattcaatacttttgatgcatcttatgtgttgactaacaaatccggcaaggtttatgcatccgggggctcaagttggatactcgacagcgggtgcacaaaccacatgacaggggagaagaagatgttctcctcctacgagaaaaaccaagatccccaacgagctatcacattcggggatggaaatcaaggtgtcactgtctttagaagaagtgatgattcaatagcatttaagggagtgttagagggtcagctatacttggtagattttgatagagctgaactcgacacttgcttaattgctaagactaacatgggttggctctggcaccgccgactagcccatgttgggatgaagaatcttcataagcttctaaagggagagcatattttaggattaacaaatgttcactttgagaaagacaggatttgtagcgcatgccaagcagggaagcaagttggtgctcatcatccacacaagaacatcatgacgactgatagactactggaactcctacacatgaacctattcggtctgatagcttacataagcatcggcgggagtaagtactgtctagttattgtggatgactattctcgcttcacttgggtattctttttacaggaaaaatctcatacccaagagaccttaaagggattcttgagacgagctcaaaatgagtttggcttaaggatcaagaaaataagaagcgataacgagacggagttcaagaactctcaaattgaaggcttccttgaggaggagggaatcaagcatgagttctcttctccctacacgccacaacaaaatggtgtagtggagaggaagaatcgaactatattggacatggcaagaaccatgcttgatgagtacaagacttcggatcggttttgggccgaggcggtcaacaccgcctgctacgccatcaaccggttgtatctacaccaaatcctcaagaagacatcatacgaactcctaacccgtaaaaagcccaatatttcatattttagagtctttggtagcaaatgcttcattcttgttaaaagaggtagaaaatctaaatttgctcctaagactgtagaaggctttttactaggatatgattcaaacacaagggcatatagagtctttaacaagtcctctggacaagttgaagtttcttgtgatgttgtgtttgatgagactaacggctctcaagtagagcaagttgatcttgatgagataggtgatgaagaggctctgtgcatcgcactaaggaacatgtccattggggatgtgtgtcctaaggaatccgaagagcctccaaatgcacaagatcaaccatcctcctccacgcaagcatctccaccaactcaaaatgaggatgaggctcaagttgatgaaggagaagatcatagagatgagccacctaaagatgacgacaatgatcaagggggagatgcaaatgatcaagacaaggaggatgatgaaccaagaccgccacacccaagagtccaccaagcaatccaacgagatcaccccatcgacaccatcctcggcgacattcataagggggtaaccactagatctcgtgttgcacatttttgtgagcattactcttttgtttcctctattgagccacacagggtagaggaagcactacaagattcggattgggtggtggcgatgcaagaggagctcaacaatttcacaaggaatgagatgtctatgatgggggagttgaagtacttcttaggatttcaagtgaagcaactccaagagggcaccttcctaagccaaacgaagtatactcaagatattctaagcaagtttgggatgaaggatgccaagcccatcaagacacccatgggaaccaatgggcatctcgacctcgacacggaaggggatccacttttgatttaattggatattcagatgctgattgggcagggtgtaaaattgatagaaagagcacatcagggacttgtcagttcttgggaagatccctagtgtcttgggcttcaaagaaacaaaattccgtagctctttctaccgtcgaagccgagtatattgccgcaggccattgttgcgcgcaattactttggatgaggcaaacccttagggactatggttacaaattaaccaaagttcctctcctatgtgataatgagagtgcaatccgcatggcggataatcccgttgagcacagccgcactaagcacatagccattcggtatcactttttgagggatcaccaacaaagggggatatcgagattgcatatgttagcaccaaagaacaattag

SEQ ID NO: 31879 - DNA, 5454 bp, Zea mays
  Clone ID: MRT4577_129087C.1
atgggcatagattcacatttaagcacttgtgttggcactcaatcaccaaaatacttagaaatggcccaagggcacatttccctttcagagagaggacggggcgagctcacctcggcagacgagcggcgacgctccggcgggacgtggctccggcggcggttcggcgaggtttatgcatccgggggctcaagctggattatcgacagcggatgcacaaaccacatgacgggggagaagaagatgttcacttcctacgtcaagaacaaagattcccaagattcgatcatctttggagatgggaatcaaggcaagatagaccttgtgcagcttgtcaagcaggataaatcagtaacccaagggaccctaaagcgctttctaaggagagctcaaaacgaatttgagctcaaggtgaaaaagataagaagcaacaatgggtccgagtttaagaacttgcaagtggaggagtaccttgaggaggaaggaatcaagcatgagttcaacgctccctacacaccacagcaaaacggtgtggtagagaggaagaacaggacgcttatcgacatggcgaggatgatgcttggagaattcaagacgcccgaacgattttggtcggaagctgtgaacacggcttgccacgtcataaaccgggtctaccttcatcgcctcctcaagaagacatcgtatgaacttctaaccggtaacaaacccaacgtttcatactttcgtgtatttgggagtaagtgttacattctagtaaagaaaggtagaaattctaaatttgctcccaaagttgtagaagggtttttgctaggttatgactcaaatacaaaggcgtatagagtcttaaacaaatcatcgggtttggttgaagtctctagcgacgttgtatttgatgagactaatggctctccaagagagcaagttgatcttgatgagatagatgaagatgatgttccgacgaccgcaatacgcaccatggcgattggagatgtgcgaccagaggaacaacaagagcaagatcaaccttcttcctcaacaatggtgcatcccccaactcaagacgatggacaggttcctcaagaagaggcgtgtgatcaagggggagcacaagaagaaccagctatggaggaagaagcaccacaggcccctcctactcaagtccgagcgatgatccaaaggcatcatcccatcgatcagatattgggtgatataagcaagggagtaactactcgctcacgtctagctaatttttgtgagcattactcgtttgtctcttctattgagcctttcagggtagaagaggccttgcaagatccggactgggtgttggccatgcaggaagagctcaacaacttcaagaggaatgaagtttggaccctggtgccacgtccaaagcaaaacgttttgggaaccaagtgggtgttccacaacaagcaagacgagcacggggtggtgacacgaaacaaggctcgacttgtggcaaaaggttatgcccaagtcgcaggtttggattttgaggagacttttgctcctgtggctaggttagagtctattcgcattctattagcctatgccactcaccactcttttaggttgttccaaatggatgtgaagagctctttcctcaatggaccaatcaaagaggaggtgtacgtggagcaaccccctggctttgagaatgaacggcaccccgaccatgttgttgggaaagccgatctaactcttttcactaagacttgtgatggtgacctatttgtgtgccaaatttatgtcgatgacataatatttggttctactaaccaaaagtcttgtgaggagtttagcagggtgatgacacagaaatttgagatgttgatgatgggcaagttgaactacttccttgggttccaagtgaagcaactcaaggatggcaccttcatctcacaaatgaagtacacgcaagaccttctcaagcggtttgggatgaaggacgccaagcccgcaaagacaccaatgggaaccgatggacatgtcgacctcaacaaaggagataagtctgttgatcaaaaggcataccggtctatgatagggtctttactttatctatgtgctagtagaccggatattatgcttagcgtatgcttgtgtgctagatatcaatccgatccaagggaatgtcaccttgtggtcgttaagcggattcttagatatttagttgctacgccttgcttcgggatctggtatccaaaggggtctaccttttacttgattggatattcagactccgattatgctggatgcaagattgataggaagagtacatcagggatgtgccaattcctaggaaggtccctggtgtcttggagttctaagaaacaaacttcagttgccctatccaccgctgaggccgagtatgttgccgcaggacagtgttgcacgcaactactttggatgaggcaaaccctccgggactttggctacaatctgagcaaagtcccactcctatgtgacaatgagagtgcaatccgcatggcggataatcctgttgaacacagccgcactaagcacatagacatccggcatcacttcctgagagaccaccagcaaaagggagatatcgaagtgttctatattagcaccgagaaccagctagccgatatctttaccaagcctttagatgagaaaaccttttgcaggctgcgtatgctagaaacaggagaaaaacgattggaaatgagttgccaactcctgctcagtcttagtgcactggactgtccggtgcgccagaccagtctcagtgaacaggccactcttaggactcgatggcggcgtatggctataaatcacgggactgtccgatgtagagatattaatgtagaaactattgatgatcacattgctatgattaaacaacaaaatgatcacatagctaaattaactgcaaaaattaatgagcatgaacttgaaaacgaaaagtttaaatttgctagaagcatgctctataatgggagacgccctagcattaaggatgacattggtttccaacagggaagcaatgtcaagcttaatgcccctaaaagatggtctagttttgttatgggtaaggctttcatggttcaggataatgaaggctacattttatatcctgctaattatcctgagcacaaaattaggagaattcatgctaggaaacctcataacatttctcaccatgcatttatgtataaaaatgaggcttctagctctaggcattctacggatgttaaaatacctaaaaagaaaactcctgctgcatcaaatgagcattatatttcatttaagacttttgatgcatcatatgtgcttactaacaaatcaggcaaagtttatgcatccgatggctcaagttggataatcgatagcgggtgcacaaaccacatgacaggggagaaaagaatgttctcctcctatgagaaaaacgaagatccccaacgagctatcacattcggggatggaaatcaaggtgttactgtctttagaagaagtgatgattcaatagcctttaaaggagtgctagagggtcagctatacttagttgattttaatcaagttgaactagacacttgcttaattgctaagactaatatgggctggctctggcatcaccgactagcccatgttggaacgaagaatcttcataagcttctaaagggagagcacattttaggactaaccaatgttcattttgagaaagacagggaaaaatcacaaacccaagagaccttaaaaggattcttgaggcgggctcaaaacgagttcggattaaggatcaaaaagataagaagcgacaatgggacggagttcaagaactctcaaatcgaaggctttcttgaggatgagggcatcaagcatgagttctcttctccctacacaccacaacaaaatggtgtagtggagaggaagaatagaactctactggacatggcaagaaccatgcttgatgagtacaagataccagaccgagtctttggaagcaaatgttttattcttattaaaagaggtagaaaatctaaatttgctcctaaggctgtagaaggctttttacttggttatgactcaaacacaagggcatatagagtcttcaacaaatccactggattagttgtagtttcttgtgacattgtgtttgatgagactaacggctctcaagtagagcaagttaatcttaatgaactagatgatgaagaggctccgtgcgtcgcgctaagaaacatgtctattggggatgtgtgtcctaaggaatccgaagagcattcacaagcacaagatcaaccatcatcttccaaccaagcatctccaccaactcaagatgaggatcaggctcaagatgaagatcaagaggataagcctcctcaagaggaggacaatgatcaagggggagatgaagataataaagacgaggaagatgatcaagaaattcaagttccacgtcctaaccaaaatgttgtacgtaccaaatgggtattccgcaacaagcaagatgagcatggtgtggtgacaaggaacaaagcccgacttgtggccaaaggttattcacaagtcgaaggtttggactttggagaaacttatgcacccgtagctaggcttgagtcaattcgtatattacttacctatgctacttatcatggctttaagctttatcaaatggacgtgaaaagtgccttcctcaatggacctattaaagaagagttctatgttgagcaacctcccggctttgaagatagtgagtaccctaaccatgtgtataaactctcaaaggcgctttatgggctcaagcaagccccaagaccatggtatgaatgcctgcaagatttccttatcactaatggtttcaaagtcggaaaagccgatcctacaccctttaaaactattgcaaaagatttgtttgtatgccaaatttatgttgatgatgtcatatttgggtctactaacaaatctacttgtgaagagtttagtaggatcatgatacaaaaattcgagatgtctatgatgggggagttgaagtatttcctaggatttcaagtcaagcaactccaagagggcaccttcatcagccaaacaaagtacattcaagacatacttaacaagtttggaatgaaggatgccaaacccatcaagacacccatgggaaccaatgggcatctcgacctcgacacgggaggtaagttcgtagatcaaaaggtataccggtcgatgataggatctttactctatttatgtgcatctcgactggatattatgctttctgtatgcatgtgtgcaaggttccaagctgatcctaaggaagttcaccttggggccataaaaataatcatgagatatttagtttacactcctaagtttggactttggtaccccaagggatccacttttaatttaataggatattccgatgccgattgggtagggtgtaaaattgataggaagagcacataa

SEQ ID NO: 31880 - DNA, 119 bp, Zea mays
  Clone ID: MRT4577_129088C.1
ggcactgcaacttgtatgggtgaaaacagtgagctggttgcaagaaaacaaggggctcatctggctgatgtaaaactggaacctgcattacggaggtcatggagattcggtccgttccg

SEQ ID NO: 31881 - DNA, 676 bp, Zea mays
  Clone ID: MRT4577_129089C.1
cactcctatgggcgatccggccggggtgaactgtccgggaacaaaaggaatcaatccctcatccttcccaggccgtcatcacgttaccgttgcagtcgcctttgccgagtcttgacagcccattcacaatgtctcaccagaagaacgagaaggacgtcggtgatgctcccaagagccaccgtatccgaatcaccctgaccagccgaaaggttcagtctcttgagaaggtcagcgctgagctcattgagcgtgcccgcagcaagggcctcaccatcaagggccctgtccgcctgcccaccaagaacctcaagatcaccacccgcaagaccccttgtggtgagggttccaagacctgggactcctacgagctccgtgttcacaagcgcctcatcgacctccacgcccccaccgaggttgtcaagtccgtcatcgtcaacatcgaggccggtgttgaggttgaggttaccatcgctgcttaaatgtggtcacgatcctagtcagtagtaaaacagcctggttgtgtcctggcattgtgagggaagggaatgatgggaacatcaggcccttgccctcgagaagagtggtggatataggatactcagtcatgattaatgaatatctgagaacctcgtgttctaccattcaaaacaaaaaaaaaaaaaaaaaacccgcggcc

SEQ ID NO: 31882 - DNA, 434 bp, Zea mays
  Clone ID: MRT4577_12908C.1
ctattcatcaaatcagctttccagcttgggaggcgatctgcaatcttttccaccagagaccagaggcatccccaaaaaggttgagaatatcaatagtggtggagatatcagcagcagaggggtgcaggaataaggccacatcgtcagcataaatagagatcatgtggagcttcttttttctggataactgctgcagcaatccggcatcttcagccttggaaaaagcagacctagcatatccatagcaaggatgaacaacattggggataggggatccctgtctaagccctctgttgtattctttttcctgggcattcattgagaagcacttgtgtggtagaagagccaagaagctcacatatgatatctctccagagctgcccaaaaccccatttgtgcattacttcaatcaaaaaaggccaagacaccgaatc

SEQ ID NO: 31883 - DNA, 532 bp, Zea mays
  unsure (1)..(532): unsure at all n locations
  Clone ID: MRT4577_129090C.1
ttcagtaaaaccgaaaaaattttgcttgacaatataaaatcatttgatcccaagcctgatcaacttaaagctttcagtggtgacactgtgtgtgagttcaacgagattgccactgcgaggggctgccttggacgattccctggaagtgagatgatgggcattattaaaaagtttatcaaggcgaagaatgattaatgctggttgaagcgctaaccttttgcgtgatctgtagaccataaggcttttctatgtaataaacttgttggcgcctgtttggacaaacactaaccatccctaggtcgccttcgtagtgagtccggatcttgaggatgatccctaggtttcgcccacagatggtcgagacattgggagcgagataataaataatatgtaagacaaataacaaaaccgcgaatgtgatcttgaaaggaaaccttggaaccaagagcatgattacttgatgtaaaaaaaactcgacccggtaagacagcccccgagtattgtntaagaagacattctcacatagatcaag

SEQ ID NO: 31884 - DNA, 245 bp, Zea mays
  Clone ID: MRT4577_129091C.1
tttcccccttctacaattccttcagccggtcgccgatccacccgtacgacgacaccatgagggagtgcatttccatccacatcggccagcccgccctccacgccggaaacgcgtgctgggagctgcactgccctgagaaaggcattcacgctgacggccagatgcccggtgacgagaccattgcgggaggtgatgatgatttcaacacctccctcgcgagactggggccgtgaagcacgtgcccc

SEQ ID NO: 31885 - DNA, 921 bp, Zea mays
  Clone ID: MRT4577_129092C.1
ccttcgacccccctaacccaaccaagcccgaactctcgagatacaggacgcggatccaaaccagaggcccctgcctgccctcccccaccacaccacagcctaccgccatgtcggcgcccgctacggacgaggccgcggtggaggcgcgcctccaggagctgcgggggaggctcgggaagaagcagcacttcgaggaggccgtaaacgagctcgccgccgccgtccgggaccgctacgccggcgcctctccagccctccacctccagcatggcttgttgcccagaatttaacgagggaattgagcatactaactgaatcctctggtgatcaagatgggagcaacaacagaacagtgcctagagccgaggagattacacctgctataatgaacctcctagaaaccatatcaggcgacagggatctagaaactgctttggaagaatcactgcagggaatcattgagcatccacagagggcacccccggcttcaaaggaagttgtcgccaatcttcctgtcattgctgttaccgaggaagtcatgtctagattgggtagtgagacggagtgtgctgtctgccgcgaaaacttggttgtggatgacaagatgcaggagcttccctgcaagcatctcttccatcctctttgtctgaagccatggctggacgagaacaactcctgccctatctgccggcatgagctgaggacggatgaccatgtgtatgagagcaggaaggagcgtgaaagggaagaggaagaagatagaaggggtgcggcaaatgctgttaggggtggagaattcatttatatctgaactcaacagttccagaatgtaatccctttgatgaacttcgtgattaccatgttgacatatatatatacctagttacttatgcttgagttaaatatcttgcggtctttttt

SEQ ID NO: 31886 - DNA, 230 bp, Zea mays
  Clone ID: MRT4577_129093C.1
cggagatcacgctcaatcaggagctccgccatgagagggacgtcatagcagctcgtttgtgacagaaccttcgactcggcaaggaccgatcaaccctgcacggttgcggagctctgagcaccatcgacaacgtgaaggctacgatccaggacaaggaggggattcccccagaccagcagcgactgatcttcgccggcaagcagcaggaggatggtcgcacccttgcagac

SEQ ID NO: 31887 - DNA, 522 bp, Zea mays
  Clone ID: MRT4577_129095C.1
cccagcgtccgcccagcgtccgcccacgcgtccgcggacgcgtgggcggacgcgtgggcgttaacgttaggaggtgcgtggaaagaaacagatatgcattagggggtcacgagggcgagtatggcataaatctgactagtgtttaaagtgtacccctctgctcagagttcaaacctatttgaatagtccgtgttcactggtatggacgagtatggtatggtatcgaaattaatgttttgttttaaaaaatgggtgctatttcgagaaaaatggtttttaaaaagttcgacagtttattcgtgagctatggtggacgggaagtactgttgctgtttttgaaaaggaaaatcaatgggaaactgctgaaatacttggatggtttagtgcaggggattttgatataatactgaaaaaaattcatgatgtttttggagaggatgctctttgcaaaatacaaaatgtttttaaaaacatctgtgcataatatatttttgtttttggaaattttctgagtttcacata

SEQ ID NO: 31888 - DNA, 379 bp, Zea mays
  Clone ID: MRT4577_129096C.1
cacaccaagcggaagcgcactgatcaacaacgctatttttctatcggctacacaagtattattattccctatctggtcgtcttcttgcagcctttcttcgtagcacatcaacatcgcgcttcattatatgcacattcgcttacctcgctcccagttctcaatatgccagaactgctctcaccacttacttaaatcgactatgaacacccatctgctctagcctatcggctactacatgctactgccgcaagcgacttacatcaaccaagtgccctactactacaactatgcgcagaccatctatctataccaaccattgctactaaacagctaccacaattacatccagcttttagacacccatccctggtgaaccctg

SEQ ID NO: 31889 - DNA, 332 bp, Zea mays
  Clone ID: MRT4577_129097C.1
cgtgggacgacccaagcctctaaagagactcgtagaagaagacgagtgtcaagtgaacctgaaacttgcggtgtcactggctggtagcctgagtgtgagtgagtgatcgagctagctgagctccgatgcgcgctagctaggataccgccataccacaagtcttcttcacaagtttaggagtgacaggaacaagagatcgatggcctctggcagcgtgctcaagtcctccgtcctgcgcaagacctcccgaagggggcgccacgaggcaagccggcgcgcgcaggccgcgcagcgtctccagggtcgtccgcgcctgccgctacgcggacgag

SEQ ID NO: 31890 - DNA, 312 bp, Zea mays
  Clone ID: MRT4577_129098C.1
atggccagccctttttttttttttttgttttttggatcagctggaatggtttgaggtcttaatcacagctaaccgaacggaatcggaaacacgagagggcagtatcggagctccctaatccggagctttatcacacggaggttgcgatgcctagatccctgcaggtgtacatcgatcgccgcaaggctagtcggggggggcgggtactctaagctgcagagcttgttgactggctaggagacttgccaggcgcaggtcatgccctcggggatgacgacaaggcctaccgtgccgatttccaggaactactgc

SEQ ID NO: 31891 - DNA, 405 bp, Zea mays
  Clone ID: MRT4577_129099C.1
gcgacgtataggggaaacgaatcgccgcatccgggtgggatgcgatcgccttctttcgcccaatcctgcgtgcgtgccgccgccgccgtggacgggcagacggctggacgcattcgccaggcgccagctcgttcggtctttcctctctgcctgaatcgccagatcgctatctcactgatcgccacgacggcacacagttctgttcctgaatcgctgctactgctagcctgctgctggacgcctgaactggacaggctgtgttccaaattccaatactaacggttgatcttgatatattttaagtctgaattttcccaaactatcttactccgggaccaaataattatgaaattgactctactttgaaacaaatagaagatataatgcaatactttgagacatata

SEQ ID NO: 31892 - DNA, 661 bp, Zea mays
  unsure (1)..(661): unsure at all n locations
  Clone ID: MRT4577_12909C.1
atttcggcacgagggagccgagaaacagtccactcctcactcccgttccgtttcgtttccccagttccgcatggccgccgcgaggtagcggcgcaggcgctcaccggggatggcggccggagggaggggcaagctggcgccggcggaagtggcgcccgcggcgtttccctcgcggggcttggcggtggcgggggccgcggcgggcgaggtggtgcggcgcgtgaggcccacggaggcctccgagcgccgccgcgcggaggtcgtcgactacgcgcggaggctcgtcggctcagcgctcggatgcgaggtttttgcatttggatcagttccactaaagacttaccttcctgatggggatattgatctaactgtccttggaaatacatcttatgatagtactttggttaatgatgttttctgcattcttgagtctgaggagcagaatagtgatgctgaatttgtagtgaaggacttggaacgaattgatgccgaggtcaggctcattaaatgcactattggaaatattatagntgatatctcattcaaccaaactggtgggatctgcgcactctgcttncttgagctggttgatccggaaggtgggaaaaaccatctatttaaaaggagcatcatattggtcaaggcatggtgctattatgaa

SEQ ID NO: 31893 - DNA, 665 bp, Zea mays
  Clone ID: MRT4577_1290C.1
ctcgaggccggccgggccgggcttcctcgttgcagccgcgactccgacatcgtcccttcgtccccacgaccaaccgataatccgccctgggtgagatgatcgatttatctggatctcctatctggcgacgagctcctgtggtattcattctcctacaacgagctctataacgacgtcctgtgggaggccgaggcaaagaggatcaccccaggtcctgccgatgtggacattgccgtcacccatccacctaagttggagaggaccaaatggtggatgacacagctgccgtaacgtggcacgtatattgtctgacacattcaccctagatgatgaacctcccttgtgacaacaaagcattcgagactgacatcgataaatacttcaagatctcactgctgtgccgcatgctgacaaaaccgatgagttcctcaaggacgccaaggatgctaccgaggtcctccctagcaagtgtgtaaggaactccaattctttgtctgcgaccccatgaaaaatgatgcgtgctgtggtattcacctattacaaagatggagacgctattccgacactcctctatctatatcatgtgcttacggagactggtgctaggcgtgcgtctaaattatttacccactgacgggaactatctatgtactattataatatac

SEQ ID NO: 31894 - DNA, 7239 bp, Zea mays
  Clone ID: MRT4577_129100C.1
atggtgatcggcggtaagaagtccgctacaagccacaggaaggctccatcaagggagtccgccaacaacaagaaggatggatccccttcacgcattcgatcgcacaagagtggtgagaagaagaagaaaatgaagaaggtggtctactacgagaccgactcttcctcgccctctacatccggatccgacgccgcatccgtcacttctaagcgccaagagcgcaagaagtatagggatgaagattatgatgaggacgaggtggcccaaatcgtgcacttcaactcccaagccaccactatactcctcacctctctaagtcgagaggagtataacaaggtgcaaggattgaagagcgccaaggagatttgggacgtgctaaagaccgcgcacgaaggagacgaggtgaccaagatcaccaagcaggagacgatcgagggggagctcggttgcttccggcttcgccaaggggaggagccacaagaaatgtacaacaggctcaagaccttggtgaaccaagtgcgcaacctcgggagcaaaaaatgggatgaccatgaaatggtcaaggttattcttagatcactcgtttttcttaaccctacgcaagtacaattaatacgtggtgatcctagatatacactaatgtctcccgaggaagtaataagaaaatttgtgagctttgagttgatgatcaaagtctcaaagaaaatcatcgagcaagatgcgccctccacgtccgaagcacaaccggtcgcattcaaggcaacggagaagaagaaggaagagtctacatcaagtagactccccatcgacgcatccaagctcgacaacgaggaaatggtgctcatcatcaagagcttccgccaaatccttaagcaaaggagggggaaggactacaaatcccgctccaagaaagtgtgctacaagtgtggtaagcccggtcattttattgctaagtgtccattatcaagtaacaatgacagaggcgaagacaagaaaggaaagaggagagaaaagaagacatactacaaaaagaagggcggcgatgcccatgtgtgccgcgagtggaactccgacgagagctccaccgactcctccgacgacgaggacgccgccaacattgccgtcaccaagggactcctcttccccaacgtcggccacaagtgcctcatggcaaaagacgacaaaaggaagaaggtaaaatcaagatcctccactaaatatgcatcctctagtgatgaagataattctagtgatgaggaggataacttgcgcaccctttttgccaacctaaacatgcaacaaaaagaaaagttgaatgaattaattagtgctattcatgaaaaggatgaactcttggactcccaagaggacttcctaattaaggaaaataagaagcatgttaaggttaaaaatgcttacgctctagaagtagaaaaatgtgaaaaactatctagtgagctaaacacttgccatgatattattgccaaccttagaaatgagaatgctaaaataattgctaaggttgattcaaatgcttgtgatgtttcaattcccaatcttagagatgataatgttagcttacttgctaagattgaagaattgaatgtctctcttgctagccttaaaaatgagaatgaaaaattaattgctaaggctaaagacttagatgtttgcaatgttaccatttccaatcttagaagtgaaaatgacattttacatgctaagattgttgaactaaaatcttgcaaaccctctacatctaccgttgagcatgtttccatttgcactagatgtagagacattaatgttgatgctattcatgatcacctagctttaattaagaaacaaaatgatcacatagctcaacttaatgccaaaattaatgagcatgacttagaaaatgaaaaatttaaatttgctagaagcatgctctatagtgggagacgccctggcatcaaggatgacattggcttccaaaagggggacaatgtcaaacttaatgccccttctaagagattgtcaaactttgttaagggcaaggctcacatgcctcaggataacgagggttacattttgtaccctgccggttatcccgaacacaagattagagaattcactctaggaagtctcactctggccctaatcatgcttttatgtataagggtttatgcatccgggggctcaagttggatcatcgacagcgggtgcacaaaccatatgacaggggagaaaaagatgttctcctcctacgagaaaaatcaagatccccaacgagctatcacattcggggatgggaatcaaggtgttactgtctttagaagaagtgatgattcaatagcatttaagggagtgttagagggtcagctatacttagtagattttgatagagctgaactcgacacctgcttaattgctaagactaacatgggctggctttggcatcgccgactagcacatgttggaatgaagaatcttcacaagcttctaaagggagaacacatattgggactaacaaatgttcactttgagaaagatagggaaaaatctcatacccaagaaaccttaaagggattcttgagacgggctcaaaatgagttcggcttaaggatcaagaagataagaagcgacaacgggacagagttcaagaactcacaaatcgaaggcttccttgaggaggagggcatcaagcatgagttctcttctccctacaccccacaacaaaatggtgtagtggagaggaagaatagaactctattggacatggcaagaaccatgcttgatgagtacaagacttcggatcggttttgggccgaggcggtcaataccgcttgctacgccattaaccgagtctttggtagcaaatgctttattcttgtcaaaagaggtagaaaatctaaatttgctcctaaggctgtagaaggctttttactaggatatgattcaaacacaagggcatatagagtctttaacaagtcctctggactagttgaagtttcttgtgacattgtgtttgatgaagctaacggctctcaagtagagcaagttgatcttgatgagctagatgatgaagaggctccgtgcgtcgcgctaaggaacatgtccattggggatgtgtgtcctaaggaatccgaagagcctccacaagcacaagatcaaccatcttcctccatgcaagcatctccaccaactcaagataaggatgaggctcaaaatgatgaaggagaagatcaagaagttgagccacctcaagaggagagcaatgatcaagggggagatgcccatgatcaagataaggaagatgaacaagttccaaggccgccacacccaagggtccaccaagcaatccaacgagatcaccccgtgaacaccatcctcggcgatattcagaagggggtaactactcgatctcgtgttgctcatttttgtgaacattactcttttgtttcctctattgagccacacagggtagaggaagcacttcaagattcggattgggtggtggcgatgcaagaggagctcaacaacttcacaaggaatgaggcatggcatttagttccacgtcctaaccaaaatgttgtaggaaccaagtgggtcttccgcaacaagcaagatgagcatggtgtggtgacaaggaacaaagtccgacttgtggccaagggatactcacaagtcgaaggtttggattttggtgaaacctatgcacccgtagctaggctagaatcaattcgcattttacttgtctatgctacttaccatggcttcaagctttatcaaatggacgtgaaaagtgccttcctcaatggaccaatcaaggaggaggtctatgttgagcaacctcccggctttgaagatagtgagtatcctaatcacgtatataaactctctaaggtgctttatgggctcaagcaagccccaagagcatggtatgaatgcctaagagattttcttatcgctaatggcttcaaagtcggaaaggccgatcctactttatttactaaaacacttgcaaatgatttgtttgtatgccaaatttatgttgataatattatatttgggtctactaacgaatctacatgtgaggaatttagtaggatcatgacacagaaattcgagatgtctatgatgggggagttgaagtacttcttgggatttcaagtgaagcaactccaagaaggcaccttcatcagccaaacaaagtatattcaagacattctaagcaagtttgggatgaaggatgccaagcccatcaagacacccatgggaaccaatgggcatcttgacctcgacatgggagggtgtaaaattaatagaaagagcacatcggggacttgccagttcttggcgactttcaggttacccgcgcatcgttttgtggcggaggtgttgcagaggtttggggtgcagattcatcaatttacacctaatgccgtggtagccctggcgaagtatgtctgggcagtgacttcgtatggtggtcagccctccgtagaggtcttcgccaaaaattattgtttgcactggcagaagaggaaagttggaaacaagattgcacagtttgggtcatgcacgtttacgctgaggactggcaagacttcggcggaggtcgtggagctggttccttgcgtccacaataagtggggcaactggtgggatttctggttttatgcttttgagagcggagtcgaaaaccacccagggctccccgtggccctgatgtgctcccattattatgtggcgtacccgcaatttgaggtggtggaggatgatgaaaatgaaggagcccttcggtgcgcgccccgcatgagtagcgggcgtgatttagttgaggaattcattggttatggggtgtggcccttggcacatggctgggcgctgggcgaagtatgccctcgtgagatgccctccttgggcgggcagcgagtgcgaagtccagccttcgcgttggatttgcgtggccgagatccagccgcattcgttcgtgaagtggaggacggtgcgacgaggattgtggggcgctatgtgccgaggacagagggtctacggagttggaatatccgggggtccaatgttagattgaatcgggtcttcgaattaaactgcttgccatacggtggctatcccggggatgacgctgtcgaccgccgcgggaagaggctagtggccgcgactgaggaaggcccttcgcaggaggccgccccagccgctaagaagaggaaaatagtgatggagaaggatcgtcaagacgctactcagaagcaccgagcgttcgtcaggctcgcggatcctttccatgaggtaaagaaggcacgggcagctgcgaagtctgccgccccgggcagtagtaagccactgccggctgcgaagccggttgcccctgggcacgacaaagcgtcggtcggtgcgaaggctgctggtactggcgcgagcaagccacccccgggcgggcccgtgaaaggacggaggctgccttcgccggcgcgaacgggcggggcggcggcacgtgttgccgacttcgacacggacatcagtgtcgctgattattttgttgggtcgaatggggggcaactggctgttgtcccgcctccggtggtagccacctcgccgacggtggtggttggggcgaagggtgccccgcgggactcgtgggccactttctgcgtgagcggcgagattctgtcggccgctaccgctaaggacatggcgggctccatggctcagcaactgaggcaagcatcgcagcagctgtcgcaacagctgaagcatgcggccgacttcgccgaccacgtcgcgtcgggtgccttgactgtggactttgctgccaaggtcgagagtctccggacgcagcatgcagatgctgtgcgggagaagtcggctgcggaaagtaaaatccgcaggctgtcggagaagaaagagctgggggtgctcccaacgatcgtgacgggtctcatgtcatttgcctccctcgtcacctgtgagggggcagtgaatgctttgtcccgcaaagggtgcaggcatttcgaggtttttgaccagtcgaatgaaaactttgaatgtgaaatcttcaagatggtgcatgccgaaggcgttgaggaccttggtggtctagacggcgcgctacccgaggctccggaggtggatccggagccgcaatctgatgccggcgagggtccctcgacgacccccgcgccgactgcagccgacgaagactccgcaccagtccctgcgccgccgtgtgaggatgcctcgaaggcggtggtcgagcccgctaccgaagaccccacggcggcggccgagccttcgcaggttccgacgtttgggcctgcgcacgcaaccgctactgataatactatttttgtggcggcttcgaccgtggctgccgatgatgattcgtttggctctgtgtctaagtgttttgaggctgatgattctgggagttcgattgcgtggacggaggagtcttcagatgaggacttggattattttacagcgctagatgtggttgtagcggaggctttgccgcgcgtggagggttctgaggggctcccgggtgcgagtactgggtataggcggcgaagggcggtggcgaaatggagagtgagtgaattgtcgcgaggtggtaggcgtcatcgtagtgagatggagagtggtcgtcttcgcatggatgggactggtaaacaagaattgttgtcctcgccgtttgggggagatggagagacaggagatgagtttctcctcgtcttgcgaagtcaggtcttcgcttatgatgaccgtctgcttgggcattgcctggtcctagcctgccacactgtagttgattaccatggcgtcaatgtggggtgcgctgcgcagatcgacatccctggcgtcgaaggtcagcggcacatgggaccacttcgtttgcacgagtgggccagtgacggcgacgtggttgatgcttcggtagtggtccctcttctgtcgcttcgtgtcgaagtcgacgctggaccccccagtgatcatgtgaatgactccgcgatacggctgatcagcgaagtcttcctgttttggtgcttgggggtgatttgggtggtggatgtttggctgatgcgggtgcggcggcgggagtgggggtggtacaacttgcacctcctggtggtgttggtatgcgtggttaggtggatgctgagcggggccgtggttgtatggttgtgggaggtgatgttgatatgtgtgcacaacaactcttgggttgtcggctga

SEQ ID NO: 31895 - DNA, 3601 bp, Zea mays
  Clone ID: MRT4577_129101C.1
atgtcgtatggagcgaaggatgccttcgcccgttgtcttgtctccgttggaccgacgaccacggcgaaggcctcgagcggagggtggcgtcttcgccttcgccccaacagcctcatagaaaaagacggcaaaaggaagaaggtaaaatcaagatcctccactaaatatgaaacctctagtgatgaggataattgtagtgatgaggaggataacttgcgcaccctttttgccaacctaaacatgcaacaaaaagaaaaattaaatgaattaattagtgctattcatgagaaggatgatctcttggactcccaagaggacttccttattaaagaaaacaagaagcatgttaaggttaaaaatgcttacgctctagaagtagaaaaatgtgaaaaattatctagtgagctaagcacttgccatgacactattgcaaaccttagaaatgaaaatgctaaattaattgctaaggttgattctaatttttgtgatgtttcaattcccaatcttagagatgataatgttaacttacttgctaagattgaagaattggatgtctcacttgctagccttaggattgagaatgaacaattgattgctaaggctaaagattttgatgtttgcaatgttactatttctaatcttagaaatgaaaatgatatattacatgctaaggttgtagaattaaaatcttgcaaaccctctacatctactgttgagcatacttccatttgtactagatgtagagacattaatgttgatgctatccatgaccatcaagctttaattaagaaacaaaatgatcacatagctcaacttaatgctaagatcaatgagcatgacttagaaaatgaaaagtttaaatttgctagaagcatgctctatagtgggagacgccctggcatcaaggatggcattggcttccaaaagggagacaatgtcaaacttaatgcccctcctaagagattgtccaactttgtaaagggtaaggctcccatgcctcaggataacgagggttacattttataccctgtcggttatcccgagagcaaaattaggagaattcattctaggaagtcacactctggccctaatcatgcttttatgtataagggtgagacatctagctctaggcaatcaacccatgctaaattgcctaaaaagaaaactcctaatgcatcaaatgattccaacttttcatttaaaacttttgatgcatcttatgttttgactaacaaatccggcaaggtttatgcatctggaggctcaagttggatcattgatagcgggtgcacaaaccacatgacaggggagaagaagatgttctcctcctacgagaaaaaccaagatccccaacgagctatcacattcggggatggaaatcaagatgtaggtgttactgtctttagaagaagtgatgattcaatagcatttaaaggagtgttagagggtcagctatacttagtagatttcgatagagctgaactcgacacttgcttaattgctaagactaacatgggctggctctggcatcgccgactagcacatgttggaatgaagaatcttcacaagcttctaaagggagaacacattttgggactaacaaatgttcattttgagaaagacaggatttgtagcgcatgtctggcagggaagcaagttggagttcatcatccgcacaagaacatcatgacgactgacaggccactggagctcctacacatggatctattcggcccgattgcttacttaagcatcggcgggagaaaaatctcatacccaagagaccttaaaaggattcttgagacgagctcaaaatgagtttggcttaaggatcaagaaaattagaagcgacaacgggacagagttcaagaactctcaaattgaaggcttccttgaggaggagggcatcaagcatgagttctcttctccctacacgccacaacaaaatggtgtagtggagaggaagaatcgaactctattggacatgacaagaaccatgcttgatgagtacaagacttcggatcggttttgggccgaggcggtcaacaccgcctgctacgccatcaaccggttatatctacaccgaatcctcaagaagacatcttatgaactcctaaccgataaaaagcccaatatttcatattttagagtctttggtagcaaatgctttattcttgttaaaagaggtagaaaatctaaatttgctcctaagactgtagaaggctttttactaggatatgattcaaacacaagggcatatagagtctttaacaagtccactagacaagttgaagtttcttgtgacattgtgtttgatgagactaacggctctcaaatagagcaagttgatcttgatgagataggtaatgaagaggctccatgcatcgcgctaaggaacatgtccattagggatgtgtgtcctaaggaatccgaagagcctccaaatgcacaagatcaactgtcctcctccacgcaagcatctccaccaactcaaaatgaggatgaagctcaagttgatgaagtagaagatcaagcaaaagagccacctcaagatgatggcaatgatcaagggggagatacaaatgatcaagacaaggaggatgaagaacaaaggccgccacacccaagagtccatcaagcaatccaacgagatcaccccatcgacaccatcctcggcgacattcataagggggtaactactagatctcggggtgcacatttttgtgagcattactcttttgtttcctctattgagccacacacggtagaggaagcactccaagattccgatcgggtggtggcgatgcaagaggagctcaacaacttcactaggaatgaggtatggcatttagttccacgtcctaatcaaaatgttgtaggaaccaaatgggtcttccgcaacaagcaagatgagcatggtgtggtgacaagaaacaaagctcgacttgtggccaagggatactctcaagtcgaagtgccttcctcaatggaccaatcaaggaggaggtctatgttgagcaacctcccggctttgaagatagtgagtaccctaaccatgtgtataaactctctaaggcgctttatgggctcaagcaagccccaagagcatggtatgaatgccttagagatttcgttatcactaatggcttcaaagtcggaaaggccgatcctactctattcactaaaactcttgaaaaatgacttgttcgtatgccaaatttatgttgatgatattatatttgggtctactaacgagtctacttgtgaagaatttagtaggatcatgacacaaaagttcgagatgtctatgatgggggagttgaagtacttcttgggatttcaagtgaagcaactccaagagggcaccttcattagccaaacgaagtatactcaagacattctaaacaagtttgggatgaaggatgccaagcccatcaagacacccatgggaactaatgggcatctcgacctcgacacgggaggtaagtccgtggatcaaaaggaagagcacatcggggacttgccagttcttgggaagatccttggtgtcttaggcttcaaagaagcaaaattcggtcgctctttccaccgccgaagctga

SEQ ID NO: 31896 - DNA, 121 bp, Zea mays
  Clone ID: MRT4577_129102C.1
ggaccaggtaagcagcagcaggaaacctagcacggcggaatcggaaccattggtaaccaactccgtgccggttggaaggaccaggaggccaagcggacaggcgcgaaattccgccgttttt

SEQ ID NO: 31897 - DNA, 354 bp, Zea mays
  Clone ID: MRT4577_129103C.1
gtcagtttgtttgtacatggatcaggccgcgtttttttttattgaattaaaattgcgcccaaactggcctagataaacactgtcacacccatgtacctgaaaaatcaatcccggttgagtgcatcgactagtgaagactgtaaaccggcgtggacactaccagctcgtgggggcggaaaggttgttgtctgcctgaaaagcgcctattcctattatataggcgggaacccggcctgtttttttacaaacaaacggacaaaattttaaaagggggggccgaattctagggttacgtacgccccggtgacgaattcatagaccgttctttgggggcacccaaatttaatttattgg

SEQ ID NO: 31898 - DNA, 4525 bp, Zea mays
  Clone ID: MRT4577_129104C.1
atgaagaaagtggtctactacgagaccgactcttcctcgccctctacatccgaatccgacgccgcgtccgtcacttctaagcgccaagagcgcaagaagtatagcaaaccacctatgtttgatggtgaagattataatatgtggagtgataaaatgaggcatcatctaacctcactccacactagcatttgggatgttgttgagattggagtacaggagtataacaaggtgcaagggttaaagagcgccaaggagatttgggacgtgctcaagaccgcgcacgaaggagatgaggtgaccaaaatcaccaagcgggagacgatcgagggggagctcggacgcttccggcttcgccaaggggaggagccacaagacatgtacaaccgcttgaaaaccttggtgaaccaagtgcgcaacctcgggagcaccaaatgggatgaccatgagatggtcaaggttattctaagatccctcgttttccttaaccctacgcaagttcaattaattcgaggtgatcctagatatatgctaatgtctcccgaggaagtaataggcaaatttgtgagctttgagttgatgatcaaaggctcaaagaagatcatcgagcaagatggcccctccatgcccgaagcacaaccggtcgcattcaaggcaacggaggagaagaaggaagagtctacatcaagtagagtctccatcgacgcctccaagctcgacaacgaggaaatggcgctcatcatcaagagcttccgccaaatcctcaagcaaaggagggggaaggattacaaatcccgctccaagaaagtgtgctacaagtgtggtaagcccggtcattttattgcaaaatgtccattatcaagtgatagtgacaggggcgacgacaagaagggaaaaaggagagaaaagaagaggtaccacaagaagaggggcgaagatgcccatgtgtgccgcgaatgggactccgacgagagctccaccgacgaggacgccgccaacatcgccgtcaccaaagggctcatcttccccaacatcggccacaagtgcctcatggcaaaagacgacaaaaggaagaaggtcaaatcaaaatcctccactaaatatgaaacctctagtgatgaggataacttgcgcaccctttttgccaaccttaacatgcaacaaaaagaaaaattaaatgaattaattagtgctattcatgagaaggatgaacacttggactctcaagaggacttcctaattaaagaaaacaagaagcatgttaaggttaagaatgcttacgctctagaagtggaaaaatgtgaaaaattatctagtgagctaagcaagtgccatgatattattatcaaccatagaaatgagaatgctagtttaatagctaaggttgattcaaatgtatgtgatgattcaatttccaatcttagagatgataatcctaatttgcttgctaggattgaaaaattgaatgattctcttgctagccttagaaatgaaaatgaaaatttgattgctaaggctaaagacttagatgtttgcaatgtcacaattttcaatcttagaagtgaaaatgacattctacatgctaagattgttgaacttaaatcttgcaaatcctctacatctactactgagcatgtttccaattgcactagatgtagagacattaatgttgatgctattcatgatcacctagctttaattaagaaacaaaatgatcacatagcccaacttaatgccaaaattaatgagcatgacttagaaaatgaaaaatttaaatttgctagaagcatgctctatagtgggagacgccctgacatcaaggatggcattggattccaaaagggagacaatgtcaaacttaatgcccctcctaaaagattgtctaactttgttaagggcaaggctctcatgcctcaggataacgagggttacattttgtaccctgccggttatcccgagcataaaattaggagaattcactccaggaagtctcactctggccctaatcatgcatttatgtataagggtgagacatctagctctaggcaatcaacccgtgctaaattggctagaaagaaaactcctattgcatcaaatgattctaacatttcatttaaaacttttgatgcatcttatgttttaactaacaaatccggcaaggtttatgcatctgggggctcaagttggatcatcgatagcgggtgcacaaaccacatgactggggagaagaaaatgttctcctcctacgagaaaaaccaagatccccaacgagctatcacattcggggatggaaatcaaggtttggtcaaaggtgtcactgtctttagaagaagtgatgattcaatatcatttaagggtgtgctagagggtcagctatacttggaaaaatctcaaacccaagaaaccttaaaaggattcttgagacgagctcaaaacaagttcggcttaaggatcaagaaaatcagaagcgacaacgggacggagttcaagaactctcaaattgaaggcttccttgaggaggagggcatcaagcatgagttctcttctccctacacgccacaacaaaatggtgtagtggagaggaagaatcgaactctattggacatggcaaggaccatgcttgatgagtacaagacttcggatcggttttgggctgaggcggtcaacaccgcctgctacgccatcaaccggttatatctacaccgaatcctcaaaaagacatcttatgaactcctaaccggtagaaaatctaaatttgctcctaagactgtagaaggctttttactaggatatgattcaaacacaagggcatatagagtctttaacaagtccactggacaagttgaagtttcttgtgacgttgtgtttgatgagactaacggctctcaagtagagcaagttgatcttgatgagataggtaatgaagaggctccatgcatcgcgctaaaaaacatgtccattggggacgtgtgtcctaaggaatccgaagagcctccaaatgcacaagatcaaccatcctcctccacgcaagcatctccaccaactcaaaatgaggatgaagctcaagttgatgaaatagaagatcaagcaaaagagccatctcaagatgatggcaatgatcaagggggagatacaaatgatcaagacaaggaggatgaagagcaaagaccgccacacccaagagtccaccaagcaatccaacgagatcacctcgtcgacaccatcctcggtgacattcataagggggtaactactagatctcatgttgcacatttttgtgagcattactcttttgtttcctctattgagccacacagggtagaggaagcactacaagattcagattgggtggtggcgatgcaagaggagctcaacaacttcactaggaatgaggtatggcatttagttccatgtcctaatcaaaatgttgtaggaaccaaatgggtcttctgcaacaagcaagatgagcatggtgtggtgacaaggaacaaagctcgacttgtggccaagggatactcccaagtcgaaggtttggatttcggtgaaacctatgcacccgtaactaggcttgagtcaattcgtatattattggcctatgctacttaccatggctttaagctttatcaaatggacgtgaaaagtgccttcctcaatggaccaatcaaggaagaggtctatgttgagcaacctcccggctttgaagatagtgagtatcctcaccacgtctataaactctctaaggcgctttatgggctcaagcaagccccaagagcatggtatgaatgccttagagatttccttatcgctaatggcttcaaagttggaaaggccgatcctactttattcactaaaactcttgaaaatgacatgtttgtatgccaaatttatgttgatgatattatatttgggtctactaacgagtctacatgtgaagaatttagtagaatcatgacacaaaagttcaagatgtctatgataggggagttgaagtacttcttgggatttcaagtgaagcaactccaagagggcaccttcattagccaaacgaagtatactcaagacattctaaacaagtttgggatgaaggatgccaagcccatcaagacacccatgggaactaatgggcatctcgacctcgacacgggagctagccagatgggacgccggtctggttccccatggcctgagtcagctcggggtagggtgatgatggcgcctcctgttgacgtggctggcctgcgccctaggttgggcgatgcggaggctcctccgaagccgaggtcgagtctgtcttccgtggccgaggccgagttcgagcccctgggtcgggcgaggcggaggtcgtcggctgaggccagggcggagtccgagccctggggtcgggcgaagcggagttcgtcgtcttctgggacttagcccgagtccgagccctgggtcgggcggagcggagttcgccgtcttccgggacttagcccgagtccgagccctgggtcgggcggagcggagttcgtcgtcttccgcgacttag

SEQ ID NO: 31899 - DNA, 111 bp, Zea mays
  unsure (1)..(111): unsure at all n locations
  Clone ID: MRT4577_129105C.1
cnggggcgatgccgacacgctcttgcgcccgacgctcgcttctgtccgcggctctacctacccggctaccgatccccgacgcctccattgaggctcttgctttgggggggg

SEQ ID NO: 31900 - DNA, 5772 bp, Zea mays
  Clone ID: MRT4577_129106C.1
atgtcgggagatcacgccaagaaggagatggagaccggcgaaaagcccactacaagccaagggagcacttcatcggaagagtcccacaccaagaggaaggagaagaagaaggactcctccaaacggaaggagaaaaagtcttcctcttcacaccacaaagagaagaaggaaaaatcttcttctcacaagccgcatcggagaggagacaagcacaaaagaatgaggaaggtggtctactacgagaccgacacttcatcaacatcaacctccgactccgacgcgccctccgtcacttctaagcgccaagagcgcaagaagtatagtaagattcccctacgctaccctggcatttccaaacatactcctttactttccgtcccattaggcaaaccaccaacttttgatggtgaagattacgctaggtggagcgatttaatgcgatttcatctaatctcgctccacaaaagtatatgggatgttgttgagtttggtgcacaggtaccgtcggtaggggatgagaactatgatgaggatgaggtggcccaaatcgagcacttcaactcacaagcaacgacaatacttctcgcctctctaagtagagaggagtataacaaagtacaagggttgaagagcgctaaggagatttgggatgtgctcaaaaccgcgcacgaaggagatgagctcaccaagatcaccaagcgggaaacgatcgagggggagctcggtcggttccggcttcgcaaaggggaggagccacaacacatgtacaaccggctcaagactttggtgaaccaagtgcgcaacctcgggagcaagaagtgggatgaccacgaagtggtaaatgttattttaagatctctcatttttcttaatcccactcaagttcaattgattcgtggtaatcctagatatactaaaatgacccccgaggaagttatcgggcattttgtaagttttgagtgcatgatagaaggctcgaggaaaatcaacgagcttggcgacccatccgaagcccaacccgttgcattcaaggcaacggaggagaagaaggaggagtctacaccaagtagacaaccaatagacgcctccaagctcgacaatgaggaaatggcgctcgtcatcaagagcttccgccaaatcctcaagcaaaggagggggaaggactacaagtcccgctccaagaaggtttgctacaagtgtggtaagcccggtcattttattgctaaatgtcctatatctagtgacagtgaccgaggcgacgacaagaaggggagaagaaaggagaagaaaaggtactacaagaagaagggcggcgatgcccatgtttgtcgggaatgggattccgacgaaagctcaagcgactcctccgacgacgaggacgccgccaacatcgccgtcaccaagggactcctcttccccaacgtcggccacaagtgcctcatggcaaaggacggcaaaaagaagaaggttaaatccaactcctccactaaatatgaatcttctagtgatgataatgctagtgatgaggaggataatttgtgttccctttttgccaaccttaacatagctcaaaaagaaaaattaaatgaattagttagtgctattcatgaaaaggatgaccttttggatgcccaagaggattgtctaattaaagaaaacaagaaacatgttaaggttaaaaatgcttatgctctagaagtagaaaaatgtcaaaaactatctagtgagctaagcacttgtcgtgagatgattgacaaccttagaaatgaaaatgctattttaaatgctaaggttgattcacatgtttgtaatatttcaattcccaatcttagagatgataatgttgacttgcttgctaagattgatgaattgaatgtatctcttgctagccttagattagagaatgaagatttaattgctaaggctaaagattttgatatttgcaaagttacaatttccgatcttagcgataaaaatgatattcttcatgctaagattgttgagcttaattcttgcaaaccctctacatctattgttgagcatgtatctatttgtactagatgtagagatgttgatattcatgctattcatgatcatatggctttaattaaacaacaaaatgatcatatagcaaaactagatgctaaaattgccgagcacaacttagaaaatgagaaatttaaatttgctcgtagcatgctttataacgggagacgccctggcattaaggatggcattggcttccaaaggggagacaatgtcaaaattaatgcccctcctaagaacttgtctaactttgttaagggcaaggctcccatgcctcaggataacgagggctacattttgtaccctgccggctatcctgagagcaaaattaggagaattcattctaggaagtctcactctggccctaatcatgcttttatgtataagggtgagacatctagctctaggcaaccaacccgtgccaagttgcctagaaagaaaactcctaatgcatcaaatgaccatgccatttcatttaaaacttttgatgcttcttatgtgcttactaacaaatccggcaaagtggttgccaagtttgttgggggcaaacacaagggttccaagacttgtgtttgggtacccaaagttcttgtttctaatgccaaaggacccaaaacagtttgggtttatgcatccgggggctcaagttggatactcgacagcgggtgcacaaaccacatgaccggggagaaaaggatgttctcctcatatgagaaaaaccaagatccccaacgagctatcacattcggggatggaaatcaaggtgtcactgtctttagaagaagtgatgattcaatagcatttaagggtgtgttagagggtcagctatacttagtagattttgatagagctgaacttgacacatgcttaattgctaagactaacattggttggctctggcaccgccgactagcccatgttgggatgaagaatcttcataagcttctaaagggagagcacattttaggattaacaaatgttcattttgagaaagacaggatttgtagcgcatgccaggcagggaagcaagttggagtccatcatccacacaagaacatcatgacgaccgacaggccgcttgagctactccacatggatctattcggcccgattgcttacataagcatcggcgggagtaagtattgtcttgtaatagtggatgattattctcgcttcacttgggtattctttttacaggaaaaatctcaaacccaagagaccttaaagggattcttgagacgggctcaaaatgagttcggcttaaggatcaagaaaataagaagcgacaacgggacggagttcaagaactctcaaatagaaggcttccttgaggaggagggcatcaagcatgagttctcctctccctacacgccacaacaaaatggtgtagtggagaggaagaatcgaactctattggacatggcaagaaccatgcttgatgagtacaagacaccggaccggttttgggccgaagcggtcaacaccgcctgctacgccatcaaccggttatatcttcaccgaatcctcaagaagacatcatatgaactcctaaccggtaaaaagcccaacatctcatattttagagtctttggtagcaaatgctttattcttgttaaaagaggtagaaaatctaaatttgctcctaaaactgtagaaggctttttacttggttatgactcaaacacaagggcatatagggtctttaacaagtccactggactagttgaagtctcatgtgacgttgtgtttgatgaaactaacggctctcaagtagagcaagttaatcttgatgagataggtgatgaagaggctccatgcatagcgctaaggaacatgtccattggggatgtgtgtcctaaggaatccgaagagtctccaaatacacaagatcaaccatcctcctccacgcaagcatctccaccaactcaaaatgaggatgagactcaagttgatgaagggcaaaatcaagaagatgagccacctcaagatgatggcaatgatcaagggggagatgcaaatgatcaagaaaaagaggatgaggaagaaccaaggccgccacacccaagagtccaccaagcaatccaacgagatcaccccgtcgacaccatcctcggcgacattcataagggggtaaccactcgatctcgtgttgcacatttttgtgaacattactcttttgtttcctctattgagccacacaggatagaggaagcacttcaagattcggattgggtggtggcaatgcaagaggagctcaacaatttcacaaggaacgaggtatggcatttagttccacgtcctaaccaaaatgttgtaggaaccaaatgggtcttccgcaacaaacaagatgagcatggtgtggtgacaaggaacaaagctcgactcgtggcaaaagggtattcacaagtcgaaggtttggatttcggtgaaacctatgcacccgtagctaggcttgagtcaattcgcatattattggcctatgctacttaccatggctttaagctttatcaaatggacgtgaaaagtgccttcctcaatggaccaatcaaggaagaggtctatgttgagcaacctcccggctttgaagacagtgagtaccctaaccatgtctataggctctctaaggcgctttatgggctcaagcaagccccaagagcatggtatgaatgcctaagagatttccttatttctaatggcttcaaagtcggcaaggccgatcctacactctttactaaaactcttgaaaatgacttgtttgtatgccaaatttatgttgatgatattatatttgggtctactaacgagtctacatgtgaagagtttagtaggatcatgacacagaaattcgagatatcgatgatgggggagttgaagtattttctaggattccaagtcaagcaactccaagagggcaccttcatttgccaaacgaagtacactcaagacattctaaccaagtttggaatgaaggatgccaagcccatcaagacacccatgggaaccaatgggcatctcgacctcgacacgggaggtaaatccgtcgatcaaaaggtataccggtcgatgattggttcattgctttatttatgtgcatctcgaccggatattatgctttccgtttgcatgtgtgcaagatttcaatccgaccctaaggaatcccaccttacggccgtaaaacgaatcttgagatatttagcttatactcctaagtttgggctttggtatcctaggggatccacatttgatttgattggttattcggatgccgattgggcggggtgcaaaatcaataggaagagcacatcggggacttgccagttcttgggaagatccttggtgtcttgggcttcaaagaagcaaaattcggtcgctctttccaccgccgaagccgagtacattgccgcaggccattgttgcgcgcaattgctttggatgaggcaaaccctgcgggactacggttacaaattgaccaaagttcccttgctatgtgataatgagagtgcaataaaaatggccgacaatcccgtcgagcatagccgcactaaacacatagccatccggtatcattttcttagggatcaccaacaaaagggagatatcgagatttcttacattaacactaaagatcaattagccgatatctttaccaagcctcttgatgaacaatcttttaccaaacttaggcatgagctcaatattcttgattctagaaatttcttttgctag

SEQ ID NO: 31901 - DNA, 409 bp, Zea mays
  Clone ID: MRT4577_129107C.1
tgttttcagaaccttctctttccaatgcacaacttatggacaagtgcttcccttcaaacggcaggaccatatcattggatatggtggtggagtgaaagcaagacatctttgaagtccatctgttagtaaggctgaattgttagagaagctgaaacagtcggaggatgagaaacgagcaatgcttgaggagaacagagagcttcgagaagaaaatcgggctacaaacagtcgtgtaagccaaatggaaaaggagtgggcagagttgaagaaacaaataagtagtagttagcatagaaatcttgatttgagtagagtttgagtgatatgaatatttacaacttttataccattggataaatacgtgatactggatttattatatgtaataatcagattaccaccgatatat

SEQ ID NO: 31902 - DNA, 3168 bp, Zea mays
  Clone ID: MRT4577_129108C.1
atgtctcccgaggaagtaataggaaaatttgtgagctttgaattgatgatcaaaggctcaaataaaatcatcgagcaagatggtccctccacgcccgaagcacaaccggtcgcattcaaggcgacagaggagaagaagaaagaatctacatcaagtagactccccatcaacgcctccaagctcgacaacgaggaaatggcgctcatcatcaagagcttccgccaaatcctcaagcaaaggagagggaaggactacaagtcccgcaccaagaaagtgtgctacaagtgtggtaagcccggtcattttattgcaaaatgtccattatcaagtgatagtgacaggggcaacgacaagaaaggaaagaggagagaaaagaagagatactacaagaagaagggcggcgatgcccatgtatgccgcgagtgggactcggacgagagctcctccgactcctcctccgacgaggacgccgccaacatcgtcgtcaccaaaggactcctcttccccaacgtcggccacaagtgcctcatggcaaaggacgacaaaaggaagaaggtaaaatcaaggtcctccactaaatatgcatcctctagtgatgaagataattctagtgatgaggaggataatttgcgcactctttttgccaaccttaacatgcaacaaaaagaaaaattaaatgagttaattagtgctattcatgagaaggatgaactcttggactcccaagaggacttcctaattaaggagaataagaagcatgttaaggttaaggatgcttatgctctagaagtagaaaaatgtgaaaaattatctagtgagctaagcaagtgccatgatattattaccaaccttagaaatgagaatactagtttaatagctaaggttgattcaaatctatgtgatgattcaatttccaatcttagagatgataatgctaatttgcttgctaagattgaaaaattgaatgattctcttgctagccttagaaatgataatgaaaaattaattgctaaggctaaagacttagatgtttgcaatgttacaatttccaatcttagaagtgaaaatgacattttacatgctaagattgttgaacttaaatcttgcaaaccctctacatctactgtcgagcatgtttccattaatgttgatgctattcatgatcacctagctttaattaagaaacaaaatgatcacatagctcaacttaatgccaaaataaatgagcatgacttagaaaatgaaaaatttaaatttgctagaagcatgctctatagtgggagacgccctggcatcaaggatggcattggcttccaaaagggagacaatgtcaaacttaatgcctctcctaaaagattgtctaattttgttaagggcaaggctcccatgcctcaggataacgaggaagaattcactctaggaagtctcactctggctctaaccatgcttgatgagtataagacttcggatcggttttgggcggaggcagtcaacaccgcgtgctacgccatcaaccggttgtatctacatcgaatcctcaagaagacatcatacgaactcctaaccggtaaaaagcccaatgtttcatattttagagtctttggtagcaaatgctttattcttgttaaaagaggtagaaaatccaaatttgctcctaaggctgtagaaggctttttactaggatatgattcaaacacaagggcatatagagtctttaacaagtccactggactagttgaagtttcttttgacattgtgtttgatgagactaacggctctcaagtagagcaagttgatcttgatgagctagatgatgaagaggctctgtgcatcgcactaaggaacatgtccattggggatgtgtgtcctaaggaatccgaagagcctccacaagcacaagatcaaccgtcttcctccatgcaagcatctctaccaactcaagatgaggatgaggctcaagatgatgaaggagaagatcaagaggatgagccacctcaagaggaggacaatgatcaagggggagatgtccatgattaaggcaaggaagatgaacaagttccaagactgccacacccaagagtccaccaagcaattcaacgagatcaccctgtgaacaccatcctcggtgatattcaaaagggggtaactactcgatctcgtgttgctcatttttgtgaacattactcttttgtttcctctattgagccacacgggatagaggaagcacttcaagattcagattgggtggtggcgatgcaagaggatctcaacaacttcactaggaatgaggttttccgcaacaagcaagacgagcatggtgtggtgacaaggaacaaagcccgacttgtggccaaggggtattcacaagtcgaaggtttggatttcggtgaaacctatgcacccgtagctaggctagaatcaattcgcattttacttgcctatgctacttaccatggcttcaagctataccaaatggatgtgaaaagtgccttcctcaatggaccaatcaaggaggaggtctatgttgagcaacctcccggctttgaagatactgagtaccctaaccatgtttataaactctctaaggcgctttatgggctcaagcaagccccaagagcatggtatgaatgcctaagagattttcttatcactaatggcttcaaagtcggaaagaccgatcctactctatttaccaaaacacttgaaaatgatttgtttgtatgccaaatttatgttgatgatattatatttgggtctactaacgaatctacatgtgaagaatttagtaggatcatgacacaaaaattcgagatgtctatgatgggggagttgaagtacttcttgggatttcaagtgaagcaactccaagagggcaccttcattagccaaacgaagtatattcaagacattctaaacaagtttgagatgaaggatgccaagcccatcaagacacccatgggaaccaatgggcatctcgacctcgacacgggaggtaaatccgtagatcaaaagaaagagcacatccgggacttgccagttcttgagaaggtctctggtgtcttgggcttcaaagaagcaaaattcagtagctctttctaccgccgaagccgagtatattgccgcaggccattgttgcgcgcaattgctttggatgaggcaaacccttag

SEQ ID NO: 31903 - DNA, 6602 bp, Zea mays
  Clone ID: MRT4577_129109C.1
atgtcgggagaactcaccaagaaggagatggaaaccggcgacaagcccgctacaagccacgggaaggcttcatcgggagagtcccacaacaaagagaagaagaagaaggagaagaagacttcttctcacaagtcgcatcggagtggcgacaaaataaagaagatgaggaaggtggtctactacgagaccgacacttcatcaccttctacctccggctccgacgcgccctccataacttctaagcgccatgagcgcaagaagtttagcaaaccgccaacctttgacggtgaagattatgctaggtggagtgatttaatgaaatttcatctaacctcactccacaaaagtatatggaatgttgttgagtttggagcacaggtaccatccgtaggggatgaggattatgatgaggacgaggtggcccaaatcgagcacttcaactcccaagccacaacaatactcctcgcctctctaagtagggaggagtacaacaagatcaccaagcgggaaacgatcgagggggagctcggtcgctttcgtcttcgccaaggggaggagccacaagatatgtacaaccggctcaagaccttggtgaatcaagtgcgcaacctcgggagcaaaaagtgggatgaccacgaggtggttaaggttattctaagatctcttattttccttaaccctactcaagtacaattaattcgtggtaatccaagatatacactaatgactcctgaggaagtaatcgggaattttgtgagctttgaatttatgatcaagggctcacggaagatcaacgagcttgacggtccctccacgtccgaagctcaaccggttgcattcaaggcgacggaggagaagaaggaggaatctacaccaagtagacaaccaatcgatgcctccaagctcgacaatgaggaaatgacgctcgtcatcaagagcttccgccaaatcctcaaacaaaggagggagaaagattacaagccccgctccaagaaggtttgttacaaatgtggtaagcccggtcactttatagctaaatgtcccatttctagtgacagtgacaggggtgacgacaagaaggggagaagaaaggagaagaagaggtactacaagaagaagggcggcgatgcccatgtttgtcgtgagtgggactccgacgaaagctctagcgactcctccgacgacgaggacgccgccaacatcgccgtcaccaagggactcctcttccccaacgtcggccacaagtgcctcatggctaaggacggcaaaaagaagaaggttaaatctaaatcctccactagatatgaatcctctagtgatgacaattctagtgatgaggaagataatttacgtactctctttgccaacctaaacatgcaacaaaaggaaaagttaaatgaattaattagtgccatccatgagaaggatgacctcttggactcccaagaggacttcctaatcaaggaaaacaaaaaacatgttaaggttaaacatgcttatgctctagaagttgaaaaatatgaaaaattatctagtgagctaagcacttgccatgagacaatagacaaccttagaaatgagaatgctaatttattagctaaggttgattcaaatgtttgtaatgcttcaatttccaatcttagaaatgataatgatgatttgcttactaagattgaagaattgaacatatctcttgctagccttaggattgagaatgaaaaattgcttgctaaggctaaagattttgatgtttgcaatgctactatttccgaccttagaactaaaaatgatattttgcatgctaaggttgtagaattaaaatcttgcaaaccctctacatctaccattgagcacacttctatttgtactagatgtagagatgttgatgttaatgctattcatgatcacatggctttaattaaacaacaaaatgatcatatagcaaaactagatgctaagattgccgagcatgacttagaagatgaaaaatttaaatttgctagaagcatgctctatagagggagacgccctggcattaaggatggcattggcttccaacagggaggcaatgtcaaaattaatgcccctcctaaaaggttatctaattttgttaagggcaaggctctcatgcctcaggataacgagggttacattttgtaccctgccggctaccctgagagcaaaattaggagaattcattctaggaagtctcactctggccctaaccatgcttttatgtataagggtgagacatctagttctaggcaaccaacccgtgctaagttgcctaagaagaaaactcctagtgcatcaaatgatcatgacatttcatttaaaacttttgatgcatcatatgttttaactaacaaatccggcaaggtttatgcatccgggggctcaagttggatcatcgacagcggatgcataaaccacatgacaggggagaagaagatgttctcctcatatgagaaaaaccaagatccccaacgagctatcacattcggggatggaaatcaaggtgtcactgtctttagaagaagtgatgattcaatagcatttaagggagtgttagagggtcagctatacttggtagattttgaaagagctgaactcgacacttgcttaattgctaagactaacatgggttggctctggcatcgccgactagcccatgttgggatgaagaatcttcataagcttataaagggagaacacattttaggattaacaaatgttcattttgagaaagacagggaaaaatctcatacccaagagaccttaaagggattcttgagacgggctcaaaatgagttcggcttgaggatcaagaaaattagaagcgacaacggtacggagttcaagaactctcaaattgaaggcttccttgaggaggagggcatcaagcatgagttctcctccccctacacgccacaacaaaatggtgtagtggagaggaagaatcgaactctattggacatggcaagaaccatgcttgatgagtacaagacttcggatcggttttgggccgaggcggtcaacaccgcctgctacgccatcaaccggttatatctacaccaaatcctcaagaagacatcatacgaactcctaaccggtaaaaagcccaacatttcatattttagagtctttggtagcaaatgcttcattcttattaaaagaggtagaaagtctaaatttgctcctaagactgtagaagactttttactaggatatgattcaaacacaagggcatatagagtctttaacaagtctactggacaagttgaagtttcttgtgacgttgtgtttgatgagactaacggctcccaagtagagcaagttgatcttgatgagataggtattgaagaggctccgtgcatcgcgctaaggaacatgtccattggggatgtgtgtcctaaggaattcgaagagcctccaaatgcacaagatcaaccatcctcctccacgcaagcatctccaccaactcaaaatgaggatgaagctcaagttgatgaaatagaagatcaagcaaatgagccacctcaaaatgacgacaatgatcaagggggagatacaaatgatcaagacaaggaggatgaagagcaaaggccgccacacccaagagtccaccaagcaatccaacgagatcaccccgtcgacaccatcctcggcgacattcataagggggtaactactagatctcgtgttgcacatttttgtgagcattactcttttgtttcctctattgagccacacagggtagaggaagcactccaagattcggattgggtggtggcaatgcaagaggagctcaacaacttcactaggaatgagggatactcccaagttgaaggtttggatttcgataaaacctatgcacccgtagctaggcttgagtcaattcgcatattattggcctatgctacttaccatggctttaagctttatcaaatggacgtgaaaagtgccttcctcaatggaccaatcaaggaagaggtctatgttgagcaacctcccggctttgaagatagtgagtaccctaaccatgtctataaactctctaaggcgctttatgggctcaagcaagccccaagagcatggtatgaatgccttagggactttctcatcactaatgaattcaaagtcggaaaggccgatcctactctattcactaaaactattgaaaatgacttgtttgtatgccaaatttatgttgatgatattatatttgggtctactaacgagtctacatgtgaagaatttagtaggatcatgacacaaaagttcgagatgtctatgatgggggagttgaagtacttcttgggatttcaagtaaagcaactccaagaaggcaccttcattagccaaacgaagtatactcaagacattctaaacacgtttgggatgaaggatgccaagcccatcaagacacccatgggaactaatgggcatctcgacctcaacacgggaggggaagaaagtacttcgagggctctaatgattccgtttttggcgattcatgccaaagggggagaaagtaagagcccaaagcaaaaggaccgcaccaccaccaatttcaaaatcttaagtgttgaatattttcaattggtatcctattgtgttaaaaagggggagaaagtagtatttcaaaatgatatatcaaaaccctcttgaacactaagaggaggatctcatttagggggagtttttgtttagtcaaagtaagagcatttgaaacagggcgagaaaatttcaaatcaatcttgaaaatggtttgcaaactcttattcatttacctttgactatttgcaaaagaacttagaaaagatttacaaaagattttgcaaaaacaaacatgtggtgcaagcgtggtccaaaatgttatataataaagaaacaatccatgcatatcttgtaagtatttatattggctcaattccaagcaacctttacactcatattatgcaaactagttcaattatgcacttctatatttgctttggtttgtgttggcatcaatcaccaaaaagggggagattgaaagggaatttgggttacacctagttcatataatgcaagaggagctcaacaacttcactaggaatgaggtatggcatttagttccacgtcctaaccaaaatgttgtaggaaccaaatgggtcttccgcaacaagcaggatgagcatggtgtggtgacaaggaacaaagctcgacttgtggccaagggatactcccaagtcgaaggtttggatttcggtgaaacctatgcacccgtagctaggcttgagtcaattcgaatattattagcctatgctacttaccatggcttcaagctttaccaaatggacgtgaagagtgcctttctcaatggaccaatcaaggaagaagtctatgttgagaaacctcccggctttgaagatagtaagtaccctaaccatgtttataaactctctaaggcgctttatgggctcaagcaagccccaagagcatggtatgaatgccttagggattttcttatcactaatggattcaaagtcggaaaggccgatcctactttatttactaaaactcttgaaaatgacttgttcgtatgccaaatttatgttgatgatattatatttgggtctactaacgagtctacatgtgaagaatttagtaggatcatgacacaaaagttcgagatgtctatgatgggggagttgaagtacttcttggaatttcaagtgaagcaactccaagagggcaccttcattagccaaacgaagtatactcaagatattctaaacaagtttgggatgaaggatgccaagcccatcaagacacccatgggaactaatgggcatctcgacctcgacacgagaggggaagaaagtaatcagagggctctaatgactccgtttttggcgattcatgccaaagggggagaaagtatgagctcaaagcaaaaggaccgcaccaccaccaatttcaaaaatttagcttttcaaagagtattttcaaattggtgccaaggttcacacttagcaaataaaaagaccaagtatggggttcaacaaagagagcaagggataaccgaaggcacctctggtctagggcaccggactgtccggtgtacaccggacagtgtccggtgcaccagaggactccaactcaaactcgccaccttcgggaatttccagaggcgctccgctataattcactggactgtccggtgtgtccggtgctccaaggaagagcggcctcaggaactcgccagcttcgggaaaccacagcggctgctccgctataattcaccggacatgtccggtgtacaccggactgtccggtgtaactgcggggcaacggctacttcgcgccaacggtcacctgcaacagcaattaatgcgcgccagagcgcgcagaagtcagacacgcgcgtagtggtgcaccggacactctacagtacatgtccggtgcgccaccggacatcaaggcgggcccagaagacagagctccaacggtcgaatcccaacggctttggtgacgtggctggcgcaccggacatgtccggtgtacaccggactgtccggtgcaccatacgacagtcagccccaccaaacggctag

SEQ ID NO: 31904 - DNA, 464 bp, Zea mays
  Clone ID: MRT4577_129110C.1
cacacctgctcgcttccacttcgctcgtttgactactcgtcccgtcctttcgtttcgaagcctcggtagccttgacgatggccaccgccgcggtgtcggtcgacgagaagttcgacaagcttcgcgccgtggtcgccatgctcgaccagatcatctagaacgagaagttcggtttcatcagtctcgtgtcactctacctcacgtatgttgaattatgatcctcgtaggttcactgtttatgattgctattttttcattctattttttatccttgttatttgttttatttctttctttctttttttttttttatttttttttgtggttctttgatttttttctcttcttattttttgattattttttttatttttttttttctttttttttttattttattttttttattcttttttttattttttttgtttttttttttttttttttttttttttttattattt

SEQ ID NO: 31905 - DNA, 409 bp, Zea mays
  Clone ID: MRT4577_129111C.1
gagctcactatttggcgggcgcccttcctttcgctctcacgtgttgttttttttgtatacactttttgtttaaatatacatacaggcgccgcaatgagaaatcttttttggggcaatttacaaaaataaggtcaaggaatttcaagccaagaccgtctttttgtggccaaaccaaccccaaacggggcagctttttaaggagggacttgcccattccgcactgaaccccactcttgaacggcatgaaccccccacttatcttccgggcgcggcaacagaaaaaccgactgacccgagcaccttccctgacaccacccccgacaattaacgcttctatcaaaaggttgctgaccttcacccggagagacccaccccgtggaggggagggcacaggccctacaggtgggag

SEQ ID NO: 31906 - DNA, 245 bp, Zea mays
  Clone ID: MRT4577_129112C.1
tgataagaatacggaagcaccaagctcaatcggggggtttgtatcgctcactgatcgtcgagaacctgttcaacgcgagtttcaggtggcgcacgacaccctgaaagctttggggtcctgacaatttctaggagagcggcatcgttgttggctcgcgtggccttgttgcagtgactgttggggctctggcggactgctcgctgctactttgtatcgactgcggccagggcgagctctacgaggca

SEQ ID NO: 31907 - DNA, 1589 bp, Zea mays
  Clone ID: MRT4577_129113C.1
attggtacctcgagccggccggaaacgtgaccaaagccgtgtccatggcgcgccgttctaaaccctaaacctttcgacctgctttatactagacctcatcgagaatctcacgcgtcggcgaccatggcggcgtctccgtcttctccccatgccgcccccggagttagcggccagagcctgtccccctcagcgccgtctccccacctccccaactatttcatgtggagagaatttgtctggggaggaattgcaggtgcatttggggaaggcatgatgcatccagttgacactctgaaaacaaggcttcagagtcaagctataatgacaggggctaaggctcagaagaatatattccagatggtcaggacagtttgggcttctgatggtctaagaggtttttacagaggaatcagcccaggtgttactggatctcttgcgactggcgctacatatttcggtattattgaatcaaccaaagcatggttggagattgctaatcctaatctaagtggacactggtcacattttatcgctggagcgattggtgatacacttggatcctttgtctatgtgccttgcgaagtcatgaaacaaagaatgcaaattcaaggcacccaaaaatcttgggcatcagctgtagccaaaggaaatatttctcaaactcatgggatagagatgtatgggtactacaatggaatgttccatgctggctgttctatctggagagaccatggcttgaaggggctttatgcaggatactggtctacgcttgccagagatgtcccttttgctggtctaatggtcactttctatgaagcaatgaaaaagatgtctgagtatgggaaaacaaagtatttgccacacagtgatttgcatgttagcaactcctttgaaggacttgttctaggaggattggcaggcggctgtagtgcatacttgacaacccctttggatgtgatcaagacaagactgcaagtacaaggatcaacgtctaggtacaatggatggctggatgctataacaaagacgtggacttccgagggggtgcgcggcttgttcaagggaagtgttccgagaataatatggtatgttccggcatcagcattcacattcatggcagtggaattcctaagggaccatttcaacgacaaggttgatgcggatgcccatgaagtaacctccctgtcaatcgacacaaaatcagaagttgagaaatcagcttagcgttccttttcctatgatctatgaagcgtattggtatccctccccggtggaaattatccggcgggatctttctgtcttgggcaacaaactatgtttcggtcatgtaaatgcggaggacattcattggcagctgggcggagacattgttgtgtaccagaaagaaagtaattgacaacaacatgatcatattgtggcagcaattttcttagatagatagatattggtgagtggatggaatgagagaagtgaacatgtaacgtttctggaacgaaagaccaatgccaccggtgtattagagcttctgaatctctgttgctgatgttattgccattcttgcgtattgaaatattggatcgatttgccat

SEQ ID NO: 31908 - DNA, 640 bp, Zea mays
  unsure (1)..(640): unsure at all n locations
  Clone ID: MRT4577_129114C.1
cccggngatacaccaaaaccacttttgctgtggatgtcaagtttatctgatagatttgttatttagaatttttttggtgtatcctaactcctaagcttactaatgctgtggacaggaatagagatttactttttagaagaatctgctaatgaacaaatataatggttttccaggtcactttctatgaagcaatgaaaaagatgtctgagtatgggaaaacaaagtatttgccacacagtgatttgcatgttagcaactcctttgaaggacttgttctaggaggattggcaggcggctgtagtgcatacttgacaacccctttggatgtgatcaagacaagactgcaagtacaaggatcaacgtctaggtacaatggatggctggatgctataacaaagacgtggacttccgagggggtgcgcggcttgttcaagggaagtgttccgagaataatatggtatgttccggcatcagcattcacattcatggcagtggaattcctaagggaccatttcaacgacaaggttgatgcggatgcccatgaagtaacctccctgtcaatggacacaaaatcagaagttgagaaatcagcttagggtttcttttcttatgatctatgaagtgtattggtatccctccc

SEQ ID NO: 31909 - DNA, 303 bp, Zea mays
  Clone ID: MRT4577_129115C.1
ttcttttttttttttattggacccaataaaacagggcagggtgatagggcaacggggcaaaaatacataacacaggaaaataaataacaacattttaagtggacataataacaacatatttaaccttgttcatctaggactcctgcaaactaaatctggtcgaccatgaccaaaattcatgggttatttctttacttcttggccgaaacaataacaatgaacactcaacttatctctaaaaattatacacctaaaaaatgtactgttccttaattacttaaaatctaaactatagagagaaca

SEQ ID NO: 31910 - DNA, 511 bp, Zea mays
  Clone ID: MRT4577_129116C.1
attggaacttaaaataaatctgggggaactgcaatacatcattcactataccaactcaatcatcaagcatgggaggccaaaacaatcaatcaaacactgaagaataaaacaactcacacatggagccatacatcagttcgtagcaggggtacaacacatgcaactggtaaaaagagaggatcttgccttctgcttttctttgcttcttggggaactaaccatggttgttctcctcgtctgcggttctggttccttcaatggagaccatataccagcttcgctctgcatcagcaagctctcaaatggtttcttaaatcttgcagaatgatttgctattctgaagtctcctcctgttggttccctggggcttaacagggggctcctctcagattcttcatcagcctcaattttaaattgcattacagcaatgtcggctggggggatttccatgggtacatggctatgctgctcaatacaatgggaaaaacctatattttgcgctccctgaagt

SEQ ID NO: 31911 - DNA, 341 bp, Zea mays
  Clone ID: MRT4577_129117C.1
ggatcacgatacaagtgctgatggtgattgatgaaaaaaaaaaaaaaaaaaaaaacgggaaatataataaataaaaaattaaaacaaaaaaacattctacataattattaaattataatgtaaattaattaaaattcactagttgacggtatacgacttcatgccttgtactaactcacgtataccgtaacttcactaaattgaaccatatgacaataaaacgactggcctagcttagcctaattgatggacctaaataatgtaccaaatgtgtgatatgcatattgattcttctcatcctacttgtctctacatattaagcactatagtattgcatttta

SEQ ID NO: 31912 - DNA, 3231 bp, Zea mays
  Clone ID: MRT4577_129118C.1
cttgatcacctggaaagtgtactagcaaatgaaccagtctctgtcaagagtggccagttcattgttgaagtcaaaccacagggaataagcaaaggcatagttgctgagaggatacttgcatcagtgaaggagagaggaaagcaggctgatctcctattctgcaccggcgatgatgggtctgatgacgccacgtttgcaaatattgctgataacggtggctgcgacttgggcgctccgggggcggcactgtttgcctgcacggtgggactcgagccggtcgtcgaggtaatcaacccggaggatgactacgtttgggttcacgactaccatctcatggcgctgcctaccttcctccgccgctgcttcaaccgcctccgcatcggattcttcctccacagccccttcccctcgtccgagatctaccgcaccctccctgttcgggaggagatactcaaggcgctgctcaactgtgacctaattggcttccacacttttgattacgccaggcacttcctctcgtgctgcagtaggatgctgggaattgaataccagtcaaagcgtgggtacattgaattggattactttggccgcactgtcgggatcaaaatcatgccagtgggagttcatatgggtcaattggagtcgggtctgcgcttgcctgataaggaatggaggctttctgagcttcaacggcagtttcaggggaaaactgtcttgcttggtgtggatgatatggatatctttaaggggatcaatttgaagcttctcgcctttgagaacatgttgaggacacatcccaagtggcaggggagagcagtgttagtgcagattgctaacccagcccgtggaaggggtaaagatctggaagccatccaggctgagattgaggagagctgccagcggatcaatggagactttggccagtcagggtatagccctgttgttttcatcggccgtgatgtgtcaagtgttgagaagatcgcctattatacgatagcggaatgtgtggtggtcactgctgtgagggatgggatgaacttgacaccgtatgaatacgttgtctgtaggcagggtgcaccaggatctcagtcggtatcagaggtgagtgggccaaagaagagcatgctggttgtgtcagagtttattggctgctcaccgtcactgagcggtgctattagggttaacccatggaatatagaggcaaccgcagaggcgatgaatgaggccatttcaatgccagaacaggaaaaacagttgaggcatgagaaacattaccgttatgtcaggagccatgacgtcgcttattggtcaaagagcttcatcatagacttggaaagggcttgtaaggatcacttcaagaggacttgttggggcatagggttgggttttggtttcagggtggtggccttggaccctcatttcacaaagcttaacatggattcaatcattaatgcttatgagatttcagagagcagggctatattgctcgattatgatggaactctggttccccaaacttccctcaacaaggaacctagtccacaggttttgagcatcatcaataccctttgctcagatagtagaaacatcgtttttcttgtcagtggtcgagacaaagataccttgggaaagtggttctcctcatgtccaagattggggattgcagctgaacatggttacttcttgaggtggtctagagaagaagagtggcaaacatgcactcaggcattggacttcggatggatgcaaatggcgaagccagtgatgaatttatatacagaagcaactgatggatcctacattgaggccaaggaaagtgccttggtgtggcaccatcaggatgctgacctaggctttggatcctcacaggcaaaggagatgcttgatcacctggaaagtgtactagcaaatgaaccagtctctgtcaagagtggccagttcattgttgaagtcaaaccacagggaataagcaagggaatagttgccgagaggatacttgcatcagtgaaggagagaggaaagcaggctgatttcttattgtgcatcggcgatgataggtctgatgaggacatgtttgaaaatattgctgatatcattgggaggaatttggttgctccaagaacagcactgtttgcgtgcactgtgggacaaaaaccaagcaaagccaaattctacctggatgatacattcgaagtggtcactatgctgagcgcactggcagatgccacaggtcctgaactggagactgattcggctgatgaatctgtcgcatatatctcatcacttgatattggtgacgaacaatcagaatccagtgataaaccagttgaagggtcttagccagttttctcttgcgttttcagaacatgatgattgtttcaatagtcaattctattctacacaattttctgatgggaactcaacgactaacaactggttctacgaatgctccagagtgaagcttctcaatctgctgtgctccaagttctccagttgggcaagatagtacagtctgttgctccaaggcgtagatccatatgttcatagctgacttacttggcacgttctttcactttctcattcctggttgaattaaaatgaaaacctcacagaagacaaagggagcgctgtttggctcattggctgaagtaatctggggggaggtataggagtggcgtatgtgaaaggagcctgtgcgcaggttgtgatatgattccttattaacacgacgttacaaagtggtgtcacttcttgaactaccagtagtaacaatcccaagagtgaggttcgaattgattaattaattgcttcaaagccggatctcggatggttttgctccaacgttttcccctcgtgcggttttttttaataaattttctgggtttacgttgaaagaagccttggaagatagcatatttttaggcctgtctatcagttctgatgaccacaaccaatcagcgctggatgcttggcgattgtgtaccttaacacgctaagagcatctccaataatattaatccaaataagagggtattggtgatttcacaattagtgtttttttttttgtaaatattagggaaggtgctcaataatccttcacaatatataagatccaccgttctgtggtaaaaaaaaaaaaaaaacaaaaaaaaaaaaaaaaaaaaaaaaaaaaaaaaaaaaaaaaaaaaaaaaaaaaaaaaaaaaaaaaaaaaaaaaaaaaaaaaaaaaaaa

SEQ ID NO: 31913 - DNA, 565 bp, Zea mays
  Clone ID: MRT4577_129119C.1
atattggtgtagtagtgtagtggtataggagggtatgcgtgagagagaggttgcgagttcgaatctcaccatttattaaatatataaaaattaattcaaaaaatgataggtagggttggagagtttttcctataaatttaaaaaaaaatgtttagaaaggtgaccaaagccgtgtccatggcgcgccgttctaaaccctaaacctttcgacctgctttatactagacctcatcgagaatctcacgcgtcggcgaccatggcggcgtctccgtcttctccccatgccgcccccggagttagcggccagagcctgtccccctcagcgccgtctccccacctccccaactatttcatgggaaattgagtgttctcatggtgagaggttgaagcatactggagcttagtactttggcctctgtggagagaatttgtctggggaggaattgcaggtgcatttggggaaggcatgatgcatccagttgacactctgaaaacaaggcttcagagtcaagctataatgacaggggctaaggctcaaaagaatatattccagatggtcaggaca

SEQ ID NO: 31914 - DNA, 309 bp, Zea mays
  Clone ID: MRT4577_12911C.1
ggaaggaaaaaaaaaattttttggtttaaaagctttggccagaaaattttaaaaatttacccaaatttggccaccataggggggcccttttccagaccaaaaaaaaaataaacgtgacaaagttttttgcattgttaaaatacccgggcgaactaaaaaaaatttttggcaagtgttccctcaaaaactcctttgggggaaaactttttttaaaaaaaaaatgggcccttcctaaaattggaacttttttacttttttgcccgggggggtttaaaatattttttcaaaattttttttgaccaaaagggg

SEQ ID NO: 31915 - DNA, 2729 bp, Zea mays
  unsure (1)..(2729): unsure at all n locations
  Clone ID: MRT4577_129120C.1
gtacgtgctcgccaacaagttcttcttcgagaaggtcgtggaggtaatcaacccggaggatgactacgtctgggttcacgactaccatctcctggcgctgcctacctttctccgccgccgcttcaaccgcctccgcatcggattcttcctccacagccccttcccctcgtccgagatctaccgcaccctccctgttcgcgacgagatactgaaggcgctgctcaattgtgacctcattgggttccacacttttgattacgccaggcacttcctctcgtgctgcagtaggatgctgggaattgaataccagtcaaagcgtgggcacattggattggattactttggccgcactgtagggatcaagatcatgccagtgggagttcatatgggtcagttggagtcgggtctgcgcttgcctgatagggagtggaggctttctgagcttcaacagcagtttcagggcaaaactgtcttgcttggtgtggatgatatggatatctttaaggggatcaatttgaagcttcttgcatttgagaacatgttgaggacacatcccaagtggcaggggagagcagtgttagtgcagattgctaacccagcccgtggaaggggtaaggatctggaagccatccaggctgagattgaggagagctgccagaggatcaatggagactttggccagtcagggtatagccctgttgttttcatcgatcgtgatgtgtcaagtgtcgagaagattgcctattatacgatagcggaatgcgtggttgtgactgctgtgagggatgggatgaacttgacaccatatgagtacattgtctgtaggcagggtgcaccaggatctgagtcagtatcagaggtgggtgggccaaagaagagcatgctggttgtgtcagagtttattggctgctcgccgtcactgagtggtgctattagggtcaatccatggaatatagaggcaacagcagaggcgatgaatgaggccatttcaatgccagaacaggaaaaacagttgaggcatgagaaacattaccgttatgtcagcagccatgatgttgcttattggtcaaagagcttcatcctagacttggaaagggcttgtagggaccactttaagaggacatgttggggcatagggttgggttttggtttcagggtggtggccttggacgctcatttcagaaagcttaacatggattcaattgttaatgcttatgagatttcagggagcagggctatattgcttgattatgatggaacactggttcctcaaacttcaatcaacaaggaacctagtccagaggttttgaacatcatcaataccctttgctcagatagtagaaacatcgtttttcttgtcagtggtagagacaaagatatgttaggaaagtggttctcctcatgtccaaaattggggattgcagctgaacatggttacttcttgaggtggtctagcgaagaagagtggcaaacatgcactcaggccatggactttggatggatgcaaatggcaaagccagtgatgaatttgtatacagaagcaactgatggatcctacattgagacaaaagaaagtgccttggtgtggcaccatcaggatgctgacccaggctttggatcctcacaggcaaaggagctgcttgatcacctggaaagtgtactagcaaatgaaccagtctctgtcaagagtggccagttcatcgttgaagtcaaaccacagggagtaagcaagggaatagttgccgagaggatacttgcatcagtgaaggagaggggaaagcaggctgatttcgtattgtgcatcggcgatgataggtccgatgaggacatgtttgaaaatattgccgatatcattaagaggaatatggttgctccaagaacatcactgtttgcatgcactgtgggacaaaaaccaagcaaagccaaattctacctggacgatacatttgaagtggtcgctatgctgagcgcacttgcagatgccactggagctgaactggaatctgattcggctgatgaattggccgcatctatctcatcacttgatattggtgacgaacaatcagaaaccagtgatacaccaattggagggtcttagtcagttttctcttgaatttcagaatataatgattatttcaatagtcaattctacagaggggaagcttctcaatctgctgcactccaagtttctccagttgggcaagatagtagtctgttgctgcaaggcgtagatccatatgttcatagctgactcgccgacttggcatattctttgactttctcatttctggttgaagtaaaatgaaagcctcacagaaggaaagggaactgtgtggctgaagtaattggggtaagttataggagtggcaatttctaaaggagcccgtgccgcagcttctgatatgatcccttattaacatgacattacaaagtggtgtcactttttgaactatcggtagtaggtagtagcaatctcaagggtgaggtttaaattgattagttgcttcaaaaccagattttggctcctctgtgtttgggttatattttaattaattatccagggctagtacgctgagaattgcctaaatagtttggaaacttaaatcccttttaggattttcggggattgagtgagaaaacgagttattttttcactcaatcncccggaacactggaggagatttaagtttttaaactagcctttaggtgaaagatagcgtattttcaga

SEQ ID NO: 31916 - DNA, 166 bp, Zea mays
  Clone ID: MRT4577_129121C.1
ctcgtcatcctcgaggctatgcgcggccgtcacttgcgggtcttcctgcatgcgtgctacgagctctcggcgacgtacgtggcctaccgcgatcaggatctgcttggtgagccctggagcatgctcggctgactgccgccgggagactccattgttgtcgcaattt

SEQ ID NO: 31917 - DNA, 264 bp, Zea mays
  Clone ID: MRT4577_129122C.1
tatccaccttactcaccatggggcatctgtatggatgatacaagaaaggtgcaaaaaggagtgtggatacggctagagcgtctctgctgctgatgcatggtcattacatgtgtggcacttgaaagttaattccgttcgttggtacgccattggtcgatcgtacattgctatactgatcggtgcacagcattttcagagcgagagttagaggatttggtaaaccccccctgtgtattggacgtttggaacaatgtacttggtttt

SEQ ID NO: 31918 - DNA, 1312 bp, Zea mays
  Clone ID: MRT4577_129123C.1
gctttctgactttgtttacaggttggcttaagaattgaacatccccaaggattgataaacagtatccaatactctgaactggcagctgaagtacaaagaggacgtggacggattcctgtggcagattacaaaatagtgaagtctgttggtgaaagagacgcagagaatgaacttgacatagctgagccaactcgcagttgctactcgttttgtatgtgccctggtggacaggcaaggcactcgctctcactctccctctctgatactccattttgtaatataatgattttccttcaaatttttgagaaagcgtgcaggttgttctaaccagcacaaacccatcagaattgtgcatcaatggcatgtcgttctcacggcgtgcatcaaagtgggcaaactcagctcttgtagtcactgtatcatcccatgatttcaagccatttcaatcccatggtcctcttgctggcgttgaattccagagacaatttgaaagaagagcagctatgatgggtggagggaatttcgttgttcctgcacagtgtgtcaccgattttatcagcaacagactgtcagttacaacactgccaccatcaagctatagattaggagttcgtccatctaatcttcatgagctattccctccttacataactgaagctttacaagagtcactaataatgattgatagagagatgccaggctttgtttctagcaaggccctacttcatggtgtggagaccaggacaagttctcccttacaaatttcacgacatggagaaacatacgaaagtacatcactgcgaggattatatccaactggggaaggtgctggctatgctgggggcatcttaagtgctgctgtggatggtatgtattgtggttttgctttagctaaacaactttctttattccatggcgatatagagccatttctaggcaaaacacaaaaacaaacaggttttataaagtattgaatggactagtgcttggtattttgttgttccaattttttgggggaaaagatcgatgtcattatagctttaaccataggatatttttgtcatgtttagagcagctgtgattgccttactaaattcatcagctaatttgtgcacggttgatgtagaagggtagagcaaggcattgatgttgtaggagaggttctggtataggtatagctatgtaacaaataatttataacttcctatgtgatgccaccttaattttgtcaagataattcaccaagcataataccatatattctcttgtgtgatggattgatgaacattaatgtgaagaagattacaagctc

SEQ ID NO: 31919 - DNA, 433 bp, Zea mays
  Clone ID: MRT4577_129124C.1
gttaaaaggggcccccccacagcaaaaatctgggggaggaaccagggggcccgggggagacccccaaaaaaaaacaacccggggggtccccaggggggggggggacaaacggaaaccgcccacatggggggaccttgaaatgaaacgaaaaacccaaaggctggccggccaggcagggggaaaaaaatagagaagaaggaaaaataattggggttatcccaaggggaaacaacccccgcaacattggggttccgacaagcccccactaataaaaaagggaaaactagttcgcgacaaaaagcccattttaaggagggggattgggggggagcaccgaaaattaattttaattggccccgaaaggaaatttccccccaacacccccaaaaagggggaaaacccaaaacatggggggcctttccttcggggaaaa

SEQ ID NO: 31920 - DNA, 422 bp, Zea mays
  Clone ID: MRT4577_129125C.1
gtgttcaaaattgtttttttttttttttaatatgaattttttgttttttttttttgttggggatagggaagacacaaacatactcaagtggtggggggggggggaacacgcacaaaaaaacaaaataagaaccttttaatagaaaggatgcgcaaagtccgatccacacaaacttaaaaaccttacttcttaaccctggactcaaagccctgcaaaaaaagaccttttttccagatgccaaccctggtttacatgagggtgaaggaaaccttcccaacttaaccttcctcgtggctgaactcacccatttccatttccatccagccggcgggttttgtttgagggggcaggacgtgcactccaggagggtggggacgggtcccgcttccgagccttgggctaaatacattacccaccggccc

SEQ ID NO: 31921 - DNA, 338 bp, Zea mays
  Clone ID: MRT4577_129126C.1
ggggggggggtttttttttttttttttgtttttttttttttttttttttttttttttttttttttgaaaaaaaaaacataccccctgcaaaaatgggttacagccttgacggaacccttgcagtccaacccagggctttggttggtttcgccgacaaaccaaacattacaccttttttaatggcctaaaacacgaataaacccccttttcgaacccggtaaagctgaaagttgattccacgttttttaaggggtaactttccccccaataaactaagaacccgtatattatccggcgtccaaacttatctgtacccaataaacacccctttttatttg

SEQ ID NO: 31922 - DNA, 1173 bp, Zea mays
  Clone ID: MRT4577_129127C.1
ttggggctctcgaaaccggccgcgcgccaaaatgaaaaagcaaaaccacgcgcgccacgtggccgtggctggcccctcgccgcagcccggcacgccgcccgcccgcccgcgctagccggccatcaacctcatctgaaagaaggagtccacctgacgccgcccgcctcctcgtcaccccgtttcgcttcgccttccttcccctctctccctttattcctatcggcgctcggccaccttcccgcaccaacccactcgcccccgcattcccgggtgcctcgcttcgctttgcgcgcgattcgatccaggcttctttggttggaggcatggcctcgtcgcccgcgagcagctacgactgctccttcaaggtcctgcttatcggggattcggccgtcggcaagagcagcctcctcgtcagcttcgtctccgccgctcacatcgacgacgacatcgcgccaaccataggggtggattttaaaatcaattttctcagtgtgggtgggaagaaactaaaactgacaatatgggacactgccggtcaagagaggttcaggacaattaccagctcttactacaggggtgctcatgggattattttagtttatgacgttacaaagagggagagtttcacaaatttggctgatgtgtggaccaaggaaatagagttacactcaacaaataaggaatgcatcaaaatgcttgttggaaataaagtggacaaggatgaggacagaatggtgacaaaagaagaaggtcttgcatttgcacaagaacgtggatgtctctttgtcgagagtagtgctaaaacaagagaaaacgtggaaaaatgttttgaagagcttgcattaaagattctccaggttcccagtctcttggaggaaggttcttcggtcgttaagaggaacactctgactctgaaacaaaagcaggagaatgcaaaccgaagtggaggatgctgtcagtaggtcggccagttcttgttgcaagccactcgaggtatcatatatttaggtccttgtaagttgtattgggatgtagatgagttgtatctaaatgcacagcggcagagccaatgcaagtgatgggagaactaaccacttgaggttttggtgtgaattgatctgtacagaagaaaagccttctcttgtttttcctgtattaacaaaacaaaagaaa

SEQ ID NO: 31923 - DNA, 291 bp, Zea mays
  Clone ID: MRT4577_129128C.1
gggggtaatgtttttttttttttttttttttttcttaataacagataaacattgttcaaaaagttaatgattactccggttgttccttcctaactcatcaaggtcagccatcatagggcgtggagcctacaaaatcatggtgaattcacccaccggatcgtcggctagtaaccagttcgtacggtcaccctcagaggctttaatgcctccacactgaacgaacggatccccgcccggcttatgccaggcgtcaattcgtgatcagggtcctaggtgcctcctgcgtgaaat

SEQ ID NO: 31924 - DNA, 320 bp, Zea mays
  unsure (1)..(320): unsure at all n locations
  Clone ID: MRT4577_129129C.1
ctagttntagctaggtaggcaagggggggaacatggctccgcttctcgctgctgccatgaaccacgntgcggtccatcctggcctcaggagccccctagtaggaaccaaccatgacagtttctcacggcaccacctgccgacttcttctccacagagcagcaagcgcaggagcaaccttagctttactacaccatctgacagagtcggaagccaaaatggagaacaaatgccgaccccctcgcaaatcccacacaagggactgcctcccccctgacttcacctccgcccaccccactcacccgaaccaaattgaaggcgc

SEQ ID NO: 31925 - DNA, 931 bp, Zea mays
  Clone ID: MRT4577_12912C.1
aacgccgcggtccagtccaaatcaagaagaacccaccacgccacgctcaaacgagacgacgacgaatccagccaccgtcaccgtcgccatcgccaccgccgacacaatcccgccgcagccccccgcgagctggtgtccgaacccaacccaatccgcgctgccgaattctggtctctgccctgcccgccccgcggcgcggccttcccaccgcctctccgtccttctcccatgcgccgcgctcgctagcgaaaccgctccccgagctccaggtggtgtggtgcctggcgcgcttcacaacgccataaatgccacccatcaaggctcctcccgccatctagccctcttctccctgaccctgcgcccgtggctcggtgcggttaccgtttccttggcgcgcgcgtcagcactcagctgatgcacgcgccgttggaggccatgaacgggagggcgcggaggccggcggtggcgcgcggcgccgccccgaggaacgagaaattttctctgttcaaggcgatggagaaggagcagaggaggccacccagctcgaagacggcgccggtgtccatgaaagcgtcgcccgcaaatgcgacgccgcaaggcatgaagaacaggaaaattgcactgcagcaagacgtggacaaactgaggaagaagctgcggcacgaggagaacgtgcaccgagctctggagcgggcgttcacgaggccgctcggggctctgcctcgcctcccttcttttctgccgtctcaaacgttggagcttctggccgaagtcgccgtcctggaggaggaggtcgtccggctggaggagcaagtcggcaatttccggcaaggactgtaccgggaggccgtcatcaccaccttcatggcggctaagagcgcgtacttcctggacggttaccggagcacgccggtacggcacaagccatttt

SEQ ID NO: 31926 - DNA, 554 bp, Zea mays
  Clone ID: MRT4577_129130C.1
tttgggtttacccacgcgtccggaacaagaggatctgcttgggtaagaggggtggcaagaaaaagaccttttaccctttctataaaaaggattggggtgacatcaaggcacctgttgtgttcagtgtgcgcaacatagggaagactcttcgtatgcaggacacaaggtcccaggattgcttctgagggtctgaagcacacagtttgtgagggttgcctagctgatctttacggcgactaggatcaagcatacaggaaaattaggctactggctgaagatgtgcatggcaagattgtgcttacatacttgtggggtctgaattacaccactgatgcactgacatccgctagtgaataagctggctagacatcttactcgatagcgccaatgtgtgagtgttcaaagatcataccgaacatactacatagttgctgttcggttctgcatccggctttaccacagaggcgccccaaccaggtcaagagaacctgctttgctcaagcattccagaatcgtccgatccctcggaagatggttgatataatgatcaacca

SEQ ID NO: 31927 - DNA, 488 bp, Zea mays
  Clone ID: MRT4577_129131C.1
gtcttttttgacgccggtgctgctgcgcgggagcgggctccgcaaccggcacatcgggaagaacctccacctccacccgacggccctggtgtggggctacttcccggacaccgtgccggacctcaggggcaggatgtacgagggcggcatcatcacgtccctgcacaaggtggaaggcggcggtccgggcgcgccggcccgcgccatcctcgaggcgccggcgatgggcctggccggcgcggggacgcagttcccctgggtgtccgggcgcgacatgaaggagcggatgcttaggtacgggcgcacggtgcacctcttctccatggcaagggaccgcgggtccggcaccgtgcacggcgagcggcggttggcgtaccacctggacgccacggaccgggagaacatgcgcgacggcatgcggcgcgcgctgcgcgtcctggcctaggcgggcgcggcggaatatcggcacccaccgcagcgacgggcag

SEQ ID NO: 31928 - DNA, 284 bp, Zea mays
  Clone ID: MRT4577_129132C.1
gagtgggaattaattatagacggggggtgcatttatttcaaaaacaaaattctactcttacaccttaaaacaaatctttgcgctgctaatttgcaaccgggttagcgcaattggataaatgggagggaaaatgctctaatgtggctactaaaaccgtttattcccccgaagctgcagatggtggcttgaaagcctgatccaaaaaaacatgctatccactggcaactgcccagatcagtgcccgctttctatacaccatattttcactaacactcacaaggaaa

SEQ ID NO: 31929 - DNA, 197 bp, Zea mays
  Clone ID: MRT4577_129133C.1
aagacctgcaagttttgctacgttttatagtaataaaaaaagcagccggaatagcgggcaggggcattgccatatcctgcacggccttcgacgacaaggccgtgaacgtgccgtagtcggccgacttccgagagaccttcttaacgatgcgcaagacggcagtgaaggccatgccagtggtaacgtgctggagctcg

SEQ ID NO: 31930 - DNA, 367 bp, Zea mays
  Clone ID: MRT4577_129134C.1
aaaaggaaatagagcactttctttacatacattacaaacttttattttaatacacaaataaccaaaacaaagggaaggtataatatatgattgattactaaccaacccccaactaactataactttttcatcatcaatatagaaactatacaagtctacccgtatttgagatattagaccactatactgttttcattaacaaaaactcttacccgcacacacctcaattcttaagaaaaccaactcccatccaaaatcacggtcgtattcacggtgtaattctatctttatatcaccacggtcgcatattcaccatttgttcccttaaactccgaccacgagttcttacctgcgatcactttacctt

SEQ ID NO: 31931 - DNA, 560 bp, Zea mays
  Clone ID: MRT4577_129135C.1
ttgggactctcgaggccggccgggcactatgttcacctgtgtcggtttcgtgatgggggtgcggttcaaccacgcgtcggcgaaaggcatgtgtgcgacgcaggtcatcaatacggaggaggacatggctcggcgggtgcggcagctgaggcggctgcccgtgcggcaccgcgagaagttcccgtgcccgagcatcaagcgcaggcccgctcccgtagctgcccgtcgctggcgctggactacgacgagctcgacttctccacgggctacttcgacggagtaccagcgtccagtatcaggagcacacggcaaggttctgctccggattccacgtgctcacgtgcaagctctgtcagtgacgaagccggcatctggctctggacccgcgcgccgagggcaagctctgcttcttcgacagcgtccgacacctgctcaagctccaccgagaatactacggccactacatcttctaccgtcaagatgtgcgcgcctgccgacaccgagctggcctactcggtcgaggaggtggtcgacatcatccagaaggccaaggatgggat

SEQ ID NO: 31932 - DNA, 385 bp, Zea mays
  unsure (1)..(385): unsure at all n locations
  Clone ID: MRT4577_129136C.1
ttccttgttcgaccccttctttcgccccgcgtccggtctcccccggggggtgggggggcctcgctcgctcgctggcctgcctgcgcctcggggggcgtcggtcggccggcccgggcttctggcgcggctcgtctggcggtgcccggctgggggttcgtgctttttttttctctggggngcacatcccccttttgttggggggggggtgtgccgngggctggggctcttcctccgcgtgccgggggtcgtctgctccccggccggctgcgcgtgcccgctctccggctcctccgcgtctggctgtgccgctgtcccgtcgccggtggccacgccgtcgttctcgtcggcgctcccgttcggcgccccggcgtgctgcccccgggcc

SEQ ID NO: 31933 - DNA, 725 bp, Zea mays
  Clone ID: MRT4577_129137C.1
gccggccgggctgcgatccagcagccgccccggcgggagatactctcaactatgtacgcaaaccacagagtacgggcgaccagatcaatggcactgcggctacccatctcctctatccacgggatggactcctgcgccagagaccatctcctccaccattacctaggagggcgtgcgacgacatcgagagcttgtatcccgtcagctgccctgatcttagttgacatccgctgggcgtcgacagacggcaccacaatagactctctgctgctgaacgacagagacgtgtgggttagtctagccgatgatgacgagggcgatcaacacgattacaacctcatcgggatctgaggtcaacatcggcaaggtaacaaagggctaacaagattccgtctgatgcatcttacaagccataagctaaaatgtctacgaaataaacgtgaaaaactgatggaacgccacgtggatggcgatacatccgacgactacatgcagggcctgtactacattggacttaccgatacgcgacctgaactgcacaagagaacctgatatgctcacgaatgacatattcataagagtcgccgcaagatgcatgacactatgatcaaccagggttctacatgtgaccttaaagaacttgattctaagtttattccggaacgtattgataaacagattgagaagtctacctccagcatcttcacacattcaaacgtcttcat

SEQ ID NO: 31934 - DNA, 980 bp, Zea mays
  Clone ID: MRT4577_129138C.1
cattgggtacctcgatgccggccgggacggggacacacagagataaggcccgctccgcccgcacccggcgtcagctcgcgcgacatggcgcccgccgcccggtggtccacgtcccctgtgctcttcctcctgctgctgctcgcggcggccacggcgacgacgacgaccactacagcaaagcatgggcatccgtcgccgacgccgtggccggagcgtttccacgcggtgctgttcacgaacctgaccaactacacggaagcctccacgggcccgccgctgcgcgtgacggacctctactacgactggccgcggcggcggaacctgaacctggtgcggcaccagctgtcggacgacccgctgtacgacgtggagtggaacaacggcaccggcttctacttcgactccaaggcgtgccgcgtggagcagttccccgtgggcgtgctgccgccgtggtggctctccggcggcggcgccgagtacgtgggccgccgcgtcgcgggcgggatcgactgccacgtgtggggcaaggccggcttcatcttctactacgaggaggcgcgcacggggcggcccgtgcgctgggacttcgtcgacgtgacggggatccagcagttcgtgatgagcttcgagcccggagctgcgctggaggacgacgcgcagtggcaggcacctgcatactgcttcccggacgacgacgacgccgcaaggagcagtggtgaggaggaagctggggatgggcttgaggcggcgaccagattactcaggaagctagcaggagctgcagcaacgcattgactgtgttgtgttgtagtaataattactatgcgacatgtaccgtattaatttcgagcacaacagatatacttatgttcttgtagtactacctaattgcctagtttcctattgctgctcctgttgaaaacaaacagatatatgatccaaataatatatatatatggccaccgagctcttagtttcag

SEQ ID NO: 31935 - DNA, 321 bp, Zea mays
  Clone ID: MRT4577_129139C.1
tggaagtctaaaaatattactgctattgacttttcacggaaacacacaagcagctccttcctaagctccatagatagatcatgtaagaaataaatattctacatgaatacactgtaggggaaacaatcgtgaaaatcaactagagttggtctattcatcaggatatttatgtgatttgtgagcttcaatgtattcatctaccgagataggaaacaaccaaagtataacacagtatagccgtatagtgaacatgtagactgaatgtgatattccttgtacttcatgttcctttttaagtttgatgaaggaagtttgtaagtt

SEQ ID NO: 31936 - DNA, 1593 bp, Zea mays
  Clone ID: MRT4577_12913C.1
ttgggtacctcgaggccggccgggccctgaccacgcgcccgcggctcggtgcggttaccgtttccttggcgcgcgcgtcagcagactcagccgatgcacgcgccgttggaggccatgaacgggagggcgcggaggccggcggcggcgcgcggcgccgccccgaggaacgagaaagcgatggagaaggagcagaggaggccacccagctcgaagacggcgccggtgtccatgaaggcgtcgcccgcaaatgcgacgccgcaatgcatgaagaacaggaaaattgcactgcagcaggacgtggacaagctgaggatgaaactgcggcacgaggagaacgtccaccgagctctggagcgggcgttcacgaggccgctcggcgctctacctcgcctccctcctttcctgccgtctcaaacgttggagcttctggccgaagtcgccgtcctggaggaggaggtcgtccggctggaggagcaggtcgtcaatttccggcaaggactgtaccgggagaccgtcatcaccacctccatggcggcgaagagcgtgtacttcccggacggttaccggagcacgccggcacggcacaagccacctgcacaaccgcagagtccagagctgtctacctcgacgcgccaaggctccgatcaagatgccgctgattggccgccatctttgaggcgatccaccaatgcgatgcggacaccaagaaggcccggcctttccctgagccaaggcgactgtccggggaaggagaaccagtcgttcggcagtggcactaactcgtgcagagagttcggcctggcgcccttgagtaacgtgccaggatgcagggtacaggtaggcgccgagacacgcgcgggttttcagacaaccagtgcagtggaagaccacaaagctgttgagggcagcaatggcactggtcaaggcaaggcctcgacggcggcgaacgaagtctcggaggagctactggcgtgcctgctgggcatcttctcgcagaagagcgcatccagcggccaggacgaggagcagttgtcgccgccgtcggtctctggctcctgcggaagcagctcagcagacccctacggtgtcccagaattcgggtggcgggacattggccggtacaagcagtttcagtcagtcgacacgaacatttctgccggtgacgactccgctcttgaccagagactgaagtgagttttcattgatcgggcgctgctctggaagctctccttggttgacctagcgggcctctcccaccagcataataggctggcgttctggatcaacacctactactcctgcatgatgaacgtaagctgcccctaataaccgaggcatcctcttgcttctcacctcagcatccatgattgatccatagctttatacctcacgtcccttccctgtcgatgggggagactcatgttggtaggaacttcagttacagatttctgggaccatttggaactggaactcgtgagcaggagtgtaacctttctctcaaatttcgctgaaatttcatgaacttcagtaattttgtggaatttcgtaccacagtggtgcatgtgctttattattaatactttgttttggtct

SEQ ID NO: 31937 - DNA, 748 bp, Zea mays
  Clone ID: MRT4577_129140C.1
atgaaagtgcggtttcgggataactattgacttcaaaccagatatgagttcaggtgtggtagctcagtttttttttaactggacctgtacaaattgatatccctaaaaccatctaaataataggaccgtcagcgatgatatacagcagtctcaaacgtatctgaaaattagatacatcagaatcaagacatgctaaataacctatacaccagccttgtcgagaaacgatcagtcatgattcatgaaagcttgagatcttcaaagtttgccacagctacaaactacccaaaattgtgttatagaccaacacacttcacccacctgaacgggcgtccgatcttgaaaggaagttcatagtctttcatgaaagtcgattctctcatcgctgcctctgcttctgaccatacatacaatccccgctcttgacgaccaccagggactgtgttgtcaagtaccagagcaaccagaaatgcaatggccatgttgagtgaaagtatcgtgttgaggacatagttcaccccgcccgatccagtgtgaacaggtccatgagatgcaacaacgtatggttgaaaataagttggcactgatgagtttgcgctaggatgtacaccgtactgctggaagtaagaaggaactgatagggacaagaataaagccagcccaactataatactgtttctggagcttccagtagcactgtgacgaagattggacaagccaagagcacagagcatagcccacatgaagc

SEQ ID NO: 31938 - DNA, 186 bp, Zea mays
  Clone ID: MRT4577_129141C.1
tcctgcttccgcgacccggccatccatacggggggtttattttcagttcatggtggtgacacaacccgactcatttacgggcgaccgcgcaccttcgtttgggggccgggcgtaacccttacaccacactgcggagaacagagagcggacaggctcgagacggcctgcccccggcttaggggatcg

SEQ ID NO: 31939 - DNA, 137 bp, Zea mays
  Clone ID: MRT4577_129142C.1
tccggacttcgcatttatatctctgttgtacgatcatatgtagcgccatggttagacagtatgacgctcagccgtccccatagacggattgacgacgctagtgacatacgccaggagcatgaagaacgcgctaccat

SEQ ID NO: 31940 - DNA, 913 bp, Zea mays
  Clone ID: MRT4577_129143C.1
ggcggcgaggtcaggtgctgccagatcctcgtgtcgcgcggggcggacagggccgccgtcaactgcaacgggtggctcccggtggacgtggccaggacgtgggggtgccactggctggagcacgtcctgtcgcccaagtctctgctgcccatccccaggttcccgccctccgcatacctctcgtcgccgctcgccagcgtcatcaccctcgcgagggattgcggcctggctctgaacatgtcgtcgctgccaatggacaccatggacggcggcgccgacgacggcgacgcatgcgcagtctgcctcgaaagaccctgcaacgtcgctgccgaagtgtgcgggcacgagctgtgcgtcaagtgcgcgctggacctgtgctcggtgatcaggtcctacgacgcgccggggatcgccggcaccatcccgtgcccgctctgccggagcggcatcgcctcgttcaggagacgggccgcggcggccgaggccgagcctgacgccaatgccggcgaccggcaggcgtcgtccagcccacacaagaagcggagcacggagtccgaccaggacggcctccccctcgtctgcgctcctcccgtctttttgtcgtcctgatcagcgctgcagacatagaaatagaagctgctgtgctgcatcgtctcttcgtcggtagaaatctgcagggtacagcagcagcatgggtggatcacaggatgcatagaagctagacagacagattgtttggttctggttgctgatgctcgccttcggcatcgggggatttttttttattttcattgattttttatggggattcacatgggattagcttgtcctgctagtgtaacaccgttggatttgctgggggaaaaagatggaacattctttttggccgaaaaaaaaaaaaaaaaaaggggcc

SEQ ID NO: 31941 - DNA, 779 bp, Zea mays
  unsure (1)..(779): unsure at all n locations
  Clone ID: MRT4577_129144C.1
atttctgtagaggacctcttatgcgaanagcaaacacgaagggagcaggtggagcagtatgggttccaaagttttgaggagatcctcaggaagcggcaggcggagttgttggaacgcaatactgaggtgcagtccgacagtaacagatccgagatagatgcaatctcagctgttttgaagaaactccacacttcacacttcggttatgatgatgccttttctggaatggccccacgcctttttgacttggacggggtcgaagatgaatggaggctgcatgattttatacatccaaatgattcaatggtacacactgttatatcaaagatgaaggaaaaagttactgtggagattagcaagatagatgctcagattatgcgaaatttatctgtgatgcggcatctagagcacaagcttggacctgcttctgctcttgattatcgaatgattcttttaccccttatgagatcgttcttacaaagccatttgggagagctggtggataaggatgccaaagagagatctgatgctgcaagggaagccttcctggctgaactctccttggatgctaagaagaatgcaagcaaaggggctgatatgaaacaatcccatgaaaaatcaaaggataaaaagaagttcaaggattctcgaaaatcaaaggagctcaaggattcaagctggagcaaccagtctctcattcaccaggacagtaccgatgagggaacatcagagacatctcaaatgcttgctgattgtgatgatcttgtgtgcaaatgctc

SEQ ID NO: 31942 - DNA, 320 bp, Zea mays
  unsure (1)..(320): unsure at all n locations
  Clone ID: MRT4577_129145C.1
cggcccttctttttttttttctttctttttacttctcttttggtggcttttaaaaaangtgggcttctaaaaaaacccaactccacaaaaaangcccccccaatattaacttataccaaaacttataactctctccaccctttttccccattttttttacccttccttcaactatctaaaaaaacctttattccccccaattttaaaaagtctttccacactttatttaagcggtctttaatattacctaccttacccccacaaaaaatatttatctttatttctttccccaccccccatatatttaaaccaattcacgc

SEQ ID NO: 31943 - DNA, 258 bp, Zea mays
  unsure (1)..(258): unsure at all n locations
  Clone ID: MRT4577_129146C.1
gtttgagcatcgangcattgagcatgctcgcatacgtgagctacgaatccgcgtctaggtgtacatggctacttgaacagctgacggcttcctgagttggctgcgggctatgttcctgtttgcacttacgatggacgactaacgtcgtcgtgcttgagcaggttgcaaggattctaatgaaaaccgtctctgagttggcatccgggaaacagcctgttggcacaatggcctacatgggcaaagtgcagtatttgatgc

SEQ ID NO: 31944 - DNA, 729 bp, Zea mays
  Clone ID: MRT4577_129147C.1
cattgggtacctcgaggccggccgggacgtgaagttcgcctcgcggcctcgcctaccaccacccgtgcccgtgtcccgccgccggcggcgctggggatggcggggcccaaggcggctgaggacggctcggcggctccgctgctgcctgcgcaggcgggggaacggagctcaggaggcgtgggcggaggggccacgtccgcgcagacgctggggaacgtggttgtctccatcgtgggcaccggtgtgctcggcctcccctacgccttccgcgcggccggctgggtcgcgggctccatcggcgtcgccgccgccggctccgccacgctctactgcatgttgctactcgtcagtacgctcgcccgcccgcccatccctccttactgatcctcacactgcctgctgctcccgagcaggagtaggcgagtacagtagacgccggtcgcgttctctctcttccccaccattcgttctgctgtttgaccgggcctggcgtgctcttcgccaactttgtgctgcagcctgcagtgttcgctgtgctgttcccttccagatccgatcatccgaatggctcataaaattaaaaatcttctagatttgaagggccgagacagcagtacttgtggggatatatcctgttgtacgatcgtgcaatcaatcaatgtatatcattgattgtaaatcatgtagtgctaatgttttacatataaaaaaaaaaaataaaaagcggcc

SEQ ID NO: 31945 - DNA, 406 bp, Zea mays
  Clone ID: MRT4577_129148C.1
gggggggcaaaggaaaaccccctgggggggtttgctttttttccaaaattgcccccagcctgacaggaaaacccccccctgccaccctagttcaggggtcaaaccttcacaatccctgggcgttcgtttcattggtgacccccccagggtaaaaccaaccccggggggttatcccccccccctttccattcatttaaaacccccgcttcatcccggccccggacccggtcttttcaaccccaaaagcttgcttaagggacccaagccctttgtctaaaacattgatagcccgggggtaggcccccctcggggaggaccggccccttggggggaccccaacaaagaacttgtaccggagggggggagggagcctataccccgcaaaaaaaacatttgggtctctggg

SEQ ID NO: 31946 - DNA, 245 bp, Zea mays
  unsure (1)..(245): unsure at all n locations
  Clone ID: MRT4577_129149C.1
gacccacgcgnccgccgcgcgctaaccnagaacccacaaggggggggggcgaccaagacagccggaggcgggacgggcgccgggcggggacgagggcaaggagggcaccnacgccggcggacaccncaagcgccaggccgncggcnccagccacacccgcgngccggacggagncgccggggnccgaaccgccggcggggggggcggccacgacgggcacgagaccggcgaacgcnggacaaagc

SEQ ID NO: 31947 - DNA, 399 bp, Zea mays
  Clone ID: MRT4577_12914C.1
actgcgacggcatcaagcgcgctacgggcgacgctaccatgcggggctggggccatcaggccaagaacggcggcgccttcccaaggccgacaaggccgcgtgccgggaacccagttaccctgccgcactcagccccgcgtcccagccccgcagcctaagcctaccaagctcaggtcgagcatacgcctggacggtgctgatcctcctcgcagggcgctcatggggaagagagtggtggttctcaagcagctcagtccggcctgctccttatctctgggccttttaggatcagcggaggcccgccccgccgtgggaaccggacctatgtcattggtacctcaaccagaggtgccatttctggaggtgctgtcgccaggtttgttgaccgggtcctttagc

SEQ ID NO: 31948 - DNA, 365 bp, Zea mays
  Clone ID: MRT4577_129150C.1
acgggaaaaaactttgggtgggaccaaagtttccaaaactggaaaacaagggcagtttttacaacacttccgttttgtttacaggggtttcaagtggggtgccaaaccccccaaagtttttaatcctggagaattgtttaaaactccaggattggttaaatacgtgaaaaaaactttgttcccaaaccccccctaaaaggggggttttcccattcccccaaggggaataaacccttctcatgtttttgagggcttggccccccatagggcccaatgggtgggggggcccccttattgttaaaggccattcggaaaagcagacaagatgcccccatgggataaaaggtgcccttcttttttttttt

SEQ ID NO: 31949 - DNA, 2340 bp, Zea mays
  Clone ID: MRT4577_129151C.1
cgggagcgtggtgaccctcagtgggatgatggggatgaggagcataatgaaatggttaaagagcaccgtaagcggaaggagtttgaaatttttgttggtggactggataaagatgcaacagaaaatgaccttatgaaggtttttggtgaagttggtgagatcactgaagttcgtctgatgatgaaccctgtcacaaagaagaataaaggctttgccttcctgcgatatgcaactgtagagcaagcaaggcgtgctgtttcagagctaaagaatccactggtgcggggtaaacaatgtggcgttgctccaagtcatgacaatgatacactctttgttggcaatatctgtaaaacatggacaaaagaacatttgaaggataaactgaagagttatggtgtcgaaagttttgacgacttactacttgctgaggacactaacaatcctgggatgaatcgtggctatgccttgcttgagttttctactcgacctgaggcaatggatgctttcaggacattacaaaagagggatgtagtatttggagttgatcgtagcgcaaaggtttcctttgctgattcctaccctcaagtcgatgatgaaataatggcacaggtcagaactgtatttcttgatggccttcctccctcatgggatgaagacagtgttaagaaatatctcaaaaagtatggagctattgagaaagtcgaacttgcacgaaacatgccagctgccaagagaaaggattttgggtttgttacatttgatacacatgataatgctgttgcatgtactgaagggatgagtaactctgagatcggtgaaggtgaacacaaggcaaaagtaagggctagactgtcgagaccattgcagagaccacctagaatgaaacatggattgagaggaaattttagagttgggcatggtgccccgcgaggtggccgtttaccatattctcgtgctcctccacctcgcaggcctccgccacgtcttattcggcctgctgttagccgcttaccatccatcaggagtcatccgttgaagcggcccatagatattagagataggcgtcctgctatgtcaatgccagatagagctaggcgtttccctccagagagatcttatgacaggaggcccccagctccagtttacctgaagagaagtccaaggagagaatacgggaggcgtgatgaacttcctcctccaaggagcagagctacaactgattacattaccagagttccggttgatagacgtccctctttgagggatgattattcaccccggggatcaggttattcagacctcggtcctcgtagtgctccccgtctttctgataggcgagcttatgctgatgatagttatggggagaagtttgaccggcctttagtggcctatagggagggtcgcggccgtgattatgacaccatttctggatcaaagcgtccgtatgcagatatggatgatgtgcctcggtaccaagaaatcggtgtccgtcagtctaaggcacgtttagactacgacattggtggcagcagtgctcggtatggagatacatatagtgagaggtctggacgaccacatgcgggatatagtagcagccgatctatccctgttcatgattcagcatatggcagcagccgtcatggaatgagttatggaggttctgctagcagtgctgatgctggtggtatgtacccaccgagttacagtggtagctatgggtctcgtggatctgatgttggtgggagttcatattcttcactttactcgggtcgcaatttgggtaccagcagtggtggctactatggaggtagcggttccagttcatattactaagatttggcatcataggactttggtgtaggccctgcattttatggagctcctcgatttaagccacacagatctgtaaaagaagtgccaagcacccaagtgaggcaatgttttccaataagacatttcaacgaagccagaccatcgatttggttcgagcagtagttctgaggacgttctggcttgtttatgtaatgtaaggatttgctttatctggtcaagagttctgaacataacaaccagatatggtgttttaagtgtttcgacatgtttacttccagtgtttctataacattattgagacagatatggagtgtactttgaggtagtttctgcaattcaagttatttggggattacatcttgtgatgagccggcaaaggccaggcttacaaaagaagttttggaatgagtgcttcttgtaaggctgttagtttctgaaaccctcccttcccttctgtcttctagaggatcaataatcaccaagacagaatgttgattggtcagactt

SEQ ID NO: 31950 - DNA, 606 bp, Zea mays
  Clone ID: MRT4577_129152C.1
tatagtagcagccgatctatccctgttcatgattcagcatatggcagcagccgtcatggaatgagttatggaggttctgctagcagtgctgatgctggtggtatgtacccaccgagttacagtggtagctatgggtctcgtggatctgatgttggtgggagttcatattcttcactttactcgggtcgcaatttgggtaccagcagtggtggctactatggaggtagcggttccagttcatattactaagaaccataagttactttaagtacacagatttggcatcacctcgtctttgtggaacagatttggcatcataggactttggtgtaggccctgcattttatggagctcctcgatttaagccacacagatctgtaaaagaagtgccaagcacccaagtgaggcaatgttttccaataagacatttcaacgaagccagaccatcgatttggttcgagcagtagttctgaggacgttctggcttgtttatgtaatgtaaggatttgctttatctggtcaagagttctgaacataacaaccagatatggtgttttaagtgtttcgacatgtttacttccagtgtttctataacattattgagac

SEQ ID NO: 31951 - DNA, 396 bp, Zea mays
  unsure (1)..(396): unsure at all n locations
  Clone ID: MRT4577_129153C.1
gggggggagtaggaaaaaaaaatactccctgtttttatcccccaccactggcctcgacttgtaatcttgagcaaaaattttttacaacccgtggaaccaaaaagttttgtacaaattttaggcggaacatgctgttgtctgcattattacgggtctttgacatgaaaaccttccccaacaataacagtggtgagtccaccccggggccgggcaagttacttgcgtgtggacaggtgcacaaacgcggccacaaacagggcagccttgatcctgaccctccaggggatgccgtaatttcccctgccgccgacgaggccccttacaaacggccaaaaacaaaacaaaaaccaggcccaanacaaaaactccccaacccccgggccggcgccgccaccg

SEQ ID NO: 31952 - DNA, 219 bp, Zea mays
  Clone ID: MRT4577_129154C.1
ccacgccccacgcgtccgctaattatgcacatgctatccaatcatccctacatcacatttctgttgataattgggacggtgttagttcatcattaactcgggatccaaacacggacttaagggctactcactgtcattccaaatgaaattgctctgaatatacgcagctcatattaaggcacatgcaacgttacctgcattcatagagactactatcaa

SEQ ID NO: 31953 - DNA, 767 bp, Zea mays
  Clone ID: MRT4577_129155C.1
atgccttcgccaagacctcaccggctacattccaccattccatcctttccttatcccctcccacgttcgtcctgcctctcactggctatccttgtctctcgccatcggcaaacacatgtcacctgccgactccgctcgccatcgtgctcatgaggcgacaccggcgtgtctcgctacgaccagaatactcctcgccacaatttccctcccactcctctcctcatccacccgcggacgcggctctcgtccacttcgacaggcgccgactgtcgctcacacacctcctcatgtcctcacaactagtggaagctcaccagcgatacgatgaagaggataaggacgtagagacgctcacatgtgagatggtgagtgtgaggatgagcaagcctgccggggcaatggtgagggcatttacgttggggcgtagtcgcgagaggacgacgaggcctaggttgggaaccttccctacgacgtctacagacagggactcgcacagatcttcgaccacgtcgtggttgccgaggccttcgaggttatctaagagaaacaacctgctcagagccgtgatcttgcctgagttaccatgagcactgtggatgaagctgacaaaggcattgagatgttcaaccgttatgatattactgctacgatgcagaatgcaaacaaggtatcctcaatgtgcactcgcatggaaagcactcatagagaatttacaccagatttcagagcttatggtggcaacttgccatggcaagttgatgactcta

SEQ ID NO: 31954 - DNA, 272 bp, Zea mays
  Clone ID: MRT4577_129156C.1
tctaatataagcgaaatattgcagcaatcgaggggggttggtccgggtcttgggcaccatagaggatgttgtgggatcacattactgataaaccactgcgggcattgctagccggacgtgtgacacttgctctttgtggtggtgcacctatgccaagtgacacacagagatttacagcttttaccatagcagcggcaataacgcacaggtatggattgactgaagcttgtgctggcgcagctccgactgcatgggatgatacaattgtggct

SEQ ID NO: 31955 - DNA, 213 bp, Zea mays
  Clone ID: MRT4577_129157C.1
gtgaaccttacagaggaagagagagagagaactagggaacgcccgacacggggcgcggcgacaccccacccagtcgagcctaaaccgagactgcataatccttggcattgcacccagattatccaaattaaactctaagaaggctcttatcttgttggagcggccgttgacccctactacgtgtatgcacaacatcctgaaccacatcaacag

SEQ ID NO: 31956 - DNA, 343 bp, Zea mays
  unsure (1)..(343): unsure at all n locations
  Clone ID: MRT4577_129158C.1
tcttcctttctccctagcaatctctatcatcagataggagttctttgcaaagcggtagacttcctactctcccnatgtcccgcacgaagcatactgcgaggaagtccactggcgacaaggcgcctatgaagcatctgtccacgaaggcagttcgcaagtctgccccggctaccgtcggagtgaataagccccaccgtttccgccccgtcaccgtcgcgctccgttagatccgcaagttccatgaatagcacggagctgcttatccacatgcttccgttccagcgcctggtgcttgagatctgcccatgattttcaagaccgaccttctcttccagagctcctt

SEQ ID NO: 31957 - DNA, 527 bp, Zea mays
  Clone ID: MRT4577_129159C.1
ctcacgctctcccttttcgaacaccggtgggctaggcaggccaagttaacaatcccgaagatgaacccccctgtgggtaagaggatcacagggagagtgcgaattttggaaaacggccattgaagatgagctacaccagagagttatgcaaaaagagcctggagctgccctactacaaaaggacgtatattaccctgatcggatgcatgtatgggtggttaagctgattacaattgtagctacacaggtatattggaccatgacatacttgtctgagcaatggaggctgtcggagacaagcgtcacagttaagaggaggatcaatggaaccgctctacacagagcctactctcacaaagaatgctggtataggtgcagaccttactctctatatgcggatatgaacaccaaacgggtcgagcatagataagaacaccatcttctctgcgatgcctgcgatgtattcatcaccccggccgccgccataagcatggaaaccatagagcaagaatacatctgaatgtttt

SEQ ID NO: 31958 - DNA, 277 bp, Zea mays
  Clone ID: MRT4577_12915C.1
tggcactcctttgagggcttaccaaagggggccattacgtgcacactcggttggggcgattcggtcatggccaggctgatcgacttccctgactacacgtaaacagttaactccattaatttgcggaatctacctcgtactcgattctacatcagacctggacgagcctccgcctgcgcacaacccatgaagacgacgagggcgggcccctccagaggaaccagtctttcctgctgagctccggcaccggatacctgttccatggtggcccctaaat

SEQ ID NO: 31959 - DNA, 553 bp, Zea mays
  Clone ID: MRT4577_129160C.1
gggtaccgcgccccttctcggtttttttttttttttttttttttttttttttttttttttttttttttttttttttttttttttttttttttttttttttggggggggggaaaagaaccttttttttttggaacccccagcccgcctaaaagcggggagaaaaaaaaaacataacaccccccaaaaaagggggggtaccccctaaatatttaccggggcaaaacctacccgggggggaattttcttttgaaaaaccccattttccacccaaacctttggggcccagccaacatagggggggggggcccccaaaaacaccccccccccgggggaacaaaggccccgggggaaactccccggccaaaaaacctggccccgtaaaaaaaaggggtctgccccaggggaaacaccccggggggggggggggctccttaaaccccccccttttctcccgaaagttcttgggccgaaaggggcccccgcgcccccgaaaaagggggggttagggaaaaaattgggcacagagatttacctctccagagagagagagaga

SEQ ID NO: 31960 - DNA, 580 bp, Zea mays
  Clone ID: MRT4577_129161C.1
cctcgagccggcgggtggttcctgaaaatccgggcaccaaaccctagcacgtcgccgcttccacagccccgccacacctcgaccctcatgctgctcgtctccaccatggcgagccacggctcgtgccgtccgttgaatcctctcgtggggtctacaaatgaagctctcccaacaagagactgcacactgcgcggctcttactgcaatacgagatactgtactactgtggatggtcgagaagcgagcagagcttgacggtcgttcgccgttggaacgttcgtgtgggcgacactgatggcatgatgcatctatcagcaagatctctagttttttcacgctgttgaatcgacaggtatagcagacaaatacagaaaaagggctggcctggttaaaaaacggttcaggttagcaagcagtctggcccggttcacaatcgaaaaagggcccgtatcgagaagttagcttcacgtttgagagaaggtgtatgctctgcttccaatccagttattagctgcagcttctccttgtgtcgtgtgtggaatgtttgcttcagtacaaaaaaaaaaaaaaaaaagcggcc

SEQ ID NO: 31961 - DNA, 480 bp, Zea mays
  Clone ID: MRT4577_129162C.1
gccggccgggttgggatcctctacagacctccctacgccaacctaaaaagaacagcaagtctcactatattaacccagtacagccagaatgcccctccacatcgaatccgcacccctgctctacgcaaacgactactgggacccgaccccggcccccctgtggcacacgttaggagatgaccatgtgaacgatgcacctcctgcagatcgactcactggcgtacacaactgctcttccatctacataacaagggccacaacgatcgagacacatgaaccacattccacggacaccagtactgacacgacgcaatctgatgctgcaaaggcaagctcgaaatcatctgtgtcttctgtgacatgatcttcttcctcatccactgcaacacaactgcgtgcgcattgcacatcaagccgctcgaaacctctatacatactactgataagacaatgctcgctgacgcacgcgcttctctacat

SEQ ID NO: 31962 - DNA, 750 bp, Zea mays
  Clone ID: MRT4577_129163C.1
acctcgaggccggccgggctccacaccgcttggccgcttggcgcttgctgctgcggcccgtcggtctaggcgtctagctaagctacctcgttatttaggcgacgcttgcatagcccagggctttgacacgacgcgacgccgattaagcgacacgaggccaggtcccggtcccggtagctcgaacgaggagctaagcagaggcgccgttctgctggttggcttctgtgatggggtcgtccacggaccacggtggcgccggttggcggggcaagaagcaggggtcgcagctgtggaagaaggcgctgctgcattcctccctctgcttcgtcatgggcttcttcaccggcttcgcgccgtcgtccgtgtccgactggacgtccgcggcggcggcggcgggcagcagcagcagcagcagccacgtggtacgggcgctgccggcgggcggggccttgaaccggagcctgctggcgcacggcgcggggcctggctacgaccgggcagcgtctccgcgcccgctcctggtggtcgtcacgacgacggagtcgacgcccgtggcgtccggcgagcgggccgccgcgctgacgcggacggcgcacgcgctgcggctggtggcgccgccgctgctgtgggtggtcgtggaggccgccccggacgcgccggccacggcgcggcagctgcgcgccacggggctcatgtaccgccacctgacgtacagggacaacttcaccgccgcgggcgcgggcaaggagc

SEQ ID NO: 31963 - DNA, 532 bp, Zea mays
  Clone ID: MRT4577_129164C.1
attcggctcgagggatgctcaaccagacggttggagtggagatgcaagccataaaccacgggccagttctagcccggtagggagcattgatagagatggcgaatctgagggtactcagacaaacgtgagtgttgttccaactgtaaatcaaactggaagtcccacatcgatggtgcagaaagatgttggttctcccagtatcaacaacacagctggagcgtcccccccagtgaataacccggaacagacctggagccaagttgctcccatcgggagcagcgttacatagaataatccgaaaggaaatgctgctgctcaggtctgtgctggttcatcatagaaccattctggcgatgcaaactcttaaacttctgcaaatcacagcaagggtagcaggtcatcaataacacatgatggtggttctggtggaaagaagaacggtgataggtgcaaggaaatggctagtagcgatatggttagtgggaatggcgatagcgatgactcataccctttctaccctgagggagcgtgt

SEQ ID NO: 31964 - DNA, 417 bp, Zea mays
  Clone ID: MRT4577_129165C.1
ggcctgccggggtgcgctaagctgccccccacactctatccaaggagacgatgtctcttatcagaaaactacagaggcacaaagtttccggttcgtaaatacctcgatcaagggggggtttaaaaagccgggcgatactcttgtgtatgtggggatatggaagcccttgagagcacaacacgtggagtgtgggcaaaaaccaggacacctgtgtattttggtgctcaggactttgatctttttgagaggtggatctgatgctgatttgagggtaatatgagcatgttgacagggggccagagcagtatgttcgtgggatccctagtgataattattgtgttcgtcttcgagaagattcgtgacgaaaagaaactggttttgctcatgactattgtttgaagtgtaccgtacgcgaca

SEQ ID NO: 31965 - DNA, 1786 bp, Zea mays
  Clone ID: MRT4577_129166C.1
gtcgctcagtggcatgtcgcagatgaacttaagccataaccagctcactggcggcataccggcggggttaggctcgatgccggagctcaccctgctggacctttcgtcaaaccagctttccggcgccataccgccggcgctgggaacgctgagggtcaaccagcttaatctgtcctccaaccagctcaccggcgaggttcccgatgcgctcgcccgtacctacgaccaaagcttcatgggcaatccaggcctctgcaccgccccgccggtgtcgggcatgcgctcgtgcgcggccccgtcaaccgaccatgtctcgccgcgtctccgtgcgggcctcctcgccgcgggcgccgcgctcgtcgtcctcatcgcggcgctcgccgtcttcgtcgtccgcgacatcaggaggcggaagcggcggctcgcgctggctgaggagccctggaagctcaccgctttccagcccgtggacttcggcgaggcctccgtgctgcgcgggctcgccgacgagaacctcatcggcaagggcggctcggggcgcgtgtaccgcgtcacgtacaccagccggagcagcggcgaagcggcgggcaccgtggccgtgaagcgcatctgggccggcgggagtctggacaagaagctggagcgcgagttcgcgtcggaggtggacatcctcggccacatccggcacagcaacatcgtgaagctcctctgctgcctctcccgcgcggagaccaagctactcgtctacgagttcatgggcaacggcagcctggaccagtggctgcacggccacagcaggctggccgggaccgggactgccatggccagggccccgtcggtccggcgtgagccgctggactggccgacgagggtcaaggtggccgtcggcgccgcgcgcgggctgtactacatgcatcatgagtgctcgccgcccatcgtgcaccgcgacgtcaagtccagcaacatcttgctcgactcggagctcaatgccaaggtcgccgacttcgggctcgcccggatgttggtccaggccggcacgaccgacacgatgaccgccgtcgccggatcgttcggctacatggctcccgagtccgtgtacacgaggaaggtgaacgagaaggtcgacgtgtacagcttcggggtcgttctcttggagctgaccaccggtaggttagccaacgacggcggtgagcacggctccctggccgactgggcgtggcggcacctgcagtccggtaaaagcatcgccgaggccgcagacaagtccatcgcggacgccggttacggtgaccaagtcgaggccgtcttcaagctcggcattatatgcaccggtcgccagccgtcctcgcggccgacgatgaagggtgtgcttcagatactgcagcggtgcgagcaggcgcaccagaggaccttcgacgagaaggtcgccgactacgacgccgctccgctgctgcaggtgcatggaggtagccgccggaaacaactctccgatgccgaagtgatcgacgacgatgggaagggcggtttcgactgcaatgtctgaagaaaagcagaatgagcaatggctatgggaaccctgaccacctgaggccagaacctagcatataggacgccatgtgcttgtgcacgctctttgccagagcaaaggatagtcatcacagctcattacaacaacactgatggacagtgccaccccgtaatataggtttttatgtactgtaacagcgaaactataaaactaaatccaatcatatatttgacgaaaaaaaaaaaaaaaaaagggtta

SEQ ID NO: 31966 - DNA, 287 bp, Zea mays
  Clone ID: MRT4577_129167C.1
acggaggataacaatcataaaaattattttaaaacaaaacatacaaaaaaaaaaaggaaggctttataaaaaaaggacgacgcctatatacatcaccaacccgtctaccatatctcgctttcccttccttttctccaactgtccatgtccctacttatcctacccgccttactaccactcaagatctcatcaattcctttaatttttccgcatttaataacttttcgtctcaacctccattccctaactttcttactaacgctatcacttgcatcatctcacacttc

SEQ ID NO: 31967 - DNA, 239 bp, Zea mays
  Clone ID: MRT4577_129168C.1
cgctgaacaaccagcgctggagctggctggaggagtgggtcggctcgcagcccttcgacaaggacgtccccgtggcgcaccagtccccgtacacccgcagcgccacaggggtgagcacgacgacgtcgtcgaccggctcggctgctcggcccgccgctccttcgcccggccgacgcgcacgccgccgaggggggactgctacggcgacgcggcgcagttcccggggtacatggcctcca

SEQ ID NO: 31968 - DNA, 350 bp, Zea mays
  Clone ID: MRT4577_129169C.1
aaacccttggccaaaggggggggggggggaaaagggttttttttttgggcctaccttggagacgtttggggtaaaatggtgaattgggggttccattccgggggggtggggggtattaaatgactccctgggccgaaaaaaaatcccttgtttaaaaaggggcctttttaaaatttacaacccattttttggaaccttggggcaccccaccttttttttctggaacccttccggggcgtttttccccccgtttttctcggggggggggggtcccagagagggggttttttttcgccccggggggtgaatttttttcccatattttacacctttttttttttttttgcccc

SEQ ID NO: 31969 - DNA, 248 bp, Zea mays
  Clone ID: MRT4577_12916C.1
tctacacgctcgtctccgtctactccgacgaccgcgtcggacgccggatgctgctgctggaggacggcgtgcagatgtgcctgtcgcaagtggccatcgtcgtcgagctgggcatcaaggtcaccgaccactccgacaacctgggccacggctgggccatcatggtcgtcggcatgggctgcaccttcggctactacttcggctggtcctggaggcccctgggctggatcatccccagcgagaccttc

SEQ ID NO: 31970 - DNA, 381 bp, Zea mays
  unsure (1)..(381): unsure at all n locations
  Clone ID: MRT4577_129170C.1
ggccggtttatattttttttttttatcggaacaagaccggacttatacatnagcttgctccgctgcggctgacacatatacacaaggctattagatcaggagaaacagagaccactatcccaccgaaagaccttcccacataacatggctaagaaagcgcttatccttgtttattgtccgataccgacaatacggagggggccttgagtgcctatgtattcagcccttcaaggagaatgatctttgctgcgaatgctgcgaatttatggggcttctttcatggcctgatatggttacttttaaggggccttttatggctcgaatactaccagaggcaaggactagttcttcctgaggacttacgcgatgaacttacctgag

SEQ ID NO: 31971 - DNA, 486 bp, Zea mays
  Clone ID: MRT4577_129171C.1
ggccaaaaaaaaaaattgggttccccccaaagagggggggggggaaaaaaccaaacagccaaaagggccggaccgttttttaaaaaaacccggcttttttttttttttttttttttttggggcaaaacggaaaaaaaaaaaaaaggggggagggggaaaaaaaatgctcccatgcaaaagaaaggggccgggcccacacggggagattttttttaggagcacaaaaaaaaaaaaaaggggccctcgatcatcacccgggggtgggtagattttattttgaccaccatcgttaaaccccccggggggaaagggggaatggttggtcaaaaaaaaagggggccgtcgtcgcgcgggggttaggttttaattaaccccgaaccaaccgggggaggggcctatggggtaggggatcccccccccccccttgggggggatgctggggggtttccccgctttaaggcccttaacccccctgggggggttttt

SEQ ID NO: 31972 - DNA, 537 bp, Zea mays
  Clone ID: MRT4577_129172C.1
ttttgttttttttttttttttttttttttttttttttttttttttttttttttttttttttttttttttttttttttttttttttttttaaaaaaagaggtttataatgggtttttttccaaacgggaaaggggggaagtcaaataaaagggagggggactttttttgggggggaataaaataaaagggcattgccggggaggaaaaaaagttaaagtttttttccatgcaaatttgaaaaaaacgaaaaaagagacgacggtccggggtttaatttgtcaatgggaaccccaggaagttgaaaagggtcgccgccctggttaaactgttgtttaagaatcaattttttgaagggggggaaaaggatttctttggagaaggtgtactgttgggggggggggaattaaataaacgtgccgttccccgccgggaaaaagtagagttggaaaaaattgtatttgtgaaaggggcctttgttgaattggataacagggggggggttgatgccctttttgaaaacctggggggacgcgtggg

SEQ ID NO: 31973 - DNA, 346 bp, Zea mays
  unsure (1)..(346): unsure at all n locations
  Clone ID: MRT4577_129173C.1
tcccacttcccatgctctctctctacctccctccctccctccctccctccccctcttccgagacttctcctttccgccatggcctcctgctagtagccagctcccgtcgcaacgcctcccagatcccggacgcagcgtgccgcaccccgcgacggccggctcgcgacatgggagggtgtcacgcgaagccgctcacccacgacgcggaccgctcgccgccgcacgcagcgccggcgaccccgcccccgggctccgccacgcccgncacccccggncccgggaagaagcactgggctgcgccccccgtcctcncgtctctcacgccgagcccgagccccgcgcacca

SEQ ID NO: 31974 - DNA, 823 bp, Zea mays
  Clone ID: MRT4577_129174C.1
cctcgaggccggccgggtcggacgacgaccggtcggtggccgcggactcgtggtcgatcaagagcgactacggcagcaccctcgacgacgatcagcgttactccgacaccgccgaggtcctcctagcctcctcctccgcctcctctgttgccgcgccctccacgacggttgccgtccacccctcctccgacttcagcttcgacaaggatgtccatgactccagctacgttgagcctcccttgctgggcttgtagaattttcaggatggtgcttacgctgaggatcttgcaaatttccatgaacgcagccacgctgatgactggtttggcactgatatcatggatatccgcgtatgttggaccaaaaatttgtgctcaagtagagatttacccagctgcagcgtacttgacattgggactgggagtggcagactcttgcagcagcttgcgaagcaggggttttctgatctgactgggattgactatagtgaaagtgcaattgagcttgctcgtagccttgcaatcggtgatgggtttgagcacattaatttcttggttgatgatgttttggagtcgaagttggagagaaggtttgaacttgtcatggatgaagggactcttgatgcgattgggctccatcctgatggacctgtgaagagaatgatgtattggcagtccgttgatagcttggtttcccgtggtggtatattgcagaaccaaggatgagttggtgcaggaggtagagaacttcaaccaaaggaagcttggtgctgtgggctcaggctcagaaggattgccggccagtgaagctgcggtggtcagct

SEQ ID NO: 31975 - DNA, 1223 bp, Zea mays
  Clone ID: MRT4577_129175C.1
ggtaccctcgaggccggccgggaccaacacgtagccaacccctccgctgagtcgctgaccgcctcgcacccgtcgttcccctccttccggcacaaccagcacgcgagcggcacgagaagactagggttccggcgaggcgacggcgagagccatggcagggattcgatggccgccgcgcccccaggagagatggcgtcggacgacgaccggtcggtggccgcggactcgtggtcgatcaagagcgactacggcagcaccctcgacgacgatcagcgttactccgacaccgccgaggtcctcctagcctcctcctccgcctcctctgttgccgcgccctccacgacggttgccgtccacccctcctccgacttcagcttcgacaaggatgtccatgactccagctacgttgagcctcccttgctgggcttgcagaattttcaggatggtgcttacgctgaggatcttgcaaatttccatgaacgcagccacgctgatgactggtttggcactgatatcatggatatccgcgtaggttggaccaaaaatttgtgctcaagtagagatttacccagctgcagcgtacttgacattgggactgggagtggcagactcttgcagcagcttgcgaagcaggggttttctgatctgactgggattgactatagtgaaagtgcaattgagcttgctcgtagccttgcaatcggtgatgggtttgaacacattaatttcttggttgatgatgttttggagtcgaagttggagagaagatttgaacttgtcatggatgaagggactcttgatgcgattgggctccatcctgatggacctgtgaagagaatgatgtattggcagtccgttgatagcttggtttcccgtggtggtatattggtcatcacatcatgcagcagaaccaaggatgagttggtgcaggaggtagagaacttcaaccaaaggaagcttggtgctgtgggctcaggctcagaaggattgccggccagtgaagctgcggtgttcagctacctggaccacgtccaaagttaccctagtgtggatagttcttgcataacgaccgttgctttccttcataagtgaaaaacataattgtattgtatgcttgattgcttggtttattggccctagaaagttaccgtatacctgctacgatattaactatgtacccagtcacttgtgtatctggacaatattctactagtattttaccc

SEQ ID NO: 31976 - DNA, 343 bp, Zea mays
  Clone ID: MRT4577_129176C.1
tctagcggccacgcgttcgacgactttgagttcgtgctgggcaagcctcaggatcccggcgaggacaaggccctggccacgttcacgctgtcccagcagcttctgcagagcatcaagagcgcggtcgcccacgaggcggcgcggcgtggcatggtgacgccgccccggtgctcgtcgatcctcgccacctacggcttcatctggtcctgctactgccgagcccgaggggcggcggcggcggcggcagagaggagctacttcctcttctccgtggaccagcgctctcgcctgaagccggccgccgtcccggagaagtacctgggcaactgctgctgccctgtca

SEQ ID NO: 31977 - DNA, 1342 bp, Zea mays
  Clone ID: MRT4577_129177C.1
ttctagatcgcgagcggtcttcctttgtttgtttttttttttttttttttttttttttttccagcaataccaacccgacaaggtaaaatactagtagaatattgtccagatacacaagtgactgggtacatagttaatatcgtagcaggtatacggtaactttctagggccaataaaccaagcatacaatacaattatgtttttcacttatgaagtaaagcaacggtcgttatgcaagaactatccacactagggtaactttggacgtggtccaggtagctgaacaccgcagcttcactagccggcaatccttctgagcctgagcccacagcaccaagcttcctttggttgaagttctctacctcctgcaccaactcatccttggttctgctgcatgatgtgatgaccaatataccaccacgggaaaccaagctatcaacggactgccaatacatcattctcttcacaggtccatcaggatggagcccaatcgcatcaagagtcccttcatccatgacaagttcaaatcttctctccaacttcgactccaaaacatcatcaaccaagaaattaatgtgctcaaacccatcaccgattgcaaggctacgagcaagctcaattgcactttcactatagtcaatcccagtcagatcagaaaacccctgcttcgcaagctgctgcaagagtctgccactcccagtcccaatgtcaagtacgctgcagctgggtaaatctctacttgagcacaaatttttggtccaacctacgcggatatccatgatatcagtgccaaaccagtcatcagcgtggctgcgttcatggaaatttgcaagatcctcagcgtaagcaccatcctgaaaattctgcaagcccagcaagggaggctcaacgtagctggagtcatggacatccttgtcgaagctgaagtcggaggaggggtggacggcaaccgtcgtggagggcgcggcaacagaggaggcggaggaggaggctaggaggacctcggcggtgtcggagtaacgctgatcgtcgtcgagggtgctgccgtagtcgctcttgatcgaccacgagtccgcggccaccgaccggtcgtcgtccgacgccatctctcctgggggcgcgacggggacccaagccccgccgctgaccatcctggaagggaagatctccgggtcctctggcggccatcgaatccctgccatggctctcgccgtcgcctcgccggaaccctagtcttctcgtgccgctcgcgtgctggttgtgccggaaggaggggaacgacgggtgcgaggcggtcagcgactcagcggaggggttggcctacgtgttgcccacaaaaagg

SEQ ID NO: 31978 - DNA, 560 bp, Zea mays
  unsure (1)..(560): unsure at all n locations
  Clone ID: MRT4577_129178C.1
gttgtaggggtgtgttccttgcccaggtctttgtgagcctgtcgtgagcggngaaggtgggccctccctgttcaaacctgtactttntactgctttctctcttaattgattggtagagctcatgccttttcgttcaaaaaaaacatacatgacaatttattgtgacaacagagggtaacatctacaaggaacaaggtgaggataactgacaggatgtgggggaggctgctgtcttcaacaaaccaaccgagtttcttgagccaaaaggacatctacccggccaaaaaagccgacaaggcggccccccgcattaaaaccaaaaaggacccgaaaaacccatctcccccagggttggcaaatggttaaaaaaagtgtgcttttaacggtttttttttgtatccagtaactgctccaacctggctgagatcagtaggccaaaactgcgggggcgatgagttttactcccatttgcatgcgaacaaaattcccgtaataaaagcttcaaaggggggatttgcgttaaaaaaaaaaaaaaaaaaaaaaaaaaaaaaccccaacac

SEQ ID NO: 31979 - DNA, 317 bp, Zea mays
  Clone ID: MRT4577_129179C.1
gagaaagctcagccagagcttctcgcctgctcactgctagcaccagtggctgcgaggaaccaattcctctttctgaaccccgcttcttatttggcgcaacaaatactactgccatttaacaagctagatctacctcgtcttcctttcttctagacacagcaccattagctgcatcactacaagcagatcgcggatcaccacataaccctattacaactacaacacttggcggcctgcgtcctacttgctttgacagaccaaatccctcttctatcaacgtcacattattgagtgcgccccattttagattgattttt

SEQ ID NO: 31980 - DNA, 279 bp, Zea mays
  Clone ID: MRT4577_12917C.1
cagatccaagaagagggaagagctaccattgtaccttcggctgcccgttcaggatccacatgtcaccgatcgagttcttggtctacctttttctcttctgaccatctacaaggctctcggagtagctcgacactttcaccaatcaagtttgcatcgctgatatgaacagttatatcccaactaactttcatcccttcagggatggcgatgcttttaattaatagcggcaacctgttcatgttctatattcacttgttccctacaagaatttttattttt

SEQ ID NO: 31981 - DNA, 537 bp, Zea mays
  unsure (1)..(537): unsure at all n locations
  Clone ID: MRT4577_129180C.1
aacataacaggcggtaacaggtatccattacctaacanatcagcacctgtntacataacagtcggagatggtggaaatcaagaaggtcgtgcttcaatgttttaggatccacagccagaatattctgcttttcgagaagcaaagctacggacattccacaccttgagataaanaataggacccatgctatctaccactggaatcgcaatgatgatggcaagaaagtaccgactgactctnttgtactgcataatcagtactgtggacacaatcgcagaagaagaaaactgaagcattttctattgaaagttattgatgaagttgccagcatgtaatttgaagttgaagcactagcatanttggcgttttgaaaaggataaaaatgtgccccttgattaatatatgcagttcaatagtgtctgagtgagcgaaatgcangacgtnggaaatggttctatgtactatntggcttgtatgcttgtatttacaacgctataagaataataaatgagcttgcttggngaaaaataaaataag

SEQ ID NO: 31982 - DNA, 807 bp, Zea mays
  Clone ID: MRT4577_129181C.1
tttttttttttttttttgaagataatttttttttttttttttttgaacgataattattttttttattacacatttttcttaacatgaaaacagttttttttaaataacaaacagcctgctacatttaaataatttaatttaattttatgataactttgtcagcatttcataaatgcttgcttttattcaacacatggctttacttggctttgccttgagcagcaactgattcaatggctttccttactgtctcctcatcgcccaagaatttcattgacacaactggcttgaagttctcatctagttcataaacaaatggaataccagtgggtagattgagggccatgatcgcatcatcagacaaattatccaaatgcttgacaattcctctcaaactgtttccatgggcagcaatgataatagatttgccttctttcaattgtggaatgataacgtcgttccaatagggcagagtacgggcaatagttagtttcaatgactcgaacattgggaattcagcttctgatggaccctcagcgtaacggggatccttcacaatagtattatagtagggatgatcgggttccattggtggtggtggtgtgtcgaaactgcgtctccagatctgcacctgggcttcgccgtatttggcagccgtttccgatttgttcaatccagtaagacttccgtagtgacgttcattcagtcgccatgttttattgactggaataccttcttgtccagattccttcaggatgttgccgagggttacctgagcacgagttagtacccgaggtatgagctaca

SEQ ID NO: 31983 - DNA, 248 bp, Zea mays
  Clone ID: MRT4577_129182C.1
tggacctccttggcttggggcttcagctgaactatagactgatacctatcgcttatatcccagatgctttggctccccctttagtatatgaatagatattcctatgcgagacgtaactaatactgcgagacactgacagaatatgtcgcctttctgaaactttcgaacaaatccaagcacaatagaaagcaaagatggatgaaagatcgtatatctttaattatttaccctatagaaatattacttag

SEQ ID NO: 31984 - DNA, 394 bp, Zea mays
  unsure (1)..(394): unsure at all n locations
  Clone ID: MRT4577_129183C.1
tgggaccaggcggccttgcggggctacctggggagggggcacgccgcggccgtgcgcggggccgacgccgaggcgacgcggntcgagcggctgctccggcggcgggagaccgtggacgccgtccgcggcgacgagcgcgagcgggccgggggggggggggcgctcatggccgngctgntncgnctggacgccgtgccggggcgctacccggncatgcgggacgcgcggngcgccgtgagccgtcgngtngtnggcctggggggggtgttngnngctgttgtngnggnncctgcngngcagacttgcggggttccggtttgcctggggcnggttcttgtggggatatggggcgtnggngaggggcctgttccggtgccttcgtngncggggttgg

SEQ ID NO: 31985 - DNA, 355 bp, Zea mays
  Clone ID: MRT4577_129184C.1
ggtaaaacttatttctccatacctataacctccggtgtgtttaatgagctggaaccatactcttttaaccctcgaggtccaaacagtagtcagacctggctttggagcattattagcctcgaaccttcaagaaccggcagctgtattacatcaggctccttgggaccatccagtgggacatggcataagggcacacctactacaagaactagcgctagcaaaccttgatgcatacgcttacaatgatcagtgccgttcattcaaccaactgactgtatcgatctatgctgcttatttgtgacaactattaccattaacacaggttgttgttgaataccccgagcgttttgttcca

SEQ ID NO: 31986 - DNA, 719 bp, Zea mays
  Clone ID: MRT4577_129185C.1
ttgggtacctcgaggccggccgggatctcactgccggccgccacccgctctccctccgctccggccaccaccgcgcgtctctctatttgctgccagacatatccaaatccgatccatcagctagcgtccatggatgaagtgtggtgcggcctggacctgcagctgcaggcggacggcatccacgctggccctgacctccatggccatgaccatgaccccttctggtcagctctggcagagtgcgctgccagcttcctcgccggcgacgccgacgacatcggcggcctggtggcctccgctggcgacgtcgttcacgccaaggcggacggcatggacaccagcagcttcttcgccgacaacgaccaccacggcctgaccctgcgccgagacgagcagcagcagcagcagcctgtgcactcgtcgtcgtcgctgtcctccaagcgctcgctctccatcgacagcgggggctcctcgtcctccaccttcatcccgccgctcgacggcgccgccgctgccgccttctcgccggcgcccccgcagccgcaggacccgttcgccggggacgacgaggccatcatgctggccatgatggccgtcatctcctccgcgtcgccttcgtcctccgagtcctcgtcgccgccgcaccgagccgccgcggccggcgccgtgcagccgcgcgtacacctgcacgggggggacgagggcacgacagacgcgac

SEQ ID NO: 31987 - DNA, 799 bp, Zea mays
  Clone ID: MRT4577_129186C.1
cggctcgagggtgttcaatgcgccgttctgggtgttccacaactacgtcctcggtgatttcacgggctctgcaaggatcgtggcgctgcactttggttgctgtgtttctttggtctgctgtatcgtggtttctaagacatttgggctgcccagaagcttgggctgcttcggatcgggtggtgctacagactacacgcagtggctattcacacgcagtggctattctgctggccttgcgtgcttgcacaataggtgcgcacggggaatctatacgatgcgaagaacggcagcttctatgagaaagttatggacggcgatggtgtggagactgatgtgggatccgtggatacggctgaattgccgatctctagtggagtagaagaggcgaacggtaccgatgtcaaactcacggtggatggtgaaatgatcccacccacccaatcagtaatagaatttggggagagggaaggaatcgattcagaagtcgtggcaaatggcggcgtccagctcaagagctaacccgcaactgaaggatgatttgagttatatggtatttagctgttcagttgcttagtgatttagcttgttttatattacaaggacgatggaacgaataggcgataatgccagagatatctaaactgatgttttagaggtgcacccccccaggaaaaaaaattcatacactttgttacaccgattcatttcaacagcaggcttgagcctcttgtagagcaattgtgcaagtcggctaatgtaatcagtaactttagaagctattattggttggtgacagttg

SEQ ID NO: 31988 - DNA, 263 bp, Zea mays
  Clone ID: MRT4577_129187C.1
gtgggaggtcattttatttttcattaaccctaaccccaagaagggaattaagccactagaaaacggttccgcgtagcagagcaagcaatcattctacacaggggccgtgaccgtgcccatatgaggaactggtgaacaaacacgcgtgggggacagtcatgtgggttacatcccaccaaaaaccaaccggctatagtttgggcaggcctgcttggaaaacacgctgtcacgggttttagaggtgtccatcgtttaccccccct

SEQ ID NO: 31989 - DNA, 420 bp, Zea mays
  Clone ID: MRT4577_129188C.1
ccggccgggcacgtcatcaaggcgcccgacctggacgtccagggcatggagggcgtcgtcaagcagtacgtcggcgtgtggaagggcaagcgcgtcaccgccaacctgcccttcaaggtcgaggtccagctcgccgtcgagggccagcccaagcccgtccggttcttcgtccacctccgtgaggacgagttcgagttcgtcgatggggagtgatgtgacgggcgtcagacagagcgcgtccgagttaaccgttcttatagattatagaataatcatggccgcggcggtcgcttgtgtcttgtgtatattgttccggcggcgtagtaagcttgcgagtggtaaatgtttcagctgttgagaattgttcggagttataatagcgatcattttgccaaaaaaaagaaaaaaaaacccgcggac

SEQ ID NO: 31990 - DNA, 456 bp, Zea mays
  Clone ID: MRT4577_129189C.1
aaataaccagtcgctaattctaagaagcaacatgaagggaagctctctcctgagttaagactgggcggcggcgagcctgcacgcgccgaacgaacgcgcgttccatgacacgccctcctcggccatccacaccccatcgtcgaagttgcgcgcgtagctggccgagtcgtacccgtacctcgccgccgccgccttcgcccgcagcggccgggcaacccacagcctccgcgcggacacccgccaccgccgcgcggcgtacagccgagcgacccctgccgctgcccgcctcagcgaaacccacgccctcgcggcgccaccctcgggctgcgacgacgacagcctctggtaggacgtgactcgcatcgcggagctcgtggccggcggcccggcttgaccggagctggagctggggcttagcttctgatcgtcctactaatgtgacgtgcgcacgccgac

SEQ ID NO: 31991 - DNA, 253 bp, Zea mays
  Clone ID: MRT4577_12918C.1
gtacaagctttttttttttttttttttttttttttttgtggttattggaagactgaattaatgtggtgttattagcccacgttttgatgtacgcgttaaggaaattctgggaggtacggctaggttttttccatttggcaattagtgaacttgctcttgccaccttctgctggaattatggaccatgaggaggcccgccgtaagaatgttgttggcaagtgtctaggttcatttatttgaaaaccattttttt

SEQ ID NO: 31992 - DNA, 286 bp, Zea mays
  Clone ID: MRT4577_129190C.1
ggaaacaagcactctggaacatttttttatttccttttcttccttttctttcaggggaaactgctatccatgccatgcgcgcgttcgctctgtataatcattatagttttgggcaacctgtccgcgacccccccggggtacaatttactggtcgtcgtcttcgtccgagtccaactgtttgagcagggcggcgcaaacgggctggccaccaacaccacctgggaaatgtcctcctcgggggtgtccttgaactcgatcgtgtaggggccggtcgccggacgcgtgg

SEQ ID NO: 31993 - DNA, 782 bp, Zea mays
  unsure (1)..(782): unsure at all n locations
  Clone ID: MRT4577_129191C.1
gccggccggtttcgagatggggaaatatgctgaaaggtttcgccagtgttgaatccttaaacttagctaaaactatgtctcctgaagaatacagagctcgtaaagttgctcttgtcacaggtgtcactggtcaagatggttcttatctcaccgagttcttattagaaaaaggatacgaggtacacggtatcattcgcagatcttcttctttcaacacaggccgtattgaacatatttacagagatagacacgaaactggcgtcaagttcttccttcactatggtgatttgactgattccacttgcttggttcatattgtgtccaaagtcttacctaccgaaatctacaatttagcagctcaatcccatgtcaaggtctcctttgacatgtctgaatacactggtgatgtcgatgctctcggcacacttcgtctcttggacgccattcgtacttgtggtttaactgatcgcgttcgcttctaccaagcctctacctctgaactttatggtaaagttgtcgaaacacctcaaaaggaaaccacacccttctatcctcgttctccctacggtgtcgccaagctctatggttactggattgttgtcaactaccgtgaatcgtacgagatgtatacttgtaacggtatcctgttcaaccacgaatcacctcgtcgtggccgtacctttgttacccgcaagatcacacgtgctgtagctgatattcatttangccgtcaagactgcctttacttgggtaatatcgatgccaagcgtgatggggggcat

SEQ ID NO: 31994 - DNA, 425 bp, Zea mays
  Clone ID: MRT4577_129192C.1
gggggggcaaaaggggatttgatttatataaccttttataaaacattcttgggattctctctctctctctctcatatttacggggggggaatttacatttggtttgccaaatccccccccctattttttttttaaaacgtatacaaaaaattccctgggaaaagagggccttaacttcacttttactttcccccggagaaaaaaatgaacaaaaaaattgggcccaataaaaattggccaaccccccccgggatatatatgggtatttttttacacccccctcgtccctggccagcctgtttagccttgcgaacattccccccctgggccccctgttgtccccccccccccttgtctggatgtaattctccccgggggcccctaaacgggcccgggggttgggccccccacacatggcccccccc

SEQ ID NO: 31995 - DNA, 249 bp, Zea mays
  Clone ID: MRT4577_129193C.1
ggacgcgtgggtgctcttaacgtggatgtgaatgagttccagaccaacttggtgccctacccgaggatccacttcatgctttcctcctatgctccagtcatctctgctgagaatgcctaccacgagcagctgtctgtggccgagaatcacaacagcgctttcgagccatctccatgatggccagtgggatcccggcatggtagtacatggctgctgcctcatgtaccgggtgatgtgtcccaggatgtg

SEQ ID NO: 31996 - DNA, 319 bp, Zea mays
  Clone ID: MRT4577_129194C.1
gtcctatccatccggcacgcccagcctccctccgctgctgccctgctccggctccggctccggctccgacatgggcctctcaacagtttactccccggccggaccgcgccttgtgccggcccctctcggccgatgacgctctggccagccccgacgtccgcgccgagccccgctcgccaccgtccggtgctccgccgacgccgccaagcaagcgcaggatggcgtggccacagcggtcgctacggaggcgccggcatcccagaaggagagcttcggtgactactgcaccacgtactacctcaaggcggcggacaagacc

SEQ ID NO: 31997 - DNA, 596 bp, Zea mays
  Clone ID: MRT4577_129195C.1
ttttttttttttttttttttttttttttttttttttttttttttttttcctttttttttttttttttttaaaaacaaagggggcccgggttttattttaaaacaaaaaatttatttaggatttggaaaatttgggggaagaccccccccccaaaaaaacggggccctttttaaacccaaccctgccccaaacagaaaatttttggacacccccctttgggggggggccccaaacaacccgggcccatggggggttaaaaccccccatgttttactgcccccccgggaaacggaccaaaggggggggggggccctcttttgggagggggaacccgggaggggggggcccatcccccaggtgttggccggaaaaaataaaaccctgttggcccggggggaccccctctttggccgggatcttccccttcacatgggggggggggcccgacccctcaccccccagggttggggttttcccagggggggtcttaaaaaaaatcggcaaccccccccggggggggaaaaaaaggggaggggggctctcctttgggaggtggaaccccgggagaggggggccatcctcaagggggttgcccg

SEQ ID NO: 31998 - DNA, 2564 bp, Zea mays
  Clone ID: MRT4577_129196C.1
cactcactccccttgcccccatccagcaggctcgccggggacactccactagtgctctgcgctctgctctccactcacgaactccctcactccccccccttgcccccatccatcgctcgacggcgggaaaatcctgaatcgagttcgagtgtcttcaggagcatagcgagacaaactcacgaactcactcactcactccccttgcccccatccatccgctagccactagctccagcaggctcgccgccgacactccactagtgctctgctctctccgctccactcacaaactcccctcgctccccccccccccaatcggcgatggatctgctgctgcggcggcggctgctggccgtggtggccacggcggcggtgctggccgtgtgcgccttcacggcggcggaggggttcgacatcctgcagatcctggggaagcacgacgagttctcgcagttctgcaagctgctcaacgagacgcacctggccggcgacatcaaccgcgaccgcacaatcaccgtgctggccgtggccaacggcgacatgggccacctcgccgccggccactactcgctcggcaccatccgccacatcctcgagctgcacgtcgtcgccgactactacgacgacaagaagctcaagcagctgtcgcacgccgccaccgccgcgtccaccttgttccagcgatccggatttgcccccggcatggcaggatacgtgaacataacgcagcaccgcggcggcaaggtgtcgttcatcgtggacgacgcggcggacagcgtcaagcccgtcacctacgtgaagcagatcgagagccaccgctacgactactcggtgctccaggtcagcggcgtcctgtcctccccggaggccgaggcacccgtcgccccgccggcgcccgtcaacctcaccgacatcctctccaagaagtactgcaagagcttcgcgggcctcctcgccgccgaccccaaggtcttcgacaccctcaacggcaccaaggacaccgcgctcaccgtcttctgccccgtcgacgcggcggtggccgccttcatgcccaagttcaagaacctcacggccaaggccaagacggccatcctgctgtaccacgccgtgccggactactactccatgcagttcctcaagtccaacaagggcaaggtcaccacgctcgccaccaccagcgtcgccaagaaggactacacctacgaagcggagagcaaggacgacaccgtcacgctcgacaccaccgtcgtcacctccaccatccaggccaccgtcagggacgacgacccgctcgccgtctacgcttgctccaagttcctgcagcctaaggagctgttcaaggccaaaaccgctgatctcgcgcctgcgccggctccacaagggcccaagaagaagagcaagaagaagcccaccggcacttcggcggcctccgcgccctcggacgatgaatctgcagatggcccgtctgccgacgacgactcgtccgatgatgccgcggacaaggctgccgccgcgccgtcgtacctgtccgctcgatgggtgaccgccgcagtgacgaccgccgtcgcgctggcgctggcggcgtaaggtgtgcgctcatgtgctatgttttttttataacttattggaccccctatcttcttttcttttgtccaagtcgtgtcccttccttgttggtgaacaaaataagaagggctatttttgtttttttatatttattaccgcattccattaaaaaaaaattagaggtgtgtgtgagtgatgtaagtcttgattttgttcattgggttgtggtgatcattttgtaatggtagtggccaatggaattggagagtgggttaagttttcacatatgatactatatataaggcatcatatggagtttagaggtgcagccagtgtttgttgtttacacaaaaaataagatccgttcagaaaaaaagatgatgccgcggacaaagctgccgccgcgccgtcgtacctgagcagtggtaacaacgcagagtacgcggggaccgccgtcgcgctggcgctggcggcctaaggtgtgcgctcatatgctatgttttttttataacttattggaccccctatcttcttttcttttgtccaagtcgtgtcccttccttgttggtgaacaaaataagaagggctatttttgtttttttatatttattaccgcattccattaaaaaaaattggaggtgtgtgtgagtgatgtaagtcttgattttgttcattgggttgtggtgatcattttgtaatgatagtggccaatggaattggagagtgggttaagttttcacatatgatactatatataaggcatcatatggagtttagaggtgcagcagtgtttgttgtttacacatgctttcaaaaaaaaaaaaaaataggatattaccctgtacgtaacctattagaacgaataaaactaggttcgtatctttagaagtttaggatgtctccataataggaaggagagactctagcggtcggtgtcagagtcgatgtacaatggtgaaagtgtagaggcatcaatcttctccttaccgtgttagaat

SEQ ID NO: 31999 - DNA, 335 bp, Zea mays
  Clone ID: MRT4577_129197C.1
cataataatcatatatttacatgttatggaataaaaggagaaacaataattcaaaaataaattttttaacatgaaattatcaaagcataaaaataaaatgtggtaaatggatttccatatcacagaaaaaaaaagaaaattctcagccaaaaatatgcgagtcaaaaacaggtttgaattgaagataatttgttaatatcttaaaagtaaaaacaaacctaaaaaaaacaagagagtctcaaacttgactaatcaaagtttgaataataaagtaatgaagtatttacagtattcacatccctgattggaaaaaatttaggcttcaaccgttgttt

SEQ ID NO: 32000 - DNA, 2300 bp, Zea mays
  Clone ID: MRT4577_129198C.1
gccggccggtccgggctcgatgtgcacctggctcttggactgccgggaaaccattcaccattctaaaaaaaatccccgatcttactacctttctcctcctctctctcacggtctcacctctagtttccaggatgacaaattatgagatcagattcgattcgtgagcctgtagaacaaggatgctcctccaatccatactaaattgaacccacgcagcagacatccgcgcgcagtacgtccccttcgcgcccatcctcacccgccgccgagtcgggcggcgcatgcgccagcgttcctattcggcgcattcctgggcctggtccgtgagctggctgctacagctgcagctttctcgaagttgactgtacaggatttgaggaagctcatcccacccgagttttatccatcatgggtttcattcacacaaaagcagaagcttaaatggctgaatcaagagctgacaaaaatctggccatttgtcaatgaggctgcatcagagttgatcaaaacttctgtggagcctatttttgagcagtacaagtcattcatcctggcctccctccatttctcaaagttgacacttggtactgttgctcctcagtttactggtgtttcaatcttggagagtgatgattctgccatcatcatggaacttgagttgcaatgggatggcaatcccaatatagtacttgacatccaaacaacacttggaatttctcttcctgtacaggtgaaaaatattggattcacaggagtacttcggctcatatttaaaccgctggtgtctgaattcccctgttttggagctgtttgctgttctttaagggagaagagcaaggtggaatttaccctcaaggttattggtggcgaaatgactgctattccaggaatttctgatgcaattgaggggacaatacgtgatactattgaggatacactgacatggccgaatcgcataattgttcccattgtacctggagactatagtgacttggagttgaaacctactggggtattagaagtaaaactggtggaagctagggacctaaagaacaaggatcttgtgggaaagtcggacccttttgcattgatatacatacgtccattgcatgataaaacaaagaaaagcaaaacaattaacaatgatttgaatcccatctggaatgagcactatgaatttgtggttgaggacatatctacgcagcacttgactgtaaaaatttatgatgatgaaggactccaatcatcagagatcattgggtgtgctcgagtagacttagctgatatacagccaggaaaagtgaaggatttatggttagatcttgtgaaggacctggaaattcaacgagacaagaaacctcgtggtcaggttcacctggagctcctctactacccttacgctaagcatgaaggggttcctaatccttttgctaatcagattcaactaacttcattggagaaggttctcaaaaccgagtctaatggatatgatattaatcagaggaaaaatgttattatgagaggagtcctttcggtgacggtcatatctgcagaggagttgccacctatggacattggtggcaaggctgacccatttgtggtcctgtacttaaagaagggagaaaccaaaaagaagacgagggttgtgacagacacgctaaatccaatatggaaccagacatttgatttcatggtagaagatgcactgcatgatttgctcatggtggaagtatgggaccatgatacatttggaaaggattacatagggaggtgcatcttgacactgacgagagttatactcgaaggtgaattccaagatacctttgtcttgcaaggtgccaaatcgggaaaactaaacttgcatttcaagtggacgccacagccaatctatcgtgatcgtgacagggatcagtgagacttgtaaacgaaaaaggccgataaacacttatccccaacgatgctatgtatattagtcgttctgtatttacaaaatcccacggttcttatagccacgtgaccaaaaagagatcaacccaccgacctgtattttctcctttgtgatgcaagtcagcaagtgcatggacctgtatatttgagtcgtgaatgaataggaaatgctgttactatgctgcaagcacatatatgcttagtggtgccgtggtggtggttgcttctgtgctgctgtttgttcttccggttgttattatttccataaagaaaaaagtttttcatttcttttttctttaaaaaaaaaaaaaaaaaaaaaaaaaaaaaaaaaaaaaaaaaaaaagaattaaaaa

SEQ ID NO: 32001 - DNA, 2207 bp, Zea mays
  Clone ID: MRT4577_129199C.1
ccgtccgcccacgcgtccgggctcctggaagtggttattgacagaatttgcattgtattatggggtttcagatgcctacacgaggttgaggtacctgtcttatatcatggatgttgcaactcctaccgctgattggctcaatctggttcacgggcttttgttacctatactgatgaaaagcgatggtactgctactttgagccaccaagagaaccgaatactgggagaagttgaagagcaaattgagcaaactctagctatggtttgtgagaattacaagtcgctagatgactctataccgttgggtttggcggaagattttaggcctccaactggattggctgctgctgctctggaaccagctattaagttgtacagtcttctacacgacgtcctatctccggaagctcaactaagattgtgtggttacttccaggcagctgccaggaagcgtacgaggcgttacatgattgaaactgatgagtatgtatcaggaaattcagaaggcttcagggtagacttggtaaccgttaccacggcttaccagaagatgaaatcattatgcaacaatctacgaagtgaaatttttactgatattgaaatccataatcagcacatacttcccagttttgttgatctgccaaatttagctgcctccatctatagtgtagagctgtcaaatcgtctacgcgcttttcttgttgcttgccctcctgctggtccagcatcacctgttgctgatttggtggttgccacagctgattttcagaaggatctggctagctggaatatctgcaatataaaagcaggtgttgatgcaaaagagctgttccatttgtacattgtattgtggattgaagacaaacgcaggatgttactggaaaactgcagactggacaaggtcaaatggtcaggagttaggacccagcatatgacaacaccttttgtggatgagatgtatgatttgctgaagaagacattgacagagtacgaagttatcatttgtcgatggccagaatacatattcgttctcgagaatgctattgcagatgttgagaaagcggttatcgagtctctggaaaaacagtatgcagatgttttggctccactgaaggattgtattgcaccaaaaaatttggcctcaaagttgtccagaaactcacaaagcgcaattcaacggtgccctacactgtacctgaagatcttggcattctcttgaatacattgaaaagattacttgaggttttgcgacctcggattgagagtcacttgaaatcatggagttcttgtatacctaatggaggaaattctgcggccattggagaaaaacttagtgaagttacagtgacattgagagctaaattccgaaattacatgcaagcagttgttgagaagctttcggagaatacccgtatgcaaaataccacaaagctcaaaaagatcattcaggattcaaaagagttggttattgaatctgatatccgcagcaggatgcaggccttgaaggatcagctaattgaggcaataaatcatgtgcacaaagtatctgaagtacatgtttttttagccatatgccgaggtttttgggaccggatgggacaggatgtgctgagtttcctggagaatcgcaaagaaaacaaagcctggtataaaggtgcacgagtcgcaatctcagtattggatgatacttttgcatcccagctgcaacagctgctaggtaatacagtcccaccgaaggacctagagccacccagatctatcgtggaagttcgttctattctctgcaaagatgcaccccgccagaagaattctagtttctattattgatgatcaggcttaactgtacatagtagtcatgcgctgcgcgtgcagcttttctcttggagagaaaagctccaaagtgcccaaatagccggatctttataaagaaactagaggaggctcaatggtatctgagaagcttgccttgtgttacaccatatctttttgctagttaaattggctatgttcccattgcctgtggatgtggactacattcggaaagtggattgtgcttcagagtgtagtccaattgacattgtaggttagcttcattggtaacacttacctgtggttaagcagttgctctatttgttcttagggatttttttgaaacaacaaaaaagaactttctggtttaaaaaaaaaaaaaaaaaagcggcccaaaa

SEQ ID NO: 32002 - DNA, 404 bp, Zea mays
  Clone ID: MRT4577_12919C.1
ctcttccccggcccaaaaaatagaaggcgacgggtttttcaaatagggaaggggccgtgacaaaaacaaccatttggcagcacaacattccgggacccgttaaaaaaaaaatggaaatcccccccccaatttttgaagaccttaacccacagccttgtttggttacatggaacgcatagcccgtttttaaaaaaaataggggtgggccttcttccaccgacactttttggggactggtttaccctcctttcccaggtttggaattggggggggcctttatgggacctgggattaattggcccccatgttttgcctttaggggagcctgaagggccctctcactgaggaaagacttgctgcacgatttggaggggcccgcccccccaaatttgggcccaaatttt

SEQ ID NO: 32003 - DNA, 750 bp, Zea mays
  unsure (1)..(750): unsure at all n locations
  Clone ID: MRT4577_1291C.1
gcatccagctccttacttctctcgttcatccctctttctcatccctgtgcttccactgatatgcagctctggatgtgaagcctccaaagtcgctggtgccccccgttccgccggagccagcgccgccaccggatcccgtcccctcccctcccatcctctctgtgtgtgcatgtttctctcatttcctcatatcgttctatgcttccaggtcgtcggcgcacgcccggccatggcgcggtcgcggcagaccttgagctggatccgctccccgtacagcttgcacgccagcgtcctcttgtagtccttccccttggagggcgacccctcctcggcgccatcggccaggttctccgacgaggtccgcatgtgcacgcgtcgcgcgatggacgttgacatcagggggctctccctcccgtccgtgtcctcgagctccgccttttcctgcggctctgacgcaggctgctgcacatcctcttggtggtcttgtccgtcaggttgctcatcttcttcagcctgcatgtccttgctcctttgttgttgctggtcttcctcgattctcccaatggagccaatttcttcagcttgcaagtcttcgctgcattattcggccaccttcgactccgccaattctttcttgacatctacaagttcctcctctggtaactggctaattgctttcggtcagattctttcttgaggaaagtggncttcactctgnntttggtcgcaaagattcagtatcaattgcat

SEQ ID NO: 32004 - DNA, 537 bp, Zea mays
  Clone ID: MRT4577_129200C.1
aaatcttacggcagatcatgactatgcctagcatatccattcattcacaactataactagaaaatgtgatggaattaaaatgccatagagccaattctacggtctaacctcatactagttaaacctgtaaacctgcacctaaacctggaaaagacatgcaaattgcatcagctgacctgaccacgaggtttcttgtctcgttgaatttccaggtccttcacaagatctaaccataaatccttcacttttcctggctgtatatcagttaagtctactcgagcacagccaatgatctctgatgattggagtccttcatcatcataaatttttacagtcaagtgctgcgtagatatgtcctcaaccacaaattcatagtgctcattccagatgggattcaaatcattgttaattgttttgcttttctttgttttatcatgcaatggacgtatgtatatcaatgcaaaagggtccgactttcccacaagatccttgttctttaggtccctagcttccaccagttttacttctaatacccca

SEQ ID NO: 32005 - DNA, 463 bp, Zea mays
  Clone ID: MRT4577_129201C.1
aaaaaaaaaggggggggggcaggagccaaaccagggccgggaaacaccggaagggaccaaaaaggggaaagggggggcacgggggacagggggggggggggaacccgcacaaacaaaggggaaaaaagggggaaaaaaatagagagacatatagagaagcaccccaaaaacaaacatgaccaaaccgagccaaaaaaaggcccaaagaacgccctgaataccaaccaaaacaaaacccaacccagcaaaccgacccagaaagggccaccaataaaaacaaacctggcaaaaagaaagatcgggaaggctctggggacgggccaaagggggcaaaaagcatgccaccaagaaaccctaggaaaacaggcaaaacaaaagcccgtcaaaaaagatggatgggacaaacagcataaagggaggggcttaatccaacccttttaaagtcgggaagaggggggccaaa

SEQ ID NO: 32006 - DNA, 1458 bp, Zea mays
  unsure (1)..(1458): unsure at all n locations
  Clone ID: MRT4577_129202C.1
tttcgttcggctcttggccggccgggacccttcaccattctaaaaaaaatccccgatcttactacctttctcctcctctctcacggtctcacctctagtttccaggatgacaaaatatgagatcagattcgattcgtgagcctgtagaacaaggatgctcctccaatccatactaaattgaacccacgcagcagacatccgcgcgcagtacgtccccttcgcgaagcaccgccatcctcaccacgccgccgagtcgggcggcgcatgcgccatggcgttcctattcggcgcattcctgggcctggtggtgggcgtggccgtcgtgatggcgttcgcgcgattcgagaacagccgcgccgagcagcgccgtgagctggctgctacagctgcagctttctcgaagttgactgtacaggatttgaggaagctcatcccacccgagttttatccatcatgggtttcattcacacaaaagcagaagcttaaatggctgaatcaagagctgacaaaaatctggccatttgtcaatgaggctgcatcagagttgatcaaaacttctgtggagcctatttttgagcagtacaagtcattcatcctggcctccctccatttctcaaagttgacacttggtactgttgctcctcagtttactggtgtttcaatcttggagagtgatgattctgccatcatcatggaacttgagttgcaatgggatggcaatcccaatatagtacttgacatccaaacaacacttggaatttctcttcctgtacaggtgaaaaatattggattcacaggagtacttcggctcatatttaaaccgctggtgtctgaattcccctgttttggagctgtttgctgttctttaagggagaagagcaaggtggaatttaccctcaaggttattggtggcgaaatgactgctattccaggaatttctgatgcaattgaggggacaatacgtgatactattgaggatacactgacatggccgaatcgcataattgttcccattgtacctggagactatagtgacttggagttgaaacctactggggtattagaagtaaaactggtggaagctagggacctaaagaacaaggatcttgtgggaaagtcggacccttttgcattgatatacatacgtccattgcatgataaaacaaagaaaagcaaaacaattgtaagtgcattctcttgtttaaggcagatgaatgtcatcctaacttattcttctgcagaacaatgatttgaatcccatctggaatgagcactatgaatttgtggttgaggacatatctacgcagcacttgactgtaaaaatttatgatgatgaaggactccaatcatcagagatcattggctgtgctcgagtagacttagctgatatacagncaggaaaagtgaaggatttatggttagatcttgtgaggacctgnatatcaacgagacaagaaa

SEQ ID NO: 32007 - DNA, 405 bp, Zea mays
  Clone ID: MRT4577_129203C.1
ctctacctcctctcttctccgaactcccatctcacctgactcgtcgtgttaaatgcgtccgccactcaccacccgcccctgcccacctgcccccagtgaacacgcgcttatgttaggtttgaggcggccccttaaccaaacggcgactccacccgtacgcgaacctttgcgggcacacaatcttgtctctggaaggcctgtagctacgcattagaaaggaaaccaggtgctccatcacatagtccatgtgcaatatatctaatgtgagacggaccaccgatgcccctaaccaacacataaggatgaacatcataacggcacctactgcctcaagcgttcagttgtgccgccatcgatgctgaggacgtctagccataggctacctagtgccggcgcaccacctac

SEQ ID NO: 32008 - DNA, 349 bp, Zea mays
  Clone ID: MRT4577_129204C.1
accaaatatcttgacattgatgctgattcgcctaattacctgcaacttggtgagggtctggatgcgctggtctagagggccaattaatacgatttaaggaacccattggacgcatataggctaggtgctaggccacggaaggacccaacctgtgtataaatcactgtatcttcttaggcagcgcgggaaccatgtacatgtgctggctgtgccttacagtgatgacaaccgagcaacatcaagccagtctgtctatgcgctctatagactgggtgatgatcggtcacctccccgccatggatccgggtagcggttgcttcacctcggtagcaactgttgacgaatttgt

SEQ ID NO: 32009 - DNA, 106 bp, Zea mays
  Clone ID: MRT4577_129205C.1
ggggagccgctccggctcgtgtccaagcgcttcggcctcagcgagtccacctgcgacaaactcgtactcaaagtctacgccgccatcaaggccgtactcatgcccg

SEQ ID NO: 32010 - DNA, 194 bp, Zea mays
  Clone ID: MRT4577_129206C.1
attataataatatcttttttacaatcttatttttatcataaataattgattaaataaccaggccggactaagtatgcatacttccctctccttttagccaataatataataaatcatagagggagctttattacattaactaactgccacctaggattatgacaaaaatggtacaaaaatgcccacactgcatg

SEQ ID NO: 32011 - DNA, 299 bp, Zea mays
  Clone ID: MRT4577_129207C.1
atccacaactgcctcagttatcaaagagttacatgagaatcaagtgagtcccatttagtcctgtaatttcatttgactgttatcatgctcggaagctcttgttcatagtttagagttgtccaattctttgcccaatcagtctgctccaggctgttcaatgtacatggccgtagtaatgttaccatctccgcatctcctgattagtttgagctctggtatatttgttcaacgtaccggggcgcaaatatgttatgaacttctttggaccattcttaacttgttatgtgtgcactgaggtt

SEQ ID NO: 32012 - DNA, 432 bp, Zea mays
  Clone ID: MRT4577_129208C.1
tttccacgcgtccgggaaaatgtcaagacgaagcacccgcagcttcactacgagtccaagctatacatgcttctccaaggaggaagtaggccctagagtcctgtcctgtcctgtctagttttactgctgggacggtactctgtggttagttgctagcatgatgcgcgagttgggctaaccttccgctcccccccttttttttgtttcgtcacagctggcattccgcacctgaagtggttcggcgttagggggagtataacgtgatggtgaatcgatcttctcggccctagccttgaggacttgttcaacttttgcagtagaaagttttctctaaggaccgtgctcatgcttgctgaccaaatgattattgggtcgagtacatgcataaaagggggtttttgcaccgggatataaagcctggatattttctat

SEQ ID NO: 32013 - DNA, 215 bp, Zea mays
  Clone ID: MRT4577_129209C.1
gaaaccgaataaaactgtggggccccaatggaacaaactcgggacccctttcaagcgcgtccccaatttaagcccccccccatgggccaaaacggggggggaagccggtgaccggggggttgaaaaatcaagtttcacaaaacctttgctttccttttggccaaaaacccccggggggatttacggaaaacccaaacagcgaggcctgggaccaa

SEQ ID NO: 32014 - DNA, 522 bp, Zea mays
  Clone ID: MRT4577_12920C.1
cgtgcacactctgcggagtgaataaccggcatactagacgagctcgcaggcgagagcagctcaagactcatcgcatgattcagcctatgagactgaattgattttgatattggcattagcggggactatttgttaatgatgatatattcgtattatggatgggtattcacttccatggactgctgatagaaccgtgaccagcttattagaaacattgctcaactgtaacccctattgctgatcatccttacacatgacatgaactccaacctctggtgagctcatgcacattattccccacagcacgttgagcgacgaacatgtgcgagctaacccttgctgtgctcacacgcccccacaggagaacaacacgtggttcacgcggcgccacataacgaggagctcagttctgtctatgtggcgactcccaggtgactttatggcgccaaggatggactctagtttgcccatatttaccttgtattacagtaagactgtccgtatgtaatcagcacctggact

SEQ ID NO: 32015 - DNA, 228 bp, Zea mays
  Clone ID: MRT4577_129210C.1
ccaaggctgctgaacactttacaaagacattttttcatactaaaccatgcctctaataaagacgcctaggttgtcactacagagagtctcctgctaccaaactctcacaccccatacctgacttgaccaacacgcacgccctgactgacgcataagctcatgcatacttgatttgatttaaacaccaattctgtacttttactgaacatgctactcttttcatcattc

SEQ ID NO: 32016 - DNA, 161 bp, Zea mays
  unsure (1)..(161): unsure at all n locations
  Clone ID: MRT4577_129211C.1
gcggagctccgccgccgccgccgccgctgtccgattccgcagcagagaagccaccaacaccgccgcacgtccgtggattgtcctcagatacgcctccccgcgccgcgtcttcctgaggnccgaggctccgacgcagccgaacccgtgcatcccacgggtcc

SEQ ID NO: 32017 - DNA, 678 bp, Zea mays
  Clone ID: MRT4577_129212C.1
ttttttttttttttttgagataatgtacaataatatcagagtacttattacatcgcggaagtcttacaaaataaaagataaatataaattgaactaaaatccatctttggcgctaataagtcaactgggagaggccacctagatcagatcaaactcctcgttgtgtggctcctcttgaaccacctgttcttctcctggcacttgagattccagttaccaggatgattcttcagatcctcgtgacctcaccgctggcacttgagattccagttaccccgatgattcttcagatcctcgtgacctcaccgctgacacttgagattccagttaccccgatgattcttcagatcctcgtgacctcaccgcaagttcgaagcacaagtacagttgcccacggaggcttgcggcgtgatggcgattcctcaacaccgcccgcgaagctcccgatttctgacttggcgaatacgtgaatgagtcttcgcgcggtacggggtgatatcgcagcttgacaacgcccgcaagtcgttggagaacccggctcccaccgcacgacagagacgacgctcacacaccctcactcacgacggcggtgaaacacggtggcacatgcacgaatggcttatctgctggcaaccgggacggcgatttctatggacgagggttttgtacggtgaggga

SEQ ID NO: 32018 - DNA, 278 bp, Zea mays
  Clone ID: MRT4577_129213C.1
tcttcgcgtccgttcgctaacacggcgggggggggccatttcaggaaggtggactgcgaaaagctcgccgcctccgccatcagcgactaccagagggaagccttggtaacgtggaagcagcacgcgcggggcgcgtacgagcagctggacaaggaaagaaaccggcccattgtgaacgacgaggctgcaacggaactagggcttgtcccgagcgtgcctctgcacggtgcccaccaggactggatccggtacgccgagcggaagctgagcttcctggg

SEQ ID NO: 32019 - DNA, 389 bp, Zea mays
  Clone ID: MRT4577_129214C.1
attgaaacagggaaacccatcactttatttattgcatgcatgacaagggcagactgaattggaacaatgcgtgattagccacggggctggagagttttcctccataacctttcgtggcggaaaaaaaagaaaattttcggtttgaaaccacaccccaatttttaatgggctggacccacattatgaggccccccatttctaaactggcgtaagaatttttttactgggcttcttcgcggcgttgaactgttttaaccaattggcaaactccttaatgtatcgcgtgcagttattgatgcggtccacgtacacaatgaccataacgttcggtgaagcccgataaccattcaaagttgttcatcaaaaaccaaacaaagtagccttgcaca

SEQ ID NO: 32020 - DNA, 439 bp, Zea mays
  Clone ID: MRT4577_129215C.1
cgtccgctaggtttcaactcaagagagaccaataataggtaaaaatcagggattctcttttttttttttgcactacaagctgtgacgttttaatatttgatgactagttgttcatgcattgctattgtatttgcatgaaaaaaaaaaaaaaaaaaaaaaaaaaaaaaaaaaaaaaaaaaaaaaaaaaaaaaaaaaaaaaaaaaagaaaaaaaaaaaaaaaaaaaaaaaaaaacaagggggcgcccccttaaaggggccaaaatttaattcccagcccacgcaaccgaattcttttttttttgggcccccaaaataaaaaaaatggcccccctttttaaaacgatggaggggaaaaaccctgcctcttccccacataaagcacatgagaaaaaaccccctttcccaaagtgtgttaaaaaaaaaaaaggccccccccggc

SEQ ID NO: 32021 - DNA, 241 bp, Zea mays
  Clone ID: MRT4577_129216C.1
acgttcagcaccagatccgatctcttacgccgttttcgtttgcccacctcctcacacaaaccctgaccggagcccgtaccgccggctcctactacatcaccgccgcattcgtctgccttcgtcgcctcgctaccaaggtcgatatcgacgagatcgacctcaccgaggaagacgctggctcctctgtccacggctcctacgcctcttcctcatcgatcgaagtggttgtgatccgtcacct

SEQ ID NO: 32022 - DNA, 725 bp, Zea mays
  Clone ID: MRT4577_129217C.1
gtaccggcgccctctttcgagtttttttttttttttttttttttttttttttttttttttttttttttttttttttttttcccaatatcgataaccaataaggtaaacacccttccataacgacgtttttaaaaacccaggggaaaagggggggggacataaccaaaaggttttacaacatcgggggtggaaaaccacccgggggacaaaagcagcacacaaccctgacaatgaccgggggaggatacttttagtactaataaccataatcaccttcctcgccctaataaaactaagaaccaacctcctggaagtccttttggagggctgccaaatcctaaggggcctaaaaaaactcgccttcttccataccctaacggaaataccagggcacaaaggcccccttggggaacatgaggccaaacttggggccgaggcggaaaaacacctccacaacactgggggagtgggaaataatgcacacagggggctgcaccttggccaggtcaccaccaggccccacactggggggctggtagttaaggcccgacttaaagccagtggggccccagcccacaaacgggagggggcccttggtcttgaggggggccacagaagaattcacatctttggggaccacatcaccacggtacatgaggcagcaggccttgtacttaccatggggggggatcgcacttggccatcatggaggatggctcaaaggc

SEQ ID NO: 32023 - DNA, 601 bp, Zea mays
  Clone ID: MRT4577_129218C.1
cgggccggcaccgtcccagatgagcgaggtactggagtatggtgcggaagatcgttgagaacagcgaaaccggaacgccggagcatcccctaatcagcaattcagaggagttagttagtgacgaaaggaagcggaaacgccttggcttgaaaagaaggattgcagatattaaagctggggaagggagatggtttgcatggcaaaggtggacgcctaagcttgtgagaacacagtgattcagatcatcggtagataaggcgtttcttgcatggcttgacttgcatagttagtagcaaaaacggtaagtcacctgggttttcttttagcaaacaagtcacagagcatggcaattgtaaacaaacggtttggtgcagtccatggcagacaccactaataaataatggataggttcacattttctgggatcacaaataggctgataggaaaccttctccacaaactcggggggttccatgtttcttattaagctcaagcagtcattttctcgtgtagaaggcatatcgtatagtttactcggttttgtagagtgacttttgaaatgcataatgtgccaaataaaaatgttcttgtagtcccaaaa

SEQ ID NO: 32024 - DNA, 742 bp, Zea mays
  unsure (1)..(742): unsure at all n locations
  Clone ID: MRT4577_129219C.1
aattcggcacgaggcatcggcccaccctccccaccactcacggtgtagctgccattgtcgctgtctccctctgcgcactaccacatcacagtgccacgatctcggtctcgccggtgccacctccggcgcccggcggctctctctctctcagacggtacggacgtggccggccgactgcacgcagtccggccggcgctgcctcgcagcaacaagacggacagctcgccaccggcagggggacctctgctcgccctcgccctcgcggggagacacgggttaggcgctagatccacgcgtccggtcccgcctgcggtgcccgcggcagtgcaggacggtgtgaatgaaaggggctcaggatacaaggcacaggaagaagctggacctccaggttctcgcgcccttcccaggatgcctggggaggatgatcgacatgttcgacctcagcaatggcgtggttgccaccaagatgctaactgagaaggcacatagagatgtttctccggccggaaaagaccgaagtaacactttcaagatggcaattatccccccagctcagacagaagataaacaaatagatagccagacgagaaggaattcccctactaaaagatcaaactcgcctactaaaaggagcggtgcagcgcctgttaagatgatcatggagcaaggcatgtggaaagaaaggatgcctgatgaggagccactgaatgttgntgcaagattaatgggactacatgatgct

SEQ ID NO: 32025 - DNA, 849 bp, Zea mays
  unsure (1)..(849): unsure at all n locations
  Clone ID: MRT4577_12921C.1
aggtctagttaaaccattttacacactccgctctactcccggaagagacgatggcggaggcgacgccgacgatggtgttcgtctacggcaccctaaagcgcgggttccctaaccactcgctcctcgtggcctccgccacccccttcgtgggagccgcatccacggccgagccagcctccctcatcatcggcccctactcggtacccttcctcctccccactcccgcctccgcctcctccggtcgcgtcgtctcgggcgagctctacgccccatcccccgccgcgctcgccgagctcgacgccctcgagggcacccacatcggcgtctacgagcggcgcccgatcaccgtcgtggtcgacgggtcgggcgaggtggtgcaggcggaggcgtacttcgcgcacccgagctacgcggaggcgctctggcggcgctgcggcggtgaggaggccgagattggagagtacaccgtggaccatgccggcgagtacgtcccgaagagtgagcgccttgccgacgctgctgggcttattgacgccatccataagttcgtcgccactgccacggacaactgacgtcgtgctcacggattactaccatagttcagtgaatgtcacatgtttcctcttttcctgggctagtgcttcggttgcagcttttgttttctggagtctgtcacgaactgtaattcatcctgcaaatttgcagacactgcttataggctatgcaggtcgtcgtattctgtattcagcatgactgaatccgagttttacgaatgagaaatgttataccacactttggggcnnnnnnnnnnnnnnnnnnnnnnnnnnnnnnnnnnnnnnnnnnnnnnnn

SEQ ID NO: 32026 - DNA, 166 bp, Zea mays
  Clone ID: MRT4577_129220C.1
gggtgaatgaacaaaaggaaatagctggttacttttgagagtacagctgccgaaacagcttcttcctgtaggcgttagctgatttagtatcagaggagtacctgtgaagtaaaacttttgtctgtagctcaacaagttccgttttcttgtaataatagaagttcag

SEQ ID NO: 32027 - DNA, 221 bp, Zea mays
  unsure (1)..(221): unsure at all n locations
  Clone ID: MRT4577_129221C.1
ctgcgggaacactgtacaagagcgggaagccggcgctgccgtggcggcagcgcctcgagatcaccatcggcgccgcgcggcgcctgcactacctccacaccgccgccatctacacgagcatccgnctcgacgtgtccgcgaccacgatcctggtggacgacaactgggtagccagggtttccgacttcggcttgtccaagaccggcccgacggccatgaac

SEQ ID NO: 32028 - DNA, 280 bp, Zea mays
  Clone ID: MRT4577_129222C.1
cgtttctccgagaaccgggaaggacgttggtatagaggacattggctaccatgagttccggtgctctgttgccgaaaccacagatgcgtggtcttctggccaagcgtctgcgggttcatattgttggcgcattcgttgtggccctaggagttgctgctgcctataagtttggcgtggctgaaccaagaaagaaggcttatgcagatttctacaggaattatgactccatgaaagattctgaagagatgaggcaggctggtgtctttcagagtgcgaagtg

SEQ ID NO: 32029 - DNA, 666 bp, Zea mays
  Clone ID: MRT4577_129223C.1
attgtaaggaaaatgatgtccccggagaaagacaacaagcttccactgcaaatctgcaagaattctaatgtctcacaagcctatcatttgtcttcaaatggtccgccatcaattttcaattggtaactctgagactacatttagcttcattttcatgtcttctccgatatttggttagactatatttcatatcttatacttcccatgctactataaatgcatatattgttgactcatattttgttacctatgcataagggaagttagtctattcaaatcatgtcttgcacctccatttctcacatgctttttcctaagtagaagatctttgtcagggggagtttttcttcgtctctaaaaggggagaaaattctttctaaaggagaacactcatttagggggagtaacaatttggtgcttcaactggtattaattgacaaatcctttatgagggcagtcttatttgcttcctatatgcttttaatgtcttctttttcggtggttgatgccaaagggggagaagttgtagggaccaaagcaatgaaaatgttatcaaacatcaaacaccaccaaattaaaaaaaaattcatccttcaagtgtttttggctgtttggtctaaataggaagtaagtgaatatggagttagggggaggctaagtcatatc

SEQ ID NO: 32030 - DNA, 101 bp, Zea mays
  Clone ID: MRT4577_129224C.1
gtgtacaatgcgatgctccgtaggacaacgggcactggagcaaagattagctgagaagcgggctgcagtcagcagtgcagagggcgtcacatcactggatg

SEQ ID NO: 32031 - DNA, 357 bp, Zea mays
  Clone ID: MRT4577_129225C.1
atcttcgggttcattatgaggttgacatagctacaaaaactggcaatcttgtttttctgaagggcctcatagatcgagttactttggagaccatgcccgacacatcagctttatagctctagattgcaagcacagttatacaactagcagtttcgctaaccacataacctagcgtagttatttcataaggatggtaattccgaagctgcgacaaaagaatagacagcgacacggcagccaaactacacagagagtgctttagaaggttacgagagaagcgcgccacagcggatttttttttttttccccccccccccccacggagagggggagggcgaggagaagggcggacggcac

SEQ ID NO: 32032 - DNA, 583 bp, Zea mays
  Clone ID: MRT4577_129226C.1
actcagacagaattttcattcaatgcgatggtagtagatcaaacaaacagacaaacgtgcccggaacggaaactgaaaatggataccaacaccgccgtggtacctgcttctgttgacgcatcacatcagattcagcggcaggacagctgcgtgactgatggctccggtaaccagaaccatagcagcacatcagcagagacggatgtgatcactgcgtgattgcggctctgctggtctattttcttcgccactctaccggtactccgggaggtggtggcacatccttctcccgtgatggcgccactgctgatctttgctggttaaaaaaaaacacgcacgctgccaagtccacttcaggttggccttgatccttgcgtaaaaccagagaggccacatcagatttcgtcagacagtcagcttggttgttgggagacagtccagagcagcttgcaagcttcccgtttctgttcggtccggcgcagagcagagcggaagcagctgcaacatgcagagacatttgggcagaacgaacaatgtatgaatccagaaacagggttatattggatcatgctgtgtacgaaaa

SEQ ID NO: 32033 - DNA, 2167 bp, Zea mays
  unsure (1)..(2167): unsure at all n locations
  Clone ID: MRT4577_129227C.1
cattgggtacctcgaggccggccgggccctcccactacccannctcgacatttttgaacccaaacccctcacttccccttccctcgacctccccgaacccgaactcctctcaggtcgagcctagggttagggtttcgtccctccggccccgattcgaaccaatccgcctcggcctccgccgcgccatggccgccggctccatcgtggtggacttcccttccatgggcgccgccctctgcttccccagcctcgattcactcctccgcgactccgcctcgggcttcctcgctgccgtctccaacgccccagcccccggcgcagccgacctcaccaactttcaccgcgtcttctcgcgcgtcctcagcgcctacccggacccaccgctcgaggctgtctggttcttctccgcgctctccttccacgaccgtcccgacgacctccgctccctgctccagctcctctccgccttcaccgcctcctcgcccggcaccgccaagccgcttgcccttctcgcccctgtcgtttccgagctcttccacgccgacaagccgcgcagggagaccgagaccctcgttgaggccgtcctcagctacatcagcatctgcagcaaccgctctgccccctcttcgaccgtgggcgccaccgcagacgctgtgaggctgctgccggctttcggcgatcttgtcaaggtgtggagcgtgcggtactcgagggagaggtgcccgttccaggtgctgttcccgctcgctggtgacgaggccaggcgggagctcatgaaggaaggctgcagcgttgactacctcgctggggtggtgctggttgaggcgttccttcttaggctctgcctcaaggtgcagaatgcaacaggggtgcctcgctctgagctgcagaaggagctcaagatatgggcagtcagctccatcccggtcttccagaaccaccgattcttcgggatcttgctgaacatgctcttgaactctccactgcctgtttactctctagtgagtgctgatgatgaaatcttgttgagagatgtcctttatgattctcttatcctggtggactattctttcattaacaatggtgttggagttgatcttttgcctatatacgtgttgagattggttatcactcttgatgctgtcaatgatgccaggaggaaaggtgatcaagggagagcagtgtcttttatcaatgctttctcaacctcaaatgttcccaattttctcatcaagtgggctacttttcaatctggctctggtgcactcagcaaaccaattaccaatacaccacaatctattattaagtggcttgtcgaccttgaagtcaaggggctcaaagtgtttggagactacagttcttgtattatggagaggtttgcttatgatggggtcaagaatggccatgggaacatgattcattcagatgcggaccttttcttttttgataagcagagtggtagggagtttatggacaccaaaggcagcgaggatgaagctgtggaggagatggagactgcaggtaatgcttttatggctgctgcccagtcaatgaagggggtgactgacggcatgaggaagaggaagagctgcggatatgaagatgcagcagctgtgaagtttgtgaagtacaaggttgaagacagctcgctgaaggactacctgtcagcagctaatggcataagcagtggcagtgaggtagagaacccgcagtctgatgatgagatggaagaatcaaactgatgcatagaaacgagatcacccgctaatgcttactttggacagttgcttttgagagttccttggacagccgcctttttttggagccaggaccagtcttgtttcagctgccgcttgttaatgatgccgtgcagaatctgcaagacggccccatctccagctaggcattcggatgtagtagtaaccgttagctgaccatacttgacatggagcatatgatgtttgctatgggccatatcgtgctctctgttgttataacgcagctatagtagagacctaaaaatgtagtcttgcttcaagttacttttgtaatagctgggtacttcgttatcccacggaaccagttggaagtaatgaaatcttaaccttctcctgtgtaaaaaaaaaaaaaaaaaaaagaaaaaaaaaaaaaaaaaagcggcctttgc

SEQ ID NO: 32034 - DNA, 3086 bp, Zea mays
  Clone ID: MRT4577_129228C.1
aattagtgaccacggggccggccgggctcttttgaattctcacttcccctcccctcgacctccccgaaaccccacttctcggatcgagactagggttagggtttcgtcactcccgccccgattcgaaccaatccgcctaggcccccgccgcgccatggccgccggttccattgtggtggacttcccctccatgggcgccgccctctgcttccccaacctcgaatcactcctccgagactccgcctcgggtttcctctccgccgtctccgccgccccggcccccggcgccgccgacctcaccaacttccaccgcgtcttctcgcgcgtcctcagcacctactcagacccgccgctcgaggtcgtctggttcttctccgcgctctccttccacgaccgccctgacgacctccgctcactgctccagctcctctccgccttcgccgcttcctcgcccggggccgccaagccgctcgccctcctcgcccccgtcgtctccgagcttttccactcagataagccgcgcagggagaccgaggccgtcgtcgaggctgtcctcagctacatcagcatctgcagcagtcgccccgccccctcttcgactgaaggcaccaccgccgacgctgtgaggctgctgccggctttcggcgatcttgtcaaggtgtggagcgtgcggcactcgagggagaggtgcccgttccaggtgctgttcccgctcgctggtgacgaggccaggcgggagctcatgaaggaaggctgcagcgttgactacctcgctggggtggtgctggttgaggcgttccttctcaggctctgcctcaaggtgcagaatgcaacaggagtgcctcgctctgagctgcagaaggagctcaagatctgggcagtcagctccatcccggtcttccagagccaccaattcttcggggtcctgctgaacatgctcttgaactctccgctgcctgtttactctctagtgttttgtgattcctgactaatgagcaatttgagaggcatgacacagcaagctagtattattatggattcactgcttattaacaaaattataagagtattaattaagcattcacaaggcatgtggtagttgtatggaccataaaaatattaacaaacatggcaaatagcttataaactcatttcatgaattaagaaacatgagtcatgatcatgctttttcattacctgttctgtaaactagttatttacctttgtgaaataagaaatgtgcaacttgttgccttgttcttcaattgtgcttggaataaggaatctatcctaatttgtggaaactaaagaggagaacagaacggtatatgactattgtgtatcgcaaagctggtgttactatagcattttgctgtcatcatctgcaaggagcatgatttaagatggagttgtgtctcatctttgtgatatgcaaacaggttgaagcctgaactgtggtttgtcctagtatacccttttgtttcggatcatgattatgccttttttatgcggaaatggcaaaataggggtttatgtacaattttacttggttatatgttcagttttgcaagcagtgcagtactgtacacatgtatttgatcactcctataaagttgccagactggttgatttttccgagtagttggttacttcaattttcactgtttagaatctaaaagtatcatatgtcagataccagaccaggagtaacgcctttattgactgagttttgtcagtggcagtttcagtttttcttgactcatgtaatttgtgttgtgtttggtttcttggtgactcagagtgctgatgatgaaatcttggtgagggatgttctatatgattctcttatcctggtggattattcattcattaacaatggtgctggagttgatctcttgcctgtatatgtgtcgagattgattatcactcttgatgctgtcaatgatgccaggtgataaagagtttttgtaaccaaacttagttggggggggggggtggaaatatcttctcatttcatttctgctgacaggaggaaaggtgatcaaggtagagcagtgtcatttattaatgccttctcaacctcaaatgttcccaattttctcatcaagtgggctacttgtcaatctggctctggtgcactcagcaaaccaatttccaatacaccccaatctattctcaagtggcttatcgaccttgaagtcaaggggctcaaagtgtttggagattacagttcttgggttatgaggaggtttgcttatgatggggtcaagaatggccatgggaacatgattcattcagatgcggaccttttcttttttgataagcagagtggtagggagtttatggacaccaaaggcagtgaggatgaagctgtggaggagatggagactgcaggtaatgcttttatggctgctgcccagtcaatgaagggggtgactgacggcatgaggaagaggaagagctgcggaaacgaagatgcagctgctgtgaagtttgtgaagtacaaggtagaagacagctcagtgaagggctacctgttagcagctaatggcatgagcagtggcagtgaggtagagaacccacagtcggaagatgagatggaagaatccgactgatgcatagaaaacgacagcacccgctaatgcttactttggggagagttgctttgaagagtttcttggacaaccgcctttttggagtctggaccagccttgtttcagatgccgcttcttaatgatgtcgtgcagtaccctgttctaggccaataatctgcaggagggcccctctccagctaggcttttttcggatatagtggtaaccgttagctgaccctacttgacaaggagcatgtgatgtctgctatgagctatatcgtgttctttgttgttataatgctatatagtagagacctcaatgtagtcttgcttcattttgcttttgtaatagatgggtacgttgttgttatcccacggaaccagttggaactaatgaactcttaacctttcctgtgtaaaaaaaaaaagagcggccgccgactagtgagctcgtcgacccgggaattcattccggaccggtacctgcaggcg

SEQ ID NO: 32035 - DNA, 456 bp, Zea mays
  Clone ID: MRT4577_129229C.1
gatgatggtggcgatgaggtatcagatgaccatgagaatgaagaagaatacgatggacatgatgatgatcctgcacccaatggcgaacgcggaagctatgacgacgaagatcatggtggacaggatgaagaggttgtgacgacgagacgatgatggggaccatggcaatgaggaagaagaggaagaatctgaagaggatgatgatgatgatgatattccccaaccactttctaaaaagaagaaatgatcaacctgttgcgacgagtggttgcttatacccaagaatgctgcctgttcgttccttcgcaacaacttactgtttaatgggtatagttttttaacttggttgtggaccattcatattctaatttggcaactaaataataacattttattgttccttttctattaaaccctttctttaattatgtatctcagaatggtatcattgctttt

SEQ ID NO: 32036 - DNA, 432 bp, Zea mays
  Clone ID: MRT4577_12922C.1
gcctgtcctttttttaattttttttttttttaaactatttttatttatttttttgtgtttttttttaattttccccacccccaagtaaaaataggccttgaaatatttttgtcaaacaaggattagaggaagccaatgcagggccatgcttgcaacaagggtatcctcacacccaccaaaaaaaactggaaggcaagggacccagggccggggaaaaaaaaaaaaaagggaaaagggaaagaaaaacccaaccctgcaaagggtccggggaccccaaaaaaaaaccgaacgacaaaaacgacgcagggccctagcttgctcctagcctacgcaggaacttatatttgcccgggggggggggccggggggccccttttaaatctttcccgggggcttgttggcaaaaaaactcccccccctgtttttgttttt

SEQ ID NO: 32037 - DNA, 255 bp, Zea mays
  Clone ID: MRT4577_129230C.1
gctatgtgatcagtgctggctttaggccatgcatacttttaagttgcaaacctctttccaggcagaacttgtttgtagttattagagctgccacttccctcagcactggagtctcatgggatcagctcttctccatgggtctggggcctacgtaaagaacgtatattcaatgcatttaacttttgtgaccaggtaaccacatttcccagctttatgacttatacaaaatatggaccaaggtttatccaagatata

SEQ ID NO: 32038 - DNA, 1249 bp, Zea mays
  unsure (1)..(1249): unsure at all n locations
  Clone ID: MRT4577_129231C.1
ataacggaaccaacacactactactctacccgtccgcctctctcgaaggcgcaggaccagggagaatgacacctgtcaccgcactcctggggggcacgggggggccgccggcctcggtcccggacccgtggccggcgaggcacgcccgccattactcggtcaacttctccccgctccacggtggcgatggcgcggggccgaccatggacggctttgcccgcacgcgcccaaacgttgacgacgtccacgtgaacatctccaagccccgcattgaggcctggaacagagacaccctgccgatctacaaccctggccgccatgatgccgggaagaatggaaggtggaggaacctcttcttcagcactgatggtgagaagcacgtcgctgaggatgacattatctttgtctcggcgaacacccccaccaagacccgtgggcttggagctggcaaggctgccgacctcacctactgggagagcgctgcccgcatgattgccgatgtctccaagtctgacaagattgttgttgagaagtccactgtccctgtcaagaccgctgagggtattgagaagatcttgacccacaacagcaagggcatcaactaccagatcctttccaacccagagttccttgcggagggtactgccattgaggacctgttcaagcctgacagagtgctcatcggtggccgggagacccctgagggcaggaaggccgtccaggctctcaaggatgtgtacgctcactgggttcccgaggacaggatcctcaccaccaacctgtggtctgctgagctctccaagctcgctgccaacgcgttcctggcacagaggatctcctctgtgaangccatctccgccctctgcgaggccaccggcgcgaatgtgactgaggtggcttacgccgtgggcaaggacacgaggattggccccaagttcctgaacgccagttgtgggttcggtgggtcttgcttccagaaggacatcctgaacctggtgtacatctgcgagtgcaatggcctgcccgaggtggccaactactggaagcaggtgatcaagatcaacgantaccagaagagccggtnctgaacgcgtngtgtngttcaatgtncaaaacgtnccggnnaaaaagatcgcgnccncggnttgccttnaaaaagggaaaccgggaaacaaggnaaacccgggaatcgatnttntaaagggcnttntggntanaaaggccaaattangatttnagancccaagtg

SEQ ID NO: 32039 - DNA, 429 bp, Zea mays
  Clone ID: MRT4577_129232C.1
aaacactccctcttctccttcccaaaaagtcccccatttttttctcactcaaacactatcttttaaaagacatcatcacccaacagctggactatgtctccccacaaaccaactctacaatatgtcttatccaactacgaaacaaatctccaccgaaaaagactccttgacaacatccatggcatcaccaagcccaccatccctagcctatctcacatgtgccacctgaacctcatttctgtccttatttacaaagagacctgcagcgtcctcaaaatcttactcgataacatcattcatgacgccgtcacctacacccagcacgcacgccgcaagactgacacctccatacacttattttacccgctcaatcgccatagccaaaccctctacacgcttacacgctcaactagatacctcttctccttc

SEQ ID NO: 32040 - DNA, 986 bp, Zea mays
  unsure (1)..(986): unsure at all n locations
  Clone ID: MRT4577_129233C.1
cggttcgggcgtgacgtgaagaccaacaacatactgctggacaacagcttccacgtgaaggtcgccgactttgggctgtcgcgcctgtaccctcctgaagtcacccacgtgtcgaccgtcccacagggcacgccgggctacgtcgacccggtgtaccaccagtgctacaagctgaccgagaagagcgacgtgtacagcttcggcgtcgtgctggtcgagctcgtgtcctctaagccagccgtcgacatgggcaggagccacagcgagatcaacctggccaacatggctctcaacagaatccagaaccacgagctagaaagggattcacggccgtcgatgaaggaagtggtggaggccctgaaccgtatcaggaacggggattcactggagaataacaagacggacaggagctcctcgtctcctaaggaagacgcacgcctgctgacgagtagcagcatacagtactctcctgactcggtaatccacagattccatagccaatcaaccacgcactcggcagcgtcaaatgctagcgggtgagtgagatagatacccggccttgtgtatatataccgaccgatcctgaagaaacgaagcccttaccagacgagtttgtgtacagtatagagatctgccaatgagctgattcatctgggngagttgtttcttctctctttttgtgactggttcgtagtacaatgtacacagtcacgctgtagccacagcaggagcttggcataaattaaggcattattaggcaaagtagtagaatcagtgtcaggccaaaaattgtactgtaggaactattttttcgttttgacgaaagaagggggctctgccgatgacagaagtggagctccccgaaataggaaggaataaaagctgtatacttcgtaagcatttgatccagtttgtcctgaacatgtactttttgggtcagctgatctcagtaattttctaaatatctaatggaaaaaaccgttcat

SEQ ID NO: 32041 - DNA, 1636 bp, Zea mays
  Clone ID: MRT4577_129234C.1
gaggcggtctattggtagtgtcagtgtcgggtactttgttgggcgtaagcacaaaagatccaaacaggcaatggcaccgatggcctgccggcgtatgcaatcttcgatgcaatcgtatagcaagatccttgaggtgggggactctccacacattttcacttacggggattcactggagaataacaagacattcaggagctcctcgtctcctggtgatggtggtttcggaactgtttacaaagggaaactccgggacgggagagtcgttgcggtgaaacgcctgtacaagaacaactacaaacgggtggagcagttcataaacgaggtagacattttgtcccgcctcctccaccagaacctggtcatcctctatggctgcacatcccgtagcagccgcgacctcatgctcgtgtacgagttcatccccaacggaacagtcgcggaccatgtccacggatcccgtgcgtcggagcgcggcctcacgtggcctcgaaggatgagcatcgccatagaaacagctgaggcgctggcgtacctccacgcggtcgagatcatacaccgtgacgtgaagaccaacaacatactgctggacaacagcttccacgtgaaggtcgccgactttgggctgtcgcgcctgtaccctcctgaagtcacccacgtgtcgaccgtcccacagggcacgccgggctacgtcgacccggtgtaccaccagtgctacaagctgaccgagaagagcgacgtgtacagcttcggcgtcgtgctggtcgagctcgtgtcctctaagccagccgtcgacatgggcaggagccacagcgagatcaacctggccaacatggctctcaacagaatccagaaccacgaggtgggccagctggtcgaccctgagctcgggtacgagactgacggtgagacgaagagatccatagatctcgtcgctgagctggcgttccggtgcttgcagctagaaagggattcacggccgtcgatgaaggaagtggtggaggccctgaaccgtatcaggaacggggattcactggagaataacaagacggacaggagctcctcgtctcctaaggaagacgcacgcctgctgacgagtagcatacagtactctcctgactcggtaatccacagattccatagccaatcaaccacgcactcggcagcgtcaaatgctagcgggtgagtgagatagatacccggccttgtgtatatataccgaatcctgaagaaacgaagcccttaccagacgagtttgtgtacagtatagagatctgccaatgagctgattcatctgggtgagttgtttcttctctcttttgttgactggttcgtagtacaatgtacacagtcacgttggagccacagcaggagcttggcataaattaaggcattattaggcaaagtagtagactcagtgtcaggccaaaaattgtaatgtaggaactacttttttcgttttgacgaatgaagggggctctgccgatgacagaagtggagctacacgaaataggaaggaatacaagctgtatacttcgtactctaaaaaaaaaaaaaaaaaaaaaaaaaaattggctgacaggccagcatttggtccagtttgtcctgaacatgtactctgtggtctatttggcgc

SEQ ID NO: 32042 - DNA, 488 bp, Zea mays
  Clone ID: MRT4577_129235C.1
acaagatgcatttctattgtggttgtcctgaattcatccaggaatagtgcagattttaaggaccctatgcacagaatggcacaaatatatgcaaatactgggacaacgtgtttatgaaagtgaatcctagaaaaaacaatcacaccttgcatttgacaaggattcttcataacgggttttgcccggaaaacatgataatagagctctgaacattgaaaatgtaggtgacaaggaacacaagattagcacaaactttatacctctacttcagcaaaaaagttgtaactgttgttaactggggcaacaatcagattaaggggccttattgcttcaaaaaaaaatgagttgcttctgggagaggataacaaggaggttgccataaacactccaccaatcctcaggactaccgcttatttcaattaccggattgcacggtgagggccatcaatggataggcgctccacaatgaatggtatgtactgaacaag

SEQ ID NO: 32043 - DNA, 235 bp, Zea mays
  unsure (1)..(235): unsure at all n locations
  Clone ID: MRT4577_129236C.1
gtccatctcatcccgagcgccgaaatccaaacgcacaatgactttgccgtccccgcccccggcccccaccgtgtgcggtgtcctccccttctctgcctcgtgcgccggccggccttaccactcgtgccaccccgcgcgccgncgnctgtgcgtgcgcagctcaagggccagcccaccgggcatgcccaacaccagcaccaggccgacttcgctgccgccgcgccgactgcacgga

SEQ ID NO: 32044 - DNA, 542 bp, Zea mays
  Clone ID: MRT4577_129237C.1
cgggaaaaaaaaaaaaaaaaaaaaaaaaaaaaaaaaaaaaaaaaaaaaaaaaaaaaaaaaaaaaaaaaaaaaaaaaaaaaaaaaaaaaaaaaaccttttttcccgccgcctgcccagagcctttgccttggcattgattgggccaaaaccgggggcacgcccccaaaagaattggttggcgccttttaagccagggggcaaccctggggggggatcctcctggaagggggggccggttgggcccccccgccggactccataaactgggacatgatcctgttcctcccgggcctgttttgcgccctggtttgggccctcgggctggatctcggggcccggggcccgttctcgtgggtttggcccgccgggccccggtcgaatccggggggggcccccaccaaggccctccacaggggcttgaaaaagagggggttgtattctctcccaacggtaacttccgtcccccccagcgttatggccaagggggtgggggggcccaaaaggggccccttttgccttcccgctttcgtgggggggcgggc

SEQ ID NO: 32045 - DNA, 474 bp, Zea mays
  unsure (1)..(474): unsure at all n locations
  Clone ID: MRT4577_129238C.1
gccggccgggctccgnaaacaaagacacaaaacccacttgtgactgagcactgtgcgcacgccctgcccagcagagggatgcacacaaagatgatggccgcgtaggtgctggagcacaacaccagctacctcgggaaggccctgtactcccgcgccggcggcgaggatgacgacggcacgcatcgaccatgggctgctacggccacagcgttccccacagcatatgtcagggccctgatggcaccagggatccttggcccgatgtccgaggacaaggccgaggacttgaccgaccagttccccgtcaactacaagggggacaccgtgctcctctactgcgagacggagacattcgccaagtaacccggagctggacgagatccactccgaggtgctgaatgctgagcgccctgggatgcgtactctgggatatcctgtgcaagaacgacggcaagtgcttgctagcttgtgtgt

SEQ ID NO: 32046 - DNA, 369 bp, Zea mays
  Clone ID: MRT4577_129239C.1
gttgttttttttttttttttttttttttttttttttttttttttttttttttttttttttttttttgggccggaaatagggggaattcccaggccatcaacacaattggggacaacaaggttttgggttagccccgcaatccctaagggggggggggtgatttcttggccccttttcccgggggggcaaccaaaaaggggggggcttaccaaggggggttactttgggggggcgggcctttaaaacaaggggtcaacatttttaaccccctaagccttcatggtcataggggattttttggggggggggataccccccctgggggtaagacgacaaccggggacagaccattttttgattttaaggggt

SEQ ID NO: 32047 - DNA, 460 bp, Zea mays
  Clone ID: MRT4577_12923C.1
ggcccgggcccgggactccacacgacatcctgaggtatcatatccgattacctaccttttcagcatcttccgattccatccggttctttccactcctcgcctctgctggcatggaaaagatccatagcgacatctcacggatgcggaactatacagggagagatcggggtcagggtccccctgcatagacaggatgttcagctctgccccgaaaatccaccccttacatcaccactgattacatgacctacatgcatcaggaccataccctgcacgggcaatgagagagcatactcacatcgcccctcgaggactccaaaaggcttctcttcagagacaagtcggaaccgcttgttgcatcatgaaccccgaccatatcccgtgaggtgaggctggcgatgattatgtcgtggaggacaccggtgaattcactgacaatgacaaggatggtgcacatctg

SEQ ID NO: 32048 - DNA, 703 bp, Zea mays
  Clone ID: MRT4577_129240C.1
agttcacgccccgcgtcgtcctccccttctcctcttcctcgctcttgcgaccgaaatcgccgccgccgccgccgctcaaccccggccgcctccggtggtttctgccgccgtcgcctagcgcgaacgacgcacctagccgccctttatcacctcctcctcttagattttccgggcgcctcctcgtgcggctgtgccctactccgcatgggagctagggtttgcgcccctcgtcggagttgaactccggcggccgtcctggtgctcgggtggtcatggtcgccgccccctcccccgccctaaccgccgcggacgcgaggcaggccgcggcgaggaagaaggaggacgacgacgaggaggtcgtctgcttcatctgcttcgacggtggagacctcgtcgtctgcgattggaggtgcgacgccgcagtgcgcgacttcttcctgattgcagtcagtgccgccgccgtctccaagctgcagagtcccgttcctttccgcccgtgcgtttcctcagcgtgagatcgatcgggatgtccctaatctactgtgtgtacttttaactgaatttccgacagtgcgtttgctcagcgtgagatggatcatcgagttgccacacgtgctgccatctgaaaaagcattttatgctgctgtatcttcccttggcatctacagcaaagatgtttacgatggaaaggggctatttagcg

SEQ ID NO: 32049 - DNA, 489 bp, Zea mays
  Clone ID: MRT4577_129241C.1
ggcatcaaaacaccaaggcttgacttcatcacacaggaaagggcaaaaagctagccaaagagggctacagaatacaaccggtaggtacacaaacggaaggcgaaaaggagggaaacaaggcacaaaaagggggactacagacaaacaaagacgaccggccagaaagaaacaacgacgaaatagaagagcaagcgcccaaatctgctgcaaaggggcggtggatgagacaagacaagcgcacaaaaaaaaagacaaaggggccaaaaagatgccccaaggaaccgccaggggagccgtccaagtgcccaaggaaccgatgaccttcccaattttgcccacaacaccccaaggcggacccccggacggacgcgggggccgacgcgcgggccgacgcgcggaccgacgcgcgggccgacgggggggccgacgcgggggccgacgcgggggccgacgcgggggcccacgcgggggccccacccgggaaccccg

SEQ ID NO: 32050 - DNA, 583 bp, Zea mays
  Clone ID: MRT4577_129242C.1
tttttattccttttttttttttttttttttttttttttttttttttttttttttttttttggggggggctgaaaaagtctacaaatttaaaaaaaataaaatatttttcccggcggcaaacaggggagaagggggacgggaaaaccccccaaaaacacaaaacccccaaattttattcatcgaaatataccaaaaaaaaaaagggatgaggagggggggccagggccatgaaaacaaaacaggacgggatcggacgggggccccgttaattacatcgaataaatgggcccccttggggaggagcttctggagggcctgcagcccctcaacgggggcccggatgaaaaaggggagggggcccaccaagggcccaagggggttgggggaaacctccttttccttgcccttgccccccaaagggaggggcccccccgggccctcgaaaaacttttgggcctgctccaggaacttgcccatgcccggggtaaaaaaaaggcaattgttctcaatgtcccccctccccgaaaaccgttgcctgtggggcaacgtttccaacaacagggggaagggccggccctgtttt

SEQ ID NO: 32051 - DNA, 1763 bp, Zea mays
  unsure (1)..(1763): unsure at all n locations
  Clone ID: MRT4577_129243C.1
atctccgacncggccccgctgtcgggaccccccccccgcttacccttcggaggccggccggggccgcagctggcccagttcccgcggctggctagtcgcttaccgcggcccgaacagcgccgcccacacctcggcttcggaaacttctaaacaaaacccctaatgtctcgaggtggcgcaccccaacaaactggctccgcctccttcctccccccctccggcctccgccgctgccttcttttccccgtgcgcatagtcgctcgcagaggcgccgacatcacttcgtccggaccggaaacacgcacgaagtgaggagcagcaccaaacaccgcgccgcttctcctatatttgttcctctcgcggagccgcatcgtgtgtaagcgtgtggcggatccatggcagcggcggcggatacctcggaggcgtccgcggcaggaatcgcgctcgcagaggccaatatcaactgggagaggttggacaagacgaggtttcatgtgattggagctatcctgttcacggcccagcaaggtgctctgcacccaacagctgttgtgaagactaggatgcaggttgctgaaggtgggcttgcacatatgtctgggtttgctgtttttaggaggatattgagaagcgatggcatccctggcattttcagaggatttggcaccgctgctgttggagctctgcctgggcgagtgctagctctaacatcactggagatctctaaagaaatgacatttaagtattgtgaacattttgatctgtcagaggcgtcacgaattgctatagcaaatggcattgcaggtctaatgtcgagtatctgttcatgctcatactttgtgcctctagatgtgatttgccaaaggctcatggttcaaggattgccagggatggcaacatacaggggcccattcgatgtgataaataaggttgtcagaacagaagggatccgggggctttatcgaggttttggtatcactatgttgactcagtcgccagcttcagccctttggtggagtgcatatggtggtgctcaacatgctatttggaggagtttgggttatggaaatgactcacaaacaaaaccatctcaatcagaacttgttgttgtccaagcaacagcaggaacaattgctggtgcttgctcgtcgattatcaccactccagtagataccatcaagactcggcttcaggttatggacaactatggtaagggcaggccttcagtcatgaaaactaccaggctgctgcttgatgaagatggctggaggggattctatagaggttttggaccgaggtttcttaacatgtctgtctggggcacatcaatgatcgtgacatatgagctcataaagaggctatccgtgaagtctgaatgacacattttggtggattctcaactaaggtgatttactgttcaaaatcatctatacagatataggcaatcaagtcagtttgcctcgcgaagagtataggcgagtattatgatcgggtgggatgcagaattatggtttagttgcataggataacatgcttctgtatgacacttgcgatgtatatatttttgctaaagagccctcctttcaggatgtttgtagccagcttcttttggatgtaacagatggaggccaagacgcctgttctgtctaatgaggcacattatatgtagctgtactattcgtggtccagcaaaattttggcagagttctgcgtccttttcgttcagtgaccagctctccagttgttgttgtcgtccaacttac

SEQ ID NO: 32052 - DNA, 2547 bp, Zea mays
  Clone ID: MRT4577_129244C.1
ccgcggacgcgtgggcggacgcgtgggcggacgcgtgggcgtgatgcgtggtcgggagatggcgccgtacccagtggtcagccggcagtgtttcgcactttgctattcagcttcgttcttcaccggttcaccctagccgccaccccaacccccagcgacagggaccttcgccgccaggccgcccccaatccctagcgactgcgagcaccgtcgccaggcgccgtgcagcgagcgtcgccgcctggcgaagtcgcgcgactcgtgccctgcagcgagcgccgctgtcccgcacccaccgtcgaacggctgccgatgcccaacgccctgcagcgagttgcgccgtcgtccgcttcctctcgctggtaacctcgtgtttcgatttggacagattgctcgtgacttggtgttgcgccgccgaccgagcctccttcccctaagtccctaaccgcctaccctagtccaccacctgccgcagctctcgcctccgtcaagatccgaacccctcgcacgcggcacgaccaaatcctagacacctgatcccaatgcgcagggccctcggcagagagacgttactgcgccggcaccgtggatcggcactgctgtggctagctgtaacggcactggtcacaggcaccatctgcctctggtcgtccttctccgttggcctcctcagcacctacagggtccaggatgttgttgcaaatgagttgtggagaaccgtagattcaaatggttggagagcatcttctgcaccacgcatctgttggcctcccccaccagctgaatctgagagcaatgggtacttgcgtgtctggtgcaacggcggcttgacccaacaacgcagtgcaatatgtaatgctgttgtcgtagcacgaatcatgaatgctacactagtgctgccagagttagacacaaattcattttggcacgatgagagtggttttgtagatatatatgatgttccccacttcatcaacacattgaaatatgatgttcgaattgtcatgagcattccaaaaatcactgcacaaggaaagaccaagaagctcaaagcatataagattttacctcctagagatgcacccgttacttggtacagaacaactgctttggagagactaaggaagtatggtgcaatatatttaactccattttcacaccgtttggcagaaaaaattgatgatccagagttccagagattgagatgcagggtgaattatcacgcactacgatttaagccaagtatcatgaaaacaagtagtgatatagcgaataagctccattcagaaggccatttcatgtcaattcatcttcggtttgagctggatatgcttgcatatgctgggtgcttcgacatattcacacctgaagaacaggaaatcctgttgaggcatcggaacaaatattttccattgctgttgaggtattggggcaaatattttccaggaaacacacctgactacagggaaagaaggctcattggaaagtgccctttaactccagaagaggtaggtcttattctacgtgctacgggatttgataactcaacatggatttaccttgctcctggcaagctctttggtgggaaacacttcatgaagccattcaaggctatgtttccacgtcttaaaaaccatagtatgatcagaagtggaaagctggaagaaaatatccgagggctagcagggtcagcagttgattacatggtctgtctcctgtcggacatttttatatatgatggtccgagcaacttcgcagacaatctcatgggtcatcgtctatactatggtttccgaaccacgatcacaccaaacaagaaggcccttgctcggatattcatggacagggaggaagggcacacatctgcatttgaggagagggtcaggcaggtcatgctcacccattttggcgccccccacaagcgcatccatccagagtctttctacacaaacccatggccagagtgcttctgccagacgaaagctaggaatcatgctgaccggtgcccacacaacagtgtaaatgatgtccttgaaagttggttccataataaagaagatgtagaagtggaagctactaatcaaactgactccaccagctaaaccgagagttggctggtggaactgagttatcaaaggtttattgattgagaacagattgtttgtcacagacctgcgaatgacatcattggaggaaggattgatggctccagatctctgtaggcgattatgttcgactcaagatttagttgttgagattcttagtctgggagggtcagaaccagattttggataggtttacattgtcatgtagagttctgtggaagaaaaatcatacgaacgtcatgaactatgtggctactacaattggagatctttaccccatatgctatagctgagtgtttggtggcttcagttctgttggagttatttgctgttcctcactatacatatctggttgaattcatgcgttcctggtcctggaactggaacttccccagtttcgatttttgcaattcaccgtaatgctaaaaagtcgactatctcc

SEQ ID NO: 32053 - DNA, 509 bp, Zea mays
  unsure (1)..(509): unsure at all n locations
  Clone ID: MRT4577_129245C.1
ggaaacacacctgactacagggaaagaaggctcattggaaagtgccctttaactccagaagagttaattgctgtggatgggggtacaaatttggctcagtacctagtcagattctggctcaagggtattgccaagcttggccctgcatctcagagaggcgatcgtaggtcttattctacgtgctacgggatttgataactcaacatggatttaccttgctcctggcaagctctttggtgggaaacacttcatgaagccattcaaggctatgtttccacgtcttacaaaccatagtatgatcagaagtggaaagctggaagnaatatccgagggctagcagggtcagcagttgattacatggtctgtctcctgtcggacatttttatatatgatggtccgagcaacttcgcagacaatctcatgggtcatcgtctatactatggtttccgaaccacgatcacaccaaacaagaaggcccttgctcggatattcatggacagggaggaagg

SEQ ID NO: 32054 - DNA, 240 bp, Zea mays
  Clone ID: MRT4577_129246C.1
gcggcaagccagctcgcgagctggcctgtggctttatccaacaacaatttcttatatagaatcagagttagcatataatagtagtactgagtcgataattaatttatgctatttgagattactatacaaaattgatatattatctatattatattagtgatatattaattctactaatttaaaatatttttaagagtttatattataatttagagagcagatgtacatttatgggtaggc

SEQ ID NO: 32055 - DNA, 653 bp, Zea mays
  Clone ID: MRT4577_129247C.1
ctttattccgattgttggaaaatatgttatgctggtgtattaccgaattgtgtattgtttttaccctatagcgtattgaattttttttattaggcctaccctagtccaccacctgccgcagctctcgcctccgtcaagatccgaacccctcgcacgcggcacgaccaaatcctagacacctgatcccaatgcgcagggccctcggcagagagacgttactgcgccggcaccgtggatcggcactgctgtggctagctgtaacggcactggtcacaggcaccatctgcctctggtcgtccttctccgttggcctcctcagcacctacagggtccaggatgttgttgcaaatgagttgtggagaaccgtagattcaaatggttggagagcatcttctgcaccacgcatctgttggcctcccccaccagctgaatctgagagcaatgggtacttgcgtgtctggtgcaacggcggcttgacccaacaacgcagtgcaatatgtaatgctgttgtcgtagcacgaatcatgaatgctacactagtgctgccagagttagacacaaattcattttggcacgatgagagtggttttgtagatatatatgatgttccccacttcatcaacacattgaaatatgatgttcgaattgtcatg

SEQ ID NO: 32056 - DNA, 709 bp, Zea mays
  unsure (1)..(709): unsure at all n locations
  Clone ID: MRT4577_129248C.1
atgagagttaagagtgaaagatggaaaagtttctataatacatatgtaacaaatacatactccttgttcaagagatcgtaagcaagattgtaaacggtatccaacgcagaagcacctaatatggttacagagtattactgatgggcttacctgcagactgcagatgttgttgcaaatgagttgtggagaacccgcgtagattcaaatggttggagagcatcttctgcaccacgcatctgttggcctcccccaccagctgaatctgagagcaatgggtacttgcgtgtccggtgcaacggcggcttgaccttacaaatcagtgcagtatgactaatataaaaaactgtctctctaaagtagcatagttcaccatgcaagttttgtgtattcatggcaacatagctgagagatttaagattacttctgccttgattttgtagatatgtaatgctgttgtcgtagcacgaatcatgaatgctacactagtgctgccagagttagacacaaattcattttggcacgataggagtgggntttgtagatatatttgatgttccccacttcatcaacacattgaaatatgatgttcgaattgacatgagcattccaaaaatcactgcacaaggaaagaccaagaagctcaaagcatataagattttacctcctagagagtcacccggtacttggtacagaacaactgcttggagag

SEQ ID NO: 32057 - DNA, 364 bp, Zea mays
  Clone ID: MRT4577_129249C.1
gcaggctgcgttaaccgcttacggttttcatggactgagcatcaaaactgtgtgacactggtcttatgcgatcctatagtggagaccagcgtgctttctgtgtctgagtatcgatatcacacaagaagtgggccaatgcttctgatagacttgaacgaatatgagcagacagatctggtggagagtgatacagttgttgctgacctgcacaatctgatcacgtttcactgtctagaagattgcatctacatggcttatgtacacaaactacaagtagaacagtataagcatatacacataactgagacctggtacctgcttgacacaacaaccgatggtgccgttgtacctgcacgctgaggat

SEQ ID NO: 32058 - DNA, 1562 bp, Zea mays
  Clone ID: MRT4577_12924C.1
ggagagggagggctcttccagacacgcgaattgcctcacgcgaattgcaagcaacacattcccgtcccaccttctgcgagcacagagagagtgggagagcaggcctccgaaatcaccgaccgcagagatacacttgcacgggtgtgcgggcgatcagatttttggggagcgtcttcgcgactgctcgcgtgatctgcttcgtcttcttcccggcgaccgttcgagggactgcactgcgtacaccttcctgcatcgacttcgtacggctacatcgaacaaacacacgagatgactcgtgtgaatggagccactgatgccttgagcatcggtccctccgctgggcatttttccgctggtggttttgctgctgcgttaaaaccaagtgaaccttttgatgggacattttacaagagatggcgtagtaagatgatactgtggttgaccgcaatgaactgctatcacgccgcacaggggaaacccgaacagttcactcctgaagaggagagaatgttcgacgttgccgataacctgtttcgaggcgccgtgattggcgctcttgccaacaagtatgttgattcttatctaacgtgcacatctgcaaaagagttatgggatgcattagatgagaagtttggtgtttctgatgctggtagcgagctgtacatcatggagcagctgtttgactataagatggtggaaaaccgtcctgtagttgaacaggctcatgaaatacaggcactggctaaagaactcgaacaattcccatgtgtcttacctgacaagttcgtggccggcggtattatcgctaaactgccaccttcttggacggattttgctaccactctaaaacataagagacaagagtttagcgtggctgagcttattggttctcttgatgttgaggagagggcgagagcaaaagacactcgtggaaaaggagttgagacttctagtgccaatatggtacaaaagaagaactccaatgcatcacataataataaaaagaaaaacaagcaacagaatgccacgaagcccaagcaggcagcctcgttcaaaaagaagaacaaaggagctggttgctttgtttgcggaagtactgatcattgggcaagcgcttgtccagaccgcaaatttaagcaagagaaaaaaccagctcaagagaagaaaacagtaaacatggttgttagcgagactgcagaaggaacatcgggtgcaaagggactggagccttgctgatggggaacggatcacatgcgcgtgttcttggtgttggtacagtcattctgaagtttacttcgggaaagacggtgctattgaagaacgtgcagcatgtcccctccatcaaaaagaatctagttagtggctctcaattgtgccgagatggctacaaaattgtctttgagtctaataaatgtatactgtctaagtatggaacgtttgttggaaaaggctatgacagcggaggcttgttccgcttatctttgcatgatgcgtgtaataagtctgtgaacaatgttgtttcgaatgagtcgtatatttggcattcacgactttgtcatatc

SEQ ID NO: 32059 - DNA, 1430 bp, Zea mays
  Clone ID: MRT4577_129250C.1
caagttgctaatgagtaaaattttggctttgcttttaaaaaatatgggttcaagttgttcctgacagatgccactgcacaaatggacgttgacacgttgtagtgatcacactgtcacgagagctgagcaaactacagcctgcaagagctacacgttgtagcctatactcctgccttgctataattttcttaattttcttttgttaatgagtgcagtttctctggctaatggtaaaaataatctattctacaggcatgcttgaccacatcatggtggagaatgcaagtgttaaagttgcattgaatcgcattgccgttgtttctgtcctggatgcacataccctgtcagtgatgtcttatgaagcttggaggctcatacatctgtttctgttggctctctctagctatatgcagtggagctgctaatatgcatgaagtttgggctaggtgagcttcctctttcacttgtcaaaccagtataggtattggccgatgtcaagaagacaaggccggcgacgagaggacgacagcgtgcaagaagagaaggcccatgttaggcgcaactattgggctctaaggccaatcagttgtggtcacacttttccatttttacgttcagctaaactgaccccctgtctcatggtgcaactgtgcaaggataggcaacaagtgttcaacaatatgtctgtggatcaattgacctgcatttcagcttttagttgaggatcaaaatctcgtgtcgttcagggccctcggtagagagacattaatgtgtcggcaccgtggatcgtcgcagttgtgggtcactgtaacggcactggtcacaggcaccatctgcctctgttcgtcctcctctattggcctcctcagcacctacagggtccagatggaaaagtttctataatacatatgtaacaaatacatactccttgttcaagagatcgtaagcaagattgtaaacggtatccaacgcagaagcacctaatatggttacagagtattactgatgggcttacctgcagactgcatgctactactcaaggatgttgttgcaaatgagttgtggagaaccgtagatgcaaatggttggagagcatcttctgcaccacacatctattggcctcacataccagctgaatctgagagcaatgggtacttgtgtgtccggtgcaacggcggcttgaccttacaaatcagtgttgtatgactaatataaaactctctctctctaaagtagcatagttcaccatgcaagttttgtgtattcatggcaacatatctgaaagatttaagattacttctaccttgattttgtagatatgaaatgttgttgtcattgcacgaatcattaatgacttgattttgctctctatatgctatcttagaagtttcagcgttcctggtcctggaactggaacttccccagttttg

SEQ ID NO: 32060 - DNA, 509 bp, Zea mays
  Clone ID: MRT4577_129251C.1
aattcggcacgaggttgcctttttttcgcttttgccggtccccaataaagaacaacaacgcaagaaggcggtaaaacgaaaaaaaagcaatggcgggccaaagctttcttttcaccttggagtccgggaacgaagggcaccccgaccaggtgggccaacaggtgtccgaccccgggcttggggggtgccttgcgcaagaacccgacaggaaggggggctgggagaactgcaccaagaacaacatggggaagggggtcggggaaaacaccaacaaagggaacggggactaccaaaagaacgtgccccacacctggcgggagaaccggttcaacttccacgaagtgggccttgacccccaccggtggaaggggctggtgaacattgaacaacaatcccccgacattgggcaaggcgtgcaccggcacttcaccaaacgggcccaggagaacggcgccggccaacaagggcacatggtccggtaccccaccgacaaaaaccccgaactgatg

SEQ ID NO: 32061 - DNA, 271 bp, Zea mays
  Clone ID: MRT4577_129252C.1
atgacggcataatgattatgctacagggagcaaatagcgatcctcctgccgataccatatctaaggacgctatatatatgattaatacttattcaatggactgttgcgacaatacatgacaacgccttgggtgcgctagagcttgtgccggcaaccggggcggctacgtattggagcgcggactcatgaccttaaacgacggtaccagaggcacggtatacggatcccaaaaatgggcctgtggtaggatgaacggcgcgtcaggatgtca

SEQ ID NO: 32062 - DNA, 302 bp, Zea mays
  Clone ID: MRT4577_129253C.1
acatctcccgtgtcccgccctcctcgccagtcgcctccctgctcctgctgccggcagtggcggtggtgtcgcctctcctcagtcctcactcctcctcaccccagcggaagcgggggcccgactccgtccgacctcgccgtctcggccccgacggcggggagaacccggcagggtgagcccgacgctacgccacgccgcgccaccatgccgctgccgctggccaaggcgaggcgggggtcctccccgcagccgtcaccgcagcacgcgtggtcctcctgcaggtcgcagctggagcaggacgt

SEQ ID NO: 32063 - DNA, 474 bp, Zea mays
  Clone ID: MRT4577_129254C.1
aaggaataactttgcagtgggctacaggactggggacttccagctacacactaatgtcaatgatgggacagaatttggaggatcaatttatcagaaagtttgtgaagatcttgacacttcagtaaaccttgcttggacatcaggtaccaactgcactcgttttggcattgcagctaaatatcagttggatcccactgcttccatttctgcaaaagtcaacaactctagcttaattgccctcgcctccgctcagactctgaggcctggtgtgaagcttacactctctgctctggtagatgggaagagcattaatgctggaggccacaaggttgggctcgccctggagttggaggcttaatccagctgaaagacacctttgggaatggatatcagaagatttggccttaatatatttccattgtgaccagcagcaggcttttttccccccagaagatgatcaaaacaaaggatgat

SEQ ID NO: 32064 - DNA, 560 bp, Zea mays
  unsure (1)..(560): unsure at all n locations
  Clone ID: MRT4577_129255C.1
ccactatcgcanagcccaggagcacatggggccaatatttcaggaatgcggagcttgagaaaagcttaaccaagatctgtcccgcctataccctgaattgggggacttcttccaaacaagcacatgtcagtctatgcttggacgtgtatttagtatggagcctcagatacccagagtttggttacagacaagcacttcagacaagtcagggaccttcatgaagagcttttgggtgatgattttgatggtcaaacttttccagatcgttcaaagctgaacagaagtgacaggaaaaacagtgttgagggtagaacaggtaaaattagaagtttggctgaccttgatcctgatactagagatcttttcttgatcaatgatgcatacggagcagagggtgaactgggtattattttatcagaaaagttcatggagcatgatgcttactctatgtttgagaatttgatgaatggtgcacaaggagtggttgctatcactgacttctattctctgagttctgccccagaatcaagtatgggtttaacaccagtaagagaggcatc

SEQ ID NO: 32065 - DNA, 497 bp, Zea mays
  Clone ID: MRT4577_129256C.1
tgcccaagacggcggagaacttccgggccctgtgcaccggcgagaagggcttcggctacaagggctccaccttccaccgcgtcatccccaatttcatgtgccagggcggcgacttcaccgaccacaacggcaccggcggcaagtccatctacggcaacaagttcgaggacgagaacttcacgctgaagcacctcggcccgggcacgctgtccatggcgaacgccggcgccaacaccaacggctcccagttcttcatcaccacggtgaagacgtcgtggctcgaccagcggcacgtcgtgttcggcaacatcgtcgagggcatggaggtggtgaagaccatcgagggctacggcagccagtcgggcaagccctccaagaaaatcgaggtggccgactgcggacaattgtaaatctcccccgcccacacacatacagttaattatgggggtcattccagattgtctatcagtgaaaaggcgacaaaagatgaatcattt

SEQ ID NO: 32066 - DNA, 288 bp, Zea mays
  Clone ID: MRT4577_129257C.1
tccgtgtgcacggaaaaatcttgttaccatacctagacggtgattgtatgcttgttatagccaaactgtctatggttgcaagcatgaagaagaatacccaaccgtgctcaacccttacagaatggataggtagaacttcaatttcaaactgggatctgtcatagtccagaagagttggaacagaatcattctaccacttgcgtgtatctaataatatgtacatgtgacgagaccaccacgaccgggattgcattgatctctaggaatctgatgatctaattatatcac

SEQ ID NO: 32067 - DNA, 2620 bp, Zea mays
  unsure (1)..(2620): unsure at all n locations
  Clone ID: MRT4577_129258C.1
cccccttttcccacgccaagaaaccacgctgcgaccatccgtcctcctcgtcgtcgatctcaatctctcttcgtcacgatcgcaaacagatattgacccgtccgatcggctccgcatcgccagtttgcatctgcttccttcggtgagggtgtgtctggttcgtgctcccgcagcgaaggctggagccgagatgacaatgccgggctctccggcgaggccgagtttctcggccctccgcggtgcccggtggcgggcctatcttggcgtcatccccggcttcgccgccgtctccaccgacgagctccgccgcgccgccgctgactcccgccggagatatgctaatctccggcgaaggctgctaatagatcctcatctctccaaggatgaagaaggtgcccctgacttgattgtggagaatccactatcgcagagcccagggagcacatggggccaatatttcaggaatgcggagcttgagaaaatgcttaaccaagatctgtcccgcctataccctgaattgggggacttcttccaaacaagcacatgtcagtctatgcttggacgtgtattgttagtatggagcctcagatacccagagtttggttacagacaaggaatgcatgaactcttagctcctcttctctatgtacttcacgctgatgtgcagcacttcagacaagtcagggaccttcatgaagagcttttgggtgatgattttgacggccaaacttttccagatcgttcaaagctgaacagaagtgacaggaaaaacagtgttgagggtagaacagaaaagttcatggagcatgatgcttactctatgtttgagaatttgatgaatggtgcacaaggagtggttgctatcactgacttctattctctgagttctgccccagaatcaagtatgggtttaacaccagtaagagaggcatcgtctgcaatatatcatttgcttgctagtgttgattcctctcttcatagtcaccttgtggagttaggagtcgaacctcagtacttcgcattacgatggctccgtgtcctatttggtcgtgaattttcacttgacagccttctgtttatttgggatgagatcttctcttctcctaaccattcttattgtactgacatcaggagtagggcagattatcaatttaaagtgttatgttctcctcgtggtgcactgattttgtcgatggcagtatcaatgatgctccatctcagatcctccttattagggagtgaacatgcgacttcttgcctagtgaggttgttaaattttccagaagatattgacttaaagagcttaattgagaaagccaagttactgcaatcttttgcccttgaagcaaatcttccttcatcctcatcgagaggaagttctctcttgtctacacccaactattgggaagagacatggaagattctccagccatcaatggaccaaaagggtggtggtgtcctcaagatgaagggaaggggcttcttgagaagaagcgcgtccgcccacgcgtccgcactgagtcgaatgtttccagaagcaaggctgctaattttgaaaacaacgatatgacttcaactaggcagtccactaccgatgaatttcacaatgctgatgtagttcctgcggagctgataactagtgtgccacacatgcttatagaaaaacaaaagcatcatgttggtaaaggtactgcagagactattgggagtaattcaaagaatggatgtgagacaggacagcatgatggttactgctcaacttcaggtgaaattagagatcctcttggagcagctagcgggtatttatcgaggagtagcagtatcactttgtcatgtggtactgaatatgatcatgatacccatcatctggaagaaccatgtgatccctgtgatgacagagtggttaatgaacctgatccactctctgtgcacaatactggaactgatgaagcagcaacaacagatcgaacatctggaatagtggatacttatcctgttcgacagcgtagactgtgttctgttgatgggaagctgaaaataaaaacccgaaatgccactagtgctaaaggtgacgaaaaagaaacattggcaatatgttcaatttcaaatgtggctgataaagagttgagcagaacattaagatctcttggtgaatctatggttgagaacatacaggatatcgaattgctgttaaaaccaaattcactctcgacttcagtggagaaacttgaggaagcaattcctggaagcacagagcaagctaaggcagtagcagctctaaaagaactcaggaagatcagtgaccttttacgccaaatctaaccggtacaactacggattcttctatacatatggtgttgtagtttttatacgtatctccattggacaatggatgtgatgtaacatgctaacagtatataaccatctgattgatcggtaaatagtaatttgtatgctccctgcaagctgatacattgtaaatgtacatctgaacggctgcctgctggttgtgaagtgaaggcggcaaacatttttttttggcttgtgacccaacaataaatattcaaggtttctgcgtttnnnnnnnnnnnnnnnnnnnnnnnnnnnnnnnnnnnnnnnn

SEQ ID NO: 32068 - DNA, 1388 bp, Zea mays
  Clone ID: MRT4577_129259C.1
atgaagggaaggggcttcttgagaagaagcttgtctagcactgagtcgaatgtttccagaagcaaggctgctaattttgaaaacaacgatatgacttcaactaggcagtccactaccgatgaatttcacaatgctgatgtagttcctgcggagctgataactagtgtgccacacatgcttatagaaaaacaaaagcatcatgttggtaaaggtactgcagagactattgggagtaattcaaagaatggatgtgagacaggacagcatgatggttattgctcaacttcaggtgaaattagagatcctcttggagcagctagcgggtatttatcgaggagtagcagtatcactttgtcatgtggtactgaatatgatcatgatacccatcatctggaagaaccatgtgatccctgtgatgacagagtggttaatgaacctgatccactctctgtgcacaatactagaactgatgaagcagcaacaacagatcgaacatctggaatagtggatacttatccagttcgacagcgtagactgtgttctgttgatgggaagctgaaaataaaaacccgaaatgccactagtgctaaaggtgacgaaaaagaaacattggcaatatgttcaatttcaaatgtggctgataaagagttgagcagaacattaagatctcttggtgaatctatggttgagaacatacaggatatcgaattgctgttaaaaccaaattcactctcgacttcagtggagaaacttgaggaagcaattcctggaagcacagagcaagctaaggcagtagcagctctaaaagaactcaggaagatcagtgaccttttacgccaaatctaacccgtacaactacggattcttctatacatatggtgttgtagtttttatacgtatctccattggacaatggatgtgatgtaacatgctaacagtatataaccatctgattgatcggtaaatagtaatttgtatgctccctgcctacaaaaaaataaccatatcaccaaatatttaatttatacaacactaaaaacgcggccgcctcgcctgcattcaaatatcaagtcattaaaaatcaataactttataatgaattatctatctacggggggggggggtttatagaataaaataagatattatttggatgcaagtgaggtgtattgggttttttatatgtgggtgtattatttattttactcggccgccgattaacaacctaataagtataaaaatactgtggttatctcacatttctatactttacacaaccacaccatttatacacataagagtgatacgaaatgactatcgttttcttctcttataaaataatctttaaatatgaattataatgaatccatccttttgctattaattag

SEQ ID NO: 32069 - DNA, 1137 bp, Zea mays
  Clone ID: MRT4577_12925C.1
atgaaagctacacatgacacgtctgatgatgaaccaacgatactccatgagcattttattctggtagaacacattgaggaatcccatatacataatcttgtgaaagatgacgatgtgtcaactcgaaagagtaagagagcaaggattgcaaagttatttggtgatgattacattgtatatcttgtggatgacacaccaagtaccattgaagaggcatatttctctcctgatgctgacttttggaaggaagcaataaggagtgatatggattctattatgtctaatgcaacttgggaggtcgttgagcatccttataggtgtaagcccattggtagtaaatggatgttcaagaaaaagtttaggcctgatggtaccattgaaaggtataaggcgaggcttgtgattaaaggctattcacagaaggaagacaaatgtgtatattatcggtatggtgggggcgagggagcaattctatgcctgtatgttgatgacattctaatcttgggaacgagtcttgatgtgattaaagagacaaacgactttctgtctaataattttgaaacgaaacatttgggagaagctgatgttattgttaacattaagctactgaaagaaggcgacagtgggatcacactggtgcaatcccattatgtggaaaaggttttgagttgctttggttatagtgaatgtgaacatgctccaacaccttacgaacctagtggatatgtgttttcacttggaggtgacgctgtttcatggaagtcttgcaagcagaccatcttaacgaggtcaactatggaagcagaactcatagcattagacaccgattcagttgaggctgagtggcgtcgtgaactccttatggatttaccggttgttaaaaaacctgtgccgggtatttctatgaactgtgataatcagactgtgataatcaagataaacagttctaaggataatatgaagtcgacaaagcacataaagaggcgtttaaaatctgtcagaaaattgagaaactccagagtaatagcgttggactatgtccatacgtctaaaaatctggcagatcaaagtactaaggggctatcacgtagtgtgatagatagtgcatcgagagagatgggcctgagacccacctaa

SEQ ID NO: 32070 - DNA, 341 bp, Zea mays
  Clone ID: MRT4577_129260C.1
agccacgggggggtttttaatgggataataccaagttacaaaatataaaacaggacaatagcaaatctgaaatagccacatagtttctaatggcataattaatggtaactagctgctaatgcagcaaatatgctaatgcattctagcaatagctactagcttagttgtctagttctcatttctaaactccctcatctctcaaaaattcatcatcaaacacttctaggatattgattgccttccctttaccattattggcccccattaggttcattttcagaatctgtgatttctgcataaattttctttctctttattttcctctttagcctttgacgcat

SEQ ID NO: 32071 - DNA, 2279 bp, Zea mays
  unsure (1)..(2279): unsure at all n locations
  Clone ID: MRT4577_129261C.1
ctgaaagcaaatcagtaagggaggctgcaagcaggaagggctcaagcgataacttcctatactgtccagttgctactggtattcaagatgatgacatagtgcattttcagatgcattgggcaaagggtgagccagttgttgtttctgatgtccttcagttaacctctggtctgagttgggagccaatggtaatgtggcgggcattgcgggaaagatccaaaggcaaagcagaagatgagcaatttgctgtttgggcgatagactgccttgattggtgtgaggtggaaattaacatacataggttcttttcgggatatacaacaggcagaactcatgctaggactcactggcctcagatgcttaagctaaaagactggcctccttctagttcctttgacaagcgattgccgcggcatggtgccgaatttattagcgcattgccatttcgtgagtatactgatccacggtatggcccgctaaatcttgcagccaagcttcctgctggtgtcttgaagccagatcttggacccaaaagttacattgcttatgggttctacaaagaattgggcaggggcgattctgtgaccaagcttcactgtgacatgtctgatgcagtaaatatcttaacacacacagctgaagtcacttgtcagactgatattggcttaattgaaaaaatccaaaaagacatgagagagcaagatctgcaggaactatatgggggtctaaattcccgctctgagctcaagttgtcaccagctccaactgaatgcagggatgaatctgttgatgaaggattgaagacctcatatagtagagaaggcaattgtgtaaatagagacaattataatggtttggacatcaatgcattaccacctgatgacgatggagatattgcaaaggataaagaatcatctcctggatcagagtggcaaagtgaactaggtcagagttcagatcacaacaatggggtcaacacaactgatgagatgtacaatggagctcattacatttcacacaatcaaaaaagcactggcaggaaagttggcattaaacctcaagaagagaaatctgaaaaggctgattgcagtggcacatgtgcttatctaaaaggaagttctgaagataatccggaaatgcctattgtggagagctcagaggagcagagcaccggtggtgctctatgggatatcttccgcagacaggattctgataaattgcaagattatcttaggaagcattgctctgaattccggcatatttactgcaatccagtcaaaaaggtatttcacccaattcatgatcagtccttttacttaactgaggagcataagagaaagctcaaggaagaatatggtattgaaccctggacgtttgaacagaagcttggtgaagctgttttcattcctgctggatgtcctcaccaagtgagaaatttgaagtcctgcatcaaagttgcgcttgattttgtttccccagaaaatgttggtgagtgtgttaagctgacggaggagtttagacgacttccatctttccacaaggctaaagaagacaaactagagatcaagaagatggctgttcatgccctgaacgaagctgtaaacttcctggatcctcgttcctcagaagagttgaaaattggggttggtgagaacatctgtgaggatgaatctgtagatgagaaggagctgccgcctagaagaggagttgaagtgtcaggcgttgatgagaagcctaaatagaaggcgagggaggcatcaagtccaaaagtgaagctgctgatgaggtcgcccattttaggttctcggaatcgtggttaattgatttgtcaaagcccctgttcatgtatggtgatcgctggctgacaccgatggatgaagagaagcaggacacgtgtgtgctgctgatatgtcgtgtcggcgagtgacatgaatagcatccctatccctatggtattattggtcttttatgtttatgtttgatcatttgtcttattcagttttttttacaaataataaaacaagaggttaaaagtaaatgacgtcatttatttaattttaagacggggcaaatgcaaaacaaaaaatagccgagagggaagcgtggtcacagaatcgcgcctgccgcattctttgtggaacccataagcgntgcgtcttttgggtcgaggatctggcttcaagacaccagctggaagcttggctgcaggatttagcgggccatatcgtggatcagtatactcacgaaatggcantgcgctaataaattcggcaccatgc

SEQ ID NO: 32072 - DNA, 534 bp, Zea mays
  unsure (1)..(534): unsure at all n locations
  Clone ID: MRT4577_129262C.1
acaagctttcttttttctttgttccatttgtccatttaccgtaccaacccctgtggcgtctcctttgtcattcctccctactactgattcaccatctttggcaaaaccggccgttcatattctttataacccaaacttttttttgaccctgcctatttcactcgtcatccccccccggatgaccggtggtgtctgcctgggctttttcaatttttggttttaatggatctgtcgggcggttgttccctatgttgggcatctctnnttgggcgggttggccccggggcccccccccgggttggtgcggttgctgggccgctggttcctttggcgcgtccccccctagggggaattccgctgttttgcccccctccggcgcccggtcgggcctttcttttgggggcccccttcggccccctgcggggcgtttttccggtcctcggccccccctttccaaacctgtgcccgggaaaaccccgcgttttccccccttccttcgccctgggggctttccctttttccccccttttgggt

SEQ ID NO: 32073 - DNA, 159 bp, Zea mays
  Clone ID: MRT4577_129263C.1
tgagggcaagagctgcctgtattttggggatgtgtcgttatcaacagctgggggtgtcaagaccaacaaaaaaatggaaggtccaataccaactggtaaaggggaaaccttgggcctggctggttgattcccccaccagccttaattcttggaacctta

SEQ ID NO: 32074 - DNA, 468 bp, Zea mays
  Clone ID: MRT4577_129264C.1
gacctttgggctggtttatgtgcttggcatcttctcttcttttctcgtcgtagctcctcgcttgtcgtagactacggaggaggaagggcggtatgagcgctcgtacgggcttcgagagctgtgcgagtagtgaagtagcctatggacggccggacggagggtaacgattagtcgtcgagtcgtcgtcgtcttcatcggctgattactagcccgcacccgcttacgttctgagcagttggttgctcctccgtttcggtccgcttagccttggaaggtggctaagtttggcgaggtgcggatagagattggtaagctagagactggtaacagcgagtcttagtaggagttcatccgcatcttccactcatttgccccaaggcctttcctcctgcgtcgacttctgctccttcctgacctactccgatcgactttcatcgttttagaatcgcattggcgagagtagaagac

SEQ ID NO: 32075 - DNA, 252 bp, Zea mays
  unsure (1)..(252): unsure at all n locations
  Clone ID: MRT4577_129265C.1
agcagtggtaacaacgcagagtacgcggggtgaactcatgcgtggttcagtatcgtttcattcctttttgttgcagtgagcctacacaagttcgtctttgttttatggataatatgtataacattatctattggaatagcaatgttgatgcttgtgctttgtcatcaaaaaaaaaaaaaaaaaaaaaaaaaaaaaaaaaaaaaaaaaaaaaaaaaaaaaaaaanaaaanncctctgcgttgttaccactgct

SEQ ID NO: 32076 - DNA, 379 bp, Zea mays
  Clone ID: MRT4577_129266C.1
aaaccagaaacacttcctaacaagataacaagaaacacgctcccgataacagcactgccactgtgacaagagcataaccgcatgctgagccaacggccaagaccaaagggctgcagtacaagaacaaaaaaaaaactccgtgcaagcctggtacatacaacaaatcaaacggccagaaacttcacagagagcgccttgctgccgggagctattggtctgaaccgcgctcacgcatcggctgtcagaacaaccagagtcatatggaaacagctctgcctacacggcaacagatagaaacccccaatccatcaacactggctcccaaggccattcatacatcagagcccggactggacacaagggactttacccaataaaa

SEQ ID NO: 32077 - DNA, 339 bp, Zea mays
  unsure (1)..(339): unsure at all n locations
  Clone ID: MRT4577_129267C.1
aaaaaaaaggacgcggggcgacccacacgaccacaaaactacaaaacacattttcttttaaaaaaaaaaaaaaaaaaacgaagtggaaaaaaaatgttgttcgggcaccaaacccnacnccacnacaattatactccaccaataagtcaccatgtctacaaccatgcaaactaaatacctttctattaccactgacaccaaaaccaacgctcaagatgccaaagacactcctcaatccatctaaatcctctacctcgtacttgaagatccctaatcatctccaaatacactcaaaataaaaaaacacaaccatactaatctcacaaactacctcacaaa

SEQ ID NO: 32078 - DNA, 759 bp, Zea mays
  Clone ID: MRT4577_129268C.1
ggagcaatggacgggctcaactacagcaagttgcgctcctcgctccggcctcggctccaagcgttctccggcgtcctcttctccagtttgcgctccctagacgggctcctgcacatggcgtctgtcgccgtcttgcagtttgtccacgatccgcacgatgatccaccagtgctaggctgcgtacacttgactctagctcgcgtatatgccttggatcgagctcgctctctttctctcgtcaaggaccacttcacaaccttgggaaaagacctcaccgtcattgggtactgctgcgatgatgctgaaccccgtcgtcgacaactccagttctacgtcgccgagtccatgtttcgggtagcagcatcatattatctcgcgccattcctctgaaggttcatacatgcgcattttgcatttcattaggtgcgctagttgagcacttgatgcgaagggccagagctgagtcaaccacaagatgatgttaagcatgggcttcttcgcaaggtgatgctgatggatgaacataaggatggatgacttgaacgagtaccaagacaaagtatgatcgtcaagtggtcatctgctaacaacactaacgtagtttttatcccaagcaagccccggtgtatttgccacctccttctgttttaaaaagttttatcaccttgaatgatgcatgcattaggtgataggagttgtgtgatcaaacagttgatgcatttccatccttgattaaaaaaccctaatacctgttttatg

SEQ ID NO: 32079 - DNA, 381 bp, Zea mays
  Clone ID: MRT4577_129269C.1
ctgggtcttcacgccgtcaaggatcgcgccgtggttgtcaacggaaaggtcgaggttcgcccgatgatgtatctggcgcttacatatgaccaccgcctgctcgatggaagggaggccgtccagttccttgtcaagatcaaggaatatattgaagaccccaggaaaatgctgttgtaagggatattcctttctctttcctagtgttgcatacctgaggatagcgataaactctttaattcgaaaatgccatacctacaggccagcggagagggacttggcgatggcgactgtggacgtgatagtcacaggccgtattaaaattagaccgagaaaatgagttccgaccaacgatgtaccggtattccatgtagaaatagtaaa

SEQ ID NO: 32080 - DNA, 404 bp, Zea mays
  Clone ID: MRT4577_12926C.1
ataatgcgacaggtttttcgaataaagaaagacaaaactttattatgaacatgcatatcttatgcggcataccacacatgataatgtgcgagaccttactgcattattaccgatatacacagacagggttgggtagaggacattccccaaatttgatgagttacatctagggcataatgggactgtaaacaccacagggggaggcgtagtagctgcgacactgttactggaatatcccacacatggctgtcatgtgttgggcatttattgtggacatgttggtaacacccagagcttccaacagcatgctgctgcttttgaatgagacttaactgccacatgattgtggagtgactagctgcacgattaagctgggacatcatatgcaggtgcagatcgaggaa

SEQ ID NO: 32081 - DNA, 206 bp, Zea mays
  Clone ID: MRT4577_129270C.1
gaacgggacattgtctatgagattgagggcaaaaagcttaattatgttggtgatcaaaataagaagcctcaaaatgatgcagactcaacaaggccaccatcaatgacatctgtgcacccctcaaatgctcaaagagaatgagtgtgtatgcaggctttgctttgtgggagggctttttttgcgaacccatattagtggggggacaa

SEQ ID NO: 32082 - DNA, 1437 bp, Zea mays
  Clone ID: MRT4577_129271C.1
atggctatgggtgctgcggcggccgcatccacctgcaccaggcccgcgtcccctggcctggcccgacgtcgcgtcagggcgcaggcgacgtcgtcgtgggccggaggcgccgaggcgctggtgcggtcgggcgcggtgagggccgtgcggccgagggacgcggcggaggcgctgggcggcgaggggttccgcctgctggacgtccggccggagtgggagcgcgcccgcgccagcgtgcggggctcggtgcacgtgccgctgttcgtgggggacgacgacatgggccccgtgacgctgctgaagaagtgggtccacttgggctacatcgggctctggaccggccaggccttcaccaagatgaacgagcgcttcgtcgacgacgtcgccgccgccgtcgacggcagcaaggacgccaagcttctcgtcgcttgtggcgaaggcctcaggtcgttgatcgcggtgaggatgctgcacgacgacgggtacaggaacctggcgtggctcgccggcgggttcagcaagtgcgcggacggcgatttcgcagatgtggagggggagagcaagctgcagtacgccaccatcgggggcgcgtcctacatcttcctccagatcctgctgtttctgggagtgttacccattacgttacaaatatgtgaaccaaacgacacccaagtctctcctacgccccttctcatctactctggaactgtaataattcgtacactgagatgcttgagtgagaggttaacaagtggtatcaaagccaccgattctcgggctctttcttgtgttgaagctcgaactgatgcagtcggtggcacattcgtatctgacacgttttcggcgaaagcaagtggtgacgaatccagatacgtagatcgttctcaacgaaattgtgtcgtcgacgaccggcgcttggaggttggcaagttatccaagaactgggagtgcgtagtcgtcgagaagttttcccttatgccgggcgttcttgctcctgccctggtggctgccgagtgcccacctggtggatccacatgcaactcgccccatgggcactgcatcgacaagcactactgggaggatggatttgggtccgtcaccaccctcatccctccctcgatcaagggtatgcccccgctgccctctccagtttcagttccgatgttgggtgagccccgggagtttccgtcggagcatcatcgcaggaagtggtcatgtggcggagtacaacgtcccccatccttgggctctatctctgtgttggccttgttgcaggaggaggtcactacatcaactcgacgattggatggttgtaggctacaacttgggtggtctggcaagcctccaagtaaagggccatttcctcttccgcaacccccacgaggagataaacaaccattaccggaggagtctgataaacctgttgacaatacgtga

SEQ ID NO: 32083 - DNA, 260 bp, Zea mays
  Clone ID: MRT4577_129272C.1
ccgacaacatagccgacaagaacgagctgacctaagaggacgccagaagaaggaggagatcgccgcgatcgcgccagaagacgacgccctgaggctggacaccatcctcacggacatacccatggaggagatactccgcaagcagaggatgctggccaaccagaacataaagcaggcgaagcagacagcgcagcccgcggagccgagggacgccttacaacaagccctcaacgggcaggcgcgcaagcagacccacgcca

SEQ ID NO: 32084 - DNA, 253 bp, Zea mays
  unsure (1)..(253): unsure at all n locations
  Clone ID: MRT4577_129273C.1
gccgcttccgctccgtcgctcgcctcacgcctccggcgccacctccaccatggccccgaagaaggagaaggccccgncgncatcgtccaagccggncaagtccggaggcgggaagcagaagaagaagaagtggagcaagggtaagcagaaggagaaggtcaacaacgntgtttntcttcgatcagntcanctacgataagntnttctccnangtgnccatgttacangnagatcacccnatccattcctttnt

SEQ ID NO: 32085 - DNA, 281 bp, Zea mays
  Clone ID: MRT4577_129274C.1
ccatacgctcgcgtatcggcgtcgcagtcggtactccatctccaccgtgctgcaggggcgacgcatggccgcacgcacctcgacccagatcgaaggcacgagattgctctcacgagaactggcctcgccgacctcgcggtcatggcacagagcgttcccctcaacatcgcggacattgggtcccccatctgggtctacaacacgctaatgtcctgggttgatgagaccgtgcgccgtgctagctgcaacataagcctccgatttttcggtgtccgggcccc

SEQ ID NO: 32086 - DNA, 929 bp, Zea mays
  Clone ID: MRT4577_129275C.1
cacacacatagtagctattatactctctagagtaattgcggaatctgctagaattttctaataatggcgaaagacgttgagcaggtcacagagcaaggtgaatactccgcgaaggactaccatgaccctcctccggcaccgttgatcgacccagatgagctcacaaagtggtccttgtacagagccgccatagctgagttcatagcaacactcctttttctttacatcaccgtgttgaccattattggctacaagagacagagtgacaccaaaatccccggtaacaccgaatgtgacggcgttggcattttgggcatcgcttgggccttcggtggcatgatcttcatccttgtttactgcactgccggaatctctgggggacacatcaaccctgcggtgacattcgggttgttccttggacgcaaggtgtctttggtgagggcgttgttgtacatgatagcacagtgtgccggtgcaatctgcggtgctgggttggccaaagggttccagaaatcgttctacaacaggtacggaggtggggttaacactgtcagcgatggctacaacaaaggtaccgctttgggtgctgagatcattggtacctttgttcttgtctacaccgttttctccgccactgatcctaagaggaacgctagggactctcatgttcctgtgttagcaccacttcccattgggtttgccgtcttcatggttcacttggctacaatccctgtcactggaaccggcattaaccctgcaaggagtttcggaccagctgtgatcttcaacaacgacaaagcctgggacgaccaatggatttactgggttggaccgtttgttggagctgcggtggctgcaatctaccatcaatacattcttagaggttctgcaatcaaagctcttggatccttcaggagcaacgcttaatt

SEQ ID NO: 32087 - DNA, 360 bp, Zea mays
  unsure (1)..(360): unsure at all n locations
  Clone ID: MRT4577_129276C.1
ggaccggaccttattcccgggtttttcacccccccggttattaccccgaggaaagaggcgctcgaggggggcggtaaccccaaagccgcgaatgatcgagccacaacggcccgcgcgaacgagcagaacgaaccaaaggaaaaagccgacgcaacancgacccgcgaggaagctagcaagaccaaagacacacccggcgacgggacaacaacagcacccgaccaagcacgcgaaaccaacaagcaaggccaacagagggaaacaaccggggcaaaacctgaatcactaaagaaaggaatagacaaaactgtgcagggcctaactcaggagctcgagaaaaagcctagaccagtcaagggc

SEQ ID NO: 32088 - DNA, 444 bp, Zea mays
  unsure (1)..(444): unsure at all n locations
  Clone ID: MRT4577_129277C.1
ccccccccanccacgnggngaaaagcacgggagagcgggccgggcgggctgcaaaaatggcccggtcgctccagacacgcacgcccctacccgcgatcgggcgccgcaatcagcaagcgtactactcgtcgagcggatcgccgaccggaggccccgacccataaatccggccacaggtgggggacccgccaacggcttcggcatcgagcccgagcagccaatgcgaggagcaacgaacgcgggccgactaaggcgaatcgctagaatcaagcttgcgcgacgggcagtagatgcaccccggcgacggatggccgaatccacatgacgttgtctagcgacgggagagcaaagaacccgtcggcgtactctcccgcggcgggctcacgggcagcgacctcgaggggcaaaaagtgcaaggacgaccccacggccggcgagcacaag

SEQ ID NO: 32089 - DNA, 456 bp, Zea mays
  Clone ID: MRT4577_129278C.1
aagaaacaaaaaaggcccttcttatttcgggggccccccaaacctcacccaaaaaacctcattatgggaccataacccaaaagccatccaaaagggggccccccccaagaggggggggggggagaacaccgggggggttggcaaaacaaggggggtgaagggcaccaattggtgcagttgtaagagggggcccgcgttaggcatagcgggccgggagaacggcaacaaccggtggtgggtcaaaaaggcagcagggcccacaacaactagccggctgaaagggagaagttggtgctgctgtaaaaaagccgcaaagttcaatgccgctaggtgggtgaaaggaaaaaaatgctggggggaggcagcaaccagccggctgaaagggaattgggggtgcaaaaaagccgcagagttcaatgcaccccgttgggtgaatggaaaaaaccgatgttgctg

SEQ ID NO: 32090 - DNA, 438 bp, Zea mays
  Clone ID: MRT4577_129279C.1
tgggtacctcgtagccggccgggcatatacttttctcattgagaagctgtatgaactcgaacactcgatgaatgatatccgacctgtaaggaacatggtaacacagagaaactgccttgatggagaaaatagaggatgacgggagacaagaaggtcaccgcaactacaaggcatagacgctataacgtgaaggacgctttgatcttccccgcccgacagcataggagatacctcaatattgtacgtcccctgaaaagtgaatgaaatgggatccccgtctatctcgtcgtcgttcgagaagttcctctgcaacaaagctctgctatgatggcacgtaccgcttcgtgaacgacaagaagaaccgcatcctcccgctccacgtgctcctgttgttccctttagagaaggagctcggcaagctggtggacgtcatgacca

SEQ ID NO: 32091 - DNA, 621 bp, Zea mays
  Clone ID: MRT4577_12927C.1
ctctgctatgaccgttactgcatcctatgggcctcgggcgaccgtggcggtaggtgcagcaagacactgcattgccggcggccgagataaagaacaggactacgaaatgaggaataggcgccaacgatggaaacagatatgttgcatcggtggtggcatacaataagactccgccgatatgtctcaatacagatacacatcgtagcgggagctagaggattaccaggtgtgcaaagaaaggccagatgaagtcgcagattgatgtactgctccaagaccaagactggagccggctagaccatggagagtagtgatagcaagatcctccacgacctcaatgcgcatgctgagggagcagagtagtcccgagagatatctctacttcactacatataagaaggcgccggcaattactcaatgatttgcatgtgaagaggaactactctaactgcaaagtcagactcatgcatggtgagagcagcatagaccgtgttgcccgttactgcaagaggatcatagaagctcccacccacactggaagtacgagtcaactacgcccaggactctcgggttctaattgatatactccgatggattgcgctttagcacctatgatcttga

SEQ ID NO: 32092 - DNA, 465 bp, Zea mays
  Clone ID: MRT4577_129280C.1
ttaaaaaaaaaaaaaaacaaagaaaaaacaaagaacaaacaaaaaaaaaaaaaaaaaaaaaaaaaaaaaaaaaaaaaatttaatttaataaaatattattttttaaataataaaaaaaaaaaaattaagttttttcctttggcccccttgggcgggtccccctttaggggggttttttcaaatttcccttcccctggggggcctttggcccttttttttgggggccccatttccccttttggggggcgtttttcaatttcctgggccggttttttccaactttgggttgggaaaaccctggggttcccccattttttcgcctttggaaacattccccttttccccgtttgggtttttaccaaaaggccccccccctttcccctttccaaaaattgccccccctttttgggaaatgggccccccctttttccgctcttttacccggggggggtggggggtttcccc

SEQ ID NO: 32093 - DNA, 129 bp, Zea mays
  unsure (1)..(129): unsure at all n locations
  Clone ID: MRT4577_129281C.1
ttattagtaggcattctaatgaggaatagcttttctttcttctctatntaatcttttatcagtttggactcttgcatcctattttattcagtggctataatccatcactatgatantttatttanttat

SEQ ID NO: 32094 - DNA, 310 bp, Zea mays
  Clone ID: MRT4577_129282C.1
ttgtgtagatctgtgcggcaccgaacacgctgctgttcacaagcatgagcgcgtggccagggtgcacagcacccagcagttggacgacccgctaaaggccgacaagaaccaggtaggggtggctgagtacgaggctagcggcagtgaggacagaacacagatttacccgacaatggtgctactcagtcgcacctgaggagacctggacttcctgctggttctgggcgaccacacgataggggccaccgaggagctgctccgtcgggagggagttactaaggtgccccagttcactttttacaagggccct

SEQ ID NO: 32095 - DNA, 621 bp, Zea mays
  unsure (1)..(621): unsure at all n locations
  Clone ID: MRT4577_129283C.1
acccgcctcgtnctccgtctcctgcnttctctccctcctctctcccgccccgcgtggaaccgaccgacccgcacacgcacaaggagcggccggcatggggagaagggaggcgctcgtggttctcctcgcggtcgtcctcgcggcggcggcggccggggaggcggacgctgccaaggccaaggggaaggccaaggggaagtaccgggcgctgttcaacttcggggactcgctggccgacgccggcaacctcatcgccaacggcgtgccggacatcctcgccaccgccaggctgccctacggccagacctacttcggcaagcccaccggccgctgctccgacggccgcctcgtcatcgaccacctggagcaggaattcgggatgatcctgctgtcgccgaaaaaagataatttataagaattaagaaaagatgaaaaattaataattatagttgacaaacgtaataaaaacaaacaacttcgaggacagtggataacaaaaaaaaataaaaaaaaaaaaaaaaaaataaaaaaatntntttacaaccataaaaactaataaatacgaaaataaaaataaatntaaaatttttttttttatatatattatttttttnnnaatac

SEQ ID NO: 32096 - DNA, 228 bp, Zea mays
  Clone ID: MRT4577_129284C.1
aaaaacaaaccttgggggttttttttatacctgggggcgcaaccaacccattcttaaacacaaaaccccgataaaccctttgaaaacattgtccgccacccttgctctccaatgggaacgcccaattcaacattttcccgaaataagaaaaaggaagcttacatacccacgcccacaatcggtttcggtcacagcacccaaatgtcaacaaccatcagtgacaaacag

SEQ ID NO: 32097 - DNA, 1226 bp, Zea mays
  unsure (1)..(1226): unsure at all n locations
  Clone ID: MRT4577_129285C.1
cccggggtgaagcttgtctggctgtggtaaagctcaaccagtggttgtaaactttggtggtgccgctcgtttgagcaaggatggtaatggactcaatccgggtttttgggggaaaacctcacttgaccgggtcactgaggcagttcggcaaaatccatgttcagttatcattcttgagggcattgatcaagtggacgctgttgtgcggggaaagatcaagcgggcaatggagactggtcgcctggtagactctcggggccgtgaggtcagccttggcaatgtcatctttgttctcaccacaaattggctacctgaggaactcaggagaccaaagtttgaaacattgctccaagatgaaggaaggatgttggaggtagcaagctctaattggcagctagagctttctattgaggacaagcaggttaagcaccgagcggattggctatgtgatgatgctcgtccagcaaaggtagccaaagaactgtccggtgggcaaggtctatcacttgacctcaatttagcagttggggcattggatgacaccgacggctcacggaattccagtgatctctctgtggaacaagagcatgaaaaagggcaccttgcagtcaagtgttcaacaccagcccctgactatgatctgttgaatctcgttgatgatgccattgtgtttcggccagttgacttcgcaccgtttaggaagactgtcacagattgcatatcagcgaaattcgactcagtcatcggtagctgtaactcattcagaatcgatgaagacactgttgatcggatggctggcagcatctggctcactgacgagaagcttgaagactgggccgagaaagtgctcatgccgagcatcgaacggttgtggtgcaacgtgaaacactacagtggccgtgctgttgtccgtcttgcagcagtcacagacaaggcattgccaaggttggggtgggcgcgagaaggactaccagcaacggtgccgatcgccattgatggcatgtagagaaggaattgggagtgggggggagtacattcttttgtatggtagttatgtaaatattgggggagaatctggggggaggttactatatgaagcacataggcatggaggttatagattttataacaaaaaaaaaatcgatgtatagttttgataatatatgtagctatggtccttgaaactaaaaaaaggtttctcttggcgactgtcgcgatnctagaac

SEQ ID NO: 32098 - DNA, 554 bp, Zea mays
  unsure (1)..(554): unsure at all n locations
  Clone ID: MRT4577_129286C.1
tttcactatttcanacaagattaaaatggagggtgcagcatgggaggtgaatgctcatttggaaagtaagaggatggacgaggactacgattccgctgatcgggagtgcttttcatgcttctatgatctgcacttgtctgctgtgagttgccagtgcagacctaaccactttgcttgcttaaaccatacaaaccttctctgttcatgcggaatggacagaaaaaccgtcttgtttcgatatagcatggaggagcttgatactcttgtagcagctctggagggtgatccgactgcattttattggtggggacacaaccactagtgtgctcaactggctggttctttgatgcagcatagaaagattggactcatgtaaaagcacatacattttttttttcaggattagggtcagtgattaattgatgccaatcttgttgctagatttggtgggcgccattgcatgcatgaccttggtagcctagcaggattctgtcgcgattttagagaaataagtcacatgcttccaatatatttaaataaattaaatattctaa

SEQ ID NO: 32099 - DNA, 219 bp, Zea mays
  Clone ID: MRT4577_129287C.1
gactgtgtatcgagatagggagcacctgcccccctttaggatgaaacagggagggttgtttcccacctaacagagaggcgccgcttggacgttaacccattgacagagggatcccttgaacactttctgcggtctgaaagcccgtgctttacttagcggaaggatttttggctcacaggagttctggggcattttttggggggggccttggggttccca

SEQ ID NO: 32100 - DNA, 992 bp, Zea mays
  Clone ID: MRT4577_129288C.1
atcaattctagtagaacctttaacttcctgtgcactgttacatttccgtagaaccaacggttaggattgagaatattattaacatgttattaagtttcatttagtagatccttattctctcctgcaagtttttttttgtcaaagaagaaccttatctttttttaacaaagtacgttgattgaacttttggttacgaattgtagtttgtgttggtctgttggaactcttcaaatagattcaatgaccagttagcctggctgtcaaacagttacaaaatagcgagagcaccaatcaattagtccaagttacctaatagatttaaaaaattccagagtctgtcaaagcgacgtttactcttgatttaactttatctgctacttttgcgtatgatctataaagttgctgggcactttatcctctgtacccgctataaaaattgtgatgcagccagactatgagcttgcctttttttttcatgctcagtttgacgcagcttgctgtattatgctaatagctgttctcagtttggtgcagcttgccatatcgtgcttactagttgggctatatgattttgcagggcagtgcccagctgtagcgatgcggatggttgttttcatctgatgaccccttccttttgcggaataaaaaggtgttcgaccagcagtgcgttatccaagctgataacaaacgtgtcaaatttgaagttttatacatagaaaactgccaggtttttgcgtagcctatgccaaagatgtgtaaactgtgcagccccatcagtgaatttcccaatcaacgtagagaatgcttgctgcgttactcaaatccgatgcttatgcaatggtcgtttttgtgctgtctgtctgatgatgagtaggtatgaattcattcgcaaccagacaagtcattagtatgaattcagtcgcaaccagacgagtcattgtaatagcttgagataattcatctggtgatgtggcaaaatcttagagtcccaa

SEQ ID NO: 32101 - DNA, 928 bp, Zea mays
  Clone ID: MRT4577_129289C.1
gggtacctcgaggccggccgggagctccgattcggcagccaggccggcgttgatatattttggaagtcggtgagggaactgagcccgtgccgacgttggctgagaggctgacatctgggccttagtgtcagtcggtccaggacgggcagatacaaactccccttcgcttcgtccctctcctatacaaattcaagtggccgccgtcaaagatcggtcgtcccccttccatcccgttgcggcccattaccattacaacaaaggcagcggaagccagcagagtgagccggagagcttagagctaagtcctcgtgtgaaagatggaaatggcgcgaagcccagctcatgttgctctctgctcgcttgctctgctcctcctcctcctgcttccagccgcgcggtcggcgacgttcacgctgaccaacaactgcgggtacacggtgtggccggggctgctgtcgggcgccggcacggccccgctgcccacgacggggttcgcgctggcgcgcggcgcgtcggcggcggtggacgcgccggcgggctggtcggggcggatgtgggcgcgcacgctctgcgccacggacggcgccaccggcaggttcgcctgcgccacgggcgactgcggctcgggcggcgtccagtgcggcggagccggcgccgccccgcccgccacgctggccgagttcacgctggacggctccggcggcctggacttcttcgacgccagcctcgtcgacggctacaacgtcccgatgctcatcgtcccgcaggcgcgggcggcggcggcggaggcggaggcaacggatccggcggcgccgagtcgagcaagtgtatggccacaggctgcctcgtggacctcaacggcgcgtgccccgctgacctgagggtcatggccgcgtcgtcttccggcggcggcggggccctggcgtgc

SEQ ID NO: 32102 - DNA, 4266 bp, Zea mays
  Clone ID: MRT4577_12928C.1
agatttttggggagcgtcttcgcgactgctcgcgtgatctgcttcgtcttcttcccggcgaccgttcgagggactgcactgcgtacaccttcctgcatcgacttcgtacggctacatcgaacaaacacacgagatgactcgtgtgaatggagccactgatgccttgagcatcggtccctccgctgggcatttttccgctggtggttttgctgctgcgttaaaaccaagtgaaccttttgatgggacattttacaagagatggcgtagtaagatgatacttaagttgaccgcaatgaactgctatcacgccgcacaggggaaacccgaacagttcactcctgaagaggagagaatgttcgacgttgccgataacctgtttcgaggcgccgtgattggcgctcttgccaacaagtatgttgattcttatctaacgtgcacatctgcaaaagagttatgggatgcattagatgagaagtttggtgtttctgatgctggtagcgagctgtacatcatggagcagctgtttgactataagatggtggaaaaccgtcctgtagttgaacaggctcatgaaatacaggcactggctaaagaactcgaacaattcccatgtgtcttgcctgacaagttcgtggccggcggtattatcgctaaactgccaccttcttggacggattttgctaccactctaaaacataagagacaagagtttagcgtggctgagcttattggttctcttgatgttgaggagagggcgagagcaaaagacactcgtggaaaaggagttgagacttctagtgccaatatggtacaaaagaagaactccaatgcatcacataataataaaaagaagaacaagcaacagaatgccacgaagcccaagcaggcagcctcgttcaaaaagaagaacaaaggagctggttgctttgtttacgggagtactgatcattgggcaagcgcttgtccagaccgcaaatttaagcaagagaaaaaaccagctcaagagaagaaaacagtaaacatggttgttagcgagactgcagaaggaacattggggtatggtaatcttttacctactgttctttcagtgtgtcaatcccctgagtggtgggctgataccggtgctaatattcatgtgtgtgctgatatttctttattttcttcttatcagtgcaaagggactggagccttgctgatggggaacggatcacatgcgcgtgttcttggtgttggtacagtcattctgaagtttacttcgggaaagacggtgctattgaagaacgtgcagcatgtcccctccatcaaaaagaatctagttagtggctctcaattgtgtcgagatggctacaaaattgtctttgagtctaataaatgtatactgtctaagtatggaacgtttgttggaaaaggctatgacagcggaggcttgttccgcttatctttgcatgatgcgtgtaataagtctgtgaacaatgttgtttcgaatgagtcgtatatttggcattcacgactttgtcatatcaatttaatcccgaaatttgatttagtcaaaggttctaagtgccaggtgtgcgtgcaatctaagcaacctcgcaagcctcacaaggctgcggaggcgaggaatttggcaccactagacttaatacattccgatttatgtgagatgaacggaatattgactaaaggaggcaagcgatattttattacttttatcgatgactctactagattttgttatgtgtatctcttaaaatcaaaagatgaagctttgcattattttaagacctacaaagctgaagttgaaaatcaactcgagaggaaaattaaacggttaaggtctgatcgtggtggagaatatttttcgggtgatttttctgatttttgtgtggaacatggtattattcatgagaggacaccgccatactcaccacaatccaatggggttgctgaaagaaagaaccgtactctaactgatttggttaacgccatgttagagacttcagggctatctaaggaatggtggggtgaggcgatcttgacggcgtgtcatgtcctgaataaagttcccacaaagaacaaagaaatcacaccattcgaggaatgggaaaagaagaaattaaatatctcctatttgcgcacctggggttgtttggctaaagtgaatgtgccaattaacaagaagcgcaaattaggaccgaaaactgttgattgtgttttccttggatatgctttccacagcattggatataggtttttaattataaactctggagtaccggacatgttggttggtacaattatggagtccagagatgctacgttttttgaggacgaattttccatgaaagctacacatgatacgtctaatgatgaaccaacgataccccatgagcattttattccggtagaacacactgaggaatcccatatacataatcatgtggaaaatgacaatgtatcaactcgaaagagtaagagaccaaggattgcaaagtcctttggtgatgattacattgtatatcttgtggatgacaccccaagtaccattgaagaggcatattcctctcctgatgctgacttttggaaggaagcaataaggagtgagatggattctattatgtctaatgcaacttgggaggtagttgagcgtccttatgggtgtaagcccattggaagtaaatgggtgttcaagaaaaaacttaggcctgatggtactattgaaaggtacaaggcgaggcttgtaattaaaggctattcacagaaagaaggtgaggatttctttgatacttattcacctgtggctcgattgaccaaaatttgtgtgctactttctctagctacctctcatggtcttctcgtccataaaatggatgttaagaaaacattcctaaatggagagctagatgaggaaatctacatggagcaaccagctgagtttgtagcaaacggtcaagaaggcatggtgtgtaagttattgaaatgtttacatggcctaaaacaaccacctaagatatggcatgaaaagttcgatagaactttcacatctaccggctttgttgtgaacgaagcagacaagtgtgtatattatcggtatggtgggggcgagggagtaattttatgcctgtatgttgatgacattctaatcttggggacgagtcttgatgtgattaaagagacaaaagactttctgtctaataattttgaaatgaaagatttgggagaagctgatgttattcttaacattaagctactgagagaaggcattggtgggatcacacttgtgcaatcccattatgtggaaatggttttgagtcgctttggttttagcgaatgtgaacctgctccaacgccttatgatcctagcaagctattgaagaaaaatcgaaggacagctagggatcaattgagatattcccaaataattggttcactcatgtatttagctagcgctacgaggcctgacatctcatttgctgtgagcaaacttagtcgatttgtttcaaatccgggagatgatcactggcgtgctcttgagagagttttgcgctatctaaagggtactatgagtttaggcatccattataccgggtacccaacagttctggagggttattgtgatgcaaactggatatctgatgctgatgagatatatgccacaagtggatatgtgttttcacttggaggtggtgctgtttcatggaagtcttgcaagcagaccatcttaacgaggtcgactatggaagcagaactcacagcattagataccgcttcagttgaggctgagtggcttcgtgaactccttatggatttaccggtggttgaaaaacctgtgccggctatttccatgaactgtgataatcagactgtgataattaagataaacaattctaaggataatatgaagtcgacaaggcacataaagaggcgtttgaaatctgtcaggaaattgagaaactccggagtaatagcgttggattatgtccatacgtctaaaaatctggcaaatcaatttactaaggggctatcacgtagtgtgataatagtgcatcgattgagatggcctgagacccacctaaagtttatcatagtggtaacctgttctatgtaattggagatcccgtgaattagaatggtgaaacaagctagtggtagactgagaggaaagacccttaataaggttcatttcagatgcacatctttcattactataaggtaggttggtgtttacaccttaatatgttccaagtggttttgtgaagcaaagat

SEQ ID NO: 32103 - DNA, 504 bp, Zea mays
  Clone ID: MRT4577_129290C.1
tttttccatgctgcagaaatcggatacatcactacaaacgcttaagcagcgtgaaggatatcgaggaactccttgccagcagctcctggaacagacttcttgacggagcccttggcctttcgctcctgtcggaggagctcttgcctcctgagggtcttggcgtatgggttgagtcggaagaggatggccttgtttcggagggggttcttcttctgggtgaagggtcgcttggcaacggcctggccagctggtcggaggacggactggatctcatcagagttgatgagtcgggtgacatcagacgaagcgatcttggcgatggggagggtgaagccagacttgttctcgtagacgttgtcgagggcagcaatggcagactcggtccagatgacgaatcgaccgacgtgacctcctggggcgagctggagcaggttgagcttgtcaactgggcaggtctcgacacctgggacgttcttgaaggctcgaacgataccctcatccttg

SEQ ID NO: 32104 - DNA, 322 bp, Zea mays
  Clone ID: MRT4577_129291C.1
tgatgatgacccggaggcgcccacagggacggaagacattatcagagccagtcatgttttctcaccaccctgcagcaggatccaaggccaccggagccagaacgcgccgcctgactgattgaaggggcggtcgactagctgtgggtactactgtcacgcaggcggacctactgagggagcaaggacaaagagcggacagaccgaggtccctcccggaagctagaaatggccgctggtggacaagacgctggactgagtgtgctgcgcctactcctaacgacgggaggcctaagataacaagcgccagctgctgcactgaagc

SEQ ID NO: 32105 - DNA, 2111 bp, Zea mays
  Clone ID: MRT4577_129292C.1
attgggacattcgaggcctcccggacctgtgctgtgcataacgaacgccagcaaacaaacagcgccgcaacccaccctatagcgcaggaggagaggagcccctcctcccgttcccataaatcccattcgcacggcgaggcgagacgaggcgagggcaactgggcctgggctgccggcagagcttggaccgctcgccatggccggcggcggggagagggagggcgcgcaggcgatggactccggcgagaagcgcctcaacgagctcggctacaagcaggagctccgcagggagatgacgctgttcaagacgctggccatctccttctccacgatgacgctcttcacggggatcacgccgctgtacgggagcagcctgcagtacgcggggccggcgccgctcgtctggggctgggtcgtcgtctccttcttcacctgcttcgtcggcgtcgccatggccgagatctgctcctccttcccgaccactggttctctgtatttctgggctgcacatttggcaggtccagtctggggtccgttggcgtcttggtgctgcgcttggctggaggccatcggcctcattgccgggattggcacacaggcatacgcaggatcccaggtactgcagagcatcatcctgctctgcaccggcaccaacacgggcggtggctacctggcccctcgctggctgttcctggtcatgtacatcgggctgacactgatctgggccgtgctcaacactttcgcgctcgaagtcatcgcgttcctcgacgtgatctccatgtggtggcaggtgatcggtggcaccgtcattgtggtgatgctcccgctgggggccacgacgacgcagccggcgtcgtacgtgttcacccacttccagacggcgcccgacgtgacggggatcggcagcagcgcctacgccgtcgtcctgtccttcctggtcagccagtactcgctgtacgggtacgacgcggcggcgcacctgacggaggagaccaaaggcgccgacaagaacggacccatcgccatcctctccagcatcggcatcatctccgtgttcggctgggcgtacatcctggccctcaccttcagcatccaggacttcagctacctgtacaacccgaacaacgagaccgccggcacgttcgtgccggcgcagatcctgtacgacgcgttccacgggcggtacaacagctcggccggcgccatcgtgctgctgttcgtcatctggggctccttcttcttcggcgggctgtccatcacgacgagcgcggcgcgggtggtgtacgcgctgtcgcgggaccagggcgtcccgctgtcgtcggtgtggcgccgtatccacccgcggcacaaggtgccggcgaacgcggtgtggctgtgcgcggcggtgtgcacgctgctgggcctgcccatcctgcgcatcaacgtggtgttcacggccatcacctccatcgccaccatcggctgggtgggcggctacgcggtgcccatcttcgcgcgcatggtgatgcgggaggacgacttccggccgggccccttctacctcggccgcgccagcaggcccgtctgcctcgtcgccttcctctggatttgctacacctgctccgtgttcctgctccccaccgtctaccccatcaagatggacaccttcaactacgcgcccatcgcgctcggcgtctgcctcggcctcatcatgctctggtggctgctcgacgcgcgcaagtggttcaagggccccgtcaggaacatcgacgaccacaacaacggcaaggtctgaacacctacgcacgcacgtcaagccaaggcctcaagcgactgacgccattctgtgctgtttgactccgggacttgggcgctgctgacactgtctccctccctctcaccctctgtatgttttcgatgctgcatcagcagcacctgtggcctgtgggcgacaagtgacttacatggagaacagaggaaaaattgagcaaacacaaaaggaaaaaaatgtgaatgcacaacaaagtaaatgttttaaggacattgatgtccctctgtacctataagttattttagatgaaaacatgtgaaatatttaagtttttgttaaaaaaaaaaaaaaaaaagcggcc

SEQ ID NO: 32106 - DNA, 1122 bp, Zea mays
  Clone ID: MRT4577_129293C.1
cccacgcgtccggcacattgccattttggacatgccgaaacacgcctaccacacagttatgacccatgggagttcaattcatattaccagtcctcgtatgctgaaagcacaattctggaccaagaatcacttaggtcaagctacaaggagcagaaacgggtggtgagaaagcatatcttgcggggccgggccggggcttccccattcactatctgcaacggctgtttcaacctggttcaaatgccatcggatgtctacatatcaaaagcaatggtcggcaaaatgcaatgcggcaagtgctccaaggttctggcattatcattccgtgcagcatacaatgcaaatgcaaagagtagtgtggatgtggcccaagagtcatacaacctggacgatagcgtagtcgctaaaaacgaggatattgcttcttattatgctgagtgcctaacagggggtccggttagtatcagtgaagactatggagcatcgcacacaagaagcatgcctgctcaagctgagtctagtagccttgctgccgcacaaagtggcaagaaggtctctgactcggcgctccatcggctcatggggtatgattcagctagccagttgttacgccacagcagggtgtttgaagatgggtacgagagcttcgagtcgatggtgccagtttccagcagagtgtccagaagaaagaacaagtgaggttctacttcgaagcgtgaaaccttttgctcaccttgcgagtaatcgtacaaaggagaaacagttttggagtgcggtccaaccgtgccgcagaagcccgtcctatgatccgaaggcaagttggcatcttgccatcgaatagttccattattttctcaaataagttgggatgtttgaagcgattttagtttttttttggtcatattctttaggtgtggtgtatagatatattgcttattcttgttgtaaatttgttcatatctggtactggtataatgacaactattaatacccacacaattggcaatctcgtggtcggatttgattgtatagtccggatgctggtcggttcaggtctttcacaactccctgcatgttgaattaagggtcagagatgctagctgctgacattgtattgacact

SEQ ID NO: 32107 - DNA, 397 bp, Zea mays
  Clone ID: MRT4577_129294C.1
gggaaaagttataaaaccttgggaacccctaaaaatccccaatagaggggcccccagcaagcaacttgggaatagttccctggggggagcccctcctaggggctaaggaaatagacatgaccccccattacccccctggggctcagttaacttacagaaaaataaccccggcggggaattaagggaaggggcatttaaaaatttttatgaggccggaggagtggatccctggggcaacaggtttgggaagtcgcaccccaagggaatgacacccaggaccacctcccccagctgggggatgttgtaggaaaggggggcgagggaatccaccctgggttcccggagggaccaggacggggggaagtgcccgaaaacccttagaaaggaggaccccggg

SEQ ID NO: 32108 - DNA, 323 bp, Zea mays
  unsure (1)..(323): unsure at all n locations
  Clone ID: MRT4577_129295C.1
aaactctgtatcctcnnnaagcagacgcccttgaattatttcttttaaaactttaaatacgagagatgcattttactgtaaggacgatatatattatcctactccatttcaaatcattttatatatgcacataaaacactgaatatgcttgtttatagttatataagacacattaacattaaatgaaaacccaaaaccaaattgtttcctgtgaatgttacagcatacacttcactcatttgaatggttggaattgactttcaatgcatgatatttactttcgaaacattattttctcaagcctcaagctcctcccttaagct

SEQ ID NO: 32109 - DNA, 669 bp, Zea mays
  Clone ID: MRT4577_129296C.1
cattgggtacctcgaggccggccgggagctcctcgtctcctatcctctcgatgcaaatcttctcctctcgcgtatcgtacgggcatgcagcgagacccacagaacgtgggtgagcgactctcgcctgcgcttcacgcgctgcctcctgccgggcgagagatcgaggtgtgacctagggcctggtggcggatatggccaccccagctaggaatcgcctgatgcctcaatctcagcgcctgcaccatgacccgcccgacgggatcagcggcgcgccacactgacaactatatcatgcgctggaaccgcgtcttattcagatcggatgacacgtcgtgcaatggaggcacgatctagctgactctgcaatgtatataagattaccccaagccagctcctgctgccttgcttagatgcgagagatgtttcatccaaacatctatgcgaatggagacatctgtctggacatgctaccaaaccagtgcagccctatatatgatgatgcggctatatagacctctattcacgacctgctgtgtgagcctgatgctgattctcctgctaactctgaagcagctagaatgttcaccgatgaacaacctggacgacaaccaactagatcacgaggatgacggatcagatctggacagtcgactgatactttatccgctc

SEQ ID NO: 32110 - DNA, 320 bp, Zea mays
  Clone ID: MRT4577_129297C.1
gggcggcccaatttcaggcatgcccaaaactgaagtttaaaacggggaaccaattttttttttaaccgcccaaaaattttggacgaacaattttttatgcccaagctactagggtttttttctttttaaaaaaaaattgattttttcccttttcaaaatagcctggaatctaaaaaatgcctgggagggaaaaaagtggggtttttttcacaaagttaacccaattaaagacttaattcccggcccaactcccgataacgattgggtaacaattgctcacccatttgggattatttttttgggaaccttaaacatggggg

SEQ ID NO: 32111 - DNA, 900 bp, Zea mays
  Clone ID: MRT4577_129298C.1
ttttttttttttttttctcttggccgcttttttttttttttttttcttcgtcagaagagaatgtatttcatttataaaaaattgtggtgcgtattatgaagatggtggaacggaaatggtacggaggagggtcattagtgctaagggtcattacaaatgactacgcgaaggcaccggcgtcagctcccacaccagcaccgactccaacgctagccccagcgttgagaccaactccagcaccggccccaacgccaactccagccccgactccagcgccgatgccagcgccaaggccggcgccagcagcaaggccagcgccaactccagcgccgatgccagcccctaggcctgcaccagcaccgaggccagcgccaactccaacattagcgccgattccaaggtttgcaccaaagcctccgaatccaccgagacctccgaagaatggaatcatgccacccataccgcccagcatgccaccgccaaatggcatcataccgccaccatagggcatcatgccaccggagccaccgtaccgctgtctggggtacccgcgagagggacgcatcgtcgggcgatagctgtttcggccgtacgagccgtaggatggggctgcataatcgctgtacgatggagcagggtcagaatcgtagtcagagccgtaatcgccgccttgtgggtgaggtagagcaatgacgctgctggcagccataagcaaggtgataaaaaaggtggattgcattctcgcggatttaaaaagtgaaaaaggatggtttgttgaatggaatgtttgataaatgattgggatgtttgataaattaggtgaagcgactgaggtctaactggttatgggaagttggaagctgaaggaaatgatcccggccggcctcgagggccccactg

SEQ ID NO: 32112 - DNA, 327 bp, Zea mays
  Clone ID: MRT4577_129299C.1
ttaccggtggcgacggcgagtgttgaaagagtgttttcagcaatgaatctagtgaaaaataagttgaggactactatgagtgatgatcgcttaaatgattgcttggtgacatttattgaacgggatgtgttcatggaagtaagcgaagatgacatagttgatgctttcatggcaatgcaaaaacgtagagttacctagtgatgtaattttctacttgtgcttctttaatgtaagactacttgtattgtaattgagcacatttgagatatattttgtgaactaaattgttgtgagatttgcattaagatactcatgtattattttgac

SEQ ID NO: 32113 - DNA, 762 bp, Zea mays
  unsure (1)..(762): unsure at all n locations
  Clone ID: MRT4577_12929C.1
ngactcaccctccgcaccggatcccgtcatcacctccgagcggcgcgccgggccggcatccaactcgccgccgacgcgccgcgccccagaacgagccgccggaacgatctccctgacccccgatgcgccgtcctattgcccgcggcgagcccaaggtacaaaccctagctctaggtcctccctccgcagccgcccccaccaagatgggcgcccataggcgacaacccagctcccaccgccgcgttgccggcgccctcacgctcctcgccgcgtccgcgctcgcgcttcttctcctagcatcccgccgggttcccccgacctacggcgtcatcatcgacgccggcagcacggggagccgcgtccacgtcctcgcctaccgctccacggcgggactcccgcagctggactgggcacgcatggcctcgatgaaggctaccccagggctatcgtccttcgcggcggacccacgcggcgcggggctgtctctggcgccgctattggagtttgccaggcgccgtgtgccgcgggagagctggggggaaaccgagtccatcctgcagtcttgcagggaagtgcttcgnggggtcggggttccaatttcaggacgaatgggccaccgtgatctcaggcatgtaacatagtaaaactgtgtgacttatttctcgttttgatgacttgctttggaaatgtgtggatctggagctcttgcatttgatgtgatgctggaagtactattttgaaattgggagcttacatttcaac

SEQ ID NO: 32114 - DNA, 105 bp, Zea mays
  Clone ID: MRT4577_1292C.1
cgggactgttggcagtaatcagcttcctatgagattgtaggaggtctcagcgaccattcttgcaaatgttgtggcatcgggtgcactaaacaaaagtttcctcct

SEQ ID NO: 32115 - DNA, 1405 bp, Zea mays
  Clone ID: MRT4577_129300C.1
tgttagagcggttcttggccagtcgtacgatagcgcgagctcgatggccaggcgtaggacacacgtcacaccgggtggcaactggcagggcaatgcccgatcaggtctccgtcgtcgattcgtctgaacagctatcctcatcatattttaatgcctcgtgcataatacggagtacatatctatatttacgtcagcgttattgcaacgccctctctctgtggtctcttcttctacatactataatagtagtacattagtactaacaatgtggttggccatggcatgcttgcttcgagatcaacatgaacaatggaagcacaagtacgagaatccatgtagaagcgtgaagattttccggtgccaattgccacagaataatgccttctactcagctcaacctccaaagcatgatggctctgacaaaccactctgtccaggagctcctgtatgccactggtgtggtacctggaaaggtgataaaatatgtagtagctgcaagaaagcaaggtactgttatgagaaacatcatgcattgcattggcgtactggtcataaaaatgattgcctccagataataagttcttctgcttcaaattcagttctgccagctgtaggaatagggtttgtccgctggtttgctaaggcaagcaacgtacatagactgcacgtcttggatccttcatgtttatatagtgtgttgttttatgatcaattgaccattcattacctccgcctgatggcccttattaacaacacagaaatggaattgagggtatccatggagatgcatgtagctgaactcagtcaagtttctatccattgtgtgtgtgcgcgcttattcggcatcgtgttcttacttttcatggggaatcataaaagcatatggaggaactatgtataggctacaaagaagcataagaaccatttttatagcagaagccaaatgttctgatgattttgttttttcaattgtgttttctgttattggttcagcatgcacatatattgacatgatttatggcatggcatctaccatctttgttatatttatgacatcgttcttaattaatgtgtgcgacatgaaggatggatctttttaaaagcatatggaggacccatgtataggctacaaagaagcataagaagcatttttatagcagaagccaagtgttctgatgattttgtttttttaattgtgttttctgttattggttcagcatgcacatatattgacatgatttatggcatggcatctgtcatctttgttatatttatgacatcgttcttgattgatgtgtgcgacatgaatgatggatctttttaacatcctgaccatcattgtgtcgctcattatcgtattttgttatcatttatgggtccacagatatccaatgccaggtttctt

SEQ ID NO: 32116 - DNA, 1599 bp, Zea mays
  Clone ID: MRT4577_129301C.1
atgggcgctcagatagataattctgttaatgatggtcgtggtccaccgctattcaaaatatgtggacaggttcatcatcgtataggatctctattacctccagatggatcctcacctaaattcattcaactgtacatctacgatactgcaaatgagattcaaaatagaatgaactctttggggaataacgatagaaatgatggtggtttggaccctgttatagtcaatgggttgataaaaatgcttgatgatcacaatccatttgcaaaaaaattccgtatggcaagagatcgtctagctgataatgaaagtgaagattttattattagactcattggtgctaaggagggtgatcctgtacaatataatttgccaacaacggatcagcttgctatgttgattgttggggatttctctttggacacattcaaactgctctacacaattgaattccaaaaacgaggcctacctcactcgcatatcatattttgggtatcaaatggcacttcggagtctacatccaactttattgattctttcatcagtgctgagattccagatccaagcatcgaccctttaggatgctcgaagaattatccaaaggagttccatgaagaaactaacctggacgaacaaggatttgctacatacagacgacagaacaataaccgctacgtcattaaagggggtcacaagttggataataggtgggtagttccatataatgacactctattaaagacttatcaagctcatatcaatgttgaatggtgcaacaaaactgtttttgtcaaatacctcttcaaatacgtaacaaaaggaccagactacaacaaagtttatttacaaagaataagaaatggtgaggataccccttatgatgaagaaactaatgcgagaaatgaagtgaaagaatatttggacactcgctatctatgcgacaaggattcctgttggcgtgctacaagctacgaggatttgagaagatataacaacatattacatcccacatttaaggaagcatgtagagcacgaggtcttcttaacgatgacaatgagtggtacaatgcctttgacgaagctgccagatgggccacttctgagcagttgcgacatctatttgtcaccatgcttctttattgtgaggttggagatgagtatgcatttttcgagaaagtatggaaacaactaacagatgatattcaatatagaatgagaaaaacattgaatcttccttcctatcaaatgccaacaatagaattgcgagatcatttaattgacaaattatctgtgcttttcaacaaatgtggctccaatataaaagaatacaacttgccacaaaaaactaattcaacgggctcaatccacgacaatcgatttattgaggaagagttatcatataacttcgatactttatcacaaactgcatacaatctccgtgtgaaactgaatgatcaacagttgcatgcttttaatactatagttgatactgtcctatcaaacatatttggattcttctttttatctggatatggaggcactggaaagactttcctttggaatgcgatcataacacacttacgagcacaaaaaggatag

SEQ ID NO: 32117 - DNA, 1333 bp, Zea mays
  unsure (1)..(1333): unsure at all n locations
  Clone ID: MRT4577_129302C.1
cacaatttcttcgtcccgattcctccgccgacgcccacgctgcggacaaatcagccgccgtcgccctctcgggatcgctggctcccctgcctctgtgcacactcctcaccaggacccaagccagctccgtcgggcgccgtggggaactgctgggaggggcggtcgaccggcggtgcctctgcttcgggttctccgtaccggcgtcggaggggatcggatggcataagctcctgaatgccactggtgtggtacctggaaaggtgataaaatatgtagtagcagcaagaaagcaaggtactgttctgagaaacatcaggcactgcattggcgtactggtcataaaaatgattgcctccagataataagttctgctgcttcaaatttagttctgccagctgtaggaatagggtttgtccgctggtttgctaaggcaagcaacgtacatagactgctcgtcttggatccttcaggtttgtatagtgtgttgctttatgatcaattgaccattcattaccttcgcctgatggcccttattaacaacaataagaactaagaatgtgcgctaagatttttcttgctatctgaagtggtaaatttgttaatcctaattctttgttgaatgggtatgggggtttntgtgggtgctggatggtgttgtgggaatgagatcctttagattgtgttttgttggacattactgtttatgtgctttgttcctacaatctgtctattagttgttgttgttggtaattgagctttacttgtcccgtggctgtcaaagggttaatgttactaaattctttcaaatgcctaaatatttgttgccagcccatgtatgccactggtgtggtacctggaaaggtgataaaatatgtagtagctgtaagaaagcaagatactgttctgagaaacatcaggcactgcattggggtactggtcataaaaatgattgcctccagataataagttcttccgctgcttcaaattcagttttgccaactgttggaaaagttcctgctaacacttcttggccagaatttgagataaaaatagactatgaaggtatatttgattccgatagtggtgatgagaataactcgaagttgttggtgatgcaaagacatgggaaacctgatgctatgatgcagtcatggatggatcaatttgaggttttgggtccattttctttcagaataacctctgttggacttctgcttatgcatcaatcattatatttatttaatgntgnctgggtaggccgattctgacaacaaatgctggacatcttttcaagagcgggtctcaagagcaccaaatcaagtgttgaggtatt

SEQ ID NO: 32118 - DNA, 350 bp, Zea mays
  unsure (1)..(350): unsure at all n locations
  Clone ID: MRT4577_129303C.1
ggtggggggggggtgggagggttttattgnagttgaagtggggagaatagataggaaaaggtatgaaggatanatattaaaaagtnaagggggatggataaataattnntattgtttatggggggagaaggnggaaaaatatagagattgattagaataggagagggggggggaggaatagggttagtgagaaaaggtggttaattgataagttaagaaagattatggggaaatgttttagtntattgggnagatgaataantantaatantaattgttggaagttgaaaaaatnatgggggggttaaggtatggaggagaatttttgntgataggagttgtgtataaaa

SEQ ID NO: 32119 - DNA, 744 bp, Zea mays
  unsure (1)..(744): unsure at all n locations
  Clone ID: MRT4577_129304C.1
gggtcgcccccgtcgaattcttccgcaactgcaccaanctcccatgtctaaagaataatcatagtcttgtaaatcaacaaggagttcaggttgcatgtttgctggaatgatatttcgcaaggaaccattcttttatggccatgacaaccatgaccaacttgtgaagattgcaaaggtccttggaacagatgggctgaattcttatttgaacaagtaccacattgagctggaccctcaacttgaagctcttgttggaaggcatagtagaaaaccctggttgaagttcatgaatggtgataaccaacatctagtatcacctgaggccatagattttctcgataagctcctgcgctatgatcaccaagataggcttactgcacgggaagctatggcacatccctacttccttcaagtcagagctgtggagaacagtaggacgagaccacaataatcatggtctacactctcgcgatggagttgttgctagttcgtgaagtaccataggctaaaaccatgttcaacaagcatttcgctcttggaatctgggccatgactccatggcaatgaatcaaatagtatgagtcgcatcatgttggcaaccttggcagagcttgttattattgtcttaatcttgggactgtagctttaaacctgcaggttgtgcttgaatggaatgaaatatggaattgtatgtgatctttttagacaaagtgaagagtacaatacaaccctaatcatactgct

SEQ ID NO: 32120 - DNA, 135 bp, Zea mays
  Clone ID: MRT4577_129305C.1
aggtcaagtcgaaccagtacgagtcctcgtcgcttgtgcagatcttgggggtgaacaccaaggaggacgtcgcgtgctacgctggtacgtgcatggtgtacatatacaaggccaataccatgagcattgtgaccc

SEQ ID NO: 32121 - DNA, 378 bp, Zea mays
  Clone ID: MRT4577_129306C.1
aatgcctcatttgcacatattcatcaattgcttcttgcactattcgagaatgtattcaacaacatgcaaatttcaggccattgtgtgccataatgtggagctttgaataaacgagatggtcgccaatcgccatgcgtgttttttcctaatctaaagattacaaatacagtcatgcagattcagttcacctaatgttttgtcatgcgaaatatgcacagtttcgatgggggtgattctttctgtttttgccaggttttacgccgaaaaagtgctgcttgcgctggagtacctgcacatgcttggggtggtctacagagacctgaagccggagaacgtcctcgtgagagaagatggccacatcatgctctccgacttcga

SEQ ID NO: 32122 - DNA, 756 bp, Zea mays
  Clone ID: MRT4577_129307C.1
gaaataagaggtattcgcatctccctcctttaaccaattcaggcgcgacctagttctggctatcgttctttccagagacgcaagccctaaagacaggtccttggaacagatgggttgaatgcttatttgaacaagtatcacattgagctggaccctcaacttgaagctcttgttggaaggcatagtagaaaaccctggtcaaagttcatgaatgctgataaccaacatctagtatcacctgaggccatagattttctcgataagctcctgcgctatgatcaccaagataggctcactgcacgtgaagctatggcacatccctacttccttcaagtcagagctgtggagaacagtaggacgagaccacaataatcatggtctacactctcgaaatggagttgttgctagttcgtgaaaatcataggcttaaatccatgttcagtattcacatcgctccaggaatctgggccatgactccatggcaatgaatcaaaatagtccgagccgcatcatgtggacaaccttggcagatctttttattcttgtctttattgctgggagcactgtagctttaaacctacaagtagtgcttgaatgagatgagattcatatcatctcctgtggtggaatgtgaaattgtatgtgacctttagactaattaaaaagtacaatacagcgctaagcatactgcttgtattatgttgtgctattatgtatctacgattcttatttttttgggcgatagtcaccgtgatg

SEQ ID NO: 32123 - DNA, 312 bp, Zea mays
  Clone ID: MRT4577_129309C.1
agccacaaactggagcccagcgaaagggacgagaaaaccaaatattttccccctcctagcgcgcgcaggggtgatcaccaccgccttgaaaggagagaagggacgccgactggccaatgatatccacgtgacggcgggcaataaaacggggtgtggtgtagccacagtaggagacggcggaacggccggaacgagcccagcaagacacgactggacagattgactggcgagcatcgaggcatgcaaatggctatactgacgaacgaagctcgcctcccacgcagaaatcattttttttttaccccccccccc

SEQ ID NO: 32124 - DNA, 308 bp, Zea mays
  Clone ID: MRT4577_12930C.1
ctagatcgcgagcggcgccctttttttttttgtggttattgtattcatgtcgtggttatgcgcatgtgcttctgtattaagccttgttttttatgggaacagaaaagtgttgataagtcccactataatgagtgttttttaaaccccattatagtgatttgagaggggattttaagattatgtcaggcaatataaccgtgcgttctcaattgggtcaaccccaaccaacgtcccttctcccttcccgaaggttggatcgtccttggtccttttgaaagaggttacttccccaaaggatacaaggttgg

SEQ ID NO: 32125 - DNA, 406 bp, Zea mays
  Clone ID: MRT4577_129311C.1
cgtaagctcggaattcggctcgaggactgataaacccaaccgtaaaaccgggaagggaccagaacgccgagggcagtctaccagaaattccgccgggcacgggacaacaacaaggaaacagcaagccagcaccgccgccggcccttcacaacaccaacagtacaacgggacatggacaacgatgccaggggccccatagaccaggaccggagtcggcacacaaggggagggaacacaaatgccaagacgcaaaacaagccccgaggcgccaggcaaccaccttcccaggaaccaccacccatgaaaaggctgcgcggatcatacgcaacacaccgacaggttcatctcgatataacacatggcgagaagtggaaaataacctctaaatacttacaaataagcgaaa

SEQ ID NO: 32126 - DNA, 593 bp, Zea mays
  Clone ID: MRT4577_129312C.1
ccgggaggatctgttcattaactaactgttatcgttgaacctccattcttcttgttcattccagtgattaccccgctctagaattctaccgctctttgaaccccccgacagtcttttcccattccgttaccatggctgaagggcgctgcaactgcggaggcatcaaggtttccgtccccgctctgccggagaagtccataatctgctactgctcaaattgtcgccgtgcgggctcgagtataggaagcatcatatactctctggataaatccgaagtcactatcaatgaccccaatggcaatctcaagggctacgaagacagcgatacaaagagtgggaacacgctcactcgtcagttctgcagcaactgtggatgcccaattgtttccctgcttggtcagaaaatgttcttgaagggtggtttgtttaagcatacctgctccgggccacaaaagttttgcggaagaagagccgagctggatgaaggttctagagcccggcgataaaaagatataaaaggagtagctaccagtttccaacgtagtagttggagcacatccatagctgtggaattttatgtatctagtccatcc

SEQ ID NO: 32127 - DNA, 794 bp, Zea mays
  Clone ID: MRT4577_129313C.1
aacccaaaatcagcgactggattttcccggcccgaaacagcaaggtctctctctcgcgctcgcctctctcctcctcgtcttcggcggcggcgacggcggtggcgatgctgtccggcgacgttcccccgaaccagaccgtctacttcaggaacctcaacgagaaggtcaagaaagaagagctgaagagatcactttatgcattgtgctctcagtatggaaggatagtggatgttgtggccttgaaaactcataaactgagggggcaagcctgggtggcattcagtgaaattacagcggctaccaacgctttccggggcctacaggacttcgatttttacggcaaaaaaatgcgggtacaatatgcaaaaacaaagtctgactgttttgcaaaagcagatgggtcttatgctcctaaagagaaaaggaagaagcaagaggagaaagctgctgagaaaaaacggcgaactgaagatggacaacaacctggtgctagtgctcctgttgccccaagcaatggaactggtcatcaaccttctcgttttgccaagcctcgcaagagccagctgctccgccgaacaacatcctcttcctccagaacatgccggaccagaccacgagcatgatgctccagatcctgttccagcaataccctggtttccgggaggtgcggatgatcgaagccaagccaggcattgcttttgtggagtacgaggacgagaaccagtccatggttgcaatggaagccctccagggtttcaagatcagcccagagaacccaatggccatctcatacg

SEQ ID NO: 32128 - DNA, 3094 bp, Zea mays
  unsure (1)..(3094): unsure at all n locations
  Clone ID: MRT4577_129314C.1
gaaagttgatgccgttgaatgagcatggagatgattagataatactcagtttttctctttcaattatatgttctaactacctattaagaaatagaaagaacagtaccagttcaagatggtaatgtaatagtataccatagaaagataaggaaacacattgctcaacttgtaattgtatttttctcttcagaaatagatcttttggtttttgaatagcttgngagagtacattattatagtagtgcatgttgttaatccatcaatggagttctaccaagctcatttgatgaactgaatctcacacaggtaaataaaaaaaaaaaaaaaaaaaaaaaaaaaaaccgggaaccccgaccccctcgaggcggcgacccgacccgacccgcctccaactccaagccaagccgccatggcggctccgcccgcgaccaccgccacgactcaccaccgcgcgctcctcccgcccacgcgcacccacgccgccgctacgcactccgcgctccgcctcccgctccgcgcgcatccccacgcccacgcccagcgcgcgcgcctcaccgccgccgctgccccggcccccgcggcgtcgacggcctccctcgagtcctccgccgcggggaagcctacggtgctcgtggccgagaagctcggcgccgcggggcttgcgctgctgcgggaattcgccaacgtcgactgctcctacggcctctcccccgaggacctccgtgccaagatctcgctctgcgacgcgctcatcgtcaggtccgggaccaaggtcggccgcgacgtcttcgaggcgtccgggggcaggctccgcgtcgtcggccgcgcccggcgtcggcatcgacaacgtcgaccttgccgccgccaccgagcacggatgcctcgtcgtcaacgcgcccactgccaacaccgtcgccgccgccgagcatggcatcgcgctgctcaccgccatggccaggaacatcgcgcaggccgacgcgtcactcaaggctggtaaatggcagcgcaacaagtatgttggtgtatctcttgtgggaaaaactctcgctattctcggatttggaaaggtcggatctgaagttgctcgtcgtgctaaaggcttaggaatgcatgtgattgcacatgatccatatgcttctgctgaccgggctcgtgcaatcggggttgaactagttagcatggaggaggccatgacaactgctgactttatctcgttacacatgcctcttacgcctgcaacggacaagatgctcaatgatgaggccttcgctaagatgaagaagggtgttcgcattataaatgttgcacgtggtggcgtaattgatgaagaagctctagtcagggcacttgattcaggggtagtagcacaggctgctcttgatgttttcactaaagaacccccagcagctgacaacaagttggtactgcacgggaatgttactgtcacacctcaccttggtgccagcacagtggaggcacaggaaggggtggctattgagatagctgaagctgtcattggagctctgaaaggggagcttgcagcttctgcagtgaacgcgccgatggttcctgctgaggtgctgtcagagcttgcaccttttgttgtgctcgcagaaaagcttgggcgcttggctgtgcaactagttgctggtggtggtggtatcaagtctgtgaaagtgacctatgcatctgcgcgggcccctgatgatcttgacacgagacttctccgtgcaatgatcaccaagggattgattgaaccaatctccagcgtttttgtcaatctggtaaatgccgacttcaccgcaaagcagaggggagttcgcatcacggaggagaggatcctgctggacggctcacctgaaacacctatcgactacattcaagttcagattgccaatgtcgagtccaaatttcccagtgcgatatctgagactggagaaatcactgtggagggcagagtgaaggatggtgttcctcatctaacaaaggttggagcattccaggtggatgtgagcttggaaggaagcctcatcctctgcaggcaggttgatcaaccgggtatgattgggtcagttggaagcgtcttgggtgaggagaacgttaatgtcagtttcatgagtgtcggaagaattgctcctcgcaagcatgctgtcatggcaattggtgttgatgaggaaccaagcaagggcacactgacgaagatcggggagattccagcgatcgaagagtttgttttcctcaagctctaggcgcgaatgtatgtttgaagttgcaagcatggtgtgcaattttgatgtagctagcaatccggaggacggatggttctccttgaaataagcttttaggagtatttttgtagtggcgctcttgaatatggtctggtatcgatgcctacttttgaacggggtgtttattaataaaaacttatatatcaatgcttggctcataacgtgggagaggatcctactggacggctcacctgaaacacctatcgattacattcaagttcagattgccaatgtcgagtccaaatttcccagtgcgatatctgagactggagagatcactgtggagggcagagtgaaggatggtgttcctcatctaacaaaggttggagcattccaggtggatgtgagcttggaaggaagcctcatcctttgcaggcaggttgatcaaccaggtatgattgggtcagtcggaagcgtcttgggtgaggagaatgttaatgtcagtttcatgagtgtcggaagaattgctcctcgcaagcatgctgtcatggcaattggtgttgatgaggaaccaagcaagggcacactgacgaagatcggggagattccagcgatcgaagagtttgttttcctcaagctctaggcgcgaatgtatgtttgaagttgcaagcatggtgtgcaattttgatgtagctagcaatctagaggacggatggttctccttgaaataagcctttaggagtatttttgtagtggcgctcttgaatatggtctggtatcgatgactacttttgaacggggtgtttattaataaaaacttatataccaatgcttggctcattggttgattccaaacaaaaaaaaca

SEQ ID NO: 32129 - DNA, 552 bp, Zea mays
  Clone ID: MRT4577_129315C.1
gtaccgggcccctttcgagtttttttttttttttttttttttttttttttttttttttttttttttttttttttttttttttttttttttttttttttttttccccttaccccgaggcaaaaaatccaaggcaaaacccactttacaaccttttttttttgatttgggggaatcggaggggaccttaccggttaaaaaaaaggggcggcccccccttttcccgataaattaacaaaaccacccctaaaataaagtggggccccaaacatggaaattcacccccttcccaattcccaggggtaaaaaaagggaaaagccctgggggctaaggcgggaaccccttgaaaaaaaccccaaaatttccttaaaacaccagttgggtcaaaaccggacaattttagcccccggttcccccataaaattccccagaaggggaaaaattttgggcccatttgcccttgaaatggggacgggaaaactgggtacccccaaaagtcttttgggtctcgtttttggggcaaccccttggtttgtttaggaccagcccaaact

SEQ ID NO: 32130 - DNA, 698 bp, Zea mays
  Clone ID: MRT4577_129316C.1
cccacgcgtccgcggatcgagatcatgatccagcgagcgagcgagccagctcgtcacttccattagcagttagtctcgggctcgttggccgtctttgctggggcagctacctagcagacgcatggcacacgtcgaccggccacggagccgcgccgtgctcgcggtcgccgtcgccgtcgccgccgcggcgctcctcctttttgccgcagcgggcgtcccgcgtgcggccggccagacgacgacgacagcggtggtggatctggacagctgggccgatcgcggcgcggcgtgcacgggcgcggtggaggcgtgcggcggcatcggcgcgacggccaggagggagctgggttccggcgggtacatcagctacgacgccatgagccgcgggcgcgtgccgtgctcgtaccgcggcgcgtcctactacaactgccggccgggcgcgccggccaacccttactcccgcggctgctccgccatcacccgctgcagaggctagggcagcgagcgatgaccatccccctccccctccccccgggcacgcatatgatctgctctggtggttttgtgttctgtagttagctgggcttttgagaggctggttgttgatcagctggcctagagcaagctgcatcttgctctatgattttgtaaatcggattggaagaagggaacatgtggggatcaagaacgcctgggcc

SEQ ID NO: 32131 - DNA, 543 bp, Zea mays
  Clone ID: MRT4577_129317C.1
tcgagcggccgcccgggcaggtacaagctttttttttttttttttttttttttttgtttttttttttttttttttttttttttttttttttttttttttttttttttttttttttttttaacaaaaccccatttttacccccaaaatcccatagtaaaacaaagggaaggggggcgccccaaggaaagacccccaaaaaaaaaaccaaaaacagcacccaaaaaaaccccacccaaaaaaacaacaacatcacccccccccacaacatccccgggaggagcaaccccaacaacaggggcacaggcacccccaaaaacccccccaacaacaagagggtcagggtaaaaaaaaaaaacaacaaccgggggaccccccccaacaaaaacaacaacagccccaacaacaacatgaaggggagggccaacaacaacatcccaaacaataaaaggggcgggggcaacaccccaaacagagccctgaccaaccccggggacaaaccccggagcaaaaacataaacaacaattccgggggcaggaaaagca

SEQ ID NO: 32132 - DNA, 426 bp, Zea mays
  Clone ID: MRT4577_129318C.1
cttggctctggacctttgggctgatttatgtgcttgtttatgtgcttgggtgattgatgccgtcgccatctttgtgttgccggcggacgtggtttgagaggtgtttgttgatgttttggtggtgttcgtcgttgatgtgaagttcgttaaggttaacaaggttattgcgttcaagaagtgtgttagtttgatttatttgttgcatgttgagacggctctggaggtgactatgctgtctaaggagaggatggggcttagtagtcatgtgaccgttaagcctgcggaggataagtataaggttaagtctacgtttaatccttgtaagtcctcgaatgcctagtctaagaagtctgctgttggtcgtaagtcgattaaggcgcagaatctgcataagtcgctgcatgttattcagttgaactttaagtt

SEQ ID NO: 32133 - DNA, 861 bp, Zea mays
  Clone ID: MRT4577_129319C.1
gtctggctggccgatgcaggaggcataggactgcggatgcggaagagtagagtcaacccaagccgtcaggagaggagcgggggaatggcgacgcctcgccggctcatccgggagcgcgccgaggcggcggtggctactctcgtggcagtccgcccccacgagatccccccgttgatgagcgcggccaccaccttcttcttcatcctgagcgcctacttcgtggtgctgccgctgcgggacgagggcgccatctccatggggctcgacactctcccgggcctcttcgccggctccctcctcctcaccgtcgtcgctgcccccatcgcctccctcgccttctccctcccctccatccccaagtccaaggctttgatgatgatacacaggtttttcagcatatctcttcttgcattttttgtgctttggtatacctctacaccagggcagtccggacctacctcccagtcaagtgaaggaggttcagataaacctgcaggatggagaaatcagagctggttctacatagttgtgagaataagtttgttcctttgggttgctttgctaaatctcattaccatatcgtcaacttgggcaagggtaattgatgtcatggacagtgagtcaggttcaaggttatttggttttattggagctggtgctacgctagggcaactttttggttcattgttcgctgcaagtatggcatggctgggaccatttctgctcctattttcttcactcttgatggaacttgctgccctgtcatcaaaaggaatttgtattgatggaaatcatgcttcggctgaattacgtcaaacaggggcaggacaagctcctaatacatggctgatgatgaaattc

SEQ ID NO: 32134 - DNA, 652 bp, Zea mays
  Clone ID: MRT4577_12931C.1
caaaaccagtgagaaagaagaagctcgttgccgagacacgaaagtttatgaaccaactgtttgttgggtaggacatacggtgtaggcagtcccagcaggtttgattataaatttggtggaccacctaaaaccaagatgtgcacggacaaacagaacagaaactgacaccatgtacccagtggagtgtgcatccttgacctgcctccacatttatggcgagtttaggagctagaaaagagaagtagattggagagataaaatctactccttatttaaaattgaataagaattagattctagcacatccaatcctcatcagttttgtagctcccaaacaactcgatttctaaaagggattcttatttttaagggaaaataaactaatttcctttaaataagaatcccttaaaaatatatggttgtcaaactagtccttattatcgttgtccatttgtcctccatggctccatccatcgtgtcctctcaatattatgctgaccttttaggactgtcgaaaaaaaatgcaattgtcggtatgaatttgaacaaatatcgatctagatttatatttggaattgccatttctttttttttaaatggatggagtacgttttggaaagagaataagtgcaaagtcccgtcgagtggggag

SEQ ID NO: 32135 - DNA, 626 bp, Zea mays
  Clone ID: MRT4577_129320C.1
gcttgcctcgtcacgaactcacagcttgtccatcgtactcacagtttcttgctttgcaacaggcggtgtaccagaaagctggcaacatcttcttccgtaagagcgtcaaatcggtgatcacaacggagcagagtaaccgctatagcattgcatctttgtccagttactttctctccttagcttgcattgtctaacattagtgtggttttatgatttgctatgggttacagagcaacttgaccaagccaaggctcggctgagcaagctgaaccaagcttgatgggcagcacgctacaaatgttgaccttgaacaaaatagagcatgcagatttgaatggacttctcgttgctcattaattctgcagttgggcgttgtggacataatccatgtgtaatgctactttctttttcatgagatgtatggctagtgtggtcgtgaagtttggttaagccttttgagcccgattcagcgttaaaaatctagaatctcaactaaagcagtacatgagctgaatagatttctaaaactctatggatttctctagtttaatctcaaatctcttcttaccctagcggccttagtttctgtcatccaattttttttaatattactcaattgccactac

SEQ ID NO: 32136 - DNA, 338 bp, Zea mays
  Clone ID: MRT4577_129321C.1
cccacgcgttcgtccacgcgtccgaaaaaaaaaaaaaaaataataaaaaatgtaaaataaggaaaaaaaactaaaaaaaaaaataaaaataaaaaaaaaaaataaaaaaaaaaaaaaaaaaaaaaagataataataaaaaaaactaaacataaaaaaaaaaaaaaataatgggcgtgctttttagaggcccaaggtttggaagactttttatagcaacgaaacgacttcttatatgcacaccttattcaagcccgaggccgcggttttaaaagaggccctggacgaaaactccatgcttgccgacactatagccgctaagccaaaagccacttttatc

SEQ ID NO: 32137 - DNA, 308 bp, Zea mays
  Clone ID: MRT4577_129322C.1
ttggttttttttttttttttttttttttttcacattaaaatgtggaaaggtaactttttatttttggtgggccacatactcggatcattttgctaccatatggacaaaggtagcaaaagaaacaaaaggatatgcaaacagcagcagttgaagtaggatgtacatattcaggggaatttgacctgttactgtgcaccgggaatagctacactcattgaaaatcatgccactggcttatacacaaacgggaccacactcttcattcccgaaggatacatttctatggattttcctggggattggtatct

SEQ ID NO: 32138 - DNA, 495 bp, Zea mays
  Clone ID: MRT4577_129323C.1
ggaaacagatccaactttccaagggggggggggaattaaactaaagaggggggagaacacaagctttttatgtgtgggtgggtagacgtacgggacgggcaagggccaactactggtcgtttggggctgggggaaaccacgaaccacgcatgcttgaagacgacgacgtcctacaggaacaggagcaccactttactaccacgcttgggggggttcagggcttgttggcgtgctcggggacggagccgggggggggcaacccgggcatgccgccaaagccgttgaagcccggggggccccccccaaaaagggggatgctgccgttgccgggcaagctgaacccgggtagggtgctgccgttgccgggcttgctgaacccgggaatgctgctgccagaaatgctgcccccggggaggccgccaaacgccggggacccccccccccccaggcggccaagggggggaaaggtttggggttcaccaccgggtccccggg

SEQ ID NO: 32139 - DNA, 1313 bp, Zea mays
  Clone ID: MRT4577_129324C.1
acgataccggccggacgacgactcagtggcctggtcaaaagagccagccgaactgcccgtccgcctcccgcgacggccgccacacgccgggtgccagtggtcacgctcacgccgactcccagctccagggcgccctcaaaccagcgctggctgccatgctgccgctcgcacactccgccggctgcagccatctccacctccctcccgctccgagtcgagcttaccttcccaatcgccgccgcgtccgatccctcgtccgagcgcgccctcccagcgcgggggcgtccggaactgaaaccacctctaccactagcggcagcgttatgtcgttcctgtgcccgctcctcaaactcctcgggggaggcgatccttcgcagcaacggaacgacgttgtggaggtcacgacatcttcaatttcaagtttatccagactgccatggggatcaaaagtggctactagcagcggggagaacatcgattcagcaataagcattccaactcttcaactgtatgagtttgaggcatgtcccttctgtaggagagttcgggaggccatgaccgagcttgacctttctgcagaggtttatccttgtccaaaagggtcgctaaggcacagggacatagtcaagaaaattggagggaaggagcagtttccactccttgttgacgccagtactggtatctcaatgtatgaaagtggagatattgtgaagtacctgttcaggaactatggacaaggaaggagtccttcacctggtctccttgagagtacgattttcacaggatgggtgcccactcttctcagagctggaagagggatgacactgtgggacaaagccggtgctgtacctgcagagaagctggagctcttctcgtacgagaataatccctgtgcaaggatagttcgagaggctctctgtgaactggagcttccttatgttctccagaacgtcggagagggatcgtcgaggacggatttgcttctaaggaagtcgggctctaagcaggtgccatatctgatcgaccctaacactggattccagtcgggcgaccataagaagatactaccttacttattccagcagtacccagttagtagtatctagcagaaaaagcagacgtccacaactttaactgtgtatggtttatgtgatcttacatatgtatctgcgggtacagtgttaccagacgtggtttgtacgtatactttggctgctgcacttgaattcctcacatggcactacgtttcttcccagctaaaaagcgccaaaaaaaaactcgagggggggctctaatcttcaccagccctccta

SEQ ID NO: 32140 - DNA, 169 bp, Zea mays
  Clone ID: MRT4577_129325C.1
taggcgtgcaaaaccccgcaaccttttcgacaggatcctgctggcgctagagtcttctcccggacgcagaaactctttgcttccgcatggatcgcgatgcttgtatgggtgcgctggcctgcagcgaggtgaggagactgcggcgccgggcggttgcatggtggacgat

SEQ ID NO: 32141 - DNA, 446 bp, Zea mays
  Clone ID: MRT4577_129326C.1
ggcccaggccaacccagagcaaacaacaattcgcacaaagttgacaggaggcccaccgggggggaccaacggggcccagagacgggcggccccgaggacccccacccggtccacctgacgagagccctcgaccggccgcccaccacagcggcccaccgaccccctccacgtgcagcagcacagcagcggccagggagcaccagccaggaggacgaggaagagggcagctggcaagccggagacggcaggaccctaagctctctagcaatagccgctgcacggcctcggctgcccctacatattccgcaacgcgtatgtcttgcgacgacatgaagagcagctccagccaggcctgcggatgctcctcaggcacagggctgatgccgtccttccggctcccgacaacgagaacctgggaataaagaaggaaggcggcaagcactgcc

SEQ ID NO: 32142 - DNA, 461 bp, Zea mays
  Clone ID: MRT4577_129327C.1
aaaacataaaactaattcagaattggcaaaggttgggggaagaccccccacccaaaaaaaccgggccctttttaaacccacccttgccccaactaaggacccaaacagaaaatcctttgcccccctccttagggagaggggcccccaaacaacccaggcccatgggaggttaaaccaccccaggattaacggccccccagggaaacggaccacagggggggggggccccccctttggaaggtggaacccggcaagggggcgcccaccccccagttgttggccggaaaaaacaaaaccctgtgggcccgggggaaccccccccttgcccggaatcttcccctttacatgggcgagggggcccaacctctcacccccaagggttagggttttcccagccggggtctttacaaaaatcggcaacccacctcggggggggaaaacaagggaaggggggctcccct

SEQ ID NO: 32143 - DNA, 2672 bp, Zea mays
  Clone ID: MRT4577_129328C.1
gaaacaaggaaagtggtcagctagcacttttgccttacaactggactacaacggttgcggtatcacgccctctaactcatgtaaagaaattgcgggctaaggttttgggccttactgatgaaacaatgcgggtttgtgctgttttggcaaattggaatgggagcgacaatgaaagttttgaaggttttgatattggcaatggacccgaatgggatacaacaagacaaatgtttgaacaatttgtggatatattcattaatgctatgtttgatctaattgggcctagaaaatattctcagtggggaggatccctaattgattctgtggtgggtactttccttacacagaattctgctgataatttatcaagccaagcttttatgaacatagcggtgaggtttcctaagagtgagagacactgtcaagataatgcgactcaattaatagatggtgtcgatagaaaaatgaagtcaaaagaagcatttgataactttgacttggttcattcacattttgatgaatacattaaatctgaggaagaagttgactttgataaaaaggtgaaaagtcaatacggcgaagactacaatagaattataggaaattttgctgcaagtatgaagcagaaaaacatctctacttgggacagtgatcttatgaatttagtgaaagataaatatggaaatccagtgtgcgacgagaacaacttgagaaagatcttagcttcactacgacaaccagtcacagcatctaattggaaagagttacaggaggaagcatataaaaaaggatacaataacaaaagtcaaactgaaacaagtgatgttgtagattgggaatcagttctaaacgctccattttctgaggttgcaaaatgcattgcaatcaggggacagcacaacattttggctgtgcggatactggcttttctcgaccatgtaaagaaagctcaagatggaagctttgacctagattggcttagatttgtatcacgtgaaaaagccaaaaaatttctgcttagtatacatgggattggagtgaaaagtgctgactgcatttgccttttgtcattgaggcatagagcatttccagttgatgtcaatgtagctcgcatagtgacaaggctaggatgggtcaaacttcagcccttaaacggtgctgatttccacctaattgacctttatccgatcttggatgatgtacaaaggtatttatggcctcgattgtgcaccattgataaggaaaagttgtatgaactgcactgtcttatgataacttttggaaaggtagtttgcaggaaaaaaaatccaaactgcggagcttgtcctttcagtgcaagttgtaaatattacaatagttcacttgccaaaaagtcgctacctcttccagagaagcatgaacaaggagaacagcaaacaagcatggttgcttatgggagttgcacaccaagttctcaacaaatgtatcggtatcaaattgcaataagcagcactactactgaaacaccacccatccatagctgcgagccaattgttgagatgccaccaagcccagaatatgaatacaatgaaacacctaatgagcaagaagatttctacgaagattatgcatgtgatattgaagattttgcaccaggagtacaatatgattctgaaataaatatttgttcaaacaagcatacgctgaacaataattcttggacaccgaactgtgggaaggacttggctgtgatcaatccaaagtgtagctttggccaaagtaaaaaactaaaaaataccggtcgtcttaggacagaacacaatgcatacgtcctcccagatggtcatgtaatcctagaagagttcgaagacagagttccgggagatagatgtccttacctactagtggttatttcatgtcctgatgactacaaagttaaaggcacggttctgataccgtgtcggacagcaaatagaggaaagtttccactgaatggtacctacttccaggaaaatgaggtttttgcagattactcatctagccgaaacccaataactgtacctagggaatgtattgggatgctggagagaagcattgtatactttggttcatctatacactcgatcacaaaaggtcaaacaaggcaagatatacaggaatgcttgaaggaaggatatatctgtgtacggtcgttccaccggaagaccagaataccactacgcctatgtagcacactacatgctaccaacaccaaacctgctcgtgagaagcctatgaagcggactaggacatcgccggaggggaagaagaacgggacatcgccggaggggaagaagaacgagagcctcttctgatgcttgacttcgtgtacaagttgtagctgaatgttcctcaaaatataggattaactagttctgtaacactaacaccccggcttggttatgacttagaaactgttaggccatgtttggttcacatctcctaaagtttagtcacttgtttaaaaatgttaaaggaggtaactaaaaaaaacctcttaaataggacattatagggactaatgtttagttcctaaaatttaggagatgactaaaggaaccaaacatagtttactaagccttagtaaacgtgtgaataaatgcctctcttgtgtggcggctatttttatttctacaaaaaaaaaacccgcggcc

SEQ ID NO: 32144 - DNA, 197 bp, Zea mays
  unsure (1)..(197): unsure at all n locations
  Clone ID: MRT4577_129329C.1
gaagcccaagacccacagccccgnccncgccaagaaaggcanggacaaggagcggcagcgggacgcgcnggncacgcangagcnnggacngcaggacancaacaaggccggcgaccggcnccggcaggggaaaagacngcgcngcagccncngganggacaaggacaagnaacggaaggagaggggcggccggacca

SEQ ID NO: 32145 - DNA, 1260 bp, Zea mays
  Clone ID: MRT4577_12932C.1
gtattatctcacgcgaattgcaaacaacacattcccgtcccatcttctgcgagcacagagagagtgggagagcaggcctccgaaatcaccgaccgcagagatacacttgcacgggtgtgcgggcgatcagatttttggggagcgtcttcgcgactgctcgcgtgacctgtttgtccagctgcttcgttcacagcttgctgttcgtcgccttcccgagttgacgcgtgctgctgttcctcttcccggcgaccgttcgagggactgcacagcgtacatcttcctgcaccgacttcgtacggctacatcgaacaaacacacgagatgtctcgtgtgaatggagccactgatgccttgagcatcggtccctccgctgggtacactctgttcttcgtatttgtgcatgtttcattgctgtttactgcttatgcgagtagttatacacacatgcacatacatgtcatcacatatatcgcactgtttttctggattaaattaaaattaaaaatgcctaactttctaacaatccaaaaacctgaaattaggcaattttctgttagtggttttgctgttgcgttaaaaccaagtgaaccttttgatgagacattttataagaggtggcgtagtaagatgatactatggttgactgcaatgaactactatcacgccgcacaggggaaacccgaactgttcactcctgaagatgagagaatgttcgacgttgccgataacctatttcgaggtgccgtgattggcgctcttgccaacaagtatgttgattcttatctaacgtgcacatctgccaaagggttttgggatgcattagatgagaagttcgatgtttctgatgctggtagcgagctgtacatcatggagcaactgtatgactacaagatggtggataaccgtactgtagttgaacagactcatgaaatacaggcactggctaaggaactcgaacgattcccatgtgtcttgcctgacaagttcgtggctggcggtattatcgctaagctgcaaccttcttggacggattttgctacccctctaaaacataagagacaagagtttagcgtggctgagcttattgggtgtcttgatgttgaggagatggcgagagcaaaagaccctcgtggaaaaggagttgagacctctagtgccaatatggtacaaaagaagaactccaatgtgtcccataataataaaagaaaaaaaaaaaaaaaaaaaaaaaaaaaaaaagtactgtgcgttgttaccactgct

SEQ ID NO: 32146 - DNA, 1539 bp, Zea mays
  Clone ID: MRT4577_129330C.1
cctctcacctccccgtgccaccacagccgccgcctcccccaccaacctgccccgacccgctcccgacctccgaggcaatcagcgtccgccgcggccgccatggcgttcgagaagatcaaggtcgccaaccccatcgtcgagatggacggcgatgagatgaccagagtattctggcagtctatcaaggacaagcttatcttcccatttttggacttggacattaagtactttgacttgggagttctacaccgcgatgcaactgatgacaaggttacagtggaggctgcagaggctactctcaagtacaatgtggctattaaatgtgcaactattactccagatgaagatcgggttaaggagttcaacctaaaacaaatgtggaggagcccaaatggcacaattaggaacattataaacggcaccgtgttcagagagccaattatatgcaagaatgtcccaaagcttgttccaggatggactaagcccatctgcattggaaggcatgctttcggtgatcagtacagagcaactgatgccgttctcaagggacctggcaaactcagactagttttcgagggaaaagacgagacggttgaccttgaggtttttaacttcactggtgctggaggagtcgccatggctatgtacaacacagatgagtcaattcgaggttttgctgaagcttctatggcaatcgcttatgagaagaaatggccattgtaccttagcacaaaaaacacaatccttaagaaatatgatggcaggttcaaggacattttccaggagatctatgaagctggctggaaatccaaatatgaggctgctggaatatggtatgaacatcgtctcattgatgacatggttgcatatgcacttaagagtgaaggaggctatgtgtgggcttgcaagattacgatggagatgtgcagagtgatttcttagcacaaggttttggctctttgggtttgatgacatcagtgttggtgtgccctgatgggaaaaccattgaagctgaagcagcccatggcacggttacccgccatttccgtgttcaccagaaaggaggtgaaaccagtacgaacagcattgcttcaatctttgcatggacaagggggcttgcacatagggcaaagctcgacgacaatgcgaggctcctcgacttcgctctcaaactcgaggccgcttgcgttggagctgtggagtctgggaagatgactaaagatctcgcacttcttgttcatggatcttccaaagtcacgagaagccattacctgaacacagaagagttcatcgatgcagtcgctactgagcttcgatcaagattgggagccaattgagctgacaggaaactctgcgttgcaacttgaatgcttcatcaccgatcggctctagtcatgcttccgtgattaagtgaatgtgcgccgccgcaatttcgagccaagctaattaaagatgatgggatcgcatcgcatgagcgttcaaaataaaggaatatgtagagcaatggtcgcagatgattaaattactcatattatgttc

SEQ ID NO: 32147 - DNA, 477 bp, Zea mays
  Clone ID: MRT4577_129331C.1
aaaactaaaaccctttgggttttccccccttagcttaaaaagggacaaaaacggtgggccccgggcaactcggcccaaaaccccattgggtcctttagcaattcccccaaaaaaggggggggaaaacttgggggtccaaaagggcctccaaaaaccgggaaaaggggggcccttaaacccaaggctcacaaaatcatcaactttaaaaggggccccaacacccccccgggattttttaaaaaaaaaccaaatttcccggggggggaccatttccaaaaggtggggtccaagggtttttggccgccctggttccaaaaagggggaacaccccaaggaaacccgggcaactttgggggaaataaggggggcccccgaaaaaaccttcctttttgcccccggcttgaacccaaaaagggccatgccacattggtcactaaactgggggccttgggggggccaaaaacaaaggggcccccc

SEQ ID NO: 32148 - DNA, 176 bp, Zea mays
  Clone ID: MRT4577_129332C.1
cgaaagatggagtgtcaggagtgcttctacatcacaactacgaataatccacctatgacttttgctgttgctgcctgtaaactcaagatgtgaatgtgacagtcttgcaagtgcttggtctttatggagaaaaccatgtttgtgcaaaataaatgtgaaatgccatgctacagcta

SEQ ID NO: 32149 - DNA, 238 bp, Zea mays
  Clone ID: MRT4577_129333C.1
cggggcgaggggccaaaagtagggccccccaaaaagtcaaatcccggggggcctatgggcgaaactcaaaagattggcagggagggaaccacccacgggggggcggtgggcccaggccccaaaccgtttggccggaaaagggggcaagatgccaaaacaaccgcgcggttcccgggaaacaaggactttaacaccccgggaaacaagaaaagggggacaaaaagcaggggaagcccgg

SEQ ID NO: 32150 - DNA, 316 bp, Zea mays
  unsure (1)..(316): unsure at all n locations
  Clone ID: MRT4577_129334C.1
agggggggccactcattccatccatacaatgaggttataatattcattactaaatcacgtcatgtcttgacttctacggcattctcanacacacatgttttggcatcttcttccctaagattgaacccctaatatacctttgatctataattttttttttaagattcatctcgacaacaatggataactttaacgttgctaactacatgctttcattcttagtttcaatgtccaaaacctttattttgataattacctacctatacatcaaggtattgcctacttttatacatcttataatattattcattaaaaa

SEQ ID NO: 32151 - DNA, 302 bp, Zea mays
  Clone ID: MRT4577_129335C.1
tgtttatctccacgacacaagcccagacggcggggtttagttgctgggagctctcgttgccctaaagcgctcagaatccacggctggccatcgccggcatactctcaccgcactgtgatgcctgtacgggcggacaaacgtcatgccatcgctatagatgggcccgcgtgaggattctctgcatggcctcacccaacacatgggcgtgcctatacacttcatgagtatactcgatccttggaatgtgtaggcaaggcgggagctactgatacgcactctattggagtgcagggctactttgc

SEQ ID NO: 32152 - DNA, 251 bp, Zea mays
  Clone ID: MRT4577_129336C.1
gcggggcttccctccgtgcagccttgttgagccttgccgttgcgttttccaccgtcctcgccagctctcctccgtcgatgtccccagctcgagcgtggagctggagcttgacgcggcacgtgccgcgatacagcgagcggcgcggtggcgggtggatcctggccgtggcaatggcaacgtagtaagcaccgaggacacgctggagtggagcatgctctcgtggccagcgtccatcgcataccaaccgcgtt

SEQ ID NO: 32153 - DNA, 428 bp, Zea mays
  Clone ID: MRT4577_129337C.1
ggaacagggggattcgggggccttaaacggcggaggaatttaaacggggggccaagggggggggggggccaggaacaactgggggggggcttttactagtttacagggggggggaaaaggaatcggggggaagcgggaaaaattctaagggtttactgggcaaccaaagaatttaaggccaagggggcttcacagggggggggtcccaaacaatgggtctaccccaggggcaccattggaaaagtattagccctgaaaggcattgggaacctagctttatatggtccaacatcggtgaaaccctaaaagggggggcagcttggggcaaatctacattagggggacccttttgggtaaaaccccccccaccattaattccatgctgaaaaaagggggggggaccaccaaaaccaggtttggataaaagg

SEQ ID NO: 32154 - DNA, 1075 bp, Zea mays
  Clone ID: MRT4577_129338C.1
gtttcagaagatggtccagcagggtgtacggccaaatgttgtaacattttctgcgatcctgaatgcttgcagtcgctgtaatagttttgaagatgcagcccttttactggaacagcttcgcttatttgataactctgtctatggggttgcgtatgggcttttgatgggccatcgagaagcttggtctcaagcacggtccctctttaatcagctgggccgcatggattctccaacatcttctgccttttacaatgctcttaccgatgtgctatggcatttcggccagaggcaaggagctcagcaagttgtgcttgaaggggtaaaccgccgtgtttgggagaacacatggggtgacttctgcttggacctgcacctcatgtcatgtggtgcagctcaagcaatggtgcatgcatggctcctgaacgtgcgctctattgtttttgaaggtcgagctatgcctgagtttttaagcattctgacaggctggggaaagcatagcaagatagctggatcaagcaccctccgtcgagtcattgaagcgctgctcctttcaattggagcgccgtttcaggccgagcgcttcaacatcgggaggtttgtgtcacccagtgccttggtgtctgcctggctgagagagtccggcaccattaacatcctcctcctccgcaacgagcgagcgcaacatgcaaacacgtccaatctggtaccgaggttacaggcgttgcagttatagccccttgatctcatctccttgtccctggtagggttggttcagttctatcacaagcttcgctctgttttttttttatattcaccttcattgagaagattgtagagtaccataggctgagggaatagctcgcttgttgaatcccagtgttttagtccggtttagccttagccatgaatgtaaaaatgttgtaaaattgtcagcctgccttacaactccttccatcaaggcaaaacgagtgcaatttcttcacgacaggagcgtcacggctggaaaccaaaaacccgtgcctcgcttccttaactgcaaagagaagctccttgccttgggatggcgatctggcac

SEQ ID NO: 32155 - DNA, 877 bp, Zea mays
  Clone ID: MRT4577_129339C.1
atggcggggcgtacgggctgggtgttagaggaaaggggggaaggtgacaagcggggccagtggggcaggaacacaggcgtgtggggcgagcggcgtgccctggagtatcattggttatcaacaacagaagtttcaactaatcagcttactaggatgaagcctggaacggtggcactgctcattttgttgaacatgatgtgcatagttgcatactttgatcatggaagctttcctggaacgatggccgaagaaaccaccttgctggcaaattcgtatggaagaaatgaaggaaccaagggcatacatcgtggaagaaagctgatggacgccggtactgattcaaaccgtgggttttctatcagtgatatgcgtcacataatgagctcaggcaaccctcatccttagctccagctggttgcattccctaaagttcgtacatgtatagccttccactcatcatatgctgggtatccgacctatagacacatacggtatgttgcagatcgatcgccaggttctcagatcaagtcccttgtattgtatatgagtggaaacctatctaaataatgtgtgtggcttctaaaatatgtggtgttattgtactgagctatgctcaatactaaacaataaattattgaaatatgtcccgtgtgcgataataatgtgacttcgacatatccatagctgacggacacaacatcactagtttgcaggacaatgcaccagggggtggccgttgttgaggatccaattttcagcccgacgaagcttcatcgtgtgcagcaagaaaaggttacctgaacttgactatcagttgccactagttcaggattcttgagtgggagaatattatcctatcctacggtgtaagcctaac

SEQ ID NO: 32156 - DNA, 889 bp, Zea mays
  Clone ID: MRT4577_12933C.1
gtgcttcacctgtccgctgtacccatgcggaccggaacggtcaattatcccttggttgcccgccaccccgtatcgccgacactcaccctccgcaccggatcccgtcatcacctccgagcggcgcgccgggccggcatccaactcgccgccgacgcgccgcgccccagaacgagccgccggaacgatctccctgacccccgatgcgccgtcctattgcccgcggcgagcccaaggtacaaaccctagctctagctcctccctccgcagccgcccccaccaagatgggcgcccataggcgacaacccagctcccaccgccgcgttgccggcgccctcacgctcctcgccgcgtccgcgctcgcgcttcttctcctagcatcccgccgggttcccccgacctacggcgtcatcatcgacgccggcagcacggggagccgcgtccacgtcctcgcctaccgctccacggcgggactcccgcagctggactgggcacgcatggcctcgatgaaggctaccccagggctatcgtccttcgcggcggacccacgcggcgcggggctgtctctggcgccgctattggagtttgccaggcgccgtgtgccgcgggagagctggggggaaaccgaggtgcggctcatggccactgccgggctgcggctgctcgattccgcagtggccgagtccatcctgcagtcttgcagggaagtgcttcgggggtcggggttccaatttcaggacgaatgggccaccgtgatctcaggggctgaggaagggatatacgcatgggttgcagcaaattatgctttggggactcttgggggtgatccaaacgacaccactggggattattgaacttggtggggcttctgttcaggtgacacttgttactg

SEQ ID NO: 32157 - DNA, 479 bp, Zea mays
  Clone ID: MRT4577_129340C.1
ggaaaaaaaaaacgggttcaaaaaacgggcccttggccgattccgaaagcagaggtttcgcccacaaaaaaaccgaaggcagcccacccggggggccaaccggagggcgggatttcaaaaaattatgggggggaacaaaaaggctttcaccccgctagccccgcatcaggggacccccaaaaaaggggggctgggggtggccccgagccccccaaaaaatggcccaggaccccggggcaggggaagaaacccccgggccccaaaggggcattggggggggccaacaaaattggggggcccattcccccccccgaaccccattcaggcgggtcattggggggtaaaacccttccgggcaaagggggcggcaccaagaagggggaaaggcgaccttgcatcgaaaggcccctttacggggttggcggaccccttaatcttgccccagggaaacggcttcatgggggggggccccaaaaccc

SEQ ID NO: 32158 - DNA, 936 bp, Zea mays
  unsure (1)..(936): unsure at all n locations
  Clone ID: MRT4577_129341C.1
gccggccgttttgggtgttccctgggattggctttgggcttttcctgcgcagcttaggtggaaggcgaagaaggcccccttccgggggggcccgagccatcagtgagataccactctggaagagctcggattatcaacaatagaagtttcaactaatcagcttactaggatgaagcctgcaacggtggcactgctcattttgttgaacatgatgtgcatagttgcatactttgatcatggaacgatggctgaagaaaccaccttgctggcaaattcgtatggaagaaatgaaggaaccaagggcatacatcatggaagaaagctgatggacaatagtattggttcaaaccgtgagtattcaatcgatgatatgtctcatccaaaggcaccacatactgagctcaagcaaccctcatacttagctcctggttgctcaagcaaccctctcaagcaaccctcatacttagctcctggttgcattccctaaagttcatgcatacatatatagccttccactcatcatatgctggtatccgatctatatatagacacatatgatatgttgcatatcgccaggttctcagatcaagtcccttgtgtagtatgagtggaaacctatctaaataatgtgtgtggcttctgaaatatgtggtgttattgtactgagctatgctcaatagtaaacaacaaattattgaaatatgtcacgtgtgcgataataaagtgacttcgacagaaaaaaaaaaaaaaaaggggcctagcgccataaagaacaagaaacacggatccacaactagagatctggtctgccattcccacgctccttcctgtgaacacaaactaaacgcgngagcggcgcgggccggccgccgggcgaggtgcgcgtacctgccgtcgatcgtcgccggatcatccaccatgggcggtggcaacggc

SEQ ID NO: 32159 - DNA, 661 bp, Zea mays
  Clone ID: MRT4577_129342C.1
cctcgcctctgcacaatctcgtcgcttctgctccacaggatcctctgcgccgcccaccaaccgtgcgatcgtccgtgctgccggctaccccgattcgtcgacccgtcccgtccctacacaccctaccgccggtcgcatttatgtcgccgcacgctgccgacttcttcatgagagagtgtacatggacaaggtgacctataatgtgctacgctaccaggagatggacgagttcatggagcgcgtcgcgtgctccgccgctggcgcctcccacaggagaggatgtctccccgctggattgcactctgctgtccgccctctacaagaacgtcatcgaacgcccttaggaacgtcgaggcggatcatctcctccattgagcatcaacttctggcaccgtcgatcaacgaaagggatactgcgcctccatccgtctacctacctgtgtcacgagatttagaacgatactgcgacccgcatctgcgacggaatgcctcggcctgattcgactcgcacctctataccattctctatctcttgcgcaacacatagtgctctcatacctcaccgatgaaaggatgacatatcacacacgtatgctcgtctgagactacggatgcctcatagacttgttgttatgaaacgagctacatgcatgtctaccaa

SEQ ID NO: 32160 - DNA, 284 bp, Zea mays
  Clone ID: MRT4577_129343C.1
gggtgatagaacacgcacgtgggagggtttattcatgggactagcctcagtagcatacagcatagtgtacggacgggcatactacagagccacacttattggactgcctggcgcttacgtacatagttgacacgcggagaggtatatacatgcacggtcaacgtcgccactcacgctcatgctacgtacgcacgtcagacgcgcaccaccctcatgttgcttcatgcacgatttggcgagcagcggggtctcacattctggcgggaaccattctcatgagcgtt

SEQ ID NO: 32161 - DNA, 420 bp, Zea mays
  Clone ID: MRT4577_129344C.1
ttggtgtttcgctcccttttagacctccgacggatggttggcagccgacgccggcgccgacaaacgctaggtgctgaggacttcgccagagtcttcgacggggacgagcacgtaccagcatgatgtgggaaagaggtcgactggcgggacgatagattgataaccgcatgagagggtgccatgtagtccatctagctgaggatcccagaggccatcctgaagtcctcgtgcatggggatcggaggagatactctgacatgagtggggttgagcaacgaggggactaccctgacaccaatctggtgaaggaacctaaggtctaccataggatgctggaggaaaaccataagccctattctacaagccgaggagtggataagcgcaagggctatcctgaggtacatgaaggatcacgcatga

SEQ ID NO: 32162 - DNA, 137 bp, Zea mays
  Clone ID: MRT4577_129345C.1
tccgggtcgaacacgcgtccgcagacgcgtggggtaggatcgatcttgttagcagagcagaactcgttactaaaaaaatctatattatattacagacactatagctttttgataacttgccgtgcaaatgtggtaac

SEQ ID NO: 32163 - DNA, 608 bp, Zea mays
  unsure (1)..(608): unsure at all n locations
  Clone ID: MRT4577_129346C.1
gctcgtcaagctcgctataagcagccagatattcaggaccaccgatcacgatcccaaaaacagcggctctgtgtcgcgacgtggacagcgatggacgctccggccatgttcgcgcgcaagcacagtccccgatgacgtcggcctccggaacatcggcgaagctgaggacgaaggagccgggggccaggcccagctccaccggagcgggaggccacgcaggccggccttgcgaaggaaagggaaagagtgagggaagaaaataacacacacgctcgccggccacggccacgggcacgacagcacgcccatggcgagcgcatgggagacgcggacgccggcagcgacagcagcgaggaggcggaggaggacgcggcggagagggaggccgcgctggagaagggcggctacatggaagatgtcgaggacaagcccctcgtcatggagccggagcccaaccccgagctgcacggcgcaccaatgtacgagtcggcgagggcacccgccgtgcaggacctcatcgccgagtacgatcagccggcgtggacaccggcggtgcaggaggtggagggcgacngctccgcacctagggtgcggctcggtgatatcgg

SEQ ID NO: 32164 - DNA, 276 bp, Zea mays
  Clone ID: MRT4577_129347C.1
cgtttcgcgtacgactcagcccgcctcaaggagaggtaagttcaggagacattttcgagaagctagaatggctcctaagctgttcctgccaagaagggtgatgccaagacccatgcctttaaggttgccaaggctgttaagtctggggcagccaataagaagaccaataatatccgcacgtatgtgacatttcactcgccccacgaccctttagaaggctagggtcctcaagtacccacgatttcatcactaccgaagggaacattgctttgatca

SEQ ID NO: 32165 - DNA, 1073 bp, Zea mays
  Clone ID: MRT4577_129348C.1
gccagtcaagctcgctataagcagccagatattcaggaccaccgatcacgatcccaaaaacagcggctctgtgtcgcgacgtcgacagcgatggacgctccggccatgttcgcgcgcaagcaagtccccgatgacgtcggcctccggaacatcggcgaagctgaggacgaaggagccgggggccaggcccagctgcaccgcgacgagaagcagcacaagccggccgtgctgaagaaggtgaaggagaaggtgaagaagatcaagaacaccctcgccggccacggccacggccacgacggtgagcacggcggcggcgagcgcatgggagacgcggacgccggcagcgacagcagcgaggaggcggaggaggacgcggcggagagggaggccgcgctggagaagggcggctacatggaagatgtcgaggacaagcccctcgtcacggagccggagccggagcccaaccccgagctgcacggcgcgccaatgtacgagtcggcgagggcacccgccgtgcaggacctcgtcgccgagtacgatcagccggcgtggacaccggcggtgcaggaggtggagggcgacggctccgcacctagggtgcggctcggtgatatcggcggccccgtcgtcgaggatccagccgcgccgcgctccacgacgcccaccgcgcgagagggtgaggacataggtacgacgcccgtggtgcggcagtttgagaccatgagcttatccgacgacccgacgcacgtgggcgcgggcaagaaaggcgccaaagcagaggagtggaaagacaaggccgcggacacggtgcgcggtgcggacggtggcggtggcgctagctacacggacactctcaagaacgcggctgccggcaccacggagtacggcaagaagctagcgagcacggtgtatgagaaggttgccggcgtcaccacggctgtgggcgtggggaagcgcggcgacgaacgcacggaggcaacgccggcgtcgaacacccgcacggaggagcgcggagcggcccccgaggccacggatgcgacgagaggcgcagggtacaccgacaagatcaagtc

SEQ ID NO: 32166 - DNA, 350 bp, Zea mays
  Clone ID: MRT4577_129349C.1
gcagactattcagtaccacgccatatgattatggaccgcctaagtcaacataggagactgtacaatttagaaggtgaaggccatggtaaataacctggctgctcaaacacagtatcacggctcgctgaaaccctacagcacactcccaaattgctagcattgcattctaacttatactcagctagtcatcatacagcaaacatgcatcttaatcccactttctatcaaatcaatcgctatcaccaatattgtgaatcaacagatcatgtagcactaagctatacatctatgatagcaaagccattactcagcacaaacttacatttcacactacaatctacacccatctt

SEQ ID NO: 32167 - DNA, 279 bp, Zea mays
  Clone ID: MRT4577_12934C.1
ccaataaaccccccccccattttgattttccgaaggatgaattattcggggaaaaaagggcttcccgacaggaaatggggtttttttacatggggtttaagttggctatgctgtcaggcttttgaagatcccttaggggcacgcgccggctgattccgggcatttacaagaaggggggacaccgccttgactaccatgctcatgcttgggctgaacccaaatttgttttggacccagagggccgccactgccgctaggtttgctaccccctttgggggg

SEQ ID NO: 32168 - DNA, 225 bp, Zea mays
  unsure (1)..(225): unsure at all n locations
  Clone ID: MRT4577_129350C.1
gctctctcctcgccctgcccatggcgacctccaccgcctccccctcctctctgaccgcccctctccttggccccaaacccagccccaatccgccccccagatccctcccgctcctcaggaatcggaggtgcgctaggtccgtggccgcctctgccggcggcggcggagtgggactgcacggggctgctcacaggcgcgggatttggncgancagggacgacttgc

SEQ ID NO: 32169 - DNA, 630 bp, Zea mays
  Clone ID: MRT4577_129351C.1
ggccgaccttttttttttttttttttttttttttggggggtgtgtttttttttttttatttttttttttttttttttttttttttttttttttttaaaaaaaataattttttttatttaaaaaatttgggagggaaaaaaaggaaaaaaaaaaaaaccccaaaaaaaaaaacaaaaaaaaaaaaagggggggggggggcctctgtgttaacccttaaatttttttactgttacaaattctccccttaaaatttccgaaaaaaaaatttttcttttttggtgcccccaaaggacacaaaaaaaaaaaaaaaaacgcttttctcaaaaaaaaaaaccaaaagccaaaaaaaaaggggtcaacaaaaaaaaaaaaaataacccacaaaacccaaaaaaacccccagaaaaaaaaccccccaaatcctttttaaataaggcatgacaaacggacaaagagatggcctgcaggcggccgcccggtgggatttttcctgggggaaacaaaacaaatggttcacaccccataaaacactccgattcaaaaacttcaccccccccccaaaaaaattttttcccagatgcataccacccttttgttccaaaatgaacaaaaaaaaaaattttttccgtt

SEQ ID NO: 32170 - DNA, 282 bp, Zea mays
  Clone ID: MRT4577_129352C.1
atcaaacggggggcatatacacaaaacctccgttgccttggaaaggaagggccatccccgaactcacagatttaaggatgcatcaacaggtgaatttagagcctagtagaacgggtcccagtcagggtaagcttgtttttaagaaaccgggggggggggagcactaaaactgcccatgcgggtataaaaagtttcccactggggtgtgacggaaacacccttataataatcgctgaaggggggggcatatttgggtttcacgtaaaccaaggcctcccacaa

SEQ ID NO: 32171 - DNA, 883 bp, Zea mays
  Clone ID: MRT4577_129353C.1
aatctagaccagaagtccaaaaccgcagctcccatctctctccccatggccgcggcggcgccggaggctgcggacgaggttgcgccgtcggcgacgctgagcgtctacaaggcggcacggtgcatcaagcggcgggcgagcacgctgtacaacgcgctgcggagcgtggcggaggacgcggccttcgtggcggaggtcgcggcgctgtggccctcgctgccgctggtggccaacctccgctgcggtctctggtacgccccgccccgtgccttcgcagccacctgctacttcaagtccacggatggccacgccgggaactggtccttctcaactgcccgcctcaacctccacctcgccctcctcgctggggagagaggagggtgcataatagttgattcaacaaggagagggaaacgattccctgatagcatgtcaaagaccatacccatttggtgctctgtcttgaaccgagcgattgagaggcatcggctgcaggctatccacaaaagtgccgaagtgaattatcagtcgtctaccctgctgaatggagatgcagaaaacaactctgatctatctaattgggatagctcagtgcaccttcctgtatgggttctaggcacagagaaaaatgctatagaggggcgtattgatgaatggacagaccaatttgaatcatgtggtgcagatattcattctcttgcagtaggtttgcaaaaaccgctacgtcctttatggatctcacaaaggacacgcatatggttaaatgaagtgccggagcttgagtcatgggatttcactcctataattctaatttctgcatctgatgcagttgctacacaaaggatgtctttagatttaagttggccctattttcctgagccag

SEQ ID NO: 32172 - DNA, 825 bp, Zea mays
  unsure (1)..(825): unsure at all n locations
  Clone ID: MRT4577_129354C.1
aggccggccgggccgggtttctagactagaagtcaaatccgcagctcccatctctctccccatggccgcggcggcgccggaggctgcggacgaggttgcgccgtcggcgacgctgagcgtctacaaggcggcacggtgcatcaagcggcgggcgagcacgctgtacaacgcgctgcggagcgtggcggaggacgcggccttcgtggcggaggtcgcggcgctgtggccctcgctgccgctggtggccaacctccgctgcggtctctggtacgccccgccccgtgccttcgcagccacctgctacttcaagtccacggatggccacgccgggaactggtccttctcaactgcccgcctcaacctccacctcgccctcctcgctggaatcttgaaccagaatttaaggtttatgactgtagttttgttccctgtccaagaaggccgaggaactttgcttcattggtttctctataatctatattcataacacaatcttggggtaaactgaagcacagatatcctaggggagagaggagggtgcataatagttgattcaacaaggagagggaaacgattccctgatagcatgtcaaagaccatacccatttggtgctctgtcttgaaccgagcgattgagaggcatcggctgcaggctatccacaaaagtgccgaagtgaattatcagtcgtctaccctgctgaatggagatgcagaanacaactctgatctatctaattgngatagctcagtgcaccttccctgtatgngttctaggcacagagaaanatgctatagaggngcgtattgatgaatggacagaccaat

SEQ ID NO: 32173 - DNA, 642 bp, Zea mays
  Clone ID: MRT4577_129355C.1
agtcttttttttttttttttttttttttttttttttgtcttgttttttttttttttttttttgtttttttttttttttttttttttttttttttttttttcggggggagggggtttttttaactaccgcgggggcggttgtggagatggtaaaactaagagcgtggaaacaggcagaacccttctgattttgaagatggcggggatcaaagaccaggggtggcgggaaccgggatttttttatgggggcaagaagcctaaaacctcccgcaaaggggccaaaaaaaaatacaccatagatagtttatttgggcaacccccccaaaattgcccaacttttttgcgcggggcgggggatcacaccaccgccaaaaatcctttttgaaaagggggaaaggggaccacccaaaaaaattttttgggcggccgcaatgcctttaaaaacacaaaggccctgctcaaacatggggggggggatccccaaacctgccacccccgtgccaaaaaagccccgccgctttttaaaaaaaacatacttgaaattgtggggggacaccatctttccccccagtttttttggccaattgaaaaattgttttttaaaccccccactcaaacttattgtggctccccgggggggact

SEQ ID NO: 32174 - DNA, 207 bp, Zea mays
  unsure (1)..(207): unsure at all n locations
  Clone ID: MRT4577_129356C.1
cggcacgaggggcaggggcggggcggggtgcccttgtacaacgcacgcacggtgccccgtcccagtggtccagactgtgtccggcgtctgggagctggttcccctggagcgcccgttcgggggcggcggggggggggaggggagaaacattcggtgngttgaccggcgagaagcgggggggggggggcgggagggggtctcgggggg

SEQ ID NO: 32175 - DNA, 392 bp, Zea mays
  Clone ID: MRT4577_129357C.1
acgcttttgctccctcgctcgcggctctcggcttcatctacacgctatggtctcacagccgtatacgctgctcgcggatcccgctatttctccaacgctgctcgaccgccagccgttcgcctcatcatggcagcgtcgtcgacggcctgctcggtcgacgacgtcagcgtcaaggatgcgagctgcacaaacgttgacctcaccacctattccgggaacgttcttctcattgctaatgtcgcatcgcactgtggcgtacctaactcgatgctacactgagctggcccagctctactagaagtacacggaccacggcttttagatcctgtctttcccatgcaactagtttggtgcgcaggagcctgctacgaatgaagagattgtccattttg

SEQ ID NO: 32176 - DNA, 597 bp, Zea mays
  Clone ID: MRT4577_129358C.1
cccgggtagttgggcaccagcgagcgttggaagtcgaacgcgaggccgaggtcgagccggaggcgcgccacgagccggagcgggagcgcgcgagagggggcgagcatgagcagccgaagcagacggtcagccgcgtcggggacggtggcgtcgacggcctgcgcctcggcggcgtggagcgccgagagccggggcgtcggggagacctcgatggggtgcggcgagagcgcgaacgccgaggggtagagccgcaggaagcgcagcgggcggaacgggaaagggattgtggagggcagcgagtgcagcggcacggcgtgcggcggcggcgtggcggcgaggagcacgtccttggcaaggagaaacggcaccaggtggcgctcccgctccacgacgtggtcgagggcccgttctcgcacccaaggcacgcgcgcctcgaggaggccgcgcgccggcactagcagcgccgccggtacacgccgcagcggcggcagatgcatctcttcgtggggttttgggaggcgagcgtccgaatgcggcggcgtgtggggaggcctcaccgcccccgtcgccgcgatccgaacacttcaccggaccatt

SEQ ID NO: 32177 - DNA, 269 bp, Zea mays
  Clone ID: MRT4577_129359C.1
gcgcgccgatatgcgagtgcagggtcacgtttacgaccgtttgattactttctcgcaaggcgcgcgccctgggcaagtgcgactttctgttcgtgtgccgggacaacatcctcaacttctgcaagctccgtctcactccgtctactgaagatgatgatgctgagacttaataatctaagtggtcaaataaccttgccaattaataatttcagatcggagcttcatttgtatctttcttcaatatgcagacgacagggtttaaataatca

SEQ ID NO: 32178 - DNA, 296 bp, Zea mays
  Clone ID: MRT4577_129360C.1
tctgggtgcaaaagcccagggttaggaaccgtaggcatgctgcgccccaaggctttgacccaggtgctaagccaagccaacactggaggcgtccagagcaccctgctgctgaataacgagggatcactgctggcctactctggttacggggacactgacgcccgggtcaccgctgccatagccagtaacatctgggccgcctacgaccggaacgcgaaccaagcgtttaatgaagacaatctcaaattcatcctcatggactgcatggtagggcgtgtagccatcacccgagtggc

SEQ ID NO: 32179 - DNA, 583 bp, Zea mays
  Clone ID: MRT4577_129361C.1
ttgggtacctcgaggccggccggggttacaattccccgatccgatcgtcctaggaggatttcaactgtgtccatgtagctgtgtgcttccgataatactatcgctcgctgcgcctcccgttgcttcgcattcttaaaacctacatcttcgactctgatcccgccagacactaggctcagacaccacgagaggcgagggacgggggccttctacatataccacggatgcatccacgactgcaccttccaccacctcttcgcgatctacggcgacgattcattcctaaccctagagatcgcctcctccccccaccatactacccattataacccacctgcaggttagattgcttcgcaagtgccgctaccctgtggatacgtgcccatggaatgaagagaaacacgacggacccaccctagtatggacgaggcacccgtacagatacctcataacaactgctactgattcaacctgaaggagactgagacctgaaccacgctgctcgatcacggaactggaggtcaaagaccccaggtcaaactgataaaaatccatcggcgtctgcatgactacgcatgcacca

SEQ ID NO: 32180 - DNA, 344 bp, Zea mays
  unsure (1)..(344): unsure at all n locations
  Clone ID: MRT4577_129362C.1
ngaagctccttatcccatccatcactgctagctagcgtacagacgaataatctcttcttcacctcactacatatcaccagttaatagctcgatcgctgctgtactgcaataatggtcgttcgctcctcctctcagcaggtggtcgcggcgtggatcctggcagcggctctgctgctgctggcgccggacgccgtcacggcgtctgagcatgatgagatgcgacgaggtcacgtcgtccgtggcgccgtgactcgatgacaagatgggcagcgcgctgtcctcctccgcgtagtgatgcacggtcgtgcaatcgctcaacagccgcgcgtcgtcagcggcggacc

SEQ ID NO: 32181 - DNA, 389 bp, Zea mays
  unsure (1)..(389): unsure at all n locations
  Clone ID: MRT4577_129363C.1
agcacaaaagaccgccggtcgaggagcaagatagatcacgtaatcggacgcagggagaaaaataaccccctttgcgctgaaccaccactctagcacaagcgagatatgagtgctcggactcacctcggtcggagataacacttctgctcagctggcatcactgaacactacgtgctgcatggaggaacaacaaccttattagcgagggaactcataaaacacccgtcgacacatacgccggagacactactgtataactaaatcggggagtatagcgtaccaaccgagcactcttctatannaagacaaatgagtggactagcatggaagaacattgcataacatggatgcagcttaacagccaatctgttaacgctcattacatgctc

SEQ ID NO: 32182 - DNA, 206 bp, Zea mays
  Clone ID: MRT4577_129364C.1
atcaactgtagctcaatggttcgtgctagttgcacgagagacggtagacaatgatttacaggttcaggcctctttgaagtgcgtaacaccctacgtcctggcgagagtgctgtatatggtgagttacaaggtaattctctaatgcgtaggaagctagggtggatggctaagtagtgagttcgatttccactgaaggggtgccccct

SEQ ID NO: 32183 - DNA, 125 bp, Zea mays
  Clone ID: MRT4577_129365C.1
accaacttttcgatgtactggttgaagccgctccaaaaccaactccaaagcgaacatatctgggcggaagccgtttaatataacgatgaactaagttatactgtacaccactatgctcccgacta

SEQ ID NO: 32184 - DNA, 410 bp, Zea mays
  unsure (1)..(410): unsure at all n locations
  Clone ID: MRT4577_129366C.1
ccngcctttaaaaccatggctgggaacgtgagaaccaggcggtctttaatgcaggctccggttgttacggctgcggcgcaggcgatctcaggcgagcggcgcatggtgcggacctcccaaagtcccaccaggcaagaacatcacggccacctatcgcaaggactggatggacgctaaagcgacacaggtatggcaagccgacgggcgccggacccgatgacaacaggggcagctgcgggtacaaggacgtgcacaagccccccttcaatcagcatggggcgctggagcaacatccccatcctcaaggatggcctggattgtgggccctgctacgagatcaagggcagaaagactgtgaagtgctccggcaagcccgcggtggtgcacataacggacatgaaccatgagcc

SEQ ID NO: 32185 - DNA, 471 bp, Zea mays
  Clone ID: MRT4577_129367C.1
ctcgaggccggccgggactcggcacgaggcgttctcgtctccgaagacaagaagggaacacgaaccgccggagatgaacaccgccggcgagcctcctttggggcacaagtaagacggcgtatactgtagcgcttgtttggtcgtaataggcagggcacgccgcacgcgccattcatgttttggttgccgagtgaggacggtggttgtggttggttggagaggggaacgaagggggagggagggtgcggcggcggtgctgtaagtggcggtcatcgatgacgtttcggttcccggtgaagaaccagcagggcacgatcgacggcagtccgtttgcgccggcgacggcgagggtgtcgatgttccggaggctgatggtgcgggtgaccccggccgagcggctggcagctggggacggcaaggagagagagaaggaccataggggaggggaggcggaggctggatccctggatc

SEQ ID NO: 32186 - DNA, 186 bp, Zea mays
  Clone ID: MRT4577_129368C.1
tcttaaaaatttactaaccaaaaaaaaacatagcctaactggaaaaatataccggatttacggatattaaaaaaatattaaaaaaattactttatcatgatcataaaatatatactgtttaaaatttgttatttctctaacaatatcacacaatattacttcccataatcattcattaaaattcct

SEQ ID NO: 32187 - DNA, 446 bp, Zea mays
  Clone ID: MRT4577_129369C.1
gggggtgtttttttttttttttttttttttttttggttttttttttttttttttttttttttttttttttttttttttttttttttttttttttttttttttttttgggaaaataactttttttttttgggggggcccataccttagggggggggggggtttttgaattccaaccaaaaagccatttaaaaaaggggcccgccaatgatttttttttggaaaaaaggtgctgggtttttcaaaacaagttggacaaaggggacaaactggtgcatttttaaaagggttggggggttacccccaaactggtgggagaacggaaacactttttgttttgtcaaaaaagaaagggggcttgttgtaactagctggcccaaagggaggaatttttggtgggggaaaaaaagaagggggttcagggcggccaattggttaaaagggaaaaa

SEQ ID NO: 32188 - DNA, 453 bp, Zea mays
  unsure (1)..(453): unsure at all n locations
  Clone ID: MRT4577_12936C.1
ggtaccctccgggttcggccgggccgggnacaccaccactggggtcttcagaccattagctttatctactccagagcgcagaagaacccgatcgacaccatgagggtgttgctcgttgcccttgctctcctggctctcgctgtgagcgccacctacacgcatactattggccactgctgatttcatccaacggcgacgatttcacaattgctcccaccagatacttcaatggggtggggacatcccgccgtgcaaggctacaggctacaactaaggcttgcggcgagcgccttacaacaaccaattgcccaattgcaacaacaatgcttggcacatgtaacccttccaaccattgggacggcacaaccaccacaacagttttttgcatcggggggggccctaaccggggggaaccctggaacctacttggaacagcaagtggtgggatgcaac

SEQ ID NO: 32189 - DNA, 556 bp, Zea mays
  unsure (1)..(556): unsure at all n locations
  Clone ID: MRT4577_129370C.1
ggaaaaattgcaaggcagctattcttgggcttataactgatagtccctccagtcaaatacacatgatattttaaacatgaagattgagctacatggagaactattttcttatctaaaatgtcatgtgaaaatggttggggctagaaacttgtttcacaacaaacaggaatcatagatcaaccattgcaacattgtttgtaaaaaaaatgcaaaaccacatatcaggattaaggtcgcattggaaatatccatgctaatgcatgtaaatcagatcttgaaatatttgaaagcaccagtttcggatttcactctctgagaagggattccttctgcttttcatcatctgatagactacattcctgaaattacaataaataacatgaactttactaaccttacagagtacattgtaaaaacgataggagcaagaggtatgagttgtccatagcatgtactaaaaaatcattctcttatgacttattntgatcttcacaatgtttttatggttcatccttcgcatggactgaacaaaaaatcaaagaatggcatataacat

SEQ ID NO: 32190 - DNA, 170 bp, Zea mays
  Clone ID: MRT4577_129371C.1
aattttgggaaccaccggttaaatttaaaggaccttgacctggaaagccagttaaaagggtgggtcttgtgattaataagggccggttggtaaaagaatggcaagatgtggtaaatttggtttgggccttccaaaaaaaaaaaaaaaaaaaaaaagggccggcggtttta

SEQ ID NO: 32191 - DNA, 345 bp, Zea mays
  unsure (1)..(345): unsure at all n locations
  Clone ID: MRT4577_129372C.1
acgcgcgcatgctcgggtcctctatagcgcgtgccccctttttntttttttctctaacacccctccttaactattggttattttaaagcctgagtggggtcacaacattcattgatacgcacaccatgctttttgatgcatggccctgctgtatccttggacgaacacattactaacttctgtcacacattcgaccttgcattcaaaaacacatatgggcaacatctaactcgatacgaaccaagataaaccctctggactagggtaaacatcactggtctcgaacaggataacttggccgcgcgtgccccaccgctcaatctctccactacccgtcggagttgc

SEQ ID NO: 32192 - DNA, 161 bp, Zea mays
  Clone ID: MRT4577_129373C.1
ggtggaaaccactaaaagccgttaaaagttcttcgatatatgttttcacagtttcatctgaaagccactaaaagcaggtccagaggtgcttttagttttgcactgcgaaaaagtcagcttttagaaaaagctgctttctggatccagtacttgggtttggc

SEQ ID NO: 32193 - DNA, 1617 bp, Zea mays
  Clone ID: MRT4577_129374C.1
tccggaattcccgggtcgaccacgcgtccgcacaatacctctatcttgtgccacttatatagtacgtccatcctagtgaaacaaaccatggtttccgaaacaaaccagtccaagaatgtgtgtgtaattggagctggaccatcagggctagtggcagcgagggagctgaaaagagaaggtcataaggtggttgtgttggagcagaaccatgatattggaggtcaatggctatataacccaaatgtacaagaggaggaccctttgggaagagacccttggctaaaggtgcatagcagcatctatgagtctttaaggctcatgtcccccagagaggtcatgggcttcactgatttcccctttttagtcaagaaaggtagagatccaaggaggtttcctagtcatagagagctccttctctaccttaaggacttttgtgaatggtttgagttgagagacatgatcaagttcaatacaaaggtgcattatgtgggaccattaaattatggtgtccctagtgaggatttgaaatgggttgttagaagcaaagacaagaacagcgaggaggaagttgaacaagtgtttgacgctgtggttgttgccactggccattactctaaccccagattgccatgcattcaaggaatggccatatggaaaaggaaacaaatgcacagtcacatttacaggtcgccagagccattccgtggggagatagtggtggtggttggaaattcttttagtggacaagaaatatcaatggaacttgtgaaagtagtgaaggaactccacctcagttcaaaatcacttgacatttatgagggtttatctaaagtcatatccaaacacgagaactttcatcttcgtccacagatagagacccttcgagaggatgggacggtcattttcaacgatggctccagcattatcgcagacactattttatactgcactgggtacacctattccttcccctttcttgacaccaaaggaatggttgttgtggatgataacagagtgggtcctttgtatgaacacacgttccccccagcacttgctccttctctttctcttgtaggcatccccagaagaatcctggggctccctttctttgagtcgcaaggaaaatgggtagctcaactgctttctgggaaaaaggctttgccatcatatgaggaaatgatgaaatcgatcaaggagttttatcattcaaaagaagaagctggcattcctaaacattatacccatgaaattgaaggctttgattattgtgataaatacgcagaaaatgtaggactcccaaagttacaagaatggaggaaagatctgtgtgtatcagctgtagtgaacttatttatcaacttggagacatatcgtgattcgtggaatgatgatattgatgagaagcttcaagaagcccttcgaagtccttacttcactcaactaggagttgaacctgaagatccttctctgtaaaactcaaattaattagcgattacttgtatttctatgttgataacttcaatctttgtggctcaataatctcaaccttggttcctccaaatttgtggactcttattgtttgattcaaatgatcataaaatgcgacgaagttcatgt

SEQ ID NO: 32194 - DNA, 389 bp, Zea mays
  Clone ID: MRT4577_129375C.1
cagaacagcacgcgtgcgtgtgaaagaaatagagaacgagcggtggtctcatctgcacgctatgggagagaggcgtccacgcgcgcaagaaaaacagaggcgggggccgcacgcctgacggcggcgctcgcgtgcacgaaggaaggcgtgcctgctcgctcgcgacgaaaagcggcctcgcccgcatgccacggcagtggctgattccccgtgcgaagcatcgtagcacacgacgtgcgcactcgagagaaaggcgagaaagaaaggccacgcttcgtccatggcggcgcggcgacacggcgcgcctgcgctcgcacgctcggagcagatcgagctgcggcatgcgcggagaagatggccggtggcgagcgcccgagaagggcggcagc

SEQ ID NO: 32195 - DNA, 255 bp, Zea mays
  Clone ID: MRT4577_129376C.1
cgcgttgttgatttgtttccctgcgcctggccttatcccgtcgccgaccctgctcagatttttaggccaatagcccctgcagcaaccgctcaatctctccctctgttttttcttgccgatcatcagccgtcgtcctcatctgtttgtgcaaccaagaaaaatcaggcctcgtcttcatcctttcagcagccgcaagctccagcctccaccttcccttctgcagaaatcctgccatggccgccctccctggtgctc

SEQ ID NO: 32196 - DNA, 850 bp, Zea mays
  unsure (1)..(850): unsure at all n locations
  Clone ID: MRT4577_129377C.1
gccggccggtccgagaaccctagccgcactgcgctcatttctgcatccccctcccgccgcgccgcctcaccgccgccggagaagatgggtcactttccgccacccattcaggtacaagcaccagaaggagctctttgtcgcagccgagggcatgtacacgggccagttcgtctactgcggtcgccgcgccaccctctccatcggcaacgtgctgcccctccgcgggatccctgagggtgccgtcgtctgcaacgtcgagcaccacgtcggtgaccgcggtgtcttccccagggcctctggggactacgccattgtgatcagccacaaccctgacaacggcacatcgaggattaagctgccctctggcgccaagaagattgtccccagcagctgccgtgctatgattgggcaggttgctggtggaggcaggactgagaagccgatgctcaaggctggtaacgcgtaccacaagtaccgtgtgaagaggaacagctggcccaaggtgcgtggtgtggccatgaaccctgtggagcatccccacggaggaggtaaccaccaacacatcggtcacgcctctactgtccgccgagacgctccccctggccagaaggttggtctcattgccgctaggaggactggaaggctcaggggtcaagctgctgccacagcctccaaggctgacaaggccacctagagttattgtcgttgtttatctgtctactgtgctttagattgttaaaggacnatgtgttcagaacggatgtgttgttgcctcgtactatggtgaacattgtctcagtttttgtggtcgctgtcaggatttgcattatgccctaagatgtttactttg

SEQ ID NO: 32197 - DNA, 516 bp, Zea mays
  Clone ID: MRT4577_129378C.1
acgttttgtttccctttgacactgaaccggcttaccatgtataacgtcttatgcacacttgcaccacctgataggacatgagtactcactactgctacagcactggtactgcctgttcatacaccccaggtggaacgatgaagactacatgggtgttatatctttaggcccagtaggtgatactaacttgaaggatggattcttagaaaccataggtcaaatgctaatagccatgataaacttctgtaaggtgttgctgtgtctcaccgtgatgaacagtggtggaccactaaccacgactaaagagcatatccgatattacctacatgaagtagacagaacatattctttgaatgtctggcaatttcggacgagcgcctgtaggcgtactatataccactatagagaatggtattagagatggcggtattcatgagcatacctgctgcctgtgtgaaagtggatggcctcaaattccagacatcatacgatgcgaagaggtatagtgcaaatgct

SEQ ID NO: 32198 - DNA, 844 bp, Zea mays
  Clone ID: MRT4577_129379C.1
taaccctatccgcactgcgctcatttctgcatccccctcccgccgcgccgcctcaccgccgccggagaagatgggtcgcgtgatccgcgcgcagcgtaagggtgcggggtccgtgttcaagtcccacacccaccaccgcaagggccccgcccgcttccgctccctcgacttcggcgagcgcaacgggtacctcaagggcgtcgtcaccgacgtcatccacgaccccggccgtggcgcgccgctcgccaaggtcactttccgccacccattcaggtacaagcaccagaaggagctctttgtcgcagccgagggcatgtacacgggccagttcgtctactgcggtcgccgcgccaccctctccatcggcaacgtgctgcccctccgcgggatccctgagggtgccgtcgtctgcaacgtcgagcaccacgtcggtgaccgcggtgtcttcgccagcagctgccgtgctatgattgggcaggttgctggtggaggcaggactgagaagccgatgctcaaggctggtaacgcgtaccacaagtaccgtgtgaagaggaacagctggcccaagggtgcgtggtgtggccatgaaccctgtggagcatccccacggaggaggtaaccaccaacacatcggtcacgcctctactgtccgccgagacgctccccctggccagaaggttggtctcattgccgctaggaggactggaaggctcaggggtcaagctgctgccacagcctccaaggctgacaaggccacctagagttattgtcgttgtttatctgtctactgtgctttagattgctaaaggacatgtgtttcagaacggatgtgttgttgcctcgt

SEQ ID NO: 32199 - DNA, 380 bp, Zea mays
  Clone ID: MRT4577_12937C.1
tccatatcggccagcggacacacatactctgtatatccattacggtgggtgatcgatgaggagaatgttatcataacatcgcttcctccgcgtacgccgcatggtccacgcggtggatccctcgcgaagtgtatccgctgttcgtgcgcatggccgtgggcctgggtatccgcgcgtatcagcttgtgcgcaacatcacggggaaacccgatgtgcgggtgaccaaggagaatagagcgggccgcgtcctggacaaacaagatcagcgaataggtacccatgcacgcggtcaggacaattctctgcggaaacagtcccgagatcattgccttgatcaactcattcttcgccgaatcactcaacgactattaagctagatt

SEQ ID NO: 32200 - DNA, 977 bp, Zea mays
  Clone ID: MRT4577_129380C.1
gccggccgggtcgggctagccgcactgcgctcatttctgcatccccctcccgccgcgccgcctcaccgccgccggagaagatgggtcgcgtgatccgcgcgcagcgtaagggtgcggggtccgtgttcaagtcccacacccaccaccgcaagggccccgcccgcttccgctccctcgacttcggcgagcgcaacgggtacctcaagggcgtcgtcaccgacgtcatccacgaccccggccgtggcgcgccgctcgccaaggtcactttccgccacccattcaggtacaagcaccagaaggagctctttgtcgcagccgagggcatgtacacgggccagttcgtctactgcggtcgccgcgccaccctctccatcggcaacgtgctgcccctccgcgggatccctgagggtgccgtcgtctgcaacgtcgagcaccacgtcggtgaccgcggtgtcttcgccagggcctctggggactacgccattgtgatcagccacaaccctgacaacggcacatcgaggactgagaagccgatgctcaaggctggtaacgcgtaccacaagtaccgtgtgaggaggaacagctggcccaaggtgcgtggtgtggccatgaaccctgtggagcatccccacggaggaggtaaccaccaacacatcggtcacgcctctactgtccgccgagacgctccccttggccagaaggttggtctcattgccgctaggaggactggaaggctcaggggtcaagctgctgccacagcctccaaggctgacaaggccacctagagttattgtcgttgtttatctgtctactgtgctttagattgttaaaggacatgtgtttcagaacggatgtgttgttgcctcgtactatggtgaaacattgtctcagtttttgtggtcgctgccaggattttgcattatgcctaaagatgtttactttggatatttttgtgttaaaatggtactgtattggat

SEQ ID NO: 32201 - DNA, 722 bp, Zea mays
  unsure (1)..(722): unsure at all n locations
  Clone ID: MRT4577_129381C.1
ccctcgaggctcggccgggtttcacggtcctctctggatacaaatcggtttttatagtggacacgccgtcaaagcttttccttttcagtggctgtaattctagtatgcaaacaagggctaaagcgttggatgttgttaagcatctgaaggagaatcgacacttgggaagatgtgagatcgcggcaatagaggatggaaagcttgttggtgattctgatgctggagagttctggaacttgtttggaggctatgcgcctattcctcgtgatctacctgacgcaatcaaggaagagccactaactgcaccatctaagaaacttttttggatcaataagaaaaaccttgttccactcgaggcacacccgttggatagagaagtgctgaactcagacagaagttacatgctggactgcagcactgaaatattcttatggatggggatgacaacactggtttcagagaggaagtcatctgttgctgtcttagaagattatgtgcactcccaaggcaggtcattcaacgttcacacatttattatgacagaaggccatgaaactgttgactttaagctgcactntcaacactggtccaggaatgttgagctaaagttatatgaggctngccgagagaaagtggcagctattttcaagcatcaaggctatgatgtcacagaaaatcctgaggataaacctcagcagctcatcgatttgtatggcagtctg

SEQ ID NO: 32202 - DNA, 1234 bp, Zea mays
  Clone ID: MRT4577_129382C.1
cattgggtacctcgaggccggccgggccgggaaccctagccgcactgcgctcatttctgcatccccctcccgccgccgctgcctcaccgccgccggagaagatgggtcgcgtgatccgcgcgcagcgtaagggtgcggggtccgtgttcaagtcccacacccaccaccgcaagggccccgcccgcttccgctccctcgacttcggcgagcgcaacgggtacctcaagggcgtcgtcaccgacgtcatccacgaccccggccgtggcgcgccgctcgccaaggtcactttccgccacccattcaggtacaagcaccagaaggagctctttgtcgcagccgagggcatgtacacgggccagttcgtctactgcggtcgccgcgccaccctctccatcggcaacgtgctgcccctccgcgggatccctgagggtgccgtcgtctgcaacgtcgagcaccacgtcggtgaccgcggtgtcttcgccagggcctctggggactacgccattgtgatcagccacaaccctgacaacggcacatcgaggattaagctgccctctggcgccaagaagattgtccccagcagctgccgtgctatgattgggcaggttgctggtggaggcaggactgagaagccgatgctcaaggctggtaacgcgtaccacaagtaccgtgtgaagaggaacagctggcccaaggtgcgtggtgtggccatgaaccctgtggagcatccccacggaggaggtaaccaccaacacatcggtcacgcctctactgtccgccgagacgctccccctggccagaaggttggtctcattgccgctaggaggactggaaggctcaggggtcaagctgctgccacagcctccaaggctgacaaggccacctagagttattgtcgttgtttatctgtctactgtgctttagattgttaaaggacatgtgtttcagaacggatgtgttgttgcctcgtactatggtgaaacattgtctcagtttttgtggtcgctgtcaggattttgcattatgcctaaagatgtttactttggatatttttgtgttaaaatggtactgtattggatatccctccttgcttcgttttattttggcctttgtagaattgttgagcggttgtctctttgtgtgggatcctgtaatttctgagttgctggaacgttggcaatacatggtttccgtcgaaacttcattagtgctgactgctgagagggcactggcg

SEQ ID NO: 32203 - DNA, 234 bp, Zea mays
  unsure (1)..(234): unsure at all n locations
  Clone ID: MRT4577_129383C.1
gggggggggggggggggggggggggtgggggggccagggacccgatttgagaggagagattttaggcctgggacagtaattggaatatccncatctttaagaaacctgcactggggccccagatacccgcctncnntaaaatatctaaataggcctgctannagggggttgggtatggcccattgtgaagggccgtnngatgatacccgagaacctgtagggttggccatcggc

SEQ ID NO: 32204 - DNA, 294 bp, Zea mays
  Clone ID: MRT4577_129384C.1
tagatcctacatgacaggcagcaagtgcagggtccttgtcaagtgaagatcatggtgatgccggggttttacgtccaagatagagtgcttaaatgcagggtcctcacaaccagatcagcagcataattgtgtctcttttcagagctttctttgaccaacagctagtatggtgtcaacttccacgtgtaacatctttttttttgtcttgagccaaaggcaacacattaggcggtgtttggtttctatagactaattttttgttcctccacaaaaaaaaaatactattaaatttaa

SEQ ID NO: 32205 - DNA, 252 bp, Zea mays
  Clone ID: MRT4577_129385C.1
cgacggcttcctatacctgagatccttcttacggaaccaactgacactacttacaggaggtgaccgtccagactcatacgtccacctaaaactctcagcaaccataagaccattaattgaatacagggactacactgactgatgagctcgttgtgtccagagatcattccttaagaactataacatagcgatatcctatgataccaaggattacacatgcacgtaacgagacaaaagcgatcatgcggaaaa

SEQ ID NO: 32206 - DNA, 1034 bp, Zea mays
  Clone ID: MRT4577_129386C.1
cctcgaggccggccgggccggagttagcgtctcgcggccgtttcgacagttcctcgcgttccatttgcttcggatcatctcagatcaagctagcgcacctgacacccaccacctccctcccagatccaccaccccaagcatgaccacccgcctatgattgcgccgggaaaaaaaaaaaaaaaaaaaaaaaaaaaaactcgaggccggccgggaattcgcttcgatccccagaggcacagacgagacgacagagatgaaggacggaacgtcgtcggggggaggggcgttcgctgcgggcagcgatccaaggcagccgtcgacggcgaagccatacgcgccgccgaagctgtcgccccaggacctacccatcgactatgcaggcttcctcgccgtcgccttcggcgtcctcggcgtcatgctccgctacaaggtgtgctcgtggatcgcaatcatcttctgcgctcagtcgttggcaaacatgaagaactttgagaacgatctgaagcagctttctatggccttcatgtttgctgttatgggtctggtgacgaactattttggccccgctcgtccaggcagtacaaagcgctaaactgcggaagaacatgtgctacattcttcataggactttttggtgcttccgatagctttgccatcggtgctgacattatgtatgtccaatttgagcaaacgtcataggtatgggcatcaaattaatggaccggtacatgtatgatgctcaataatttatttgtgcaatactagtaaacgcatagactgtttgaacgagtacttggtttctccggatatgttgatcaatgttttctggacttaaaaaaaaaaaaagatgcttcggtcttatcagtttaccccaaaatgccggtagatggactgacgttttggctttttaaaatatgttacttttattatgtatctatatatagtttatgtttgggtaaaaaaaaaaaaaaaaaaaaaaaaaaaaaaaaaaaaaaaaaaaaaaaactcgagactagttctctctctcctcgtgc

SEQ ID NO: 32207 - DNA, 772 bp, Zea mays
  unsure (1)..(772): unsure at all n locations
  Clone ID: MRT4577_129387C.1
cccgggaaaagatctcacccctccagagtcccgggctcgaggccggccgggaattcgcttcgatccccagaggcacagacgagacgacagagatgaaggacggaacgtcgtcggggggaggggcgttcgctgcgggcagcgatccaaggcagccgtcgacggcgaagccatacgcgccgccgaagctgtcgccccaggacctacccatcgactatgcaggcttcctcgccgtcgccttcggcgtcctcggcgtcatgctccgctacaaggtgtgctcgtggatcgcaatcatcttctgcgctcagtcgttggcaaacatgaagaactttgagaacgatctgaagcagctttctatggccttcatgtttgctgttatgggtctggtgacgaactattttggccccgctcgtccaggcagtacaaagcgctaagctgtggaagaacaccatgcgcttcattcttcataggatatctagccgatctttttggtgcttccgatagctttggtgctgacattatgtatgtcctatttgagcaaacgtcataggtatggacatcaaattaatggaccggtacatgtatgatgctcaataatttatttgtgcaatactagtaaacgcatagactgtttgaacgagtacttggtttctccggatatgttgatcaatgttttctggacttgatgcttcgctcttatcagtttacaccaaaatgccggtagatggactgacgttttggcttttcnaaaatatgttacttttattatgttctc

SEQ ID NO: 32208 - DNA, 556 bp, Zea mays
  Clone ID: MRT4577_129388C.1
ggtggttaaaaaacccaaaggggtttgttttttcccgggtttggggggtaatagaaactccccccgggggggggggaaaataaactgtggtgggaatttaacaaaacgctacaaattttggggcacataggggttcccccctttttgatggtttggggggacccgaaatattttggggcgttccaggagggggggttacacacaaaattgggcctttttaaacaaaggggcctcctttgttttttaaaccctaagggtttgaccccacaaaggaaccccgaacgggagggcattttttttcacgggggggggaggggcgatttgagggcctcaaacgggggtttttgtggctaaaatttggggggcacgtacagggtttttgtttccttaaaaaaaaatttggggaacccgggtttgggggggttcttcttggggggccccaaaaggggggggcccggaaaaaaaacgggtttcgcccccggtttttaaaaggaccccaaggactttgggttgccctgggggccggtgaacccccgggtaatatattttttttttc

SEQ ID NO: 32209 - DNA, 365 bp, Zea mays
  Clone ID: MRT4577_129389C.1
tgaagttattataaacctccaatgtgggctaacatcacttcagaatcttcttacaagtaatccaggcttagctgctgtttttgctaccaaggagcgtctggttcctctttttgaatgccttgcactccatgtttctcctgaaagcagcatcccacaaatctgtttaagtattctttctctgttgactaagcatgctccttgtttggaggctatggttgcagaaaggatgagcctcattttgctatttcagatactccactgcaatcctccttgcagggatggagctctagctgtactatattctttagccagcacaccagagcttgcctgggctgctgccaaacatggtggtgttgtttacattt

SEQ ID NO: 32210 - DNA, 676 bp, Zea mays
  Clone ID: MRT4577_12938C.1
cttctacgtcgctcacccaaccttagcatcacactagtgccagagccctctcgtatccctcgctatgtagagcaccttcatcatgatcatgcctgactacgcccagaggcccctccttggtgagatcctcctcccgtttatgagaacaacgccttctcacctcaaggacttgatgcttgggaacgcgcagaggactttcgctgagaaaacatacgccgatctcccctcctggcccttcttccatggtctcgtggactacatgcatctctggccctgtggaggccatggtctgagacgtatacagcgtggtcacaactggccgcaatgacattggaggctctcatagccccctggctgtctgagcccggaacacatccgtggcaactttgctggcaacctcggcacgaatgtcattcatggaagtgactgcattgagatgtgctaatctggagattgccctgagattcccctaagtccctgctgactgccacagcatcctctcccgctggatctacgacaactgaacatgctgagactcacatcccagcttgagagacatacgaggcatgtcaccatttgtcgctttagcaatcgttacgaaaagattatgatctgtatcgtggaacctcatttcaatgtacctaatttctttctttgccaggaaaaaaaaaaatat

SEQ ID NO: 32211 - DNA, 519 bp, Zea mays
  Clone ID: MRT4577_129390C.1
gaaaaaaaaaaaaaaaaacgggcccgaacaaagtttgagctgttgtaccttcacccaatccacatatagcactacaaaatggtcactgggaaagtagcagtcgtcctcctagcctgctggacgctagttctctaccaaccagtgcttggccgtttaccgtgtaacaatgatcagaagagagagatcctgcgcgagtgtgatccactgaactcaacacctgactatactccatcccggcacggtgcgtgctgcgtggcggtgagaaaggtgccaggaaccaacatgctttgcattgcctccatactctcacttgctgacaaggccaaatacagtgtaaggaagattctaggatttagagatgcatgcgccccttcacatccacaccatcaggtcatggcctaaaagagtgtagctgccagcctgccatcgcttatggaatcatcgtccaaacatgatgttgaaatgagatatatctccggctggttaataaaaaccaagttatattaatcctcttgtgcc

SEQ ID NO: 32212 - DNA, 645 bp, Zea mays
  Clone ID: MRT4577_129391C.1
cagggtttaggaaatagccgtgacctttattcagtcgtgaagatgttgtggagatgaaatcttcactaatttcaatcgacaggactgcatacactgctatggtagatgctttgctagcttgtgggtccatcgacggtaagttctataccatctttttagtcactacagtgaattttcctaaaaaacaatacaatgaatttgcaagttggaaaacaacgttggtgtttgactaagaactaacaagtggcctagcacccacttttcatcctcacatttgatttattttcaaactgacacttctcttttcactttacagtggttcagcatttagcgttccatttgacgctaacaagtgacatatcacattcttatctgtacccttttatgtcccagttgcccaagcagcatatccagtctaaagtatctaaaatggtgaaactgttcttcgtcagttgtgtttgcataattttttataattacatcaccgatgtgtataacctagttgtacttctcaaatcatcacatgcagtgactataagttacaccaaaatcattttctgaggtatagactatagatcacttgttagtatggttcatttaaccttactgttgtgcacaagcaaatgcttgacaaatgacgatact

SEQ ID NO: 32213 - DNA, 605 bp, Zea mays
  Clone ID: MRT4577_129392C.1
cccacgcgtccgcccacgcgtccgcccacgcgtccggtttgagctgttgtaccttcacccaatccacatatagcactacaaaatggtcactgggaaagtagcagtcgtcctcctagcctgctggacgctagttctctaccaaccagtgcttggccgtttaccgtgtaacaatgatcagaagagagagatcctgcgcgagtgtgatccactgaactcaacacctgactatactccatcccggcacggtgcgtgctgcgtggcggtgagaaaggtgccaggaaccaacatgctttgcattgcctccatactctcacttgctgacaaggccaaatacagtgtaaggaagattctaggatttagagatgcatgcgccccttcacatccacaccatcaggtagttaatactcgttctatcacttgacagtccttagactacagtggagtgtccttgtaataagctaacaagtattaatcttgttttgtgaggcaggtcatggcctaaaagagtgtagctgccagcctgccatcgcttatggaatcatcgtccaaacatgatgttgaaatgagatgtatctccggctggttaataaaaaccaagttatatt

SEQ ID NO: 32214 - DNA, 328 bp, Zea mays
  Clone ID: MRT4577_129393C.1
aattcggcacgaggggttggcagcttggcactcgcacaggcacacagcaccacagagcagagcagcagcagcagcagcgcgctcacaacgttcgcaatggcggcgcgggccaccgtcgtcctctacgccgcgctcctctgactgctcttcgccactagctccgtcgagcaggaccccgcggacgcgccagccaatgcgccggccaagccctacaaggacacgcccaccgccgtgccgtccgacaccccggatgcgcccgctcccaaggcctcctccaaggccagcttcccattagtagcgccgggcgcaggcccaacacacccccaac

SEQ ID NO: 32215 - DNA, 251 bp, Zea mays
  Clone ID: MRT4577_129394C.1
gcggaggcgtgtaatcactcgtaagtaaccgcttccgaggttctgaccattgctgtcaaccggggggactcgtcaacagcgaagggagtttagggacctcgtatgtctaatggttgaccctttgagaccaggagacttcaaccaagcgctaattgagttaggagcaacatatatgtatcaagacaaaacctggttgttctcaatgcccactctctagccactgtcaagcgctttcgctttcccgtgtaaaa

SEQ ID NO: 32216 - DNA, 452 bp, Zea mays
  unsure (1)..(452): unsure at all n locations
  Clone ID: MRT4577_129395C.1
cgaggggagaaagacacaacgcgcaagcccaagacagacgacangcaacaacgcgaggagaagcgaaaggcanccagcaccccacanggaacaacacgaacaacgcaggncaacagccgaaagcngaaagaagcagcagccgcaccagcgagaaaaacacagggggggcagngacaccaaagcggccgcaggcaccncacaacccaaccgggacccaagggcacagccccnccngcgccaggcgcggcncgacgacagcccgcagcggngcgcccaggaacgngacgagaccgggggaccccaccacgcagacgccccccggncaagggcccgccgggagggaccacncgaagggaggcagacagggcccgaccaggggggccacgaggccgacgccgagcggcgcgcccgggcacacacggcggcccggaccgaacggcagcaccccgaag

SEQ ID NO: 32217 - DNA, 437 bp, Zea mays
  Clone ID: MRT4577_129396C.1
gcagccccaaaaaaccccattttttccttaggattaacttaaaacaaatcctgacgggggtaacagcttccattgatccacagtccatgctggttgaagcatgggtctgctggaccccgggatgaacccagctttaacaactgacacagagggaccttgcaataaaaaacccaggtgggccccccccaacgggacgaacgaagataaaccctttggactaggggaaacatcacgggggcaaacaggataacttggccgggcgggccccaccggttaatttctccagttcccgggggagttgcccgaaccccccccccgggtgccccccccgtaacccccccccccccccccgtaacccccccccgccccgtaacccccccccccccccccctaacccccccccccattaaggggcccccccccccccaaaccccccc

SEQ ID NO: 32218 - DNA, 434 bp, Zea mays
  unsure (1)..(434): unsure at all n locations
  Clone ID: MRT4577_129397C.1
aaggacaggggggggggaagagacaacaaccaaaggaaacccccccccacaaaaaccaccacgggaagggncacagggacgaaaagngacaaaacgggggggggcagaccaaaaaaaacaaacaggcccgcacagagaaagcccaaacacgaggcggccaggcaggaagcacaagcacggcgccaccgccggagggagggaacgaaaaacacgaccggaaggaaacggaaacaagcaagggacaacccccgccgaggcaagcaacgcggggggaaaaacaaaaaggcagacagccgcggccgaagcaacgggcggccagaggccaccgccaaaaacgggacaaaggcccaagncggagacaggaacaccagaggccggagacangccagcagggccaaaaaacgcagcaaggggaacacccaaagcagaacgcc

SEQ ID NO: 32219 - DNA, 335 bp, Zea mays
  Clone ID: MRT4577_129398C.1
gctcggaattcggctcgagctcgcatgtcacctcacgtttcttttggcacagacagcggtaccaagaaagagggttcatttgttccaagggtgcatatctatgctggcatactagttgtaactcccaaagaagctcaagaagtccacatgatgtctgccgagaaagcttcggtgcaacaggcggcagcaatttttgctgctgggaaactcacagaggctatggctgaccagtttggtacgatccaaaagcaggtcggatagcctacggaccatgcacagatcatcattcagggtgttccaaccacaaattattcttctgtaagtgaagcctctgg

SEQ ID NO: 32220 - DNA, 255 bp, Zea mays
  Clone ID: MRT4577_129399C.1
ctctaaattaattgtccccttagggaatgcccaaaaaggattttcccccaaagggtttagctcaaaaagctcccccctcccacaaacccctggcccaagaaagtatttctttccacagagacgtcttacaaaggggggggagggcccgggggggggtgcgggtggggtttcccccccagggtcttggcataaaaaattttatgtaccgggggtttcaaaggggcggtttttcaaaagcggggggtcccttttccc

SEQ ID NO: 32221 - DNA, 551 bp, Zea mays
  Clone ID: MRT4577_12939C.1
ttttttttttttttttttttttttttttttttttttttttttttttttttttttttttttttttttttttttttttacaacagggagatcccatggggcttattattggggggaacagaaaaaagcaacatgaaacaacgaaattgatcgaaagaaaaaacgggatcgagtagacagcaacgcgggaggaggaccgatatgcttgaattgggttgggtgccgaccacctgtttgtgccagcaagcaaagcctaggctactactaacatatttttttgcaaaaacacttgggcgtggggcccttcgccttgcacttgccgccggggaagtttttggtttggcacacgttggcgcagttgttgttgtttatgcacaggcccttgaaccgggggttttgcgaaagggagggccttgccttcgccaccttggtcgtccccagttttttggcgaccaggaggagcaggaggaccaggacgggagcccccatgcgtttaaaagagccatcaccccccttggcagttggcacccggttgctttgagcttagggctact

SEQ ID NO: 32222 - DNA, 250 bp, Zea mays
  Clone ID: MRT4577_1293C.1
gtgcagtgcaatccaagcgaagacaatccaagtaaacaagcaggaatgcgacttgatacttggaaatgtgtgtgacttttacaaagagcaattttgagctgtgactttattaaatcaatttctgtacagttagtaattttaataatgtggcccttttcctagtccctgcaacctgtttcataaagtgcaatggggaaagcaggactgttgagcccttttggtgatgcgagttgaagttcaaggtttctaa

SEQ ID NO: 32223 - DNA, 1110 bp, Zea mays
  Clone ID: MRT4577_129400C.1
cctcgaggccggccgggagatcacagacgacgaggaggagaatgctccgtctccgcacgcaccacgcgatgcttcgaattcgacaattccttccgtggccctgctccttcccttccctccctccctccttccattccaccgcagctggccaccaccacacaaaaacggcaaaaacacacaccgcgggcaagcaccgccaatctctccacacaaaaaatccatcaactactcaaccccctcctccagcctctgctcgccgcgcgcggcgctgtagcattctgccgtccatcgtcgccccggctccccatccctgctcctggcgtcaacatcccaaccatccccggagcgcgccaggggtggcggcgacacgaggctgcttacgatcgtcggcgacagcgcctcctcccactccatgccgtcggcggtggcggagcctttgccggatggcaagtacgaaacggatcgtgccggggcggtaaccgtcgtcggggcaggcgcagatcacagcatcgacggagcggttaatggaagcaaagacgagtcgttcttcgaagcgaggccctggctagattccgacagcgaagacgatttctacagcgtcagaggagatttcactccgtcaagaggcagcacacccgttcatccgagattaacgccctcaagtgggcggatgctggcagacaggtcgggtccttctctggtaaaaaagaagcagagactcctcgagcttcttcaggaggagcagcattatgacgacgaggatgacagcgtcaccgatgctagcaatgatctggaaagtagcgcagttcatgccatagaagaagaagaagaacacacgaggactcgtcgcagaagtgagaaatcgaagaagtcatcggggtcaggctgccttccaaccttcatctggaagcgtagcttcacagcctgcaggaagaagaaaaaagaaaaaggagcagaaggataaagcgaccaagcattacggtgccaagttatgattttgtaaagaagaggagaacagattttaataggctgcggaggtgcgtgtacatatacgttttgagcggtgtactctgctaaagaaaaaaggttaaaggaaagatgatgtagggt

SEQ ID NO: 32224 - DNA, 639 bp, Zea mays
  Clone ID: MRT4577_129401C.1
gccggccgggttccgatgaacgccttccaacttgaagctgccaagctaagcgccgctagattatttatgtcgacggcttcgtctgccaacaggtcagtccaactctggctctgccagagtatagatgacaatctaccggcggtgctcggcttcctccgtggggctctccgattttcagccatggacatgttcgggggaggaggtcgtgatgacgagacacgctagcggggcggctcacccccatgagaccaccttatttgaggttatcgtccgcctaggaggcccacggcgagctcggccgcctgatccacggtgttggtatcgaacttctatacaatgcccttcgccgaggcgcacgtccccgaggggaactcaacgcggccgggctctgagagactacctcggggctcagtggtccgtggctgagcttcaacaaccgggtcaaggccctcatccgctctggggatctacacggggcttcgggcgctgcccgcgccgccttctcctcgggagtccggcccaccgtcttcacctgcaacggcgtggccgcgaccatggtccgcgccgcccgacacgatgacgctgtcgtcctctttgatttcttcttccgccgctctaatatcgtccccaacatcgtct

SEQ ID NO: 32225 - DNA, 299 bp, Zea mays
  Clone ID: MRT4577_129402C.1
agaaaataagtggaatatattatccataatctattgaactatcatgcattcaacagaagctttatatgtccaatttccgtgtcaataaaacatcttttgactttgtagaagaaaatgttcatcaccagatcgataggctaacagatgcgtataacttttactaccttgcaaaacattgggactgcaatctacattgtggaactctctaccttgcaaaacatagggagtggaagctacttctgcggtgactgttgtacttgtttatttgtctgcctgcacaaggacctgaactatggtta

SEQ ID NO: 32226 - DNA, 150 bp, Zea mays
  Clone ID: MRT4577_129403C.1
ttggtgatcgcacatcggatatcctcaagggaaattcatctcctcacacttctgtgaaagtggtgtcacgacgcacgaaggcgaatctctctcctgccagtgggtaccgggctatctccactctataggagtggcaggaagctgatttta

SEQ ID NO: 32227 - DNA, 518 bp, Zea mays
  Clone ID: MRT4577_129404C.1
gcgcgacaccagcaagaactccgacgtcatgcgcgccctaagcaacgccgtgcacgcgctctcgtggcgctctggcaccaccggtgccgctgtagaagcgtgccactgggccgacgggtacccgctcaacgtgctcctctactgctccctcctccaggccatctttgatctgagggagagcaccgtcgtgctcgacgaggttgacgagctcctggagctcatcaagaagacgtggccgacgctcggcatcaacaggatgctgcacagcgtgtgcttgtcgtgggtcttcttccagcagtacgtgatcacgggccaggtcgagccggacctcgccgctgcggcgctcgccatactcgttgacgtggcagccgacaccaagcacgggagccgtgacccgatgtacgtcaaggttctcctgagcgctctcggtgggatgcaggagtggtcggagaagcgccttctggactaccacgacagcttcgagaaggacatcggtggcgctgctacggaaggcatgg

SEQ ID NO: 32228 - DNA, 245 bp, Zea mays
  Clone ID: MRT4577_129405C.1
attgctctctggcgactgtagattccgtataccatgatgaagcctgcttgctttgagaccatcggggagctgatctacaagcatgctgtgcctgtaccaaagtctgactgctacacgactacccagttggcgattaactgagctggtggttacattgcgaggagtattgtgagctattgattataacccgggtgacaacctcgggtatgtgatgaacaatgccgagggagctacagggtgagatg

SEQ ID NO: 32229 - DNA, 287 bp, Zea mays
  Clone ID: MRT4577_129406C.1
ggggaaaaaaaaaccccccttaaaaaagttttaccacccctcctaaaaaacttatttgcaggggaaattttttcaggaggggaactttgggggggggggcttgcccaaaaaataaaaaaaccaccccgggattatgtaaatggtcctgcaatcctaatcccaagaaaacacccctccaagcccccatatatatgaacagggtctttttttttgaaaaaaaaggttcgccgtttgccgcgaaaccaccttaaacaggttaaaaaagggccctgttgccttttttttta

SEQ ID NO: 32230 - DNA, 646 bp, Zea mays
  Clone ID: MRT4577_129408C.1
aaggtactacactcccactttactcctatccagtgcgcgcctggacgcgtgcgagaggcttgaccaagcagcagcagcagcagggatggcgcctctgaagctttacgggatgccgctgtcccccaacgtggtgcgcgtggccaccgtgctcaacgagaagggcctcgacttcgagatcgtccccgtcgacctcaccaccggcgcccacaagcagcccgacttcctcgccctcaaccctttcggccagatcccggctctcgtcgacggagacgaagtcctcttcgagtcccgtgcgatcaaccggtacatcgccaaccacgcgtcctacctgctctacctcagcaagacccccaaggccgggctcgtcgccgcccgcccccacgtcaaggcctggtgggaggccatcgccgcccgccccgcgttccagaagaccgtcgccgccatccccttgcccccgccgccctcctcctcggcttgacctcgccttgcgttgcctgggtcgcggatgcgtcggagccctgagtcgaataaaagaggccgcatcctgtcttgcatttgctgctgcgccatgtgctataacagcctgtgtaataaacactgttgctttcgtgtgtgttcattgcctttttgttggttggtccttgcg

SEQ ID NO: 32231 - DNA, 330 bp, Zea mays
  Clone ID: MRT4577_129409C.1
aggcgcagatggaatgagcgacttttctctgctccgccgctggcctgccgccgcaccgcgccgtcgatcgccgcgccatgaacggtccccgcggctaccccctttcttcaccggcaccttacccccgtatggtgagcgccgagatttgagctgccgtctctccttcgcatcggttgaattcttgcccccgctttttttttcatgttccggactgttgattcctagggaggcgtgaattttgcgtgtttgtttaagggattagtggagattcttgccttctttttttggttcccccatcctcatcctcctggtggtggttggtttgcaggc

SEQ ID NO: 32232 - DNA, 395 bp, Zea mays
  Clone ID: MRT4577_12940C.1
aaaaaaaaaaaaagcaattttaaagagccgaagtggcagttcctttgcctgcatgccgatttaggcccatcaaaaaaagcggatcgaacgtttgcttacgaggccaggcccattatcggtgcccttgaatgcggggcttttacctacccaattcaaaaaacgcgggggggagctaccatttttaatttttgggcgagcgggcagggcaacaatggatgccggcatgcccaggacgggggaccaccatggggtctcggaggcgcccttgaaaacggacttctggaggggggcgccgcactccttgagcgggtccttgcggaaaaaggcaaaggggttggcgtaacggaccccctgcttcttgatgcccttgttggaggtgaacgggacccgggccc

SEQ ID NO: 32233 - DNA, 680 bp, Zea mays
  Clone ID: MRT4577_129410C.1
gccgggtttgcgaggaaactcgctcccactctactcttatccactgcggcctggacgcgtgcgagagacttgaccaagcagcagcagcagggatggcgcctctgaagctgtacgggatgccgctgtcccccaacgtggtgcgcgtggccaccgtgctcaacgagaagggcctcgacttcgagatcgtccccgtcgacctcaccaccggcgcccacaagcagcccgacttcctcgccctcaaccctttcggccagatcccggctctacctcagcaagacccccaaggccgggctcgtcgccgcccgcccccacgtcaaggcctggtgggaggccatcgtcgcccgccccgcgttccagaagaccgtcgccgccatccccttgcccccgccgccctcctcctcggcttgacctcgccttgcgctgcctgggtcgcggatgcgtcggagccccagccccgagtcgaataaaagaggccgcatcctgtcttgcatttgctgctgcgccatgcgctaacagcctgtgtaataaacactgttgctttcgtgtgtgttcattgccttttggttggttggttggtccttgcatatcctactagtgctgatctttttgtgaagcttggattggatggacgcgttttcttcgccgtaaaaaaaaaaaaaaaaaaaaaaaaaggggcggcc

SEQ ID NO: 32234 - DNA, 437 bp, Zea mays
  Clone ID: MRT4577_129411C.1
cggacgcgtgggaaaaaaaaaaaaaaaaaaaaaaaaaaaaaaaaaaaaaaaaaaaaaaaaaaaaaaaaaaaaaaaaaaaaaaaaaaaaaaaaaaaaaaaaaaaaaaaaaaaaaaaaaaaaaaaaaaaaaaaaaaaaaaaaaaaaggggggggcctttttaggggaccaaagtttacttccccgtgcttgcaacgtattagtttttttttggggcccccaaatttaatttcatgggccgggtttttaaaacttggggcttggaaaaaccttgggtttcccaaatttaatccctttgaaaaaattccccttttccccagttgggtttataccaaaagggcccccccctttcccctttccaaaaatttgcccaccttaattggaaattggaacccccctttttccggccctttaagcgcggggggtgggggggttccccc

SEQ ID NO: 32235 - DNA, 688 bp, Zea mays
  unsure (1)..(688): unsure at all n locations
  Clone ID: MRT4577_129412C.1
ccggccgggccgggaaggaaactcgctcccactctactcctatccactgcggcctggacgcgtgcgagagacttgaccaagcagcagcagcagggatggcgcctctgaagctgtacgggatgccgctgtcccccaacgtggtacgcgtggccaccgtgctcaacgagaagggcctcgacttcgagacgaagtcctcttcgagtcccgtgcgatcaaccggtacatcgccagcaagtacgcgtcggagggcacggacctgctctccgcgacggcgtcggcggcgaagctggaggtgtggctagaggtggagtcgcaccacttctacccgaacgcgtcgccgctggtgttccagctgctcgtgaggccgctcctgggcggcgcccccgacgcggcggtggtggacaagcacgcggagcagctcgccaaggtgctcgacgtgtacgaggcgcacctcgcccgcaacaagtacctcgccggggacgagttcacgctcgccgacgccaaccacgcgtcctacctgctctacctcagcaagacccccaaggccgggctcgtcgccgcccgcccccacgtcaaggcctggtgggaggccatcgtcgcccgccccgcgttccagaagaccgtcgccgccatccccttggccccgccgccctcctcctcggnttgacctcgcctttgcgttgcgccg

SEQ ID NO: 32236 - DNA, 1053 bp, Zea mays
  Clone ID: MRT4577_129413C.1
cggacgcgtgggcgcagtgtggacgcgtgagagagagagagagactcactgaccggcgaccgacttggggaaggaagcagcagcaaaggatggcgccgctgaagctgtacgggatgccgctgtcgcccaacgtggtgcgcgtggccaccgtgctcaacgagaagggcctcgaattcgagatcatccccgtcgacctcaccaccggcgcccacaagcagcccgacttcctcgccctcaaccccttcggccagatcccggctctcgtcgacggagacgaagtcctctacgagtcccgtgccatcaaccggtacatcgcgaccaagtacgcgtcgtcgggcgcggcgctgctcccggcgacggcgtcggcgaagctcgaggtgtggctggaggtggagtcgcaccacttctacccgaacgcgtcgccgctggtgttccagctcctcttcaggccgctcttcggcggcgccccggacccattggtggtggacaagcacgcgcacgagctcgccaaggtgctcgacgtctacgaggcgcacctcgccagcaacaagtacctcgccggcgacgagttcacgctcgccgacgccaaccacgcgtcctacctgctctacctcaccaagacccccaaggctgggctcgtcaacgaccgcccccatgttaaggcgtggtgggaggagatcgccaagcgccccgcgttccagaagaccgtcgccgccatcccattcccaccgccgccctcctccgcttgagttgacctttcgctgggtcgtcgccggtcacggacgcgtccgagttgaataaaaacggcctccttgcttgttgctgcgccgttgtgtgaatcaaatccaaataatattgtagttgtttccatgtgtgttcatctcactgctgtctcggcttggttgtgtaaagagcacggtgggggtgtggacacgatgtgtagaacctttttttttttttgatccttggatgtttctattagcccgttgcttaatcttatcagctgaatctggtgtttttctctatcaataaatctgctacggcttattaggc

SEQ ID NO: 32237 - DNA, 987 bp, Zea mays
  Clone ID: MRT4577_129414C.1
ttgggtacctcgaggccggccgggccgtccgcctccttcgtcagctggcagctgctataataaggaagaagataacggagggcaaggaaactcgctctcactttactcctatccactgcggcctggacgcgtgcgagagacttgacaaagcagcagcagggatggcgcctctgaagctgtacgggatgccgctgtcccccaacgtggtgcgcgtggccaccgtgctcaacgagaagggcctcgacttcgagatcgtccccgtcgacctcaccaccggcgcccacaagcagcccgacttcctcaccctcaaccctttcggccagatcccggctctcgtcgacggagacgaagtcctcttcgagtcccgcgcgatcaaccggtacatcgccagcaagtacgcgtcggagggcacggacctgctccccgcgacggcgtcggcggcgaagctggaggtgtggctggaggtggagtcgcaccacttccacccgaacgcgtcgccgctggtgttccagctgctcgtgaggccgctcctgggcggcgcccccgacgcggcggtggtggagaagcacgcggagcagctcgccaaggtgctcgacgtgtacgaggcgcacctggcccgcaacaagtacctcgccggggacgagttcacgctcgccgacgccaaccacgcgtcctacctgctctacctcagcaagacccccaaggccgggctcgtcgccgcccgcccccacgtcaaggcctggtgggaggccatcgccgcccgccccgcgttccagaagaccgtcgccgccatccccttgcccccgccgccctcctcctcggcttgacctcgccttgcgctgcctgggtcgcggatgcgtcggagccccgagtcgaataaaagaggccgcatcctgtcttgcatttgctgctgcgccatgtgctataacagcctgtgtaataaacactgttgctttcgtgtgcaaaaaaaaaaaaaaaaaagcggcc

SEQ ID NO: 32238 - DNA, 637 bp, Zea mays
  Clone ID: MRT4577_129415C.1
ggcatacgcaaggccggccacctgctccacgtcgagcggccgtgcgcctacaaccgccagctccagaggtggttcgcctacgtcaactccacagaagaccacgtccaggccagatgatcgacgcgcccgccccgctcctgctgccgctgatgcatgctgctacacggagatcacatgcatacatatatacacgtcccgtctcagttgatattaattacctgtgcattggtgctgttcgttattgatgtccgccttagctctggctcccaagctgctactgcctcgcagggctcacgcctgactatatgtatgtaccgtgtcacttgggcctcggtttgcgtacgtgtactctcgaacaaatgttgttattagctgttgctcccaagaaagaagacgctggcagggcagccaacacactgtatgtatgtagtgtgttgcgctggccatggtttcagtacgtgtactctcgatcaagtgtagaccgacctcggtcgtacgtgtcgcctcattcgttttggatcaattctttgtgattcttataagtcagcaatacaatacacgcagtataatgaatgagtgtaatgtaccaacaatgctgcgtgctagtgcgtcgcaaaagttgtttttggttcgattc

SEQ ID NO: 32239 - DNA, 974 bp, Zea mays
  Clone ID: MRT4577_129416C.1
ggccgggaaggaaactcactcccactttactcctatccactgcggcctggacgcgtgcgagaggcttgaccaagcagcagcagcagcagcagcgatggcgcctctgaagctgtacgggatgccgctgtcccccaacgtggtgcgcgtggccaccgtgctcaacgagaagggcctcgacttcgagatcgtccccgtcgacctcaccaccggcgcccacaagcagcccgacttcctcgccctcaaccctttcggccagatcccggctctcgtcgacggagacgaagtcctcttcgagtcccgtgcgatcaaccggtacatcgccagcaagtacgcgtcggagggcacggacctgctccccgcgacggcgtcggcggcgaagctggaggtgtggctggaggtggagtcgcaccacttccacccgaacgcgtcgccgctggtgttccagctgctcgtgaggccgctcctgggcggcgcccccgacgcggcggtggtggagaagcacgcggagcagctcgccaaggtgctcgacgtgtacgaggcgcacctggcccgcaacaagtacctcgccggggacgagttcacgctcgccgacgccaaccacgcgtcctacctgctctacctcagcaagacccccaaggccgggctgcgtcgccgcccgcccccacgtcaaggcctggtgggaggccatcgccgcccgccccgcgttccagaagaccgtcgccgccatccccttgcccccgccgccctcctcctcggcttgacctcgccttgcgttgcctgggtcgcggatgcgtcggagccctgagtcgaataaaagaggccgcatcctgtcttgcatttgctgctgcgccatgtgctataacagcctgtgtaataaacactgttgctttcgtgtgtgttcattgccttttggttggttggtccttgcatatcctactagtgctgatctttttgtaaaaaaaaaaaaaaaaaaa

SEQ ID NO: 32240 - DNA, 350 bp, Zea mays
  Clone ID: MRT4577_129417C.1
actagagttgtactgggtcgcctataaatggtggtaattagcaggcctctctgcctctcgtcgtatggcgaccggcaccggcagtcagcagaggcggcgaacatgcgcgcgcgacagagggaagagcccgctagctagctcgccgttatgctgcgtccatctatcaccatctttgcttggaagtactagtaaattactagtgtactgtagtaaagagagagtgcaacttctcctcaccggccggagcgacgacttccgcctgctgctcactgtggagtgtggaccgatccgggactcctcagttgagaacttgagatgactggcgcaatggccatggactctggcgatcg

SEQ ID NO: 32241 - DNA, 1335 bp, Zea mays
  Clone ID: MRT4577_129418C.1
caggcggcgggatttattagaattgcggtggcgcaattaatatatcgcggctgcccctgtcgcccccgcccgtccgcctccttcgtcagctggcagctgctataataaggaaggaagaagataacggagggcaaggaaactcgctcccactctactcctatccactgcggcctggacgcgtgcgagagacttgaccaagcagcagcagcagggatggcgcctctgaagctgtacgggatgccgctgtcccccaacgtggtgcgcgtggccaccgtgctcaacgagaagggcctcgacttcgagatcgtccccgtcgacctcaccaccggcgcccacaagcagcccgacttcctcgccctcaaccctttcggccagatcccggctctcgtcgacggagacgaagtcctcttcgagtcccgtgcgatcaaccggtacatcgccagcaagtacgcgtcggagggcacggacctgctccccgcgacggcgtcggcggcgaagctggaggtgtggctggaggtggagtcgcaccacttccacccgaacgcgtcgccgctggtgttccagctgctcgtgaggccgctcctgggcggcgcccccgacgcggcggtggtggagaagcacgcggagcagctcgccaaggtgctcgacgtgtacgaggcgcacctggcccgcaacaagtacctcgccggggacgagttcacgctcgccgacgccaaccacgcgtcctacctgctctacctcagcaagacccccaaggccggggctcgtcgccgcccgcccccacgtcaaggcctggtgggaggccatcgccgcccgccccgcgttccagaagaccgtcgccgccatccccttgcccccgccgccctcctcctcggcttgacctcgccttgcgctgcctgggtcgcggatgcgtcggagccccgagtcgaataaaagaggccgcatcctgtcttgcatttgctgctgcgccatgtgctataacagcctgtgtaataaacactgttgctttcgtgtgtgttcattgccttttggttggttggtccttgcatatcctactagtgctgatctttttgtgaagcttggattggatggacgcgttttcttcgccgtaattaccatcttcctgagctacgtgactgttgattcgaacaacaacaaaaatgtcggcccacaaccgcaaggcccattcctacgactcacctgttgggtttgggttacagttaaggccttgctcggggatgaaagggcatgaaatccgggtttggattgagtgaattcgtactgcatacccaattccatggtacaattaaatccatcatttaattcatgtatctc

SEQ ID NO: 32242 - DNA, 1480 bp, Zea mays
  Clone ID: MRT4577_129419C.1
gacccccgaggtcggccgggatgcacggcaatttgcgccattttattagaaattgcggtggcgcaattaaatatatcgcggctgcccctgtcgcccccgcccgtccgcctccttcgtcagctggcagctgctataataaggaaggaagaagataacggagggcaaggaaactcgctcccactctactcctatccactgcggcctggacgcgtgcgagagacttgaccaagcagcagcagcagcagcagcagggatggcgcctctgaagctgtacgggatgccgctgtcccccaacgtggtgcgcgtggccaccgtgctcaacgagaagggcctcgacttcgagatcgtccccgtcgacctcaccaccggcgcccacaagcagcccgacttcctcgccctcaaccctttcggccagatcccggctctcgtcgacggagacgaagtcctcttcgagtcccgtgcgatcaaccggtacatcgccagcaagtacgcgtcggagggcacggacctgctccccgcgacggcgtcggcggcgaagctggaggtgtggctagaggtggagtcgcaccacttctacccgaacgcgtcgccgctggtgttccagctgctcgtgaggccgctcctgggcggcgcccccgacgcggcggtggtggacaagcacgcggagcagctcgccaaggtgctcgacgtgtacgaggcgcacctcgcccgcaacaagtacctcgccggggacgagttcacgctcgccgacgccaaccacgcgtcctacctgctctacctcagcaagacccccaaggccggggctcgtcgccgcccgcccccacgtcaaggcctggtgggaggccatcgtcgcccgccccgcgttccagaagaccgtcgccgccatccccttgcccccgccgccctcctcctcggcttgacctcgccttgcgttgcgccgttgcctgggtcgcggatgcgtcggagccccgagtcgaataaaagaggcagcatcctgtcttgcatttgctgctgcgccatgtgttaacagcctgtgtaataaacactgttgcctttcgtgtgtgttaaaaaaaaaaaaaaaaaaaaaaaaaaaaaaaaaaaaaaaccaaagaagctccataattaattattgccctttcagttcgccatcggcagccgagcaccatgagctccacaggcggcggcgacgatggcgccaagaagtcttggccggaagtggtcgggctcagcctggaagaagccaagagggtgatcctgtgcgacaagcccgacgccgacatcgtcgtgctgcccgtcggcacgccggtgaccatggatttccgccccaaccgcgtccgcatcttcgtcgacaccgtcgcggaggcaccccacatcggctgaggtttaaatctacaaaatgaatgactcggacatgccatgcgtacctgtccgtcgccgaataatggatgtgtgtgtgcttcgatcggtcctataagttgct

SEQ ID NO: 32243 - DNA, 400 bp, Zea mays
  Clone ID: MRT4577_12941C.1
ccggccttagccgccctccagggagtgcggggccatgcagacctcgctgaagctcacggtgctcgctctactgctagcggcagcaggtcaccacagactgctgccggtgccgacagcgcgatgctgctggctcaacccggagatctacgacgccggcgagctgagccagcgcgcgttcccagacaggttcatgttcgagacggtcacgtcggcctaccaactcgaggggatggccaagcacggcggacggggccccagcatctgggacgcctgcataaaggtgcctgggaccatacctaacaatgccacctgcgacatgacagtcagacgagtatcatcgcggcgcggaagatgtggccatcatgaagaacatgggcttggatgcgtaccggccttccat

SEQ ID NO: 32244 - DNA, 1601 bp, Zea mays
  Clone ID: MRT4577_129420C.1
cctcgaggccggcctggccgggattactcgaaaagaaactagccgggcaagttgcgcccaccaccataccgtcccacgcggcctccccaactaaccctatcccccggcgaccgggaactgcaaccgatggaccgcctcgtcgtcttctcccggcgccgccgccgctggatcctcctcgctgcggccggtgcggcggcggccgtcggcgcgtacaagatctaccaccaccctgccgtcgcggaacgtcgccgccgcctcgtgcgcctagccgccgccatcgcggccttcgctgatgccgccgcatcatccgccgacgccgtggccctggtgacatccgatctcgccgactttgtccgttccgacgcggacgaggtcccccgcagcgtcaagcagctggccaagctcgccgcctcccgtgaggtatccgccaccgtctccaccctatccgaggcagtaacctccgggatccttcgcgggtcgggatcctctagctccgggcccgcatccggcggtaccgtggccctctccgatcgtctcgtagacaggctcttctctgactcaggcgagcgccttgcgtccgcggttgccggcagcttcgcccgccatctcgtcctcgccttttactccgctccttcaccacaaggggaggcgtcctcctccccgacgatgtgggtcaacgtggttgcgactggaaagtgccggaaggcgataagcaactgggttgaggtcttcgtggggactgctgtgagggagttcattgacaagaccatccacatcaacacctacgagcagctcttcgaagggctcaccaatccgagacatgacgctaaggtcaaggaattgctagtttcagtgtgcaatgctgcggttgagactttggtgaagaccactcaccatgctctgtacagtactaatggcaacttgggtgcaaatggtagtgtcagtggcaatgccaatggagctggggaagggtgggtggagacggtgtcgagcacgttggcagttcctagcaacaggaagtttgtgcttgatgttacagggagggtcacatttgagacagtgcggtcatttctggagtttgttctttggaagctgcaggatggggcaaggaagggcggtggctccgtggttgacagtggcctgcgcgtcgtgaggtatatgagcgataagtcgatggttatcgccacgatctgcattacgttgtgcttgcatgtgttgaatgggactaggctcttggtaacagcttgagagtgtacttgtttggttttcctattttttgcacattgtttgtgtaaaactgtaggactcatactgaaactgtaaatccaaaaggaatggaaataatagaaataagatcaattgtgctgtacaattctgttatgcctatatacttgaggtctgaacgactttagtgagagagttgttgatctgtagcactgcctgggattaattggcatttaaatgcctgctgttattgaagctttttttttaaaaaaaacaagtatagcattactaatattgtggggggtcaagttggaccactaaattatgtgcttttgtatcttgtcaccaatgatgtaaaaagcttgccttttcacgcc

SEQ ID NO: 32245 - DNA, 527 bp, Zea mays
  Clone ID: MRT4577_129421C.1
cccacgcgtccgcccacgcgtccgggctcattctgggggcattgtttcagggaagcagtttgcgttcctgcggaacgaggccggcaacatctgccctggtgctggtgtgctcttcgagttcttcggcatccggcctgagaggctggctgcgttcccgacggtgcacctttgcccatccacaaggatctacaccggcacgacggtctactcgttcgacaagaatgggagcatgatcttcctcgacatctcctacaaccgcctcaccggtgcgatcccggcgggtcttggcaacatgatgtatctggaagtcctcaacctggggcacaacgacctcaacggcacgataccgtatgagttctcagggctcaagctagtcggcgcgcttgacctctcaaacaaccatctcaccggtggcatccccccgggcctcggtggtctcactttccttgctgacttggacgtatccagcaacaacctgtctggtccgattccttcgactgggcagctcaccacgtttccgcagtccc

SEQ ID NO: 32246 - DNA, 1646 bp, Zea mays
  Clone ID: MRT4577_129422C.1
caccaaagtcaagggacactttttactgctactactagctaccactggtacagggacagcacaatacaaaccaataaatgctttcataatacactctaggctaaaagcaaacgcccttattcatggagcccacggcaagcttcttttccaagtaaaaaagaaaagttgcaaaacaggagagaggggtccgtgctggtagcgcccaaagcaagcaaagccagccactgattgggcgcatgggagggaaatgacctcttatttgcttttcatctcagaaagaaaatcatccaacacttgctatgcaggctcttcttgcatcagctaagacctctctctctctaaccacttattatttgttacacttcccccaaaccaccggacgacattatgggttttcttcactgctcgtcaacctcccccagctttccgtccacaccaaaaataaaacgaatgtatcaccagatccgaaacgaacagacctaacaatgatgctaacgctgctactgccttcctaactctgcctgctaacacactacctaacaaaaggtacccaagctagtttcttcgattattaggatcaacaggactgccggcctccaaacgaaaggggggcgggggtgttgtcgacggaatcttggcggctccattcccgtccgcgtcccccctccaagtccagccggcgactggacgactcaggtacttctgtggcacactgccgcagcggcagccgcgcggcgcttctggctcgcgagcatggcgttgctccggctaatcaaggcgtcgtgatcgagaacgaagccgccagggtagtagcgaggctgggcgccgaggtcttcgagcctgaggttgagggcctggacgacgcgagcggggacaaggaccgtcgagcacgcccccgccgtcttcctcttgggctccgccgcgggcgcgccggccggcctcgggaggaacaccccggtgccgttacgctcgcgcttggcgccaggcggggtcaggaacacggcgcgcatgccggaggcaggatgcgccggcgcctggtgctgctgcggcggcggcggtggcggtggcttctggagcggaggccacgccgccgggttcaggccaagcggcgcgtcgcctccgccgcagccgacgggcttggcacaggcgctctggcgcgcgctccacgcggcgagatggcgctgcctctgcagcttcagcagctgatgctgcttcaggagatggaactgagcagcctgcatctgccgctgcgaaaccaagtgcgcgagcgggtggtagtgaccgccggcgccggcagggaccttggcggagggcggagcgatctgcggcggcggcggcggtaggcggcttccgctccccgtcgtcgccgaggaggcccgcgagcctgcgcgagagccccgccaggctgtcctcctcgtcgctctcgctcctggccgccacggccgccttctcctcctcggagaagaagtcgtcgtccaggaactcctccggcagccagaactcgtccccgaggtccgaacactccgtcgacatttttccgccggtggtggggagcagcgcccgggacctgcagcggcgggggtggacgggctggagaaggcggcgtgcttatcagcgaaaagaggtgggacgggcgagaaagagag

SEQ ID NO: 32247 - DNA, 724 bp, Zea mays
  Clone ID: MRT4577_129423C.1
cgggattccgtcaagtccttcgacttcgtaaggtcagcctcggctacggcggcaacaagaagctcgacggccgccggtccccaggtgcatgttttaattgaaaaaggatgttcgagggaaatgcctaaaggaaccgtgggtttgcgggtttcggacttagacggtgccttcggcgtgctcgataaaatgcccaagtagattttcaggtccagcttaattatgcagatgaccatgatggttccaccttcgttcccgcaagaacactctctgaacaaggccggagcacaggctgcttcgctggtttgctggttctggttgtgaagcacagagacgcggtatacggaccggagttcgtcaatgaggatgacgggaggaacgagctcagcggtttcagccttgctcatagaaaggatgtcgacgatactgaacttgcctcaaacgatgaagattcggatggcgattcagacgaccgacgagtatgcggtcaaggaggaaggagaggagaagtagaactgcttggccaggtttctgcagtttcatttgtgttggcagatgcattttctggggtctcatcgagtatgtggattttttttattattataatatagtagtagcataggatgagagtctcatagcctatcatcaacttgattctaacacacttttgcagtgtcgagcatatgcttgtatttagatgtttaaaggccgtgttctgctttctttc

SEQ ID NO: 32248 - DNA, 116 bp, Zea mays
  unsure (1)..(116): unsure at all n locations
  Clone ID: MRT4577_129424C.1
ggcacgaggccgcacaccaccacagccgcgtcaagccgncaaccaaccaaaccctagaaggctctcgttctcgncncccaaccnncnncgctccccgancctcgccgcccgcaggc

SEQ ID NO: 32249 - DNA, 357 bp, Zea mays
  Clone ID: MRT4577_129425C.1
gccaagcgcgcaaatcccgtctctagcgcactcgtcgctcgcgagatctcgacgccgccgccgaggccccagcaccgatcgtggcagcagaggaagagagggaggtggtgggcttgtccagggcgacagcacctgcaccgatcgtggcagcaaatgatgaagggagggaggcggcgggcttgtccacggcgaaaatggccatctccggcatggtcgcccctagctctagagacggtgccgtggtagggtgggctgcgcgtggcggctgcccaggtgccgaggtgcggtcgtgatgctcgggagccgcaacagccagccgccacctcccccgtggccctgcccccgcctccggcctcc

SEQ ID NO: 32250 - DNA, 532 bp, Zea mays
  Clone ID: MRT4577_129426C.1
gctgtaacaagcatactgtcccttctcgtcgcatcaccgtcgcatacttctagcgagttgactccatttgatcgggggagcctgcgcaccagtcaccatgtgttctggatcgtgcctggctttgcgctgtgcggcgtgcgcgtgcgaggcgtgccgtacggcggccggtagcatcggtcgccgctccgcccggatcgcctactgccgcctcttcgcgctcttcctcttcgcattctggtcgctccgcgaggtcgacgcgcccctcctccattcgatcccatggattaagcaattccacaagacccccgaccgcaagtggttcgagatcgacgcggcgctcagggtcagactgggcaacttcctgttgttcaccatcctagccgtcatcatgggcgtttataaattaccagaaggacccccttaacaagaaccactactgaagatggatgcacaagatcttctgctgagagatcatagtgtttctaatagtattagggctcaacggaaaagccagcttctatgcatctatatc

SEQ ID NO: 32251 - DNA, 3078 bp, Zea mays
  Clone ID: MRT4577_129428C.1
ctccaccgcggtggcggccgccgcagcggccctcgacctgtggacctctcagccgtcgcccgtccaggagcggcgccgccggctgctccagctgatggggctcataggggatccttccctcgccgggtttgagactggccggtccgcctccgaagatgccgcgggcccgcccccagcctctcccgtctctcggtccagatcaggcggggccgccctcggctccgccgggaagccaccactcgggggcgtccgtctgcggtcatccttgtccgacgggcccgatcctaccgacgaggaccccaggtgcttgatcaggaaccttgacgacggcagagagtacgtggtgaaggaagaattcgctctccgcgaggtcggcacgggacgccaccttaccgttgaggagttggcccgctcacccatcgttcaggagcttatgcgccgccaagctttcagtactcccaactccaactgcacctcaaattcccaaagcggcacctccacgccgatcgagagatcgagctcaggttccagcaacggtgtggggcgcgccaagcggcgtagcagctggctccgcagcatccgctgcgtagctggctccttcgcgtcccactcacgtgaccgccgcagcagcgacgagaaggacgcgtctccagagaaaggcgggcaccactccagctccacgacggatgacagccaggacagtgttccacgccatggcccggcccgtgtcaaggtgcggcagtatgggaagtcatataaggagctcagtggcctgtttatgacacaggagatacaggcacacagtggttccatatggagcatcaaatttagtcctgatggccgttaccttgcgactgctggggaggattgcgtaattcatgtttgggaggtgttggagtttgagagggcaaggaaggagaatgaggtgtgcaatccgcttgttgctatggtgtgcaatgagtcatcagagacgacggtgggatcagctgctccaagtgagagccattgggagaagaagctgagatcaaaggtactgcacggtgggggatcggtgagctcagacaggttgatggtgcctgagtatgtgtttgcactgtccgagaagcccgtgataacctttgcagggcattcagaggatgtgcttgatctcagctggtccaaatctcagtatttgctttcatcatcaatggataaaaccgtacggttgtggcacatgtcaagcacttattgtttgaaaaccttctcacacactgactatgtgacttgcatccagttcaatcctgttgatgatagatacttcattagtggttccctggatgagaaggttcgcatttggagtattccaaagcgtgaaatagttgattgggtcgaccttcatgaaatggttactgctgcctgctatactccagatggaaagggcgctctggttgggtcccacaagggcagctgccatctgtatgatacatctgatgacatgctttgctacaaaacacagatcgacctacaaaacaagagaaggaaatctagccagaagaaaataacaggatttcagtttgtcccaggggattcttcaatggtcataatcacatctgcagattcacggatcagagttcttgatggttttgagctagcgcataggtttaaaggtaaaattttattatcaactatttttcacgtacattcacaatttgcactagttcagaacttcagaacatggtgcaatcattgttgactgtgaatactgaagatcaattgtatctgccttgttcttcctcttaagagcagtgctggaacatgtcagattgctcttgtctgctatcatttgttctactgtttacttaacatgttaaaatagcttgtccttgttgatagatctaatggccacattgtttgtttttcttttgatatcactctctgcctgttattaagaaaaggaactattgctcaatttccgtcttctattctgccggttggtctcagttaacatagttcttatggcttgccatatttcaggattccgaaacacaagcagccaaatctcagcttgtttagctggaaatgggcggtatattatctcggcaagtgaggattcccatgtatatatctggagaaacaatgatggtccgaaaccaagtagaaagaagggcattgtttctgtcacagatagccatgaatacttccactgccagagtgtgacagttgctgttacctggccttttgccagcaccgcaatgacttgtttaatgaaccccgggaagcaagaagagcttgagcgtgggtctgagccgcaagatctgcaaaccaaacttgccaaggcacaggagatgccagatgttgagtaccggagcacaaatatcacgagtaacaactcgaatcataataatggtgaccggacatctccgacttggcctgaaaaacttaacacaccaccaaatcaaagtctcagggctactacctgccatgccaacgagggagatcaagctctgaatcggtcggcctggggcctagtgattgtcacagcaggccgtggaggtcaaatcagaacatttcaaaactttggttttcctgtaagagtatagcatgaatatgaatacgtaagataatagtcactgccattcaggagtgtagtttgtgtatagataggagatagtgggtgagtttcacactattcagggattgggtctgattgttccttggcgtgcatgctagagatcagaatcttcatctgacatacactgtgtactgcgaaacttggtatttatttaccctgaggcctaaattgtacacgaaaaagaaagccctagagagcaaccctatcagctgactgcagataatttatctgtccgctaaaaccccccctttcgctattaaaaaaaaaaaaaaaaaaaaaaaaaaaaaaaaaaaaaaaaaaaaaaaaaaaaaaaaaaaaaaacaaaatcaaataaaaaaaacaacgttaaaaaacagtgatggcaaataaaaacgattgcaatacaaattggcggggcgcccgcataaagaaacccatttttgcagccccttaatgagcgaacagaccctttcttatggccacaaaaa

SEQ ID NO: 32252 - DNA, 245 bp, Zea mays
  Clone ID: MRT4577_129429C.1
tcggcacgacctcggttcacggacgcgcggcggatgcggcggagtacgactgctatctcacctccatcttctgggactgcctccagatcgaggacgccgacgatccgctcgctgcctcccccgccgaggagttcgagtgggaggaggtcgcgtctccatcgggcgccgccggagaagccctggagcccgagtgggaggtgctcgtcgacttgccttccgcctccgtcgatgaggggttcgtgtac

SEQ ID NO: 32253 - DNA, 353 bp, Zea mays
  Clone ID: MRT4577_12942C.1
cggaattccggggctccgggaaactcctaacccaaaaggccacaacggccaacaggctcattggttttggtccgccagggccgccggttgcggaactttaccttccggtgggacaatttggccttgggcgtgcaaccgaagcctaagccaaccgccgggccgtcaacttcaacgtccgacgcccgcctttccgattacaaggggttttccgttttgggccacggaaacgggggaaccgggtccaaggggcggaaccgccggtccgggcagccggtcgaactaaagctattgggggacggggccaccttgggggcccccgaggccaaaaaactgatgttggccggggacccccc

SEQ ID NO: 32254 - DNA, 1095 bp, Zea mays
  Clone ID: MRT4577_129430C.1
ttccaaagcgtgaaattgttgattgggttgatcttcatgaaatggttactgctgcctgctatactccagatggaaagggcgcgctgatcgggtcccacaagggcagttgccatttgtatgatacatctgatgacatgctttgctacaaaacacagattgacctgcaaaacaagagaagaaaatctagccagaagaaaataacaggatttcagtttgtcccaggggattcttcaatggtcataatcacatctgcagattcacgaatcagagttcttgatggttttgagctagttcataggtttaaaggattccggaacaccagcagccaaatctcagcttgtttagctggaaacggacggtatattatctcggcaagcgaggattcccgtgtatatatctggaggaacgatgatggttcgaaaccaagtaaaaagaagggcattgtttctgtcacaaatacccatgaacacttccactgcgagagtgtcacggttgctgttacctggccttttaccagcaccacaatgacttctttaatgaaccccaggaaacaagagcttgagcgtgggtctgagaatggctattcaccgcaagatctgcaaaccaaacttgctaaggcacgggagatgacagatgttgagtaccggaggacaaatatcacaagttacaactcgaagcataacagtgaccggacatctccggcttggcctgaagaacttgtcacaccaccaaatcaaagtctcagcgctactacctgccatgccaacgagggagaccaagctctgaatcggtcggcctggggcctagtaattgttacagcaggccgtggaggtcaaatcagaacatttcaaaacttcggttttcctgtaagagtatagcatgagtccgaatacataagatagtcactgccattcaggagtgcagtttgtgtatagataggagatagtgggtgagtttcacactattcagggattgggtttgattgttccttggtgcacctgctagagatcagaatcttcatctaacatacactgtcagtagtccaaaactttgtatgccaaatttattttaccctgaaggcccaagttgtacatg

SEQ ID NO: 32255 - DNA, 307 bp, Zea mays
  unsure (1)..(307): unsure at all n locations
  Clone ID: MRT4577_129431C.1
cttgcaacgcctagtctgcatgtacttgatgcatggctcacataaaactgggcggactgctaccccaccagagcgcgcggaacagcctgtgggagttagcttacgccctggtggatgtttggcatacacctggacgatcatcgagcatatgctcaagaatgggatgcgaaaactgaaaaacctgactttacacttatgggccatgcaaaacatgaacgtgatgaagacgatggtcacaaggatggttgggaacaaaagaggagtaagaatagggctgaaaaaaactcgaggctcgcgagccggntcg

SEQ ID NO: 32256 - DNA, 434 bp, Zea mays
  Clone ID: MRT4577_129432C.1
ctagctcggaccgcctctcgtcgtttgccctttgtctccgcatgcgcgctgttgtgcatgcttgggcaggaaaaatgacgggtggatacattggtggctaactgggcggctcctttgccattgaatacctgtgcgacacatttatctttctcaaggaaggcctttggagggagcacccacaagactgttaatgacaaggagtggtggcaagccacaaacaccaagttccaggcctggcactccactgatgggccaccggttgtcatgaaccccatgagccgccagaacttcataaacaagtccactgagaacggtttggctaaaaaacctttatctaaggcatgggtgccggcatgaagccatacttactcatctaaggtcttaataaaattgtataaaacctaatacagtcaggatttttttgagcattttac

SEQ ID NO: 32257 - DNA, 565 bp, Zea mays
  Clone ID: MRT4577_129433C.1
ccggccgggccagcagaaataccaacaaacctcacttctgactgactagtgtgccgcgacgaggacaccggacggacacacagagcgatgatggaccgagttggcgactgcaccagaccaccagcttcctcgggaaggccctggattcgcgcgtcgccggcgtcgatgccggggaccgcatcaccatgcgccgcaccgtcaagagcgttccccagagaatatggaacggtcctgatcgccccaagtatcttggcaccgttctccgaggagacgccggcgcactctgaccggggagttccccggagactacggatgggagaccgcggatcctctcggccgacccggagacattggcgcgaaaccgacagttggatgagatccactcccggagaggctgatgctggacgcgctgggctgggtgttgccggagatcctgggcgagaacgaggaccagatcgacgaggtgcagcgtctctaggacgtggcgcagatcttctcagaggacgctctggactacctggcgaacccctacctggggaacgcacacagcatgctgagcatgtgg

SEQ ID NO: 32258 - DNA, 423 bp, Zea mays
  unsure (1)..(423): unsure at all n locations
  Clone ID: MRT4577_129434C.1
ggggagggggnnnnnnaggagaagnnngaagaggggggggaaagggggngggnnaagggcgaggggaagaaggangagaacagggngggggaagggaancacactttgggaaaagggaagggagagggggaggggaaaggnanncaaaccnccgaggannacaggggcnaggccannncagccgaanacccggagggcagcaacaagganaagacccgggggcggcagnncncggggaagcacgagcagaagcnggacggcgggggnggcnacgncaaggggcgggggggggangnagaccagaagaaannggggggagacacangggacagcaggagggggggaccaganancggggggnacagcaccaagaaggggcacacaanccggaccaaggagggcaagaaccacnggancaagaag

SEQ ID NO: 32259 - DNA, 126 bp, Zea mays
  Clone ID: MRT4577_129435C.1
gctagatcaattacgcttacctcaccagacgccatcctaaaaatgggatgaatgcaagcttctgactccatttttcgcattgagatatcaccgttctcaggagtacattaagatagtgcatctttt

SEQ ID NO: 32260 - DNA, 379 bp, Zea mays
  Clone ID: MRT4577_129436C.1
gaacggtaagggggccgactcattgtaagaaaagtaacaaaggctgaccacccacgtcagccacgaaagacgcacctgcctatcattattggcccatctgtgaattctgagcaggaaaagaattgaatcacattctgacagaagaaaaaaacgcgtctgaaaaacaggctatgcacagtgctgaatgtcttgatatacagacgccgaaagaggcacactgtaactgtgaccttgcacaccgcgaacagggaacatggtacaccggccgatagaacttagtagcggaccatgctggtccgcccactgaaccaactgtcgaatgggagcacttggaccggtccaagggaagaaacagcagcacactgttcaaagatgaagc

SEQ ID NO: 32261 - DNA, 635 bp, Zea mays
  Clone ID: MRT4577_129437C.1
accactacccggctagctgaggatgcacagctgcacacggtgcgacgacgtactacgacgacgcaggcgccacacatggcatcccagctctccgccgccgcgcgcccgagtccactgacctccggggctacgccgcgcctcaaggtccgaggcggccgctctaccgcgcgcgtagggtgggcaggaagaggtcatggcgggacggcatgcgctgcgactacatcggctgctccaccaacctgaccatggtgacgcatccacgacgctcatgctgcacgcggggcggttcgtactggcgccgctggagaaccgaaacgcgacaggcgcgctgaagctggcaggcgcgcaactccggactgcagacgggtgaccccgacgggttcaccctcatcgacacgctggcctgaggcgccgacggccacatcctcagcggctgccatcgtgctagggctcaataacaccggcgccctcgaccagtatcattggatggatccctacatactgggtggtaagatcagactcataatcctctatcgatccgccggacgacaagtgcctgcacgtggagactttggaacgtgtgtgcgtacgtacgtgcacattgcattcatcttggttgcaatggacatatagct

SEQ ID NO: 32262 - DNA, 198 bp, Zea mays
  Clone ID: MRT4577_129438C.1
ccggccgggagctactctagtcttctgccgtccaattctgccgtctccaccggcgacagaccagcagtcacacgagaggagatagatggctcccttgatccagaccgtgcgcaacgacatcgccaggctagactacgccgaagtagcctcgtggcgaatgggggagaggaagccttgccccgactgaccggcgacttg

SEQ ID NO: 32263 - DNA, 179 bp, Zea mays
  unsure (1)..(179): unsure at all n locations
  Clone ID: MRT4577_129439C.1
ctaaccaaacacccccccgggcgggaccacctggttgtgtgggggcangnaagcctcgcaagcctaaggttcaccgagccaacgcacctcaaagaccacaaggcaataacagctcccttagctgcaccgcacagcaccaaccacaagaaacagggcccgcgctcctagtccagcggaac

SEQ ID NO: 32264 - DNA, 265 bp, Zea mays
  Clone ID: MRT4577_12943C.1
agatattgagtaccacatgtcatgtctagcatttctcgtttgaaaagataatgggccagtatttctactccagtatccagtaagctcttgtaaaggacttaccgtttcaggaccactctgatggcaatcagagccccctaagagtcctacaagacctggcttagactgaggagcctaggccagtgatagataagtagaatgtgctagagatgaatgtagtacctgaaccactcatcgtcctaaggatttattaggtgcatcctgt

SEQ ID NO: 32265 - DNA, 256 bp, Zea mays
  Clone ID: MRT4577_129441C.1
gtcttagtatgcaagcggagggtctcatagtaccaatccaacctacccgtccctgccatgcgatagcttttctatagtgtaacgtaacctaaattcactggacggggcgttacaacgacaacgactggaaagaacaatgccgtgacccaacccaactgacttgcattacatcccattctcgtcaggtgaggtgatagcgaagaggacaggaccgatcggccttcccaacagaagagcagcccaaacggaaagggga

SEQ ID NO: 32266 - DNA, 394 bp, Zea mays
  Clone ID: MRT4577_129442C.1
gcactctgcagtcccatttctcaaccataaggttctcacaccatcttcttcttcttggtgattcgattcttccttggtgcactgttcttgtacttgaattcagctcccatctagtgtgttagccacacctcgccccatccgaagtcccacctaaagaagcagagagatagaggcaacaatggcgaaagacgggctgagcaagctccagcgcatgatcaacaggtaacactcgtcgacccgcatcgtctcccacgccccgtctgcatcatcagctccactacggctccacctactgagactcacactgcgcctcgatccacagcgcagacgaggtgtccaactgcctgcacccggtctacgttggtaagtctagccttctgtaccttttcatcta

SEQ ID NO: 32267 - DNA, 1014 bp, Zea mays
  Clone ID: MRT4577_129443C.1
atttcttctaggtgtcgcttcttgggcacagatggcaaacttgatcagctgataataaattggagaaagaaccgtaaaaaatgggatacaaagaaaaaattccatgagaatttggcagccgtcttggactttgcactgccttcacccccttcggtcggtgataaagcgaaagatgacgagcaagctgattgtgggatatgttatgccaagcatctgccagttgatgacgaactcggtgcccacagcgggtgtgcgacggactacatgtgtgagaaccccagctgcagcagagccttccattccgtgtgcctgagagactggttgcgctccatcaccacgactaggcagtcgttcgatgtcctgttcgggaactgcccctactgcagcgatcccgtcgccgtcaagatcaccggccactaacactgtatcttggtcagcgtttacaaagtcagccaggcgattttaggtgcaccttaacttgcgtttcacgtcacacaagggagaaaacgagactattttggttcctgcttacatgtacaatagccaagtgtcaccttcggttacgttatctaaatgagctcctgcttacatgtagtattatgtcagtttcctttcagaaaggtcaagatcgctctaggtggatacattcgtccgatttagcggagctgcaactgaaatatgtcaaaatttgccgccggcttctagagaacaaacgctcttctatagaagggaaggggttattcgataataattctacataagagtggttttacgaggcgactcgactcgtttcggcttgatttcagacctagtcgtagtcgagtccttgtgctctccatcgagcccatggacccatctataatgtatagcttgatctgaatacccatagtatatattcttaacattattctcttagtcgtccatagtatacattcttaatagtaggtcctgagttttatttgtccgagttattaaatcaagcagataagacacttatcttgaaccttctaggat

SEQ ID NO: 32268 - DNA, 157 bp, Zea mays
  Clone ID: MRT4577_129444C.1
aactaaaaaggtttccccctccattaattttaaaaaggtcgctgcccgatgggacaaattattttagccctttggtgttagttacagaaggcgttccgtgttctaggtcttcgggagaccaattgcttgtctccccattggttttttttgggtccag

SEQ ID NO: 32269 - DNA, 318 bp, Zea mays
  Clone ID: MRT4577_129445C.1
ggggacaaacaagcagtttattcgaccgacgactgggaattaacacaacacaccccggtaaaaggggcagcagagaccgggtttagcacatgtgagcctgaaacaatccatgtgggccaaaatgatctccaacgggtgaaccggcaagctagcaaatgctagcccggcctgccagcagtttactgtgaggaaaatcatttttcagccatcgtcttggcgggggcctgtgcttgttcattctgatcaacagggggccttttttggttgtgtttcccaagggggagcttgcgctcatcggaaagcattttggcgaaattt

SEQ ID NO: 32270 - DNA, 513 bp, Zea mays
  Clone ID: MRT4577_129446C.1
agcgtccgtacacactgcttcaaaatgcattgccaaagcacacaacaatatcgagaccccaaactggggcggcaacttgctggtgcactgtggccgtcctactggcctgttagtggtcctgtgatgcactgctggagatgactgatgagaccagggactcttaaagagtacctggaaggttacattgaagagctaaatcctacattttgagctgactggtggtgtggcaggctctgaagaggactttgaacaaataggtggatcaaatagagcaactactgaatcagctaatgaataacttactgatgatgatgatgaagcagatgatgatgcagaataacctgttaaataaaacatgaaagatgttctatatgacctataatgttatgactggtgtaatggtaggtccaaaactacagaagagaacaaagaggcctacaacaagcaccacaagaagaccgatcggaagaaggatcgggcctgtgggggtggcaatgatgcaggcgacggaac

SEQ ID NO: 32271 - DNA, 556 bp, Zea mays
  Clone ID: MRT4577_129447C.1
gaaagcatgagtccactccacttgcaaaaacgccaatgcgtagtaccttgaattttttttgagtttctattcattttggaggcaagtagttcaatggttcggttttgttatggggtaggtattttgatataccagcctgatgattatagtgtttgcattaagaacggagatctgaatgcatttatcccgttgaagcccgcttggccactgctgccgctgctggtactactactgccttctctggtgctgatgctgctgctgctgctgctgctgtactactactaccttctcggccatcgtcgtcgttgtttgtccatctccctgtgcttccccctctctctggctgcttgcttgatgcctgcatccgtatggatgtgtgtgattctgtgaaccaagctgggctccggggaatgcatatgcagatgcaaggcttatgaaggcttggcacaaatgccccctaccgaacaattttgccatgtaaaagtagtatctctatatggttggtgtctttactctcgtttttttttggcaaaaaaaaaaaaaaaaaaggccccta

SEQ ID NO: 32272 - DNA, 616 bp, Zea mays
  Clone ID: MRT4577_129448C.1
ggatcgggagacgcaaaggcccgcgggttcaggttttacacactttctacaggggagggggaacgcgacaccctttagagggcttgaacggaagggatctggacggcctaaacttcaccgtaaacgaggccaattcccgcggcgcccgtagaggcggcggcggtggttacggtggtggccgtggaggcggcgtctacggcggtggcggccgccgtgatggcggtggcggctacggcggtggcggcggttacggtggcggcggcggttacggtggtggtggcggcggctacggcggtggcaaccgtggcggcggctacggcaactccgacgggaactggaggaactgagcggtggggcccgcgcggccaagttatcctgttcgctaccgtgatgtttaccctagtccagagggtttatcttcgctcgtgtcgtgtttgttgctgcccatctgtgtttttgattgcccggtctctctcacccagtttttaatgctcctgaccttcgtgctttggttataccgttgtttccagcttcggtgtcttcgcttgttgggcgggttccacttattgaggcggcccttgcccttctctcggttttcctttctcccgaatttttt

SEQ ID NO: 32273 - DNA, 812 bp, Zea mays
  Clone ID: MRT4577_129449C.1
agacctaattagtatgatttatggccaaacatctaatgaaaagaagaattttatgtaacataaacaatagaaaatataagtacaaagttatatattcacaacaaagcacatatattagtgtaatacggaattttaaatttttctttcggttgcagaaatttcaccgaagttctgaaccccgtgctaatctcataaaaaacaattcaactccaacgtcgatgctcgatgaaacttgattgctttcgagttttgcctttgcttttgctacatgtacttgttactgcaacaaaaatctcaaggaccgttttactgtaactgttgttatatgtcctttcacttgcactgattgtcagtgtagtccttgtagttgcattacatccttgattaactctggaacaatcacaagcaatgcacctcccatgacagccgagagagtaaattttcctccgggaactatagggggtactggagcttccaactcatccgaatatctctctgaccaagacatagcggcaggaaaaactccaaacagcactagaactccataagttcctgcaaagtccaatgccttgaaaaatatctccggatcaagcagtgacagaacaagtggaggaaacagagtcaatacgtatggcagcggtttgttctggccacttggtagtttaagcaagtctgcaaggaagtccgagattcctagaacaaatccaatgtatgatgtggctatagcgagaaatgagaacgcctcaacaataggccccactatcccattactcgacaaaagtagttccaaggggtcagaaacagtgctgctc

SEQ ID NO: 32274 - DNA, 986 bp, Zea mays
  Clone ID: MRT4577_12944C.1
gacgcagcaccaccatcgcttttctccttccttataccagcacccccaccacctcttcctccctttccctttctggccgcattccctcgtcctccggcagccgtcgccagcttccgatggtccggaaggagacggccatgaggctgcccccgcagcaccagggcctggaggtcaagatccccagcttcttccgctgccccatctcgctggacgtcatgcgctcgcccgttagcctctgcaccggcgtcacctacgaccgcgcctccatccagcagtggctcgactccggcaacaccacgtgcccggccaccatgctcccgctcccctccaccgacctcgtccccaacctcactctccgcagcctcatcgcccactgggccgcctccgccgcctcctgttcccccaccgccgccggcggcgccggagtcgccgactcctcttcggcacgtacttcttctcccgcgagcctcgtccgccaggtggcttcgtccggcgtggacccctcgccggccctccgcgagctggcagcctatctctccgacgacgacgtcgacgacttcgaaaagaacgcgcttgtgggcgccggccgcgccgccgagaccgtcgcgtcagttcttcggagaagagccgaggaaaccggcgtcgaaggcgtggaggcggccacgagagtgctagccttgatcttggcctcggacggcatcgacgactcgaacaagaagcgggtggccactggcctcgccgcggacgcggcggcctcgaccgcgtcgctggcgcgcgtgatgcgcggcgggagcgacctggaggcgaggatcgacgcggccaagctggcggagctgctgctcgccaatgcggccggcgaggcgaaggcggcggcgaccaaatcgtccgagttgctggccgagctggtacgcctcgtgggcaccgtcgacgagacgggcgccctggacaggaacgccgtggacaccggcctctcctgcctggccgcc

SEQ ID NO: 32275 - DNA, 966 bp, Zea mays
  Clone ID: MRT4577_129450C.1
ggccgggagcctttacagagagcgatttatatgtcatccactttattctaatgctagttagtactaattaataatcagcttactaaaaaaagcagaaaaaagagagatctaataaaaccattcggagagccggacaggtcaatcactgctactcctgcaggggtcgatcagtgctgtgtagacaagaaaagcgggcagcttcgttcaaccccgagaaagcttcgagccagagcaggggggcgaagagacgatggtcgggatcttctccaggttctccgccggcgcccaccgccgctccaagagcgtggccgaggctgtcgagacgctgacccccaacatgagtacaggagaatctgacccagcggcagctgttcctgcggagagcccccatggcatcgaggttggtgttgagttcaagccagtggagcgccccgtggaacctatcaatcttgatgagccagtaaaatgcccgcttcctgagccgtctatactgcacgtaagccatcctctcagttccagtgtgctttatagaaaaatggctctagaatatcaatttattgacaagacgattaactttcttttcttgcatcgttcagtattaaacggtatcaggaaactttcttgtgctgcagaatgtgatgttaaaccattctagtaaacttccttgtgttgtgttacagaattagttacttgatgcttgaacttattgttgcgtaatcggtcttaattgatcgatggatgatgctaggataggaggatatgtggtgttttcagtatcaaatgcagaccatattagaaatctttcttgtgctgcagacttaactgctaggtctcatcttgacagtctggtcttgtatatgcttcaaagtcgacgttatcttagcagtgaagcatcaactattccaacctttacttgttcccttatccgccagatcgggtgaaggtcccatggatgctaggaccgga

SEQ ID NO: 32276 - DNA, 158 bp, Zea mays
  Clone ID: MRT4577_129451C.1
gcggagaagaatgactgcggcgacggcgacggctacgcggctgatttagtccctggaggcccttgtgacacacatccaaggcctttccggcagaccctaggagatggcgcaccttcacagtctacctaaacaggcggacggagaaccccttgcgctcc

SEQ ID NO: 32277 - DNA, 375 bp, Zea mays
  unsure (1)..(375): unsure at all n locations
  Clone ID: MRT4577_129452C.1
cattcccaatcggggccgcgccanccacccgccacactatcttctatacatctttttgcacgcgcccaactagctccgggggccgggatacaccgtgcgccgttggctactcagctgctcccatgctcactacagatctgccctctcggagatttgggacggaggttctgcgcctacacacctgatcgtaggcctccttacctgcacaagcccacaccgtcgccatcgccccgctcgcctactttgccaatggaccgaccaacctcggctcctcgctctggcccttccttccaacttatacgatcaaagggcacagggttcgcgggcccaatggggctctggtgaacgttcgtcggcacccacgcacaccacctt

SEQ ID NO: 32278 - DNA, 457 bp, Zea mays
  unsure (1)..(457): unsure at all n locations
  Clone ID: MRT4577_129453C.1
ataaaaaaaatccatggtctaattattttgggggggtgggcatgaaaaaaaaatttatttttttaatatacatggttacagttgcaatgaggtaaaaattaccaaggggatgaaaatagtgtatttgtccggtgtaacatttncaaaaaagaccaattttttgattaaaagttagtttttggtttggatgttgggataaagggttttgtaagggggggaatgggaaagaatttttgagaaggggaagggtggatttagaaagtgttgtagaagtatggtttggggggtacatatttaaggggaatagggatggnttggataatttaaggtgggtttggttcaaagatggatgtaataagtattttgtgagtttaagtatgaagtagaagtttgaagatagttttttaatgggggttggatatggtgtttttaattgggtgggatgatgggatgaaaa

SEQ ID NO: 32279 - DNA, 281 bp, Zea mays
  unsure (1)..(281): unsure at all n locations
  Clone ID: MRT4577_129454C.1
gactctagaattgaatgctgtgagctcttgtaatgtgttgaaggttggaaacttggatgccattgaatgtggggtgacncncnnnncgggcggggaacatggaacattgtgtaaaatcnaacgaaccaatccaacctattcatgagatggacgatctctggcaaagccaagaggactttcttattaaagaaatcatgaaacacgttaaggtcaaaaatgcttattctcaggaagtacacaaatgtgaaacctccactaaggagcctaccacttgccatgaa

SEQ ID NO: 32280 - DNA, 379 bp, Zea mays
  Clone ID: MRT4577_129455C.1
gatgtttcttggccccgtgcccagcgctcctaaacccaagcgccgccgcgagtgccatggggtgagcatcgacatgggcatggcatttacgcggctcttctagacggacttcttcaaccgcgaggctatcattctcgtcctcagactggacattgctggctagaccaccatactatatacactgcacatgggagaagtcctcttcacgatcccgacaattggattcaacgattatactgtgcagtacaacaacatcaaggctcaagtatgggatcttgaaggccaaacatgcattaagccatactggcagtgctactttccaaacactcaggctatcatatatcgttgatgatgcaagcgatacatataggcttgtaac

SEQ ID NO: 32281 - DNA, 291 bp, Zea mays
  Clone ID: MRT4577_129456C.1
ccaacgcttacgacatatgggacactggattgaagacatcgatcggctcctgtgaacgtgcgtgagatcagctggcaagagatcctacgcgagctcatacgcaatggcagccgctcagcaggatcctcaacacgacgataaacccaacctgtatcccaacgagtctggccaacgtgcaatgcctcgtgcaacgtctgtgcatacctcatcggatcgatgatcgtccccattctcagacaaagtctgacacaacgcctgatgactgacctcatgaatgaacacttgcacgac

SEQ ID NO: 32282 - DNA, 676 bp, Zea mays
  Clone ID: MRT4577_129457C.1
tcgggctcttttcagcctgttctcctctttcctcctcaaagatacctattagctcccaaagtacccaacaaacaccaaccaataccacaacaccacaacaccacaacaaccccatcacagcctcatctccaaaatgtcgtgcccgatcattggaacaacgaatgacacgcttcctccaaatcacccctccatagacctcagcaaggacggccaaacgtgccccgtcgtaggcgcaacaaccgaccaccaccacaacctgcactcgcaccccccggtccccaccaacgagacgaccgcaaccgcgtgtcccgccctcaagaacaatatcgtaaagcagccacgcgctcaagaaatggacgacgctatctgccccatagttggtgtagctactaccgtcttacccccggatcacccggatatgctcaaggcgaacgagggcgacgtctgccctgttaccaaggcgacggtcggacaccacaaggataaggttgctacgcatccgagtgtagaggctgctagggatggtgccgtgtgtcctgtcacgggacagagacagcagcttgcgtaggtagaatactgacatgatttgctttggcccaaggggggttctgggtctatagctggcatttgaacttaggatgtaggaaacgaaatttgatgaatttattgattctgt

SEQ ID NO: 32283 - DNA, 2069 bp, Zea mays
  Clone ID: MRT4577_129458C.1
cggacgcgtgggttttgcttcctccgttccatttccccacgcgcacgacctcttcttcccatctcaactctctcccttcctctctctccagcgcacaaggatcttttcttcgggcagggacggccaaggaagcgcccgcggagagagatgatgctggcgatcctagcgaggcggcgtgccgcggaggccgtgctgcggcggccgcaggcggcggcgggggcggccgtgtccgcctggagggcgtacgcggcggcgggcgaggagagcgatgtggtggtggtgggtggcgggcccggagggtacgtggcggcgatcaaggccgcgcagctggggctcaagaccacctgcatcgagaagaggggcaccctcggcgggacctgtctcaacgtcggatgcattccatccaaggctcttctgcattcatcacatatgtaccatgaagcaaagagttcttttgcacatcatggagttaagttttcaaatctggaagtggacctcccagccatgatggctcagaaagacaaagctgtggcaggactaacaaagggaattgaagggctctttaaaaagaacaaggtgacttatgttaaaggctttggaaaactgtcatccccctcagaagtgtcagttgatttgattgatggtggtagcaccattgtcaaaggcaaaaacataataattgcaactgggtctgatgtaaaatcacttccaggaataacaattgatgagaagaaagttgtttcatctactggtgcactgtgcttgtcagagatcccgaaaaaactggtggtaatcggagcaggttatattggccttgagatgggttcagtctggaaccgccttggttcagaggtcactgttgttgaatttgccccggatatagtaccatcaatggatggcgaggtcaggaagcagttccaacgcatgctagaaaaacagaaattcaagttcatgctcaagacaaaggttgttgggtgtgataccagtggagatggcgtaaagctgacactggagcctgcagctggtggtgagcagaccatccttgaagcagatgttgttcttgtctctgctggcagaagcccatttacttctgggattgggcttgaaactcttggtgttgagacagacaaggctggcaggatccttgttgataagcgcttcatgaccaatgtgaagggagtctatgcaatcggggatgccatccctggtcccatgcttgcccataaagctgaagaggatggtgtcgcatgcgtagaattcattgctggaaaagaaggccatgttgactatgacacagttcctggtgtggtttatacacatccagaagttgcatctgttggcaagactgaggagcaggtgaaggctctaggaattccctatcgtgtggggaagtttccacttttggctaacagtcgtgcgaaggccattgatgatgctgaaggggtagttaaggtgatcgcggagaaggaaaccgataagattctaggtgtgcacataatggcacccaatgctggtgaaatcatccatgaagctgtcatcgccttgcagtatggagcatccagtgaggatgttgctcgaacatgccacgcacaccctaccgtgagcgaggccctcaaggaggcttgcttgcaaaccttcgataaagcaatccacatataatttctcattttctatttccttgccatccaaacttttggctcaacaagatccaaagtttatggtaattttgggcctgttggaacagaaggcctccagttgtccttttgttttgttggcaataatgtgaattctttgagttgcccacatcttatagtcgtttatgcttcattggcatggcatatccatccaaattccaaaataatgttctgatactatgttttactgtgtatgcccatgaaccattgatggatacatttcggacgttccagtatggccgtgttcgtgccttgatttctttttctactgttgcatttgtttaacatccttttgctgatgatatgttaattatttgcatccccgaactctatgcaacattatccaattacaggtacgaagcaggccgttttaaa

SEQ ID NO: 32284 - DNA, 285 bp, Zea mays
  Clone ID: MRT4577_129459C.1
ggtacctcgagggcggccggggaaaaaggcagtagaacacaacacacccaggtacgatggccgggtaccgccgcaccatctcgttcccggccccgaagcccgggtccgacgcactcgctctggcgaccgcgagcgacaagctggcggcgtaccgcatccggtcgtccagcctcccctgccgcttccacccgctgctgctgcagctggacgacgacgtggacgcgctgcgcctggtgatcggccagtccccgccctgcccgtccgcgtcgtcggcgtcggcgtcgt

SEQ ID NO: 32285 - DNA, 206 bp, Zea mays
  Clone ID: MRT4577_12945C.1
cgagctgccaggcgatctcatcatgcccgctattactcttacttgtgctaggactcactatagtagtagctgctactcgtgcaggatccgcttcggaattgattcaggggctgactagctagctaatgcaccgctgcctttggaaggagacctgtccgacggcaatttcatacggcgaacgattgactatggacacgttgcatata

SEQ ID NO: 32286 - DNA, 1961 bp, Zea mays
  unsure (1)..(1961): unsure at all n locations
  Clone ID: MRT4577_129460C.1
tgggacctcgagccggcgggcgggctttccttgtctttcctccccggttggccggttccccacgcccaccttttcttcttcccatctcgtctctctcttcagcgcgcaaggatctcttcgtcggggagagaggaccaaggaagcgcccgcggagagagatggcgctggcgatcctagcgaggcggcgggctgcagcggccgtgttgcggcggccgcagacggcggcgggggcggccgtgtccgcctggagggcgtacgcggcggcgggcgaggagagcgacgtggtggtggtgggcggcgggcccggagggtacgtggcggcgatcaaggccgcgcagctggggctcaagaccacctgcatcgagaagaggggcactctcggcgggacctgcctcaacgtcggatgcatcccatccaaggctcttttgcattcatcacatatgtatcatgaagcaaagagttcttttgcacaccatggagttaagttttcaaatctggaagtggacctcccagccatgatggctcagaaagacaaagctgtggcaggactaacaaagggaattgaagggctctttaaaaagaacaaggtgacttatgttaaaggctttggaaaactgtcatccccctcagaagtgtcagttgatttgattgatggtggtagcaccattgtcaaaggcaaaaacataataattgcaactggggtctgatgtaaaatcacttccaggaataacaattgatgagaagaaagttgtttcatctactggtgcactgtgcttgtcagagatcccgaagaaactggtggtaatcggagcaggttatattggccttgagatgggttcagtctggaaccgccttggttcagaggtcactgttgttgaatttgcgccagatatagtaccatcaatggatggcgaagtcaggaagcagttccaacgcatgctagaaaaacaaaagttcaagttcatgctcaagacaaaggttgttgggtgtgataccagtggagatgacgtaaagctgacacttgagcctgcagctggtggtgagcagaacatccttgaagcagatgttgttcttgtctctgctggcagaaccccatttacttctgngattgngcttgaaactcttggcgttgagacagataaagctggcaggatccttgttgataagcgcttgaagttcggcacgaggggagtctatgcaatcggggatgccatccctggtcccatgcttgcccataaagctgaagaggatggtgtcgcatgcgtagaattcattgctggaaaagaaggccatgttgactatggcacagttcctggtgtggtctatacacatccagaagttgcatctgttggcaagactgaggagcaggtgaaggctctaggaattgcctataatgtggggaagtttccacttttggctaacagtcgtgcgaaggccattgatgacgctgaaggggtagttaaggtgatcgcagagaaggaaacagataagattctgggcgtgcacattatggcacccaatgctggtgagatcatccacgaagctgtcgtcgccttgcagtatggagcatccagtgaggacgttgctcgaacatgccacgcacaccctaccgtgagtgaagccctcaaggaggcttgcttgcaaaccttcgataaagcaatccacatataatttctcattttttgtgtccaaactccaaagtttgtggtaattttgggtctgttggaaaaaaggcccctgattgtccttttgtttttgtcggcaatactgtgaattgaccctttgagttgtccatcttagcggggttttgtgcttccttggcttggtttatccatccaaataataacctgatactatgttttacattttatgcccatgaaccattgatggatatacatttctaaggttccagtaaccgcagtgttttgcgatgtttacatgtgactgttgctgtgagggcc

SEQ ID NO: 32287 - DNA, 263 bp, Zea mays
  Clone ID: MRT4577_129461C.1
gggtggggttttttttttttgcttgtttttttttttttttttttttgggaaaatcgaaacagacggggtttttgcaggcacattttataaaaatccgaatttcggaaatacatgacacaccccacccttaaaaaaccacaaagggttaaaccccctttttttacaaactcaaaaagtcccgcccttgttttgggtggatggtgcgcgcaaaaaaaacacctttttgatataaagaacctatgtactcggggccccaaatattt

SEQ ID NO: 32288 - DNA, 603 bp, Zea mays
  Clone ID: MRT4577_129462C.1
gccggccgggccggggccacccgcaccacacacgagcacacgctacgactgacaatgcgaggatagcaaacgtggtgctatagtgcggccggcggatgcacatgaccgacaccacctacaagggatacaccatccctcacaacaagtgctggaacacctgtccaacggaaaggacctctgggtcacgatgtgatctggaattactcacaagacatatacatgatgtgtgctacgatcttcgagagtgaggcactctctcggaaatcacactgaagaccactcccagggccatgcacacctcacatggggacacatcgtggacatcttcgcataaaggcatcttactgcatgccgacaatgcgagctatcgtctcacacagaataacaccctaccaacaacagttgatcatgatgcatgccaactactgaggagaacaaggacgaggacgactacctctacatgacccacaggggcgagaacacctgtgtgctgctatgagtgacgacactgcgccaaggatctacggcacacaatgcgcctcctcctgtaagtacttcaaaaaaataaggcgtctcaagaatccgtgtacataataatctggc

SEQ ID NO: 32289 - DNA, 874 bp, Zea mays
  Clone ID: MRT4577_129463C.1
tccgggagcttcagtgaagacggccggttatatatcctagcaagcaacgctccggctacgaggcaaagcaacacttgcttgtccagtaagtgaaggaagcggcagctgtccatcatccctcattctcagtttggggtcctgggcctgtggctgtggtggagagaggtcaggagtggagcgaggtcggaggaggtcaccacaccagcagcggcgacgacgatgctgatcctggacctggcgatctggatcatcccggtgacgctcgtcctcgtgccgttccggcggctggtggtcctggtggccaggctgcaggagctggaggagtgcatcatgcggccgcggccgccgctcatggactcgtgggcgtggggccgcgtcggcggcctgcacaccatgagcatcatgatgtgaggtggggaagtcaagcgagggcgctcaaggttcgaattcgaaccatgtataagctgcaatggagctcaaggtttttacctaggatgtaggagcttcttcccggttggtaaacggtaaccgagttcatatctctcggtcagtatggtatgggtatggatatactccgatcctgtcatcttcttttttctttctgaatatgttaattgtgcaatggtggccctgtatgtaagaaaatgtagatatatctgcagtcctgtgtacatgtcattcagaaacggagcacctgctggcgcccgttgtacctgaactctcattcacaacgcatgtccatgattcagggtgctctgtccaaagaacactcgagactagttccttatacccctctgcatgccggagggttcctttacagctttcttccggggtcgtttttaaaattaccagggggagggggttttaaaactcc

SEQ ID NO: 32290 - DNA, 358 bp, Zea mays
  Clone ID: MRT4577_129464C.1
tctaacaaagaagttctccgtaaaaggactgggtaagaacattaggctaatggacgacaacgctgatctggcccttgaaaagcatgggaaaaaaagacctacaattcctttgctcgatccacaggtgcattttccacatgcctaccgggaacagacccacggtcaccctcaatgaaaaactcattgaccacactcaaacccttgagggtggtatgcgcaaccctgccgcctgccatttgatttattgcttgttgaggtcggacgccaatcgcccaaccagaaatggagagggacctgaaaaaacttctagaggtgggaaccggacactaagagagcctaatttgaccgggtgaggggg

SEQ ID NO: 32291 - DNA, 908 bp, Zea mays
  unsure (1)..(908): unsure at all n locations
  Clone ID: MRT4577_129465C.1
gcacgagtcccccggcgccgcgccctcgcctttgtagcagccagccgccatggcgccgccgaccagcaccgacgagaccgcacgccacaagaaggccaggaaatccaagatcgatatagaagagaagaagcacaagaaaacaaataaggcgcgcgccgccgcagaggacgccccgatacccgacgccgccgagcgcaagaagcgtaagcacaaggacgggcgcgaggagaagcgggacggccagaagtccaagaaggagcgcaagtccgagggaaagggagaggaagccgaggcggccgtggggagggacgagaagatgaggcgtgcgatggaggacgagcggttcgcggcggcgcggactgacccgcggttccggccgatgcggaggaaggaatccaaggtggcgctggactcgaggttcagcagcatgatgacggacccgaggttcgcctcgtcggcggcgcccgtggacaagcgcgggaggcgccgcaagaagcgcgagaaccccatgctgcattactatctcaaccaagaggacttggaggatgatgggaaggggaaggaaaaggggaagaaaccagtgcttgttgaagaagaggaggaagatgaagaggaactagaggaacaggaggaagaagagagctctagcagcgatgacgacgaagatgaagatttggatgacgacgaggaggagtgctctgttggcagtgacattgctcattacttaatgggaaggcatgatgatacacctatgattgacaaggaaactcacaggcttgctgntgttaatatggactgggatcatattaaggcagttgacctgtatatggtgatgacttcttgcctcccaagggtgggcgagttttgtcggtctcaatctatccctcagaatttggactgaagtgcat

SEQ ID NO: 32292 - DNA, 231 bp, Zea mays
  Clone ID: MRT4577_129466C.1
aaatgttgatatatgaattgctatcatttggcgttcgtattacgcctatactctaacctaaggaaatgtctatggaattcctaggcgaatctcaactcctcattctcaagaaataatgcggctataatggtcatttactatttggtattatttgccatcttattactgctatactgcagcctaagggaatgcaatcggtatttcttggggaattccaattccgccttttca

SEQ ID NO: 32293 - DNA, 431 bp, Zea mays
  Clone ID: MRT4577_129467C.1
cttacatggccaccatggcacagcgtggcaactgggaaagagcacatgggcggcctaacactagcatcaaccggcagaaacggcttgggtaagctatcgcaggctaaaagagatcgactccgatctgaccaggctacacttgcactgcactggatcacaaatgtaacgcctactggatccacaaaacattctctttttgttcccgagactacaagcagctggtcttgttcactaatcatcaacctcttgtttggttcatccgcccaactattgctgtttcctgtcacgctggttgggctctatcaaaactggtcaataacggcctgcctgacacggtttcaaaagtacagaaaaccaggcccattcccttaaaaacttgaaattggtgaagctacacagtacgtgccttcgccctgaaagaaggtttttcg

SEQ ID NO: 32294 - DNA, 552 bp, Zea mays
  Clone ID: MRT4577_129468C.1
cccacgcttacggcggaactcaggcgcaagcccttgtgcagacgcttgtttggttgctggctcggttctggtgcctgtcgacatgctccgcgctcctcgatgctctcttcggtggactgctgagcatcaaccggctcaacaagggactggacacggcagctatgtctgctgcgaaagtgggcaaccttgagaggaccctgggtgcggccgagggtgctgaccactctcttggtgccttaactgctgacataatccctctggacacctacctctacacccagatctttgtacagaccacactacacaccccaccacagatcttcacaactatatgctacacttggagcttcaacttgtgcgttccctacttcaagatctactgctacttaccctgctacttccaccacacatactagtcaacctactcaaagactgacacatatagtgcaaaatcttgtgcgattacatatggttctgggcaaatcactgactactttatggaggacaatgacctggttggccaccttgatgagcatattgagacatctattg

SEQ ID NO: 32295 - DNA, 156 bp, Zea mays
  Clone ID: MRT4577_129469C.1
accgtcatggctccggccacgacgggccctacagggacttttttaagcggatgggcatcaacatcaacgtgttcacgggcgttaactggatgctgccgggcagtcccgacagcaaggacttgccgttcgccatttaccccgttgacaaggtgccgt

SEQ ID NO: 32296 - DNA, 342 bp, Zea mays
  Clone ID: MRT4577_12946C.1
ccggggccctcttcccggccggcgtcatctaattggtccttactccccgctccactggcgaggaaggggagaggcttgggcgccgctcccgtctcgccgcgcctcgctagtctcggggcagcggcgctggcgctgctcgtggcggcggcgctgccttccccagcagctgggggccacgccacgggggggctcttgggggtccccaactttccccacttcgcgcgggtggtggcctccactctcctgtgccacgagctctgcccgagggggtccctctcactcctgggcgcgcgcaacaccaacttgtggcacacaccccctcgtttctcagcagccgccgcc

SEQ ID NO: 32297 - DNA, 260 bp, Zea mays
  Clone ID: MRT4577_129470C.1
tttttgttgggatttcagagtgtttagggaggaaggcacaccacaacataagaaattttataacgtagcggaagtgttattctctaataaaagatcaaagtaccccaagctaacggacatcgtaggatcaaaagtcaaccggggaaacactacgtaaagcaagacccaagccaaagagaaagggtgcacctcttctaccaaatgtacttgtactgaggaccatatttactcgacctgtggacgacacccactggaccatg

SEQ ID NO: 32298 - DNA, 218 bp, Zea mays
  Clone ID: MRT4577_129471C.1
caaaatccaaacgaagctttaccttcatttatttttctggaatcttttggggggcgggctttacagggggtccacacatggggggggggggagggttttccccttcccccatggtcatgacagggtccgaagcttgaccgattccaaaggtaggggttagaccggggggggccgtttgctgcatgctgccttataaagggggaccaccggggccccgg

SEQ ID NO: 32299 - DNA, 416 bp, Zea mays
  Clone ID: MRT4577_129472C.1
ccacaagcagcatagaaagtggaatacagtggcaacaatagagcaacaatggcgggggcgatatggtccatcctgtatgctccttgctctttctgcatgtgttgataacgcgaccatgcttccttaatactcacaagctcctatagctgcccttcttcccccatacctgccatcaatgaccgcttcagtttgcgaaaacccatcccttcaaccctacaagctccaacatgcaatcgcaacaagcagcttatctttatcacccctgttctatcaacaatcgccagtcctatgtatggagcagtcattggtacaaaccatcagggcacaacagctgcaacaactggtgctaccagtgatcagtctagtagctatcgcaaacctttattcatactattagctacatcgatctcttccat

SEQ ID NO: 32300 - DNA, 356 bp, Zea mays
  Clone ID: MRT4577_129473C.1
gaagcagactagcaccgctgaaacaccactagctgttcctcactgtactgtgtgagcagctcggatcagagggagcacccatacaggatggcgtcgctaaacgggctcagaagctgtaccgctccgggcgcgcccagcctgaacactctccggttcctggacgggcagctggggctccattgtgtctacaccaccacctctgggtgcatgaacatatccgcggagtggaggagcggctagccactccctgtttacctggacgggtgctcttccggggacttctgctactatcagctggagctcgtgaccacatctcagaacatcaagcggcggaaggaggaataagagtaccacta

SEQ ID NO: 32301 - DNA, 172 bp, Zea mays
  Clone ID: MRT4577_129474C.1
cccccaaccccccaacctaccaaaaggccccaaggggcgcgatattattttaaacacggaacaactaacgaactcttcacgtacctttaacccaactacggttttaccccaaaacgaccttccacccccaaggaccacttaaacacacgacatatacggaccaacctcacgg

SEQ ID NO: 32302 - DNA, 269 bp, Zea mays
  Clone ID: MRT4577_129475C.1
cccctcattttttaaccccccccccaatcgcacaaaaccgggggggctttagaaagcgcctgcgcccacacacccccgaaaagaagggcgggaaaaacagcacaattaaagagaataggcccccaccctcccaaaaaaaactgccaacctcccgaagaggaaaaaccattcaaccaggaccgatcccaactaaaaaagaaccctagagccccaacaatcaagtcaaaccgcgaggcctgccaacccagcccggaacactagtcacacca

SEQ ID NO: 32303 - DNA, 191 bp, Zea mays
  Clone ID: MRT4577_129476C.1
cctcccactcgtcctcccacgcgtccgccctttctttcaaccacacttactattacttatcgacagtttcataaacaagttcgtctactaacacctatacactctcttaattatatacacctaataacatctactaccattcattcatattaatttatatgatatatttttacttataataacaacaacat

SEQ ID NO: 32304 - DNA, 101 bp, Zea mays
  Clone ID: MRT4577_129477C.1
cgcttgcactatgaaaccctgcaggccctatgggcttcatgaagctcaatggggtggtctacggggaggggactaacggacgataccccatgctagggacg

SEQ ID NO: 32305 - DNA, 603 bp, Zea mays
  Clone ID: MRT4577_129478C.1
cggggtacctttactcgcggagtagagcaggacgcaaatattgacagagctgcgaagaagttctctgacaattcttgctattattgctattccactatgatggccggctgagtgagtgagatgaatttgagtgggcccagcgagctatccatattagtgtcaggaaacaaactaaatggaggcatgccaagagattcctgcatgctgatattgggtcaggttatgagtccatattcatttgggatgaggacctaggggttgaacattataatgcatgacgagatcatgaaacttgataagaagcatatctaggacatctctcaacctgcattagagcctgatcgagggttaacatggcatacgaccaaaagaagaggagacagtgaggttcacacggacacagaggagatgcctggctgaagctctgaccctgatattccaccttgagctggttctgttgaaatacagtgtccattcttatcaagagatgcatgcagatgcgtgtggcgtatgattcacaacgacttgcttctattttgcgctaggattgtgcgctcaagtaatgataagaacctgctcatcaaaagatagactctgctgata

SEQ ID NO: 32306 - DNA, 186 bp, Zea mays
  Clone ID: MRT4577_129479C.1
ttttgtgggggtttttaaacattttttcgggtcttaacacacggacgaaacagaatgcacataacccaaagccaattaacccctcacacggatgagaccctgctaaacgaccccaggacatcgggccaaagttataccgacccgaccggcctaacagaacccagtgcgtcacccatcggggggaac

SEQ ID NO: 32307 - DNA, 418 bp, Zea mays
  Clone ID: MRT4577_12947C.1
cggtcgcgtgggcggacgcgtgggcggcggcccgcgcgcgcggcgggtagagcccatgccggtgcccggggcgcggcgcgcggcacctcggggccctccccgccccccccccccccccgggccgcgggcgccgcctggccctgggcgccccgggccgggtatcccgccgccgggacagcgggagggcgggcatggccgggccggcggcgccgcacaaagagccggggccccgcgcgccttccggggcgggccccgcgccctgagccgtcccgagcgcccgccgtatggaccgggctcggtccccgggccccgctgtaccgctttcctttgttcgccttccggggccgcgcggtcaggggccgctgtcaatgaggtggattcgtaaaaaaaccacccggttaggcaaaggtagggcagg

SEQ ID NO: 32308 - DNA, 1868 bp, Zea mays
  Clone ID: MRT4577_129480C.1
tagtcgagcgtatgatgcaccccgccaccccccccgcagccgcagccaccaacccccaactccgagagccaccacgcgtccgccgccccgagcccggccgggatccctttccccaacccccgaagccgagccagcgaaccaccccgcccgcagccgcaagcaagcagccaagcagtgtgaactgaccgtccgttccgtccagcccaccatggaggcgccgccggtaccggagctcatggatctggacgcgccccctcccgccgcagccgacgccgcagccgcggcgccggttccccccgccgtcagcgacaagaagaaggaaggggaagggggagacactgttacgggccacatcatctccaccaccatcggtgggaagaacggcgagccgaagcggaccatcagttacatggcagaacgtgtcgtgggtacgggctcatttgggatcgtcttccaggctaagtgtttggagactggagagaccttcgccattaagaaggtgctgcaggatcggcgttacaagaaccgggagctgcaacttatgcgtgccatggagcaccccaacgtcatctgcctgaagcactgcttcttctcaacaacgagcagggacgagttgtttctaaaccttgtcatggaatttgtccccgagaccctgtaccgtgtcctgaagcactacagcaacgcgaaccagaggatgcctcttatctacgtcaagctctacatgtatcagcttttcagaggcctagcctatattcataatgtaccaggagtctgccatagggatgtaaagccacaaaacgttttggttgatcctctcacccaccaggtcaagctctgtgactttggtagcgcaaaagtcctggttcctggtgaaccgaacatatcttacatatgctctcgttattatcgtgctccagagctcatatttggagcgacagagtatacaacttcaatagacatatggtcagctggttgtgttctagctgagttgcttcttggtcagccactgtttccgggagagagtgctgttgatcagttggtagagattatcaaggttcttggtactccaacccgtgaggagatacgatgcatgaatcccaactatactgagttcaggtttcctcagataaaggctcatccgtggcacaagattttccacaagagaatgcctccggaagccattgaccttgcttcccgtctccttcagtattcgccaagtcttcgctgctctgctcttgatgcatgcgctcatcccttctttgatgagctgcgggcgccgaatgcacgtctaccaaacggccgtccattccctccgctctttaacttcaaacatgagctagcaaatgcctccccggacctcatcaacaggcttgtaccggagcacattagacggcagaacggtgtcaactttgggcatatcgggagctaggagggcaggcggctgccatggtctagtttttggtcttggtaccccatgtgcagggccggttgcaggtgaaggtgatattgctgcaccatctgggagaggaggggctcagcagtacctgagagagctgaaactatgtaaattatctgaccgcgaaggagtacggccagtgttaagccagtaaactggcgcatgttggtccagagtagttaaggtaagaatgtagcaggtggagactggtaaatgcctagggtcgtttttagttgttaccagtattttgtaatgtaatgttcgtcggtacttcccagcagtagtgtagctgctcctgttttgttcgcccgccatgatgtaaatgatcatcacccaactggaacccctgttatctcgttacatgcttaggcctctgatcgtttcgtaaaaaaaaaaaaagagaatttaaaaa

SEQ ID NO: 32309 - DNA, 495 bp, Zea mays
  unsure (1)..(495): unsure at all n locations
  Clone ID: MRT4577_129481C.1
tcccgggggcggnnccgccctttttttttttttttttgttttttttgtttttttttttttttttgtataaggttttttttattttttcttttttgttggaggggggagacatacaaaatgatcagaaaacagggaatgcaaaatccatagggccagtcccttttctgggggccggcatttataaatgcctcgagcatagcttctaggcgggggtggggagcagtaccgccacaagagggctgactgaataacccttaacaccagatccggagtatcccaagaccggcatgcatcggtaggctagccttgttttattggggggatctccctcagccaacaggaattattagtaggcgtaccagggtaagggctttgtttcacgggaggcaccgaagtaggagcacccaacggtgggtttcttgctggcaccacccacataggaggatctcggggccgtcttgtacaaaatcgtgagccttgagggcgtcataaggc

SEQ ID NO: 32310 - DNA, 1828 bp, Zea mays
  Clone ID: MRT4577_129482C.1
ggagggcggccggggaggcaggcagcggctgtcccgagctgtcgaaagcgaggcgcggcggcagtcctcgcagcagggccgaccggtcaaaagcactgctgctccacaccaccccgccccaccatccctttccccaacccccgaagccgagccagcgaaccaccccgcccgcagccgcaagcaagcagccaagcagtgtgaactgaccgtccgttccgtccagcccaccatggaggcgccgccggtaccggagctcatggatctggacgcgccccctcccgccgcagccgacgccgcagccgcggcgccggttccccccgccgtcagcgacaagaagaaggaaggggaagggggagacactgttacgggtcacatcatctccaccaccatcggtgggaagaacggcgagccgaagcggaccatcagttacatggcagaacgtgtcgtgggtacgggctcatttgggatcgtcttccaggctaagtgtttggagactggagagaccttcgccattaagaaggtgctgcaggatcggcgttacaagaaccgggagctgcaacttatgcgtgccatggagcaccccaacgtcatctgcctgaagcactgcttcttctcaacaacgagcagggacgagttgtttctaaaccttgtcatggaatttgtccccgagaccctgtaccgtgtcctgaagcactacagcaacgcgaaccagaggatgcctcttatctacgtcaagctctacatgtatcagcttttcagaggcctagcctatattcataatgtaccaggagtctgccatagggatgtaaagccacaaaacgttttggttgatcctctcacccaccaggtcaagctctgtgactttggtagcgcaaaagtcctgattcctggtgaaccgaacatatcttacatatgctctcgttattatcgtgctccagagctcatatttggagcgacggagtatacaacttcaatagacatatggtcagctggctgtgttctagctgagttgcttcttggtcagccactgtttccgggagagagtgctgttgatcagttggtagagattatcaaggttcttggtactccaacccgtgaggagatacgatgcatgaatcccaactatactgagttcaggtttcctcagataaaggctcatccgtggcacaagattttccacaagagaatgcctcctgaagccattgaccttgcttctcgtctccttcagtattcaccaagtcttcgctgctctgctcttgacgcatgcgctcatcccttcttcgatgagctgcggacaccgaacgcacgcctaccaaacggccgcccgttccctccgctctttaacttcaagcacgaactagcaaatgcctctccggacctcgtcagcaggcttgtgccggagcacattagacggcagatcggtgtcaacttcgggagcagctaggagggcaggcgctgtgatggtcgaagttttcggtcttggtttccccttctggagagtgggaggggctcaagcagtacctgagaaaagtagtgaaaccgtgtaaattatctgaccgtgaaggagtactaccgccagtaactggcgcatgttcgtccagtagttatggtaagaatgtaggaggtggagactggttaatgtgtagggtcgttttttttgttttgttttgatattactaccattttgttgtaatgttcgtcggtacttccagcagtagtgtagctggccacgttttgttcgtccgccatgatgtaaatgatcatcgcccaactgtaatgcatgttctctctgatcgtttcgtaaaaaaaaaaaaaaaaaaggccccta

SEQ ID NO: 32311 - DNA, 617 bp, Zea mays
  Clone ID: MRT4577_129483C.1
cgagcaacgtggaggcctacgtcctgttcgccggcgcggagtttgcgtggctcttcctcgatggctcctggctgggcttcgccgtcgcctgcctcgtcggcacggtttgcccgctcgcggagatcccgctgatcaagttgcttgggtgctggagctatccgaacgccgacgtccacctgctcggcgaggggctggtgagctggacgacgacgtgctacttcgtctacaccccgttcctggcgaacctggcgaggtggctcgattcacggctggcaataaacaaggacgtcgcggacgcggagggaggcgacgaggcagctcggtcttgagtcacaccggcgggaacaccagccggcgtatcccgggcttgggtccatgcggactggagtttagtgctcggagcagcagtgctgttcgtctaaaggcgatgcggccttaattttacgatgatggccgggaaccatgtccggtgggccgggccgggccgggggaggagaacgatgggaaaaagggcgaaaggcactcctggggcgatgttcgtggcgacaggtgttctgaattctgatacggtttagtcttttcgctctgattgaacgcgcactactacaccagtacac

SEQ ID NO: 32312 - DNA, 561 bp, Zea mays
  Clone ID: MRT4577_129484C.1
tccagacaaagaaccaatggcacatgccttgccccacatctgagacatcacagagcacactcatcacgggtatgaagatcctaccatgaccgcaagctgctccctagagcacaagcaaaaattagtgctttctggggccgaattccacagaaggagggcacctctattagcgttgtacgctgttgctgctgcttctgtcaccatccagggtgctaacatcactgtcgctgcttccaagaggcggcctacaccgccacatctcgccgaggagaagaaagacccgaacgacatcgaagtgctagctaaaccgctcgctacccggaatatgaaggaggccaagaaggaagctatgcctgagctagagcgagaaacgatgactcggatgataagtgaaggccctaagaactgacccttgatcaaaaaatgtaacgtatagtatgataatatactccctctaatcttcaagacgagtaaaccagtaagcagaatagactactcactacatgcgtacagatgggactactaatacaactacttgacgtgtatgtattttgacccggc

SEQ ID NO: 32313 - DNA, 820 bp, Zea mays
  Clone ID: MRT4577_129485C.1
agatgcggactacctgcacctggacagaaagaccctacgtcctgttcgccggcgcggagtttgcgtggctcttcctcgatggctcctggctgggcttcgccgtcgcctgcctcgtcggcacggtttgtccgctcgcggagatcccgctgatcaagttgcttgggtgctggagctatccgaacgccgacgtccacctgctcggcgaggggctggtgagctggacgacgacgtgctacttcgtctacaccccgttcctggcgaacctggcgaggtggctcgattcacggctggcaataaacaaggacgtcgcggacgcggagggaggcgacgaggcagctcggtcttgagtcacaccggcgggaacaccagccggcgtatcccgggcttgggtccatgcggactggagtttagtgctcggagcagcagtgcagtcggctcgaaggcgatgcggccttaattttacgatgatggccgggaaccatgtccggtgggccgggccgggccgggggaggagaacgatgggtacggttgcgcataacttttgttataatgatctgaaagcatggccgcattgatacggttggatgcgtgggatttgtcttcaggaaaaagggcgaaaggcactcctggggcgatgttcgtggcgacaggtgttctgaattctgatacggtttagtcttttcgctctgattgaacgcgcactactacaccagtacacctgagaaaaaaaaaaaaaaaaatgaaagggcggccgctataattaaagctctttttttatttgtattttattttttctctcttcctacttctatttcttttt

SEQ ID NO: 32314 - DNA, 460 bp, Zea mays
  Clone ID: MRT4577_129486C.1
gggaacccgggaaagggttttatttattttggttaccacaccacaccacaccaaaccattgggccaaagcttccctggtacaatacatacggggcaatacaatacacggggaagggaagaccccattcagggattcaacttctgtttctggggggggggccccgggggggactcaccgaaagggagcatgctgggggaggaaactttgacgatgacttttttgccgggggggttttcgctcgaggtggattccccccgcaaggtcatagccctccggtgcccctggggtgcccctgcccgagcaggagcggggggaacaaccccaggggggggtgccactcttttcatgggggagcccccccactgcaccgagaggaaatgcccctccttggatatggggggcatcccgggggaggaagagccgggcctcttctgggttggaaacggcggggccccctgc

SEQ ID NO: 32315 - DNA, 1168 bp, Zea mays
  unsure (1)..(1168): unsure at all n locations
  Clone ID: MRT4577_129487C.1
ggacgggctgttcgtgcccccgagggaccctaggcagctgaataagctggctaggaagaacgtcaaggacaccgccggcaagggctggttcgacatgcccgcgccgaccatcactcccgagttgaagaaggatctcgagattttgcaggtgtggtgttactcctattcagttaccttactagctgtaggatgccataatagcctgtaaaacggattaacggacaatatgctgtcaagaaattcgggaccaacgtatgataaagcaagcaaaacatacctgtgcagctgcccttggatcagtgtgtaggagactagtagggcgaacatggagagcagtttactgcaaccatctgacagtgtaaccatctgatcgaagctcttttacttttgcaagaaagaactggaattgttttacttgagattcaagcagtgttagatgtgcctatctcaactcaattggtattctgtgcttagtgatcctgggttatcctttgggatgcttatgtgatagtatggttgccatctgtttttccagctaaggcatataattgacctaaaaaggcacttcaagcgggtaggaaaattcaaggtcgttctcaagtacttccaagtcggtacggtcgttgagcctgcatctgagttctactcaagtaggctgaaaaatagggaacgcaaggcaacattggttgacgagctgttatcagatcaatctctgaagagctacaggtatgctcatcatacttttgccattttgcatgtgcatcaatggacagtggcttgtttttcagtgcaagattttctataaaaattgcatatggtcttttgcaagatttcctggtgccttgtttcagagtccaaccatcataataattacacggttgtggtgtgtatatctaaatgggtttcactggttacaactaaggtgcatggttttaaagtcggctgactaatcgcgattagtcgcgattagtcggccttatcgcctggggtagcacgatcagcatggacgactcgatcagggcgactaggttacaactaatcttcgctggcaacgatgtagtgcacgaaaggncgggctgagtaggtgccatgtccgtctagcttgcgccaggttttgggcctgaaaaaaaatgtgtcctctgtaatatgggctggcggcccactatct

SEQ ID NO: 32316 - DNA, 318 bp, Zea mays
  Clone ID: MRT4577_129488C.1
tggactattaacgtacttaatttggctctcacaactatgactatatcatctgcactagtatgattacgtgcacaaagcgttacacatcattctacaccatctgctcctacaactccacctataaaatcttgatgaatcctttcactggcaccagcactttcgattccagtacctactttgcttgaaccatcttaattatatgctacaacttctaataccctacaagctgctgcctaatgtgcaccaccaacaatgtcatatgctcaacctactacacgcattaagctatcatgtctatctacagctactttaactact

SEQ ID NO: 32317 - DNA, 265 bp, Zea mays
  Clone ID: MRT4577_129489C.1
cttgtcttgattatattgaatattttacagttttttaaacgttcacttgaaatttacatcgcactacaattgctggcgatttgtttgaacgattaaattaaagtagagtaaatcaaaatgtctgatcatccagtttacacttggggtgaatttcatatggattttattaatcgagaacggaaaaagccattacgtccacgtaattacactccgaccaatcatcctttgtactattcccgaatttatgatgattttcgatggggcc

SEQ ID NO: 32318 - DNA, 124 bp, Zea mays
  Clone ID: MRT4577_12948C.1
aacccatccactaccgacagcgacgactcttcaccaagaagcccatagtcaacggccgtgggaggggcgacgtctggagccacgtcccattcgagcacccgtctacgttcgacacgctcgccat

SEQ ID NO: 32319 - DNA, 343 bp, Zea mays
  Clone ID: MRT4577_129490C.1
aaaagattgaccagggttctgcgaagcatcttattcttgctgaattggagcataaaaacaaaatgatagcccaggatctcgggttgtttatagagtaagcagtttggggatttcctgagaatattactggcggccacggccacctgttaacaccaaccattttgaagaaaagggatcatcagggtttttttttttaagagcaacccgaggcccaaaagggacctctgctgaaactggtcgagggcaaccaggacaaggaaaccacccctgcctggaaaatagtgggagtttctggcaccccgacttcctaccctttgttgtgaattaataccccacacttccc

SEQ ID NO: 32320 - DNA, 415 bp, Zea mays
  Clone ID: MRT4577_129491C.1
gggaaaagggaaatttttgttctcagaagcaaagaacaagggggtgggggttttttaaacccagggtggcccagagggggaaaattttcaacaggaccccccaagggggtcaacccccggcccagggggggcaaaatgggcccccctaaagaacccccggggtaaaacggggggaaggaccaaacaaacaccctaggtcccgcccttaaaaacatggcccccatcccccgggggggggggggcggccccgaggggggcccccccaaccaagaacccgggctggggacccaaggggggcctttgggggggggggccccccccgggctccttgggatcccccttcgggggaccatttttcaccttccccggggggaacctttttgggcagggggacgggtgcccatgccccccgggg

SEQ ID NO: 32321 - DNA, 834 bp, Zea mays
  unsure (1)..(834): unsure at all n locations
  Clone ID: MRT4577_129492C.1
ggcgattgggatcctcgaggccggccgggtgtcaagcgccgtaccgatttcatggcggacgagggtatcatcttcaagaacggtgttgcagttggtgaggagggtcatccatctctcagcgaccttcgggccagccataacgttgttgttattgcaactggtgctactgttgctcgtgacctccctatcaagggccgccaactcgagggtattcactacgctatggagttccttcacaagaacaccaagtctcttctcgactccgagcttggtgacaacgcttacatctctgccaaggacaagcacgttgttgtcattggtggtggtgacactggtaacgattgtatcggaacctctctccgtcacggtgctaagtctgtcaccaacttcgagcttctgccccagcctcctcctgagcgtgccaacgacaacccttggcctcagtggcctcgcatttaccgcgttgactacggtcacactgaggttcgccagcacactggcaaggaccctcgtgagtactgcatcatgtccgaggagttcatggacgatggctctggcaaggtcaagggcatcaacaccatnccgtgttgagtggaccaagtctcccagtggtggctgggacatgaaaaaggtcgagggctctcagcagttcttccctgctgacctcgtcctgcttgctatgngtttcctcggacctgaggctcgtgttcttggtgacgagattgagaaagacgctcgcaagaacgtcaagaccgcacccggcaagtacagaccaaacccttgagggtgtctttcgctgctggtgaacgcccgtcgtggtcagtctctgattga

SEQ ID NO: 32322 - DNA, 259 bp, Zea mays
  Clone ID: MRT4577_129493C.1
ccccgcatcctctatataaacctaccccatccaaacttcatattctatactttcttctaaatacctatgcctaatcatggtcggaattcataacatggagacgggggaatccactcacaataccacacaccatacaaacctccatcataaaaccaaaatccttatgaacctaatgagtgacctaactcacattaattcccctactctcactcaccactttccacaccctaaacctctattccaagatgccttactgaat

SEQ ID NO: 32323 - DNA, 704 bp, Zea mays
  Clone ID: MRT4577_129494C.1
aaaaaaagtgcggcaacgtagcagaggaggagcaggagggaggacgaggctagggttgctcggcgatggcgtcggcggcgaagacccttgcacgggttggatcatccctcttcggccgcattctcgcgtctccgtcctcgtccataccccgcgccgggctgccgctagccaggctgcagccacacgtcccgccgccggcaccggcgggggtggacgcttacgaggcggagaccgtcgccaggctgagctcgctccccggcgagatatccttcccttgcggcctcccctcgctccgcttcttcatcgacgacgttgaggatcctgttcctaatgacccctttcagttgctcccgaaaagaacttaccagcccagtacaatcaagcggaaaagaacccatggatttcttacgcgtaaatcgaccaagggtgggcgcaaggtgattgcccggagaatcgccaaaggcaggcacagaatctcagtttagctagagcgagaaatctcagtttagctagatctcgctcgtagcagccctggatgttttctgtaacacagattcgtatcgtgttctttctatggttagcactctgctgaaggtgagccccccgcgcaagcagcagtccatgtatggatttttattgtgaaactttttttgggtgggttcagactttcagtcctggccatctgtaggatatgccctcttccg

SEQ ID NO: 32324 - DNA, 824 bp, Zea mays
  Clone ID: MRT4577_129495C.1
tgtgcggtcgctcgaggccggccattgaaaaaaaaaaaaaagtttctccaccaaaaaaaagtgcggcaacgtagcagagggaggaggagcagggggaggaggaggctagggttgctcggcgatggcgtcggcggcgaagacccttgcacgggttggatcatccctcttcggccgcattctcgcgtctccgtcctcgtccataccccgcgccgggctgccgctagccaggctgcagccacacgtcccgccgccggcaccggcgggggtggacgcttacgaggcggagaccgtcgccaggctgagctcgctccccggcgagatatccttcccctgcggcctcccctcgctccgcttcttcatcgacgacgtcgaggatcctgttcctaatgacccctttcagttgctcccgaaaagaacttaccagcccagtacaatcaagcggaaaagaacccatggatttcttacacgtaaatcgaccaagggtgggcgcaaggtgattgcccggagaatcgccaaaggcaggcacagaatctcagtttagctagatctcgctcgtagcagccctggatgttttctgtaacacagattcgtatcgtgttctttctatggttagcactctgctgaaggtgagcccccgcgcaagcagcagtccatgtatggatttttattgtgaaacttttttttgggtggtttcagtcctggccatctgtaggatatgccttcttccattttattttgcgacgctgtgtgcgtgtgtgatgatactatcatgatacttgttggacaaaaaaaaaaaaaaaaaaagcaacctaaaacccgcggcc

SEQ ID NO: 32325 - DNA, 218 bp, Zea mays
  Clone ID: MRT4577_129496C.1
gagctcatttgatggcggccgccctttctttttttttttgtttggggtaataaagaaagaacggctgcagcacacacggaaataaatacaaatgtcccgcccagtgcgctcggtcaaggttttcaatgcacacagcggcgttcgggttctcaactcactgatgctgccaggaactcaccaggaggttgagtcagttacaccccaattgacgatcctag

SEQ ID NO: 32326 - DNA, 305 bp, Zea mays
  Clone ID: MRT4577_129497C.1
ggggggggaggggggccgaacaaaaacagcggggggggagagcaaggacaagcaccacaagcacgagcaccacctgcggaggtgcatgcgggtgcatggcgtcaggcctcctggcgctggacctcaaggcggccatcgactcgctggcgggagaccgggggggggggggctctaagccgaccctctacctgcaggacccgcagctgcgcaggcccaactcgcagggcgacccggcggagacagcgacggagcaggagacgctggacgaccggaaccccaacaaccgcgggggcagcggccacaag

SEQ ID NO: 32327 - DNA, 208 bp, Zea mays
  Clone ID: MRT4577_129498C.1
tcgctctaatcccattccatttcccctgtctgcctctttctcacacccagacgacctccaactacttaacccttcccagctattcctcttctaacttattcttacctgactatacaatgccccccacacaaaaatcctcatacccatattcatatcctaaccccaacaatctactaccttttctcctaaccaattttttaaaattctt

SEQ ID NO: 32328 - DNA, 413 bp, Zea mays
  Clone ID: MRT4577_129499C.1
ggccctaggggccttttttttttttttttttgtctgaaacaaattttaaattagagctggataagaagcttccattgtactccttttacaagtgctatcaatcccttctatgacaagtaaataaaacatgatctcagaacacgagcattatgtccatttactgcggaaagatcttgactctcacaataaccattaagacttcatttctaagaattggccgagaaatcgagaatagtggaaagcggacaacagcagcaaagttggtatgttacacagccatcccactgcaaaaactctcaaactgtccccgaatttacataataatcaatttctgataaagagaagtgctaacattaattctggctgaagttcaatgctgacagagaaaggtagccggcccggccggcctcgag

SEQ ID NO: 32329 - DNA, 1055 bp, Zea mays
  Clone ID: MRT4577_12949C.1
ggcctcggcatatgtgctaagtgctgcacatgtgttacgaggcttgtcggaaggtgtgattcctgctgcggcggcgcgaagcgtaggagggtgagaatatcggagcttggcgatgtcgaagcggcagggaccgtcgcatcgtgaaaggttttaagggcagaagccctcggagggtcactgggagaagagaaacgcccggcggcgcgaagcggagggtgagaatatcggagttcggcgatgtcgaagcggcagggaccgccgaaacaccagaaccgctacgcgtggaagccgaaccttggtcagaagatcaacgaaaccgagcccgggggcaggttccgacctctgtcagaaatcaccggcgtctgtcagcgctgccgggatcaaatcgactggaaacgcagatacggaaaatacaagcccattgttgagccagcaaaatgccagaagtgtaataagcgaaacgtccggcaagcataccataacgtatgcagagattgctccaaggacctcggcatatgtgctaagtgctgcacatgtgttaacgagcttgtcggaagggatgcgaatgaggaggaaagtgaacgcaagtcactagaagaggctgtcagaggtgctagggagagggaacgacgtacacttcttcgtattatgaacaaaggcaaaggtggggagagtggaccgtcagtcccaaagattgctgacagaagtcgagaaggtgatatctttcctgctggatcacttgatgaatacgccgaacaaactagagagcaagaggaagatgactcagatgtagaggctggagattttgtggaagattaaatttggaatgctttatgctgtaaagacgatactttctgtgatgcctatggtaggattgtcgcgcatttccttatgtttgttcgaaagcttggaattggaagatgttaaactgcgttgatttaattaaaaaaaatgcttgtgtctgaaaaaaaaaaaaaaaggggtttttatgttggttttgttcctctttggatagtaataataaaaggaaagtaccatttggaccagttgttcct

SEQ ID NO: 32330 - DNA, 795 bp, Zea mays
  unsure (1)..(795): unsure at all n locations
  Clone ID: MRT4577_1294C.1
ggccctaggggccttttttttttttttttttgtacaaaaaatatggctgtctaatcattaatgacaattgtctagtccatttgttcaccactgattacaaggacacctcagttacaacaacgtggagaaaagggaaacaacatagagagagaggaagtggatcaccacgagcaatgcgtttctctagaacagcagttcactgacccacaccatacgctgcttctgactccatcagaagccagaggcttccatccaccaagtccaggcaggcaccacttgatctctgctaatggtcacaatgccatggccagtacagccacacatggtgccacagctacctgtggccatgtccaccaacccttgcaagcacaaacaaaggagtaacacctcagcagacgagcaaaagggggcgcaaagttccaatcggaagaacaatgggcagatgggccagtggagggttgttctccactttcatgattgcagaaatgcaggtaaatgctactgacggcaaaggaagtaagttcagctcgtcagttgcgattccacctttctaccatgtgttcatggctacctactcacatttctggttttgtgccagcccaacactggaacgcagaaccaaaaccggatgacttggaaagctaaaattcattctctgcttcaatgttaccaagcatatgcttaacattcatgcatttttttcaattgtttcttttcccgaacggntgttattaatttatctgattgacnatgcnttttgtgccccatgttcctttatagtgctaactaaagcat

SEQ ID NO: 32331 - DNA, 313 bp, Zea mays
  Clone ID: MRT4577_129500C.1
ggaccaacccacctttttaaaaacaggggccgcatacaaaaaaataaggccttgttcgtttccctcggattacacccggaatcgttacagctaatcaaagtttatttaaattagaaaagcaatttggtcaaaaattgttcccacccatcaatccggtaaaaacaaacaaggtttaatactacttgcaccctttttattgttttgggttaacccgggtttaacctaagacgggcccacgggcttttttttgtttatgcaataaattttcccaccttccagagcgattttccgtccgcctttgaccataaccacc

SEQ ID NO: 32332 - DNA, 467 bp, Zea mays
  Clone ID: MRT4577_129501C.1
tgtctgcggcgctggctctgcccggcgtcgtcgccagggaggcccacgcgcgcgcgctgaggtccgtcgaacagtccgacgatatcctgttcgcggccctggtggatgcctacgtgaagagcgggttgcttggctacgcgcggcgggtgcacggcgcaatgcccgtgcggagcgtcgtgtgctccacggcactgctcgtcgggtgcatgcaggaagggctgttcgaggacgctgaggcgatattcaacgagatggaggggaaggacgtcgtggcgtacaacgccatggtggaggggtacagcaagacggaagagacggcggagggctcgctcgaggtgttgaaggcgatgcagcgagcggggcttcgtcccacggtatcgacattcgtgagcgtgctcggggcctgctcactcttgtcgtcgccagagctcggcgagcaggtgcattgccaggggacgaaaagcggc

SEQ ID NO: 32333 - DNA, 148 bp, Zea mays
  Clone ID: MRT4577_129502C.1
ggcccaagccatccattattctttcagccctacacaggcacaagccggggaacaattcaaggcaggttttcaaaacacatgacgcaccacaggtgacaacacacacagcgctctcacacagggccacaccacacacaaaggggggggg

SEQ ID NO: 32334 - DNA, 474 bp, Zea mays
  Clone ID: MRT4577_129503C.1
gggggggggtttttttttttttttttttttttttttctttttttttattttttttcatttttttttatttattctttttttgaggcaaaacccaattcccaaaaacacccgaaactccatgccggaggccacccaccaaacccggcgcgggggggggggggggcccaaaggacccaaccggcggaccgggaggagggaccaacgaccaaaaaaaaacaaaggggatgcaccccaagaacggaccccgccaactgggaccgacaggacaacccccccagaccagaccaatgggacgcagcccggactaccaaaaccccgctacccacacccctgactagcccaaaggactacccaaagcataatggcacaccggccattccaaacggggatctccacccaaagttgaatccacctgaggaaacaaaaggcgggtccccaaaataaaacccattctgcccattgaaccctgagggc

SEQ ID NO: 32335 - DNA, 371 bp, Zea mays
  Clone ID: MRT4577_129504C.1
aaaaaaaaaaaaaaaaaaaaaaaaaaaaaaaaaaaaaaaaaaaaaaaaaaaaaaaaaaaaagaaaaaagaaaaaaaaaaaaaaaaaaaaaaaaaaaacaaaaaaaaaaaaaacaaaaaaaaaaggccgccccttttaaaaaacccaacttaactcccccttcattgcaactcaaaaccttttttaagggctccccaaaatcaaattacttgcccctcttttaaaaactcctaacctggaaaaaccctggctttcccaaattaaaaccctttcaaaaaaatccccttttcccaacatggcgaaaacccaaaaagcccctccccaatcccctttccaaaaacttccccaccctaaatggcaattggaaccccc

SEQ ID NO: 32336 - DNA, 485 bp, Zea mays
  unsure (1)..(485): unsure at all n locations
  Clone ID: MRT4577_129505C.1
gngggagctaagtatcttgcaacgcaagaggagttcacgctctcactaaagaggcacggccaactactgaacacgctgtcttgctgtgatcttgatgaccacaggcacaaaattaatcaacactagctagaacatcatagggagatgatctccaggctaaaggtcattccgtaaagatctgagagcgcacatataaagaaccagaaactggatagaagacaccacgacccttaacaattcaatcaggaaactgctactactactgatattggtaagataagaaactcactaaccttctaacaaacgatagcccctgagcaaacaaccgacctcttgaagactataatacatagatcgcacctaaggctagtgaatagtgcataatgtgtataggagcagcttgtaaccaatatatataaagctgtacatggtatccatacacatatagatactcatgagaatgataaaaaattgatgcacaaaaa

SEQ ID NO: 32337 - DNA, 413 bp, Zea mays
  Clone ID: MRT4577_129506C.1
ggaaacacaaagtaactttattatgggggaactgaatagagccttattacaacagtcctcacgtagcgccttccgggggggggactgggctttttgcacaaaaccggccaggggaaaaccacactttagggaacggaacggggaaacccaaacaactagggcgacgaccgtccgtccttttttcagacagaactaaaagggaaatgctgtttggaaggccctggggggggatgccggggggggcccccttcgtgtcggaggggtggggggagagcagcggggaggggaacttggccgggccgtttcggtttttggggggaggggccgcgttcatggggaccacccgtttttcgatttgggtaagccgggcgcccaaccgttggaacgccttttgggcctgggggtccgacgtc

SEQ ID NO: 32338 - DNA, 411 bp, Zea mays
  Clone ID: MRT4577_129507C.1
atggagtccctaggcgtacgatggcggtgggcatcagttggtcctcttccctcaaggtatcttcctttagaatgctttgacctcaacaaaacaccatttatttcatctaagacaaggattagtactagcacggtgccaagatacaaaagttgtggatggagaatggaggctgattcttgtgcatgttgggggtcgagggagtggcagcaacctgcaaaagaagagctctcgattcgagtcagagtcaccggggatccgaaaccgttggcgtccaacaggtgggtgacgcgcacagcgcagtcgtttatccgcttcgctttctccttcctgcagcatgcacagtcgtcgctgctgcggtgcaattcagtcttgtctcctctagcaggtgctgcctccgagtcagtggagtaa

SEQ ID NO: 32339 - DNA, 189 bp, Zea mays
  Clone ID: MRT4577_129508C.1
tttgtctagccaccatatatactacatatatgtttcagaattttgttcagccagcgaggtaaaagcctgaaacaatggttaaccgacgaatcaataaggctattcgatttgcttgtcacacaaaaaggaggtgcaatcagtaaacagggaaataaaaaagtgtggtatgaaaccaacagagagaatttc

SEQ ID NO: 32340 - DNA, 369 bp, Zea mays
  unsure (1)..(369): unsure at all n locations
  Clone ID: MRT4577_129509C.1
agccgccatcatagaaccgccgccccgtccgaggccggactgtgccctggctggggccggtagccgcgaccaggcaaggggcgaccgcgccctcgccgggatccaggcgctcgccatgcgccgtggtccgcgaccgccttggagagccgccacggcctccgtcgggccgcccgcagtctgctccatccggcgccaggagcagcagcgcctgngcgtcctcgtcatgcgtgccggtgtcagccaaccccgcaccaggaggcggccacgccgaactccgcgagaagccgaccgcgcccgacgttgccggatccgcaccggcggtcggtgtggcagggacgtgccgcttgcgcagagatgcagagcacccgt

SEQ ID NO: 32341 - DNA, 240 bp, Zea mays
  Clone ID: MRT4577_12950C.1
ctgcttagctggtctaagtgggtaacggaggatgataaacaactcctgtagtgcggggcgcggacaaggctgtacccttggcggtattgtccaaaccctggcggcatttgggtgttcgattaggtgcagacagggtggtgggttttcagcctatggccaccctggcgaatgcggtgctagctcgcgtggcagagcaacgttatgagttgacccaaagagtatgatagatgggataggagg

SEQ ID NO: 32342 - DNA, 330 bp, Zea mays
  Clone ID: MRT4577_129510C.1
aaaagaagttcgaccatgtttatagctctaagtggcgttgtgatctgcattcatgcaaattttctgggctaaactcaaatcatgcttacaaattaaaatgcaaatttcaggggtaataatagagcagacagttttctcacatgctgctcctaaaatttgccttttaaatatacaatcaagttttatagtgttttaacttgaatttagttctatgttttctttgtgacgaatctgtgctccatccccaacttttatgacctggcctgtttcgcagatctgcttccacatttcaatgctctcaaaatgattgattccgcttatactaagagg

SEQ ID NO: 32343 - DNA, 357 bp, Zea mays
  Clone ID: MRT4577_129511C.1
ggaaaagggcccccttccctggttttcccacccaaattttttttttttactaggacagggggggggaaaccctcccggttcgggcaaaacaactatacaaaacgggggccaaatatggatgccatctttgccctgaaaggagaagggttgaacaccattttttgcccaaagattctttactctaaagtctccaaaaataggggaaaaaaaaaaaaataagtttttccccaggttcctgcttgcttgaacaaaaagggcaacccaccttgggttgatgtaaaccaatatgtaggcccttttaaggcccccacccccttgcctttcccgtttggcccttttgggggccaaccccgtttc

SEQ ID NO: 32344 - DNA, 335 bp, Zea mays
  unsure (1)..(335): unsure at all n locations
  Clone ID: MRT4577_129512C.1
ctgacccattctntaaatacttctacttttctttatattagctaattcaaccgtataagactattcttctcaggatctactcttcaaccatattttttctctcttatctatcctgaattagttattccaaagatactaggctttttcccctaaaaaaaaaaaaataaaaaaaaaatttttctaaattattattaactaaaaaaattttttttttttttcattattcatacaaaaattactatttttctatataacaaatgtgggaaaagttcttgatcatctaaaaaattccaaatctttccttccccgtgctatgaaatttttttttttttttt

SEQ ID NO: 32345 - DNA, 362 bp, Zea mays
  Clone ID: MRT4577_129513C.1
aagggacatgtccagcgccaaatatgtacttaaagggaagggactgaacatttaagcatatatactaaaaccgcaggtactacacccgtgcctgcaggcacccccacccaagcgtttttttatttccaaaacattattcctgaaggacgggggtttaaaaaaattgatcagaacttttttgagctgtgatggatcccaggacgtggtcagaaacatggacctttggagctttaaggaaatgcccatgtttggtggtttttactgagggtgaggcccaaggactggggcttgggtacatagggggggaaaaagggtaaaagaatgtaaaaacaaagaatggttttttttgggaattggagttt

SEQ ID NO: 32346 - DNA, 425 bp, Zea mays
  Clone ID: MRT4577_129514C.1
cgccctagccttgccaaagtggaagcaacagcagcattgctgctggcgggggtctgttctaattagatagagaatggcgaacctggcggacacctaaggcgaatcaccatgcggcgtctagggatcactcgccaactggcgtatatggctagctgttcctggtgaaatgtatcgtcacattcccacacaacaccgagcataaaggaaagccgggtgcctaatgaggactactacattaatgctgcgctactgccgtttcagcggaaaccgcggccagctgattaagaatcgcaacgccgggagaggcggtggtattggcgctcttccttctcgctcatgctcgtggctcggcgtcggctgcgggagcggatagctcactaaagcggaatacgttcccagaatagggatacgcagaaagacatgga

SEQ ID NO: 32347 - DNA, 607 bp, Zea mays
  Clone ID: MRT4577_129515C.1
gagatctggggggggggggggggggccactagaccgtcaggtggacgccgtgaggtcacctacggcatcccgccactcccccacatcaacagcgccaggccacgccgtgccaagcgaccccggcaagagaattcctagccgtgtagtgggtttcctcctctcccgaggtttaaatctactcagtcccgtaaatctttcccccaaacctcaccgaaaaaaggaacctacataggcgacccaacgaccaaagccacgcgaccttacagtcaggccggacacatactcccgaccattgggtacttcccgatgaacgtaatattaatcttgatactaacttacgagaatttcctcatgatggtcgcgatgatcttgatcttgatcgagaactggaagatgaaaatcctgaaaacctactacttgaagtagacgatgaacttaatcctttatacgattctcatgaactctatgacctaaattacattcctgaacgatttagtcgtgagttactagtacttaatattctccttgaagttgctccagaatttgatgaattactagaatattcagacgattcattacttcatctatggttgtgatatcaactaga

SEQ ID NO: 32348 - DNA, 147 bp, Zea mays
  Clone ID: MRT4577_129516C.1
aggcaacccgtgctgctgtgttcaagttgaccagtcgactgtggccatcagggagcactttggcaagtctaacagcgtgcttcagccaggatgccactgcatgccttcgttcaccggcaagcgggtagctaggcatctcacactcag

SEQ ID NO: 32349 - DNA, 538 bp, Zea mays
  Clone ID: MRT4577_129517C.1
cgcgccggccccggccgggatcgatctatctatccccgttgccagtataataatcgcatcatcgtcgccgcccatctagctcaagagccggacaatcggagatgaatcgctggggcaagagcaagaaccctgccccggccgcccgcagcggcgccggcgccggtgctgcaggtgtcggggaggtgccggtgcagaaggtgagcaagatcgagttccacagcctgatcaacaggcccgccatctacggcggccgtgcttcacgaggggcggaagacgacatcaacgagaaggcggagaggttcatccgggagacgaggctgtggttccaccgccagaagccggccgcctgatgacgtcgccgtcatgcagatgcaggcatcatcatcgtatgcatatatatgtatacggatggatattattattatcctttattactatggatatagccaacgcatatagtataagtacaataatatatagaataccgttggtatttgatcatagaaaaaaaaaaaaaaaaaaaagaggaaaacaaaaa

SEQ ID NO: 32350 - DNA, 221 bp, Zea mays
  Clone ID: MRT4577_129518C.1
aacgccacaaaacaaccatacggaaggaggcgcacatcaagaaacgaaaaagccgtccttctcccgaaagatctccaatatcgagtaccacacaaagggccccatgaattttgacaagaaggccaagaccctcaccactcgagaggcggcgaacggcaccagcacggacagcaagaacaccattacccttaagtacaggcgcatcaaagggcaagctacgg

SEQ ID NO: 32351 - DNA, 594 bp, Zea mays
  Clone ID: MRT4577_129519C.1
attgggtacctcgaggccggccgggcgccgctcttccgagcgagaagtcattgaaccttatcatttagaggaatctatccccgttgccactataatcgcatcatcgtcgccgcgcgcccatctagctcaagagccggacaatcggagatgaatcgctggggcaagagcaagaaccctgccccgcccgcccgcagcggcgccggcgccggtgctgcaggtgtcggggaggtgccggtgcagaaggtgagcaagatcgagttccacagcctgatcaacaggcccgccatctacggcggcggcggcggcggcggccgtgcttcacgaggggcggaagacgacatcaacgagaaggcggagaggttcatccgggagacgaggctgtggttccaccgccagaaagccgggcgggccgtctccgccggccgcctgatgacgtcgccgtcatcatcgtatgcatatgtatacggatggatattattattatcctttattattactatggatatagccaacgcatatatatagtatgagtacaataatatatagaataccgttggtatttgatcatctaaaaaaaaaaaaaaaaaagcggcc

SEQ ID NO: 32352 - DNA, 523 bp, Zea mays
  Clone ID: MRT4577_12951C.1
ataaaaaaaaaaaaaaaaaaaaaaaaaaaaaaaaaaaaaaaaaaaaaaaacaccaaacaaaaaaaaaaaaaaaaagtttttacttttggccctggccccgcttaaggggctaatgtgtgagttttgcatctatactgtgcccctggtcgggcgttgcgtgcttgaggtttccaatggccccttttcgcgctttggggttacaattttactggtccgctgggctctgcattttccagcgtggggaaatccctgaaaccttcgccatttcctacttttttcggctttgtcccccttttccccttttggccgttttggggtaaaaggggaagaaggcgctcgccttttcccccttttaacatttttgaatgggtgaaatgggccacgccccgtgcccctgtcttttaacccttaagggcgggggggttgtgggctacgggcccgttacacttttccactggcctaagccctaggccccgctcttttttcctttttttttttccttcgtggcgccgtttttcccctt

SEQ ID NO: 32353 - DNA, 338 bp, Zea mays
  unsure (1)..(338): unsure at all n locations
  Clone ID: MRT4577_129520C.1
ggcctcgccatgaggctcttcctgtcgctcccggtcctggtggtggttctgtcgatcgtcttggaaggcccagccccagcgcaggggactccagacgtctccagtgccttggataagctgaaggagtttggaaacacactggaggacaagctcgggaactcatcagcggcatcaaacagagtgaactttctgccaagatgcgggagtggttttcagagacatctcagacagtgaangcagaactcaagattgactcatgaggacctgaagggtgacatccaggaggggctctgaatttccacacccagcgcgtttgcggccgcgactagtgactcgtc

SEQ ID NO: 32354 - DNA, 249 bp, Zea mays
  Clone ID: MRT4577_129521C.1
ggaggaccggccggaaagtcttgagcttttttataggaagaataaaatgcgtacagaagactcgtgttggtatgggagaatgatctatgtttctagagggttgggaggagaaaatagcttggtgcggaaatggacggggttgtacatgttattggtagagttgcccctccagcttcaagaaattgtaaaatgggcaactttgtagcatagcacactactggtacgtacttggccccatccaatgtacat

SEQ ID NO: 32355 - DNA, 297 bp, Zea mays
  Clone ID: MRT4577_129522C.1
ttcctccatagcgacggagcgaggcgttccgaagggggctgttcaagagcttctaggtttgctcccctacaggatggagggcgacctccccacgtgctgtaacgccatggctgttgacctgggctccggccgcaacatggggcatctccctgtaagtgtgccggcagatggcccggaacggcgtcaccatcatgttgacagacagagaccacacgaggggcgcagcagccgtggaaaaccctagaggcctggagctttgcgatgtccttttacaccgactggacattaccgacgctg

SEQ ID NO: 32356 - DNA, 135 bp, Zea mays
  Clone ID: MRT4577_129523C.1
atttcggcacgaggctcaattggtccggcacgggtggattcttcgtaagacgtcgagtcgagggagataatgatgctgtaccaacccacggttccggttatcgatgagatgagatggctattgtcgaggctccac

SEQ ID NO: 32357 - DNA, 446 bp, Zea mays
  unsure (1)..(446): unsure at all n locations
  Clone ID: MRT4577_129524C.1
ccctatatgaccaactagttttaacttttgcttaacactcccaaccaaatcacccacacacgcataacctatcataaatccaccaaacgagttgcacccacacacaacacgccctcaaaaccaacggttcaaattgctggataaccctcctctctcttactcacttaaatccaattgctaatattatttggatcatcgttccgccatcattcctcacacgcaaagtaacctcctgtctcctcccctcctcctgccccgccatccctcccctacctcgcgctgccccctccctgggaccgtagagttagcaccgatattagactagtattgaaagaagaagagtcatacattgacccaaactctcacacacacctgtgctacttattatctaaatcaccggntacaagacatactacgacccaaatgcactacagcaagcctttaat

SEQ ID NO: 32358 - DNA, 356 bp, Zea mays
  Clone ID: MRT4577_129525C.1
gtcacgcgtcccgtacggaggatcttgagtctgtgaatccgatcataacaacgcggttacgtcgctattgcgccggctcaccatcgagatccttctactagctaattcactaccaataactgctttcaatgcaagttcctaccacacatgaagaatctcatgctctgatatcacactcacacaactagatggagctactaggttatacatatatgtcgaaccacgggcactaggattcagacctattgtatcttattgagccctttatggcacatgcagcatcctgcatgactaatcatctgtaccactttgctacacaatcttgtggactttacaggcgtactccacattgcatt

SEQ ID NO: 32359 - DNA, 185 bp, Zea mays
  Clone ID: MRT4577_129526C.1
ccgactcgacccactcgtccgatcgcacatcatgaccaaacaccctacattactcgcacacaaacttacataacactcagggcatcctttcacatataacactcgcacacatattcagcaacctcaatccacacccaacaataactgctcaaaaaaaaacttataaacattaacactaactcacc

SEQ ID NO: 32360 - DNA, 375 bp, Zea mays
  Clone ID: MRT4577_129527C.1
tcgcccactcgttctcccactcgttctcggacgcgtgggaaaaagaaaaaaacaacaaaataaagctttaaaggctaaacttaaatggtaaaaaaaaaaaaaacaaaagatatcaaataaaagcgggaaaagtctttgcaaattattctaggcttgcaaacttgacttggtcaagaagtttcaatgatgtgtcctaaattaattaatacgtacttatatttataaaaactggagtgtaaaaaccagtttgttgcaaagcctaatttgatactggtataaattgtattttcagattggaatgtttaagaaaatgaccttccccaattgccttacaaaaaatttgcaaaacctaaatgcaaattggaacgccccttt

SEQ ID NO: 32361 - DNA, 455 bp, Zea mays
  Clone ID: MRT4577_129528C.1
ccccccccccccccccccccccccccggccaccttttttttcttttgtttctgtttttagtttttgtttttttttttagtttttttttttttttgttttttttttttttaaatgttttttgtttcagaatgtttcttttttcttatataaaaaaaattttcttttcagaacggaaaccaaaaaggtgggggacaacaaaaccagcgggggggaaacaaaacggaggcccggccccaaaacaaaaaaacagccctagaagaaaaaaacccgccccgaaaaaaaaaaacaagagaggacgggggccaggagaacaaggctctccccccaaacaaaagaaaggcaagagaagaaaggaaggggggtgggccgccaaaagaccccaccaaggccggaggaccagacccccccgcaccgagaaggcaaaggacttccgacgaggaaaagagcggccgggg

SEQ ID NO: 32362 - DNA, 244 bp, Zea mays
  unsure (1)..(244): unsure at all n locations
  Clone ID: MRT4577_129529C.1
gccggccgggccgggacctctcacctctcacctacagtctcttcttaactaactacatcccatcccgtgccattctgcgaaaggtcttttacttcaaacctcctcctcctccaactcctcctcctttctctttactcgctctctttcctctcctctcctcataattctccttccactcccgatcgacattcctcccatttacgcctcacatcnggacgacacnntttcagtcgaggaacccatt

SEQ ID NO: 32363 - DNA, 250 bp, Zea mays
  Clone ID: MRT4577_12952C.1
aaaacgatgaaacttcatttaatctgacaagggaagtgttcaacgacattctgttttattctcctccatgaaactcttccttattctatcggcccactccatagtccatacgccagccaaaattaaataaaatccattcattttccctggtacagatgatgatgaacaccactcgggttgctttctttcgacgtagaatcagaacccatggaaatcagggggggagttcattcaggatgatgatgagttc

SEQ ID NO: 32364 - DNA, 240 bp, Zea mays
  unsure (1)..(240): unsure at all n locations
  Clone ID: MRT4577_129530C.1
ggtcttcctggtgagaggcggcgccctgcgctgctccggtgcgaggatgcagcagcatttgtcgtcccacaggcgcagacaccttggggatcacnngagctggctcggccaacattgaggggggctctgtggaagctgtgctcttggtgcccgtgctgatccagancgagtcgtctgctacgggagagggcgcgctggccctatccttgggtggtcgtggcgggggcgtcgagtcgtgtc

SEQ ID NO: 32365 - DNA, 686 bp, Zea mays
  Clone ID: MRT4577_129531C.1
ttttttttttttttttgaaacgaacttatccctgcggattttttttaaaaaaattgtagatacaattatactatcgaataaagaaaatactgtcaaagaatcctttttgaattagtagcttgctgcagtggactccaagccaagtaaggtagctataggcttattaagctgcttcctccttcacatgaaacgtcatggtcgctgcaccaacgcggctgcttcgtcctcccgatgctggcagataaggacccggcccactcagcctgcacgtttaataattcatccacacgaaacgaatcagttgactgtaatagcgtcatcgatctgtagcttacatgattataattaaaaaatggcaggtagtggtttattaatgagagagagagagagagagtttggtcaaaattcatgtatcccaaaatctagattggaaaacatgtgatcatgcatgttacggagtagtaagaaacattgtagaaagcgtgacgcacgcgcgcgcgccaactgtgtctgcgttttttcggtccaaactaattaaccaaccaaatcagatgtgatgagaacaaaatattcctttgtgaaaaaagaacagctggaggcctggtgtgcggcagtataattgcggtcgtcgatcgattcggtaggtgctgggcaatcgaccgcgtgcaaaagctagctagctatcg

SEQ ID NO: 32366 - DNA, 248 bp, Zea mays
  Clone ID: MRT4577_129532C.1
tcgcatcatccctgtctactgcactgtccctattgccgcgtacgttttcaagaaggctgatacttatgaggagaagaagctgttaggagtgactactctcgatgacgccgtcgctaaaactttttatgctggcaaagccgttcagccagtataccgttgtgtttacccctgttccccgatgccatcgcggttatcactattctgcctctattatggcactggtctcatgcgtgctattaattgtccct

SEQ ID NO: 32367 - DNA, 379 bp, Zea mays
  Clone ID: MRT4577_129533C.1
aaataaatataaagggttgtttgacaactttattttctcaagggaaaccttttttttcaagagaaaatgaattaaattcccttgaaaaaataaaaccctttaaaaaaaataagggggggaaactagccctattaaaaaatttatgccaaatgcaacatcgggttccaccattttcctttttacaaaaaactactggtccgggttttcggggaaactccctttcacggggttgtaaaaaaaccggggttaattagcccccggtgcatgcatgcctacggggttgggctggcccacatgatcataacaattaattaattaattaaggggaaaaccccaaacggggaggatccatgcgtcccccccgccccaatatgtttta

SEQ ID NO: 32368 - DNA, 380 bp, Zea mays
  unsure (1)..(380): unsure at all n locations
  Clone ID: MRT4577_129534C.1
aacgttccattttaattaaatacaatcagaccagattctgcttctgcaacagcaggccactaccggtaatgtggacctttttgcctgcttggccccaaaacaggtggggggggggggtatactaaaanntcacatcaatntttgtccacatgcaaggaaatcaacttttttatctcgccctagctgaggctctcaatatgtacataccagtgatcctataaacaacactgggtgtttattctagagccagtcaacagcgtctcttgctaatacacatcacactaattgttgggatactaacaagtgatgctctgcctgttgttggatgcacattaccttatctgaattgcagcttcccctctgaattactgtaaacaaaa

SEQ ID NO: 32369 - DNA, 515 bp, Zea mays
  unsure (1)..(515): unsure at all n locations
  Clone ID: MRT4577_129535C.1
cccctcttctctccccccccccccccccctttacaaacattaaaatttttttcccttgaatttaacgagggattcccccaattcttccacagggtttaatttgtttataaggaaaagggaactaacccttttagggaaaaaaccaaagggttttattggaaaaaattaaaaaccccccctttgcccaaattaatttttacccaaaaatttccaaagaaaagggattccaaaattatttacaccctttagaacaacttaaagtaaacttattagtaaacccccccaattttaggcttaattaaatccaccccttttttattaaaaggcccattgtttttccttgggaatttctttttcttcctaaggnggaaaattcttttttaatgttaaaggttttgaaaattttttttggggttttgcctttaatcatgcaaaaaacattttaacaggtaaggtcaaccaaccttttatgttaaaatattttgcacccaaaataaggtcaaaaagcggggcct

SEQ ID NO: 32370 - DNA, 372 bp, Zea mays
  Clone ID: MRT4577_129536C.1
ttggacctttgggctgatttatgtgcttgctaaaagacctaccgttgtagtaagactaagacatcaaaggtagagaggagcccacgcgtgggcgaaaccgacgagaaggcaataacgaaaactggactagaataccccgagttaagtggcttttagaatcggaccgccgtcgtcgagggctaagaccataaaactcgggaagtgctcctacagatccggtgggtcgtgagcgttacacaatcgtctaaagatcaaaaagtcataagaaagtacaacgtcaggagacggtgttctagaacggctagtcggtgggagtcgtcgttgtcgttgttacggagtagtaaaacctaataatacaagtcacggaagtat

SEQ ID NO: 32371 - DNA, 1060 bp, Zea mays
  Clone ID: MRT4577_129537C.1
attgggtacctcgaggccggccgggactggccgggactcgcctgcgctcttctctctcgtggcgacgactgggtgaccgccggcgccccaggcctgaggcctccatcttcgggcccttcactggctacgagcaccaccaggtgtactgggtccgatccatctgagtctgatcttttgtttctcgggttcctggcagaggattatggattggctggggcagaagcgcgcggagatgctgatgcaggtgctgctggtggcgtctgctgtggcggcgttcctggtgggctacgtgcgcgcggacttccagctcatgctgctcgtctacgccggcggcgtcgtgctcacagcgctcgtcaccgtccccaactggcccttcttcaaccgtaacccgctcaagtggctcgacgctgccgaggccgagcgccacccgcgcccccaggtcagcgccggtgcggcagcagggggaaagaagaagtccgggaagaacaagtaatcgatctttcggagcgatatgtgttctttgtcgatttgactcaaacctatttaaagttttatttcgcagaactaatcaatgataaaagagctagagcctaggtgttcgacagttttggttggtacttcaaaatatgcagttgtagatgaaatttagcttgcaatcttgcacgctacttatcggttaaaaaaaaaaaaaaaaaaaaaaaaaaaaaaaaaaaaaaaaaaaaaaaaaaaaaaaaaaaaaaaaaaaaaaaaaaaaaaaaaaaaaaaaaaaaaaaaaaaaaaaaaaaaaaaaaacccaaaaaaaaaaaaggggggggcccctttttaaaaaaccaattttttccccccgggttttgaaaattaattttttttttttgggcccccaaaaaaaaaaaacggggcccggtttttaaaaacggggggggggaaaaaaccccggggtcccccaattttaaccctttgaaaaaaaacccctttttcccagggggggtaaaaaaaaaaagggccccccccaatccccttttcaaaaatttgcccccccttttagggaaaagggcccccc

SEQ ID NO: 32372 - DNA, 265 bp, Zea mays
  Clone ID: MRT4577_129538C.1
agacaaaacatggctgtgaatgtgagcaccatttggtccgtgatgcaagcccaagttgggatggttgtggccgtgtccttcttggtgagccgcgcatggtgccgtccttccaaagtcccccctggcaagaacatcacggccacctatggcaaggactggttagacgcctaagcaacatggtatggcaagccgacgggtgccggtcccgacgacaatggtggcggctgcgggtacaaagacgtgaacaagcccccctttcatagca

SEQ ID NO: 32373 - DNA, 568 bp, Zea mays
  Clone ID: MRT4577_129539C.1
tcgaggggccggccggcacgactgatgatagtgcgaactcatcccaccagtgcgagactagacatcttatactacgtgctgctgatcaacgaactgggcctcttgcactcggacgcggcgctgctgaccaacgacaaccatgaaggcgatggtcgactccttctggcgcagagagggcacgtgcaacaccaagtatcgccaactccatgctcaacatgtacgcgtatcgaggtgctcacgaggacgcaaggagagatcacgcgtaactgcacggccatcaaccctgctaatgccgccgccgacgccgcccttgcccgtcacacacgttcatcgaaatccactggagaggctacaatgtaaccatatctaccgtgtgtctgcagtgtagtggcgtgtggaatgacatatacctattgaccaccctactatggacgaggacacatacaggtaactcatgatcacaactacatgctcggcggggaagcgatgaacctgaacctggtgattaacccggacctggaggcgagtgacctcgcgatatccttcgagacggacatctggttctgta

SEQ ID NO: 32374 - DNA, 280 bp, Zea mays
  Clone ID: MRT4577_12953C.1
atagttctcacttccaaatgcttcttttcattgtaccaccaaaagtagtagagttcaaaaacgcttagagggtgtttggtttatagggactaatggttatttacatcattttatttcattttagtctataaattgtcaaatatagaaactaaaatagagttttagtttctatatttggcaattttggaactaaaatggtataaaatgtagagactaaaaattagtctctagaatccaaacacccctttaatccaaaattggtttggattcagcatatggc

SEQ ID NO: 32375 - DNA, 646 bp, Zea mays
  Clone ID: MRT4577_129540C.1
ccggccgggactgaacgagcactcgcctgcgctcttctctctctcgtggcgacgactgggtgaccgccggcgccccaggcctgaggcctccatcttcgggcccttcactggctacgagcaccaccagatacttgtaatcggatctgatccaatttcaggtgtactgggtccgatccatctgagtctgatcttttgtttctcgggttcctggcagaggattatggattggctggggcagaagcgcgcggagatgctgatgcaggtgctgctggcggcgtcgtgctcacagcgctcgtcaccgtccccaactggcccttcttcaaccgtaacccgctcaagtggctcgacgctgccgaggccgagcgccacccgcgcccccaggtcagcgccggtgcggcagcagggggaaaaaagaagtccgggaagaacaagtaattgatctttcggagcgatatgtgttctttgtcgatttgactcaaacctatttaaagttttatttcgcagaactaatcaatgataaaagagctagagcctagaggtgttcgacagttttggttggtacttaaaaatatgcagttgtgcctgaaatttagcttgcaatcttgcacgctacttaaaaaaagaaaaaaaaaaaaaaaaagcggcc

SEQ ID NO: 32376 - DNA, 1183 bp, Zea mays
  Clone ID: MRT4577_129541C.1
cgacacttgcctgcgctcttgtctctttcctggcgaccactgggtgactgccggggcgccatggctgaggctgcatcttcaggcccttcactggctacgagcaccacctgaggattatggattgactggggcagaagcgcgccggtactcctgggggcgattgggtccctcgaggccggccgggtggggtggttctactgaacgagcactcgcctgcgctcttctctctctcgtggcgacgactgggtgaccgccggcgccccaggcctgaggcctccatcttcgggcccttcactggctacgagcaccacctgaggattatggattggctggggcagaagcgcgcggagatgctgatgcaggtgctgctggtggcgtctgctgtggcggcgttcctggtgggctacgtgcgcgcggacttccagctcatgctgctcgtctacgccggcggcgtcgtgctcacagcgctcgtcaccgtccccaactggcccttcttcaaccgtaacccgcttaagtggctcgacgctgccgaggccgagcgccacccgcgcccccaggtcagcgccggtgcggcagcagggggaaagaagaagtccgggaagaacaagtaatcgatctttcggagcgatatgtgttctttgtcgatttgactcaaacctatttaaagttttatttcgcagaactaatcaatgataaaagagctagaggtgttcgacagttttggttggtacttaaaaatatgcagttgtagatgaaatttagcttgcaatcttgcacgctacttatcagttataaaaaaaaaaaaaaaaaatcagtgttcttttttttctcttcccgacatcaacgagggacaagtgcaaggtctcttccctcaccttcactgtcacccgtgtggacaagggtcttctcgtctagatctctcacgccgtcagccccaagagcaacaccgttggagagcacttcatccccaagtctctgctcttccagtccgaggttcccaacgccgagttccatatgtacaacggacccaaggacttcgagttcactcacagctcttatattgcctcccttttactttctgtgtctttatgcatgcatgtttagacaggtgtgcttacattagactattcttttgaatatacttacctaaaccccaaagaaaataaaaaaaaaccccgcggcc

SEQ ID NO: 32377 - DNA, 195 bp, Zea mays
  Clone ID: MRT4577_129542C.1
atatagcggatgcacacgtcgttattacatcatttattcatacgcacgcgtatctgtccgaagagctcggtagatacacacatgcagcagatcgagtacagcaacaccacaacggaacacgcatacacgggcttccgcgatccaagacgtacgtactgaacagaaaaaaggacgcccactctgcctgtcagtggc

SEQ ID NO: 32378 - DNA, 471 bp, Zea mays
  Clone ID: MRT4577_129543C.1
ccagcggccggcccgacgggcgcaactttactggggagtgatcgtggtgccgagattgcatacggctgaggcatggaccatgagtatggacatcagaaacgtgaatgccgcaacctgtgccacggagcaggacattttgattggtgaggtgatcagactcaaagcgctgttagacagcacacacagcggcctttggaagggacacggatcaccgggtcacatggaacacggggctgtttgccccttgagctggggcctccgggcccccgcagccgtgccttccaccttatgaacaggtggaagcactggctgcgctggttcgctccgccctgccatggcgcatcttgcccatgctgccttgtcaccgtttgtccttgccctccgagagcccgctgggtctgctagcgccgcgtgtggtctgtcatctcacctttcgttatgcctgcctgggcacctgctgcgcgtttcctt

SEQ ID NO: 32379 - DNA, 318 bp, Zea mays
  Clone ID: MRT4577_129544C.1
ggcccaaaaaaagcccaaggaacattttagggggaagggggtttccgggggcttttttattattactaacccagcccccgggccttttaaaatgttttgaccttattcttgccaaaaaactaataacggtaggcactttggcggtgccctaagggaattttttgtgaaaataaaacccagggttgaccccaaaaaataaaggggcccaaaattttgtttaatattggaaaagggggttggaaggttaaaaaacacttttttttccccccaaaaattttataaacaaggggcaaagaaagggagggaaaccgtttttgg

SEQ ID NO: 32380 - DNA, 160 bp, Zea mays
  Clone ID: MRT4577_129545C.1
acactatagaaatctatgacagtctatagtagcatcgcgtgcgcacgtacgtatgcttgaaagctgccgaccttttttttttttttttttttaaaattttttattttgtttattgggggcaaaacatgtgctcacatgacaaccaaaacgaagtacaact

SEQ ID NO: 32381 - DNA, 580 bp, Zea mays
  Clone ID: MRT4577_129546C.1
gcacgcctcttaccgattgacgctccgactccttacccttcctctctgcgcccgccgacggctcactaccctcgcggggctcgggtactgtcccctatcggctttctcgctcaggagctgaggcgccgtgggctctgcgggggggacgccggcactgaggggcgcgcggagacgcagcagtgtaaggcacctctgctccatctggtcgatagtgcatgatgctggtcatatgacaagaacattaccgagtggccaggggggactaaggactgagatcgaagcgattgaagcatggggccatgctggcttggatgctctgaactgtccaacctataggacaagttcaggtacctatgcagatctgttcactgccagcgcccagccttgagaagcagggccccaaaatcctagatctatggaagagttgatgtattgccccgacaatgcccaccagagggagcttctgtgctggcccccttcaccgggaacattgcgtgaagattcacagatgggcctgacgacaaggaatcgtgcactgtcggagctcatacacttggcgtgcaagacagacgtagtggct

SEQ ID NO: 32382 - DNA, 477 bp, Zea mays
  unsure (1)..(477): unsure at all n locations
  Clone ID: MRT4577_129547C.1
aacatagccgggtagagatatcggttttttttanttcggaaaaaataacacccactcaattccaaaagaaaattttacacgaagattttaagtgaactcaggaagggacatctttccctgcgagcaggaaatcgaccagggggggcaaggttttcctggagggtccaccatcctccaccggttggcgagctttctccttccacactatcgacttcactctcattggctttcccccctctccggcgattggctcgcgcacgagccgggccacctnctccctcctcacataattggggatctccatcccgatcccccatttgtcgcacacgtaccggcagttcgtcgggtgctcagcgaagaaggggcagcagagcattgggacgccggcgcatacgctcttcagcgtcgagttccacccgcagtgcgtcagaaagaggccgacngacgggtgcgagagcaccagctcttgcgggcacc

SEQ ID NO: 32383 - DNA, 932 bp, Zea mays
  Clone ID: MRT4577_129548C.1
ctcgacgaatgcgtgacgccgacgtgggtttgcctctgtacttctggaatcggaaagaggtgtgtcgtttcccacctcgtcgcgggcgggggcggtgcgtgtccaattctaaccccttcctatcgaccatcattctcccctctgcctgcgtcgtcctcgccgccatggaccttgcggacgggcgagacgacgccctcaatggaggcgtcggcgtcggcgtcggcgtggaggagacaaggaggaggaggaaggtggagctggtgcaggaggccatccgtggcttcctggaggagaagaggagcgatggccagggaggaggagaggagcgcttgacggccaggctcagggaggaggagcaggagctcctgttgtcgttgctctccaagttgggcgagctaaaaaccgaccccgatccagacatcttggaagaaccgagctcctcccgcccggaccacggccaccagcctgcaggaggaggcgaacgcagcaaggaggtggagccagctgacatcgccaaggacctgagcaagatcaagaggcagaacacgatcacccacctcctcctcggcgccgtcatcgtcctgaccgccgtgtggcaggtcaacgaggtgtcgttcctcctctggctgcagagcaagctgagcaaccccttcaagtccctcggggacatggtcaaggcctccctcctcaagcttagagggaggaggccggtgctcgagtcgtcgccgctgccgctggccggcgtccccgacgtcagccgggctgatctgccgacgcttgtcatcggcggcaccgagcacgtaggtaaatgagctagctgtgtggtgatccgaggattgattaaaatgtccagcatctgtttgttgcgaataatttatgaactgggattgattcttggaaaaagaactgacacacccacatttccgggagat

SEQ ID NO: 32384 - DNA, 809 bp, Zea mays
  unsure (1)..(809): unsure at all n locations
  Clone ID: MRT4577_129549C.1
gtacatacacttccctccactccaattccctctctctggcgacacgatggagagggcgggcctgcactactggcctgctctcgcggggattcttcccaacaagcaggtggaacagctgttcatccaggggggcttcctcgatgacccgtcaggtaaggcttccttcgatccatcccggcggcctgcaccaactgcatgcaaacgtcgtctgaatccgttccactcctcgcctcctccaagacatgtacatatagacgacttgactccatgcgccagctagctacacaccaccgcgccgtggtttttccagtttgcccccacctgtagtttcttttccctctcctgccttccttggttctgcaatgtctgcgaaaactatcaggagaacagaaacagaacaaatgacgctgaagaatgcgcagcatagactacaactgtgccaatgaagaaaacatggttcagatgtgcgatggccctagtaattttgagttagctatttgtttaccccaatatataagatgataatcacaaggccgaaaaataactcaggcagcggtaaaaatcgtccgttcattccaagtatgtttttttacgtaacatagcaaattgggatgggaacagtaagtcatgggctgtgcttagctttctgctccatctgactagcgtccaactccctccatcgcgaggagttaaggacataacttctcctatagcctcaggtatcgttacaagataccgtagctagaaanaagatagtggacgacccaacatttatagtgcaatcggagaatgtttctgtcagcacatga

SEQ ID NO: 32385 - DNA, 572 bp, Zea mays
  Clone ID: MRT4577_12954C.1
aaccaattctatacaaaccatccttagctgcgagctttgtagccttccttcgtgtcgagcatggacgttgtctgccatctgacgaatgatcataggatgaggtcatcaagaatgctgactacattgtcacccgacccaatgggtatccttggtgctgatgagttcactggcaccatagagaagcgcctttacagcatgaaaggggaaaacgtcatggagatacagccgggccctctgttatgttgctattgtggtgccttggtgctcttcacgcatcagcggtgtgatcttcttcgaggagaccctgtaccagaagaccaaggatgggaagagcttacagctgattttctcaaggagggaggcgaggctccttgacgagaaggttgacaagggcaccattgaagtgtgctgggactgataaggtgaccactatccacaggcatgacgaccttgtgaaggggtgcgccaaggactacaaggtaggctgcctctatgacaaacggcgcgcgtgtctcaagatagggcctaatgagccatcacagtgttgacatagacctgaacgctcagggtga

SEQ ID NO: 32386 - DNA, 656 bp, Zea mays
  Clone ID: MRT4577_129550C.1
cattgggtacctcgaggccggccgggacccactcctccttacactttcaacaacttctttaattctcttcatcctaattccccatcccaagtttagtcacttacactcaagatgattgccaccattttcctcgctgcctttgctcttgctaccggtgccgctgcgtctcctgttgaggccaatgtcaacgctgcgactgctgttgccacccaagctactgcggctgccgggcaagctggcgctcagggtcaagttggggctcaggctcaagtcggtgctaacgccaacttgcttacaccgtacggtggttacccttacggcggctacccttacggcggttacccctacggtggataccgttacggcggctacccctacggcggctacccttacggctcttacccttacggctcttacccttacggcgcttacccttaaactgatgtagctgtgtagggcacacctactggccgatcattgcaatgcgctggacggaccactgtgtggattctcctagctttatctcttatcgcctcttaatgttttagcttagcttacctcgcctgctcacgcaattagtcatgaccacaatcatccccccttcggggaccaaaaaaaaaaaaaaaaaaactaaaaaaaaaaaaaaaaaagcggcc

SEQ ID NO: 32387 - DNA, 590 bp, Zea mays
  unsure (1)..(590): unsure at all n locations
  Clone ID: MRT4577_129551C.1
cccggtntcgcccacgcgtccgctcggcaggacggcgtgccgcggcgcaggcgcaacagcagctccctccgcgctccgccctccctgctcgcaataccagcagcagcagcaccgcgccaacgaggcttccctccggtgtgtgtgcgcgcgcgctcgtgatggcagcagccccggcggcgtcgtcgtccacgtcggggtcgccggccgccggcgggccgcggtcgcggttcggcgacacgacgctgacgaaggtgttcgtgggcgggctggcgtgggagacgccctcggaggggctccggcagcacttcgagcggtacggcgacatcctggaggccgtcgtcatcacggaccgcctcactggccgctccaagggctacggattcgtgacgttccgagagccggaggcggcgcggcgcgcggtgcatgacccgaacccgacgatcgccgggcggngcgccaactgcaacattgcgtcgttggggccgncgngccccgcccagcctggagttgcaggcaggggtggtccctacaccgtgggaccctaccaattgtaggtgctgtagttcgtttccagggtgtcgggcttttct

SEQ ID NO: 32388 - DNA, 229 bp, Zea mays
  Clone ID: MRT4577_129552C.1
tctctctacacccctccgagtcgaggtcggcgcctttaccgcctccccttccccgtctccggtgcccaaggccaggccaacagttttgaggtggcaatggcggaccacgctaaccaacccactgtccttcctaagctaggtggccagttccacctcacatccaccttctctgaacgcgtacggccccctaacatactgcccttctttcccctgttatcaaaggacattt

SEQ ID NO: 32389 - DNA, 163 bp, Zea mays
  Clone ID: MRT4577_129553C.1
aattcggcacgagcggcaatctcgcatctcgctcgctcccctgagcggcagccagagcgagcgagcgcgcacacagacaactcatcctctcccctctgtctctcacacacacacatccatcatcccatccctgcgacgcgcgaaccacgggcccaccgacgat

SEQ ID NO: 32390 - DNA, 475 bp, Zea mays
  Clone ID: MRT4577_129554C.1
ccggccgggccccgcagtcgatccgccccagatcctgccccgactcctcgccagcacaatccatgcgctctctactaaccaggtacgcgtcgatcctgtcattgataaatcagtacaactccatgccactaaggcagggtattcaactattcatcagtttctcagttacgcaaaataattctcagctatgtaaaattattattgtcttctctgactttcgtatgtcatgtgtacttggaatcttaggtggacttgtatagctggttattgaaagctaaaatctgttagatggcacaacacttggattagttcatattcttagtgatgcaatttatcctattttgttgttcaatgaagttgcacaacttattgtgctggttgtttcattgctacggttagctactgatggtaatttatctaatattttatcaaatgacggacttagaataaaaaaaaaaaaaaaaaaggggcggcc

SEQ ID NO: 32391 - DNA, 2849 bp, Zea mays
  Clone ID: MRT4577_129555C.1
ctattagtagtagtgccgctgcccgctggtgctgggagctcatcatcattcgtcggtagcaggaaggaggcggcgtggaaggggaggcagatgcgggaggcccaccgcagggtcgtcgcaccagatggacacgccggataggccccgcgccgccgccgccgccgggttcgaggattctcctgtcttcaatttcatcaacaatctctcgcctataccaccacctaaacctttagactcagcacataatgtgcagctattcaagtcatcagacttggcacctgtttcttcgatctttgcctcaccacatgttaatccagtgaaggaaactaaagttttgatcagggatgaatctgttcaccttcctcaagaattgcactcgcctagcagtgtcaggactcgaatagacacctcaggctcttttagaatgatcagatgcaaagacattgtgtcggacaattgcaatatcacttgtcaactaaacgaggcatctattgattcttctgatcatacatcaaactctacaggccaattgactcaatccatacaggatgctgctggcagtatggaaagcgataaggatcaatgcgatgccaataaaacagaccttaccatatcccaggagtgcacaggcctagaaggtatgaaccttgatgagagtggcccagacaaaatggattcgtcacattctgggattgttgttcatgaaaaccagctatctgaacaaaacaatgacgaacctgcagcatataatgagggttacattattacacaccaatcaactagtgatatgctcactttagccataccatctggaacagaaacacaaccagtgaatgatacacaaatggctgataacccctactcttgtgaatccttgttggatgatcagtcaagtggatattgcacccagaattctgtgcatgaaccccatttgtactggactggggcagttgaagggtctgcagtatcctatactccccaaacactccctggtgctttgcaaagtcagctgatgccatgtaacaagctcagtgaaccaaaagattacgtgcctactgagcaaaatgccttgtcacagcacttacgtggcatgcgtaggcgcagccttttcaatgaaaaggctggaattagtaataaaggtgtagacaaaacttcggatcatcatcctgtaaattcaactacccccaaatgcaaaactatttctggtgacaactcaaagcctctaagaacccctccatgcgcattacctggtattggcttgcacttgaatgcccttgctacaatacctaaagagaaaatagtccctcgagagattcagtctactataaatgaatcaagtaacttgataggccctgctggatcttctccagcaccttttgagcaaaacattataaatgatgatttcactcaaacaactgatgttgcaactgccgaagcttctagtcagggtagtcccaagaagaaaaggcataagtttgacaatggtgatggcacttcatgcaagcgttgtagttgtaagaagtcaaaatgcctgaaactttactgtgagtgttttgctgctggagtctattgttctgagccttgttcgtgtatcggctgtcagaacaaccagagtcatatggaaacagttctgtctacacggcaacagattgaatctcgcaatccattagcatttgctcctaaagtcattcatacatctgagcctggtatggacttaggggacttttccaataaaactcctgcttcagctcgtcacaaaaggggatgcaattgcaagaagtcgtcgtgtctaaaaaaatactgtgaatgttttcagggcggcgtgggatgctccgtaagttgcagatgcgagggctgtaagaatgcttttggaaaacgggagggggcttctgtgttaggcataggggaacctaaacagggattggaagaaaaggatgtttgtgtgaaagaagaaaaaagtgaaatcgataaacagcttgttgtctaccagactactgacgctgctcctgctgaaaatgtactgaccacaccttccatggtggagtgcagacccttggcttgtcttccacccgcaagctccaagaaaagctccaaaaaaccacggtcttcaacaaagctcacaggacatccttctcggccgtgcaacttacaagctcctccaaagaccgacgttgtgctctccccattcgaaaactacgcggaaatggtcctcggtgatagcacatcagatatcctgaagggaaattcatctcctcatacttctgttaaagttgtgtcaccgaataagaagcgaatctctcccccacggatgggtatcgggctatctccaatctgtaggagtggcaggaagctgattctcaagtccatcccttctttcccttcccttggtggtgatgtaaacaacgaggatccgaaggccaagctcccagcgccttgaatttatcatgttttgtgtcactcgtggcccttcccgttggttctcgaaatcgcccacgcgctgactgcaccagactgtttctaccaccataccatcagatagtggatggacaaccaagcgtgcaccgtttcatcatttgtgtaattgtgtttgcttcgattaataattattcacgtactgctataataacccactgtgatggcagaattctacctacctcccagaaccaccagtggcatttggtttgctggtaagttatgtctcggctcaaggacgttgctgtgttgcctgtgcctgtatgtctgtataatttatgttcattatccgggatcaagatgtggaacctctatgtacctgatggcagaactgttaagacatattttattttatttttatctgaggttaaactgtg

SEQ ID NO: 32392 - DNA, 437 bp, Zea mays
  Clone ID: MRT4577_129556C.1
cggacgcgtgggttttggagttgaaattcttgaatttggagttagaattctattaagatcatgtgttccacttgctaagtatttgatagatgtgaatcttgtggtaaaaaaacacatgatcagagtactactttcacatctaggcgcccctctaatcctctccgggtttgtgactcccaaactagcccgtaggggattagaggggcaggtcctctaatcccgtccggttttgtgactctcaaactagcccctaagaaaaaaaatggtatccacaaatatgtgcacaataatactgcaaacaaggcaaaagcaactccctccagatatagaactgtagaaaaatgtgacacgatcaaattgagtctctaatctttccttatacatttgacaaggaaagaaagtgttgcatcgtatcaaggggggcccaaaaaatcaaa

SEQ ID NO: 32393 - DNA, 3661 bp, Zea mays
  unsure (1)..(3661): unsure at all n locations
  Clone ID: MRT4577_129557C.1
ctcgcctgcggcagcgcccccagcgtccgcggactcgtgggcgctcgtcactcgtcagtactcagtggaggaggcggcggcggggagggagacagatgcgggaggcccaccgcggggtcgccggaccagatggacacgccggataggccccgcgccggcgccggcgccgggttcgaggattctcctgtgttcaatttcatcaacaatctctcgcctataccaccacctaaacctttagactcagcacataatgtgcagctattcaagtcatcagatttggcacctgtttcttcgatctttgcctcaccacatgttaatccaacaaagggaactaaagttctgatcagggacgaatctgttcagcttcctcatgaattgcactcacctagcagtgtcagaactcggataggcacctcaggctcttttagaatgatcagatgcaaagacattgtgccagagaattgtaatatcacttgtcaactaaacgaggcatctattgattcttcagatcatacatcaagctctacaggccaattgactcaatccataaaagatgctgctggcagtatggaaagcgataaggatcaatgcgctggtggtaaaatagaccttaccatgtcccaggagtgcacaggcctagaaggtatgaaccttgatgagagtagcccagacagaatggattcatcacattctgggatagttgttcatgaaaaccagctatctgaacaaaacaatgatgaacctgcggcatataatggggtttacatgattacacaccaatcaagtagtgatatgctgactttagccgtaccatctggaacagaagcacaaccaatgaatgatacacaaaaggctgataatccctacccttgtgaatccttgttggatgttcagtcaagtggaaattgcacccaaaattctgtgcatgaaccccatctgtactggaacggggcagttgaaggggctgcagtagcttatactccccaagcacttcctggtgctttgcaaagtcagttgatgccatgtaacaagctcaatgagccaaaagattacatgcctactgagcaaaatgctttgtcacagcatttacgtggcatgcgtaggcgcagccttttcaatgaaaaggctgggcttagtaataaaggtgtagacaaagcttcagatcatcatcctgtaaattcaactacccccaaatgcaaaaccatttctggtgacaactcaaagactctaagaacccccccatgtgcattgcctggtattggcttgcacttgaatgcccttgccgcaactgcaacacctaaagagaaaatagtccctcaagacattcagtctactataaatgaatcaagtaacttgataggccctgctggatcttctccggcaccttctgagcaaaacattataaatgatgatttcactcaaacaactgatgttgcaaccgctgaagcttctagtcagggtagtcccaagaagaaaaggcataagtttgatagtggtgatggcacttcatgcaagcgttgtagttgtaagaagtccaaatgcctgaaactttactgtgagtgttttgctgctggagtctattgttctgagccttgttcgtgtatcggctgtatgaacaaccagagtcatacggaaactgttctatctacgcggcaacagattgaatctcgcaatccattagcatttgctcctaaagtaattcatacatctgagcctggtctggaactaagggacttctccaataaaactcctgcttcagctcgtcacaaaaggggatgcaattgcaagaagtcgtcatgtctaaaaaaatactgtgaatgttttcagggtggtgtgggatgctccataagttgcagatgcgagggctgtaagaatgcttttggaaaacgggagggggctgccgtgttaagcatagaggaacctaagcagggattggaagaaaaggatgtttgtgtgaaagaagagaaaagtgaaatcgagaaacagcttgttgtctaccaaactcctgatgatgctcctgctgaaaatgtactgaccacaccttccatggtgcagtgcagacccttggcttgtcgtccacccccaagctccaagaaaagctccaaaaaaccacgatcttcaacaaaactcactggacatccttcgcggttgtgcaacttacaagctcctccgaagaccgacactatgctctccccattcgaaaactacgcggaaatggtccttggtgatagcacatcggatatcctcaagggaaattcatctcctcaaacttctgttaaagtggtgtcaccaaacaagaagcgaatctctcccctgcgaatgggtaccgggctatctccaatctgtaggagtggcaggaagctgattttaaagtccattccttctttcccttcccttggcggtgatgtaaacaatgaggatccagaaaccaagttgccagccccttgaatttaccatattttgtcactggtttatttctaccataccatctgatagtggacagccaagcgactttcctttcatcatttctatctctctcgatcaatgattatttatgtactgctataataatctgccgcgtgctggcaaaattctgcctccctagaacaaccaatggcatttggtttgctggtaaattatctcttggctccgtgtgttccctgtggctgtctgtctataatttatgttcattattttgttccggagaccgaagaatctgaggacttgtatgtatctgggatcaagatgtgaatctcgcatgtaccagatgacagaactgttaagacttatatttgtctgaggttaaactgcaagacttttatttaagctagaactttgatcactataggatatggcatgatatagcagggctcttgagatgcattctcttgtgcgtgcttggtaactgtagtcgtgcaactgttgacggcgtttgttcagaacaagtggttgatgaatttgaagatggtttagggagtgggaatgattttgtttgtgtgcgtgcgaacttgtaaaatctccgtgtatgaactggcaatgcttttatggtattgatcatctgcggtgtgttaactgagtgccattctgggatagttgttcatgaaaaccagctatctgaacanaacaatgatgaacctgcggcatataatggggtttacatgattacacaccaatcaagtagtgatatgctgactttagccgtaccatctggaacagaagcacaaccaatgaatgatacacaaaaggctgataatccctacccttgtgaatccttgttggatgttcagtcaagtggaaattgcacccaaaattctgtgcatgaaccccatctgtactggaacggggcagttgaaggggctgcagtagcttatactccccaagcacttcctggtgctttgcaaagtcagttgatgccatgtaacaagctcaatgagccaaaagattacatgcctactgagcaaaatgtatgtatgctttgtgttgccatttagaagttttgtatattggctttactaatgctctgtgctaattgacctaatctaattcgaagactcgtgcaatatatctgtatgtacaaactacaaactaatattagcttggataccatgggcgtgtttggcatggctctgctccacttcagagctgctctgctccagagttt

SEQ ID NO: 32394 - DNA, 305 bp, Zea mays
  unsure (1)..(305): unsure at all n locations
  Clone ID: MRT4577_129558C.1
gaaaaaccaccccactccagcgctggacacttgaatggttagtgggtagctaggggggggggacagtggatactaccaagttccgtgggggcagcagccacgacacgacggtgacgacgacgaacgccggcgctcctgtgtggaacgacaacgaggcgctgactgtggggcctcgcaggcccattcttctggaggactaccaccctgtgggatgatnggggggcacctttgcgcgcgagcgcatttcccgagcgcgtggtggacacgcgcggggcccccggcaaaggcttctttgagtgccccca

SEQ ID NO: 32395 - DNA, 1962 bp, Zea mays
  Clone ID: MRT4577_129559C.1
atgccactgaatacggaagttgagtttgtcattgatcccttacctggaaccgcccctatttctaaacggccatacatgatatctgtagaagaattaaaggaacttaagaagcacttaacggagttgcgagaggctggttacattcgtccgagtcttcaccttggagagcaccggtcccttaatggtgtcaatatgaagaacaagtatccattaccccacattgaagatttatttgatcagatgagaggtgctagggtgttctcgaagattgacctccgatcaggttaccatcaaatgaagattaggccatcggatattcccaagacggatttctcgacccgatgtggtttatatgagttcaccgttatgtcatttggactaactaatgcaccagcatattttatggatctgaagaataaggatttggaaattcactatcacccgggcaaggcaaagttggttgcagatgccttgagtcgaaaggagcatgttcattcagctattgttgcccagctacccgatgagattgttgaggatttcaggagacttaacctggggatagttgctcacactaaaggagttactattgatgtggaacctaccttggagcaagaaatctgcaaaggacctactggcgatgctaggatacaagagatcaatgatctgattactgaaggtcgaggtccagaattcacgaaagatgagcaaggcaccgtatggttcaaggacaggctatgtgttcctgatattgaaagccttcgtgagactattttaaaggaggcccatgactcggattattctattcatcctaggagtactaagatgtatcaggatttgaagcaaaggtattggtggcatggattgaagagagatgtggctgcacatgtggctatgtgcgatgtgtgccaaagagttaaggctgaacaccagaggctagctggactactgcacccactaaagatacccgagtggaagtggaaagagaatggtaaggacttcattaccagattgtctcgcacctcgaaaggatatgattctatatgggttattgtggaaagactgaccaaagtggctcatttcattccgaagatcgttttggatagaggatcacagtttaccttcagaatttggaaaagttctcatgagaatatggatacgaagttgaatttttgtacggcctatcaccctcaaactgatggacaaactgaaaggactaatcaagtattagaagatatgttaagagcttgtgctcttaaacatggtggaagttgggataagagtttgccttatgctgagttctcctataataatagctaccaggccagtttgaagatgtcaccgtttgaggctttatatggcagaaagtgcaggactccattgtattgggatcaaactggtgaaaggcagttgtttggacctgagattatacaggaagcagaggaacaagttcagcaaataagagagaatttgagaactgcacagtcaaggcagaaaagttatgctgacacccggagaagactgcttgagtttaaagagggtgattatgtctatttgaaggtgtcaccactccggggtatgagaagattcaaagtcaaaggaaagttgtcccctcgcttcattggacttttcttgatcttaaagcgagtgggagaggttgcataccaattggagttaccggatcatcttgcggatgttcatgatgtctttcacgtatctcagctgaagaaatgtctcagggtacctgaagagcagttatcaatggaagaccttagcgttcaagatgacctgacttatgctgagtatcccatcaagattttggatactttgactcgagttacgaggaataaggttataaagatgtgcaaagtgcaatggagccaccatggcgaagatgaagcaacttgggaaagagaagaagagcttcggatagattttccccaccttttctctcgttcttcctaa

SEQ ID NO: 32396 - DNA, 737 bp, Zea mays
  Clone ID: MRT4577_12955C.1
cctcgaggcggcgggaacctccaccacttttaccaagaaaaactcaaaagtcacttcatcgccaaaatgactaccgagcagaccttcatcgctgtcaagcctgatggcgtccagcgtggcctcatcggtcccatcatcacccgcttcgagaaccgtggcttcaagcttgccggtatcaagatggtcactccctccaaggagcacctcgagaagcactacgccgacttgagcgacaagcccttcttccccggtctaattgcctacatgggctctggccccgtctgcgccatggtctgggagggccgtgacgccgtcaagaccggccgctccatcctcggtgccaccaaccccctcgcctccgcccccggcaccatccgtggcgactacgccctcgacgttggccgcaacgtctgccacggctccgactccgttgagaacggcaagaaggagattgctctctggttcaaggacggcgaggtccagagctggaagtccgctcagcacgactgggtttacgagaagtagacgtctcatacaattgaaccatgagagtgtggagtgtgcttagtagctggacgtctttgtaacggaaagcaggtctaccgacccgtctagtagttacgaatgcgtctggcggaaggctgtctccggcttgaaggtttaggtgtgggctatgaagatacgatcacatgaaaaggaatatgggagaaaaccatgagacacatgaatgatcttct

SEQ ID NO: 32397 - DNA, 196 bp, Zea mays
  Clone ID: MRT4577_129560C.1
gacctgtgaccacacgatccatatatatgctgctactaacaccaaacgcgaggactacacatacacaggtgtacatgttcctaagggccgaccggcagcaaatattgcagaccatgatacaaaactatacggcaaatacacgacaactgggtaacctgtgggcataccattgccgaaaccagcacaacttcaacta

SEQ ID NO: 32398 - DNA, 1677 bp, Zea mays
  Clone ID: MRT4577_129561C.1
atgggctacccctatagtgttagaagagagcactatagccgtgatccttggatgtctgtagaagagttgaaggaacttaagaagcagttaactgaattacaagaggctgggtacattcgtccgagttcctcaccttggggagcgccggttctgtttgtacagaagaaggatggatcacagcggatgtgtgtggattatagatctcttaatgatgtcactgtgaagaacaagtatccgttgccccgtattgaggatctatttgatcagatgagaggatattatcggagatttattgaaggattttctaagattgctaagcctatgacttcgcttttggagaaaggaagagaatttaagtgggacgagaagtgtcaagacagctttgatcaactgaagaaaagattgatgtcgccaccagtattggttatgccagacctacagaaaggatttgatatctattgtgatgcatgtggccaaggcttaggatgtgtgcttatgcaagaaggacatgtgattgcctatgcgtctcgtcagttacggaaacatgaattgaactaccccactcatgacttggaattggcagccgttgtgcatgcgcttaagatttggagacactatatcatggagaccaagtgccaagtatatacggatcataagagtttgaagtatatattcactcagaaggatctcaaccttaggcaacgccgttggttggagcttattaaggattatgatttggagattcactatcacccgggcaaggcaaatttggttgtagatgccttgagtcgaaaggagcatgttcattcagctattgttgcccagctacctgatgagattgtcgaggacttcaggagactcaacctggggatagttgctcatactgaaggagttactattgatgtggaacctaccttggagcaagaaatccgcaaaggtcaaattggtgatgctaaaataaaagagattaatgatctgattactgaaggtcgaggtccagaattcacggaagatgagcaaggcaccatatggttcaaggacaggatatgtgttccggagattgaaagccttcgtgagactattttaaaggaggcccatgactcagattattctgttcatcctggccagtctgaagatgtcaccattcaaggctctatatggcaggaaatgcaggattcctctacattggatcagaatggaagaagacagttctttggacctgaacttattcaagaggtagaagaacaagttcgtataattcaagagaatttgagggtagctcagaccaggcaaaagagctacgctgataatagaagaagaccactggagtttgaggaaggtgatcatgtgtaccccaaggtgtcaccacttcgtggaatgaggagattcaaagtcaagggcaaattgtcccctcattttattggaccattcagaaattttaggcgagttggagagatggtctatcaactcgagctacctgataatctatctgatgtgcataatgtattccatgtgtctcaatttaagaagtatctccgtgtccctgaggaacagttaccaatggaagagctcagtgttcagggtgattcgacttacatggagtatccgatcaagattcttgacactttgactagagttacaagaaataaggtgataaagatgtgcaaagtgcaatag

SEQ ID NO: 32399 - DNA, 2013 bp, Zea mays
  Clone ID: MRT4577_129562C.1
atgggcatcttagcatgtaccactataaggcaaagacagtatatacactgtgctaagggaaccgtagaactcacccgttccaaaggagaaagatttgaagttggaactgcagtaactacagtcaccagactagcgacattcttagtcgatgggaagtttgttggtgtcaacatccgtgtggttagagattttccggatgtcttcccagaagagttacatggatgccaccatatagggaagttaagtttgtcattgatcccttacctagctgcccctactttcaaacggccatacaggatgtctgtagaagagttaaagggactgaagaagcagttaacggaattacaagaggctgggtacattcgttcaaatgcttcaccttgtggagcgccggttctatttgtacagaagaaagaaggatcgcaagggatgtgcatggattataggtcccttaacgatgtcattgtgaagaataagtatccgttaccccgtattgaggatttatttgatcagatgagaggcgcaaggatattctcgaagattgatcttcgatcgggaatatcagtggatcctgctaaagttaaggagataatggagtggagagtacccactacagttactgagattcagagtttcttgggattagcaggatattattgtagatttattgaaggattttctaagattgctaagcatatgacttcgcttttggagaaaggaagagaatttaagtgggacaagaagtgtcaagacagctttgatcaattgaagaaaagattgatgtcgccaccagtattggttatgcccgacctacagaaaggatttgatatctattgtgatgcatgtggccaaggcttaggatgtgtgcttatgcaagaaggacatgtgattgcctatgcgtctcgtcagttacgaaaacatgaattgaactaccccactcatgacttggaattggcagccgttgtgcatgcgcttaagatttggagacactatatcatggggaccaagtgccaacttgcccagctacccaacgagattgttgaggatttcaggagacttaacctggggatagttgctcatactgaaggagttactattgatgtggaacctactttggagcaagaaatccgcaaaggtcaacttgatgatgctaaaataaaagagattaaggatcttattactgaaggtcgaggtccggaattcacgaaagatgagcaaggcaccgtatggttcaaggacaggatgtgtgttcctgatattgaaagccttcgtaagactatattgaaggaggcacatgactcggattattctattcatcctggtagtaccaagatgtatcaggatttgaagcagaaatattggtgttatcaggccagtctgaagatgtcaccttttgaagctttgtatgggaggaagtgcaggactcctctatattgggatcagactggagaaagacagttctttgggcctgaactgattcaagaagcagaagaacaagtccgtataattcgagagagtttgagggtggctcaaaccaggcaaaagagctatgctgataatagaagaagaccactggaatttgaggaaggagattatgtgtacctcaaggtgtcaccacttcgtggaatgaggagattcaaagttaagggcaaattgtccccttgctatattggaccattcttgatctttaggcgagttggggagatggcataccaactcgagttacctgatagtctatcggatgtgcataatgtgttccacgtatctcaactgaagaagtgtctccgtgttcccgaggaacaattaccaatggaagagctcagtgttcagggtgatttgacttacacagagtatccgatcaagattcttgatacattgactcgagttacaaggaataaggtgataaagatgtgcaaagtacaatggagtcaccatggtggagatgaagcaacatgggaaagagaagaagaacttcgcatatattttccccacctttttcctagaccttcctaa

SEQ ID NO: 32400 - DNA, 1359 bp, Zea mays
  Clone ID: MRT4577_129563C.1
atggggatagttgctcacactgaaggagttactattgatgtggaacctactttggagcaagaaatccacaaaggacaaattgatgatgctaaaatacaagagattaaggatctgattactgatggtcgaggtccggaattcatggaagatgagcaaggcaccgtgtggttcaaggacaggatatgtgttcctgatattgaaagcctttgtgagactattttaaaagaggcccatgactcggattattctattcatcctggtagtaccaagatgcatcaggatttgaagcaaaaatactggtggtatggattgaagagagatgtggctgcacatgtggctatgtgtgatgtgtgtcaaagagttaaggctgaacaccagaggccggctggactactgcacccactgaagatacccgagtggaagtgggaagagattggtatggatttcattactggattgcctcgcaccccgaaaggatacgatgctatatgggtgattgtggatagattgactaaagtgactcatttcattccggtcaagactacttataaaggctctcaactagcaaagttgtatatggttcagattactgatggacagactgaaaggactaatcaagtattggaagatatgttgagagcttgtgcccttcaacatggaggaagttgggataagagtctaccgtatgctgagttctcttataataatagctatcaggccagtctgaagatgtcaccttttgaggctttatatgggaggaagtgcagaactcctctatactgggatcagactggagaaagacagttctttgggtttgaactgattcaagaggtagaagaacaagtccttataattcgggagaatttgagggtagctcaaactaggcaaaagagctatgctgataatagaaggagaccactggaatttgaggaaggagattatgtgtacctcaaggtgtcaccacttcgtggaatgaggagattcaaagtcaagggcaaattgtcccctctctatattggaccattcttgatctttagtcgagttggggagatggcataccaactcgagctacctgctagtctatcgaatgtgcacaatgtgttccacgtatctcaactgaagaagtgcctccatgtccctgaagaacaattaccaatggaagagcttagtgttcagggtgatttgacttacatggagtatcctatcaagattcttgatactttgactagagttacaagaaataaggtgataaatatgtgcaaagtgaaatggagtcgtcacagagaagatgaagctacttcggaaagagaagaagagcttagcatagattttacccatcttttcccaagatcttcctaa

SEQ ID NO: 32401 - DNA, 1122 bp, Zea mays
  Clone ID: MRT4577_129564C.1
tcagaggtgctgcatctggagcactaggacgaaccgtgcgaggacgtgaaggacgtcgacgactgcacggcactgctcgacgcgttcgtctacatcgagacgtcttccgctgctctgcgcgtctagtggtaattccatgaccgaagcgatgaaagccgaagtttgttggttgcctacgtactctggtacatagggagagtagcatgaagcagtatgtaaaacctgcttcggctgattctgccgcgcttcagcttcggcaatctcctttttcttctgtattgtgacttggcatgttcttgtggtgtggcccttatcttctccaaaaaataagcaatatagccttctgggttgatcctcgtaccttcctccgaagcccctgccgcctctgccccttggggttggtggcctgaaagagctttgttgttgccctgaagattgggagctgtgttgtggcctttgtggctggcttcctctgtcatcacttaggctagaattatgaatcgatctaacgtgcctagggtggatgcttcctccgaagcccctggtcatctcagaaaacctgtaggcttcttcccttctcgccatgacgaaggatttcgccatgactgcagtattgcccccatatgaagatatggttgcctcgtagctcattagaaactgcttcgggtctgagtgcccatcatacatagggagttggggtggcttgtatgatgggggccatggggtagcctgcaattctgctgctagaggagaagcatcatcaaaagtaaaattgccatgatggaaatcatcataccattcgtcatcattgtaggagttgtcttgatgaagctctctgtattgaggtcttcggtcttggacatcttgggtgagatgacacatttcttcagtgagctcatcaatcttcttctgaagattggcgagacaaagcatcttttcctttttcctctggacctgttgatgaatggcttcgaggtccctgatttcttggtccaactcctcctcttgaggtgtcggactggtagccttccttttttggctcctagcttcgcgtaatgtttgttggttgatgtctagtggctgcagtgcaacccctagccctgaagacttcttcggcggcat

SEQ ID NO: 32402 - DNA, 203 bp, Zea mays
  Clone ID: MRT4577_129565C.1
cccacgcgttcgcacacgcattcgcattctttctcgcactcgctcagtcagtcgcatagccactggtggcgaagacagtggcaaacgtaatgccatccctcctgccggccgtgctgctggtggcggcggttctggctggcagctgtgcttgcatccgcgccttgctacctgtgtcgggaccaggggacgttccaggcgagctt

SEQ ID NO: 32403 - DNA, 373 bp, Zea mays
  Clone ID: MRT4577_129566C.1
gaattcacggctcgacgacgcgtcagatgactatgttaatatctatcttaaaagcgatatgaaaagcattcagacgaggaatgtgctgtcgacaatgctctccacatggcccatcacggttcatgattccgggccaggttagcttaccagtcaccatcggtggcacattcagggagtcaatcaaggagtatgtcggcaacaccttccggtacaccatcaagtggatccagatctgtgtaactggccctggcatattcttcataaaactcatggtccacgacaagaacatctccgtggagatatcgtcggctacatcgtccacgtacacgaccatctaggacctcgtccaagaggtcaaagctgcagagaaggt

SEQ ID NO: 32404 - DNA, 305 bp, Zea mays
  unsure (1)..(305): unsure at all n locations
  Clone ID: MRT4577_129567C.1
acccacgcgtccgaagacgcgagggcggcggaggagatgcgggaggaggagaagaggcctgttcgacaccatcttcggcgcgctgtacaaagaggagcagctgctggagacggaccccgtcctgaacaaggaggggagcaagggcaaagccgccgccgccccggcgcccaagaaagccgctgaagaggagcggaacggcgggctcagcctcggagaggtcttctccaagcccaagaaagggagaggatcgnttagcgctgctcttactttctagcacgtaatccttggattggaatggacggctc

SEQ ID NO: 32405 - DNA, 708 bp, Zea mays
  Clone ID: MRT4577_129568C.1
ggctctgatcaaagcctttttctcttcttccaatgcctcatttgatgcgttccagcttgtattattcgaggaagaagtgatggcagtcaatcatagcttatttatgaatcgggatcttctcctgattgtttgcattatgttgttatgtgtttgaattcaatttccctacttctggattgtatctcattgttatattgattatgtgagctttagaatttagtctctatgatgctgttgttgtcttgtcttctgtctcttccagtttctccacaggaattgattcttctcttattgtttccctcaaaatggaagacaatttcgtctttttgattgattttgcattagtattctctgattctctctctcttttcaatgaatactgagtaaaaggagaggaaattgatgtgtttgaattggattgactgtcatttatgtccattggtttccagggaagaaaatgattgttttgggaagaaacatttccgcttgtcttttctgcagtaatttcgcattgtattgacctcttcagatattcattcctttctttctgtttctctagaaatacaccaagtttcccattccattccattgtcaatctaattctctacttgataatttcaatcaaacgttatttgttttctattcgtttgagtgttctgcgttgtgttttgtcaaacaggaagaaaaagatattcaaagtcgggcaat

SEQ ID NO: 32406 - DNA, 832 bp, Zea mays
  Clone ID: MRT4577_129569C.1
ggacaatcagacacagaccagagtccacagcacagcagagcaccaccactactaccacccccagtggcaaccctgacaaggctctagcagcttagctgaagatggccgggctactctctgtcaaggccgtcgcgctcgccgccgtgcttgctgccgcgtatgcctcttgcgccgccgccgagcagccgggggcggcggacctcgacgcctccgccgtgtcttacagctccgcgtggcttccggccagagcgacctggtacggagcgcccaacggcgccgggcccgacgacaacggcggcgcgtgcggcttcaagcacgtgaaccagtaccccttctcctccatgacctcctgcggcaaccagcccctgttcaaggacggcaagggctgcggctcctgctaccagatacggtgcagcggcgacaaatcctgctccggcaaaatcgagacggtgatgatcacggacatgaactactacccggtggcgcagtaccacttcgacctgagcggcacggccttcggcgcgctggccaagccggggctcaacgagaagctgcgccactcgggcatcatcgacatccagttccggcgggtgccctgcaacttcccgggcctcaagatcaacttccacgtggtggacggctccaacgcggtgtacctggcggtgctgatcgagtacgaggacatggacggcgacgtgatccaggtggacatgaaggaggccaactccgggtcgtggacgccgatgcgcgagtcctggggctccatctggcggatggactccaaccatcgcctccagggggcccttctccatgcgcatcaccagcgactccg

SEQ ID NO: 32407 - DNA, 285 bp, Zea mays
  Clone ID: MRT4577_12956C.1
cccacgcgtccgcggacgcgtgggcttacccctttgaaagacccgagcacggcccgcagagccacgtctcgaatgtcgcacgcacaggtccccgcttacacggtcgcggagggcactggcgcggtgcacgccagttcctccagcacggcggcgcaggaggccacggacccaagcagagacgggagattagcaaggccacgaaggaaccgggatcggcccaaggggtgggggggccaggcctctcaagaaggcccgcttcttcgccaacctgggaaagcgagacgg

SEQ ID NO: 32408 - DNA, 643 bp, Zea mays
  Clone ID: MRT4577_129570C.1
cctcgaggccggccgggtcattttctccacctactactatctctgttctctgtttgcctttccggcataggatccacagcaagcataaacaagctgcagccgtgagaactcgcctccgcctcctgcaccctgtccggctacacatgaacaccacgatgtcccgatctaaggggtacaccctccaggacgtggctaagcacaccccaaggacgactgcctgggtcgttataccgcatcaaggtgtacaatgtgcactaaatttctggaggatcaccctggatgcgatgatgctctgctgtcttacactgccaaggatgctacccatgatttcgatcatgtggggcacatcaccactgcccgagcaaagatgcacgagtacttactgggggaaattgatgctcccacaatacccaccaaggagaaatacacgccccccaatacagacgaactacaaccagtacaacacccatgagttaaccatcaagatcctccagattttggtctgcctcgccatactggccctgcgcgtcactggaaggatgtacaccaagccataatctacctaaactcttgtcatctacgctacagacctgattcacaaactgaataagctagtgtttgaatgctgcaaacatcattaatt

SEQ ID NO: 32409 - DNA, 1693 bp, Zea mays
  Clone ID: MRT4577_129571C.1
cccacgcgtccggtgaagcggaatatagacgccgtcgacaatgggagagagccgcggcagcatcgcctttttcgccacctaccggccaccagtgccgctagacatcttctccgtgcccatcccgccgtcttcgatccgcgtcggctaccaccgcgccaggagcgacctcgtgaaacccggcgacgacgtgctctcgcggaacttcgacaagattgagtcgccggtgaaggacgtgggactgttccgggtgtctggcgtgttcccaaccatctccaaggacgggtcgaagctggcgttcgtggacaacgagttcaaggcggtgtgggtcgccgacagccagggtctgcgcgtggtgtacgagaccaagggccccgacaacattttctcgccgatgtggaaccagaaccccgacaaggacatcctgtacgtgtgcatgggcccctccttcaacgccggcaagccgctggagatctgcgccatccccaacgtgtccagcggcgcgcggcagcgccgacagctcaccaagggcaagttcaacaacgctttcccgtcgagcagccccgacgggaacaggttcgtgttccggtcgaccagggacggcggcgacaagaagcacaagaacctgtacatcgcggagaacgcggaggtgggcgagtacggcgacggcacggtgacgcggctgaccaacggggagtggacggacacgcactgccagtggtcgcccagcggggactggatcgtcttctcgtcaacgcgggacaagcccaaggacgcaccggaactggacaacggcctggatccgggctacttcgcggtgttcatggtgaaggcgagcgacccgacggtggtgatccgggtgatacggagcggcgacgacctcggcgggcacgtgaaccacccggtgttcagcccggacggcaggagcatcgtcgtgacgtccgacctcgccgctgtgtcggccgaccccatctcgctgccgctcttcatccactccgtgcggccctacggcgacatcttcgtggtggacatcgacccggaggacgcgagcaagaacaaggacgtgaagaagttccaccgggtcacgcacagccgctacgagtactcgacgccgacgtggacggtgtttgccacggatgatcccaacgcgcagtggaacatgctggtgaagaaagactcgtacacgccggcgtgcccctacgcgtacccggacggcggcgagagctggcacatgaccgggcacctctgcatccctaggaggtgctgctgattgtgtcattggattttggattgcatccttcgtcgtcacgagcagctaccagctactgcgaccttttttaatatgttcatccatcagtaataaaccactagggaattagcagggctcttcttgcacctgatgatgacatcagcggagccctgcctctatggtctctgccatatgggtttgtacggtttcattcatgtcactactttcccaccacctagctcattctcgctccatcccaaggctatatctagccgtcttcgtattccacctccgaataatgcagtctacagtgtaaaacagtgatttgcacgactatatacatgttatactgagtatggcctagcgttggttctaggctgacctataaaaaaaaaaaaaaaatattgaccgatcgcaaaaaaaaaaaaaaaaaaggcccctagggcc

SEQ ID NO: 32410 - DNA, 889 bp, Zea mays
  unsure (1)..(889): unsure at all n locations
  Clone ID: MRT4577_129572C.1
cattgggtacctcgaggccggccgggatcatctctttatctcttacatcgactcaaccaaggcctatctcctcaactactctatcattatcacttgttcgcactcattaattcatcaacagtaatattctttttttgaattccttatcaccaatcaacatgcagtctaccttactcatcactcttctcgttgtcgccagcggtgtcattggcacgccagttgatgagaaccacccaagcgattacagctctgattacgactctggctcatacgccccgtcaaccccttcntactacccaagccaccctaacccctccccctcccaacctgggtaccacggccccccgcaaggctaccctggccgtcctggtttgggtggtttgttccctggagccggtggtgtgggccacggcttcggcattctccccggctttggcggaatcggtggctttccgggactaggacttaacgtcggactcggtggactcggtgcggccaacgtcggagcaggattcggacccggtggtttgggcgccaatgtcggagttggagtcggtgggcctaatggcatcaatgcccaggtcggagccggaattggtggacccgcaggcattactgccaacgtcggcgcaggagttggcgggcccggcgggatcaatgccggcgtcggtgccggagttggtggacccggtcttgtcggtgccaatgttggagtatcagccggtggacccgccggcgttggtgccaacgttggcgtcggcctttaagtagtctttcaactatctgtacattatcaatcactttatttcacaagcccactgcattagtcacgaaaaccgttatgatttcctcatgaccctcatgacccatttgtgccatctccccagcc

SEQ ID NO: 32411 - DNA, 284 bp, Zea mays
  Clone ID: MRT4577_129573C.1
aaaatcgctcgcacgtggagtcaacccagccacgattcatccgtccagcatcctcgcatcctcagggtctacatcaacatccggatcaactgggtttggcacgatcggaaagctggccaccacggtggccctgcagaacgacgacgtcgagctcgtcgccgtgaacgatgccctcagcagcaccgattacatgacctacatgttcaagtaggacactgtgcgacggcagtggaagcaccacgaggtcaaggtgaaggactccaagacccttccccttggtgaga

SEQ ID NO: 32412 - DNA, 216 bp, Zea mays
  unsure (1)..(216): unsure at all n locations
  Clone ID: MRT4577_129574C.1
ctgtccactttccccgtgcttctccgccgtcgatgccgcgttccagtgcgaagagactccgactcagatngccagccnctgggtccggccccaagtgtacccgctgttcgcggcgacaggcgtggccgtcggcatctgcgggtttcaactcttccggaacatcactggcaaacccggagtcaggggtaacaaagcaaggaaggcaactggtgtgct

SEQ ID NO: 32413 - DNA, 457 bp, Zea mays
  Clone ID: MRT4577_129575C.1
ggccgctttttttttttttttttttcgtacacatcgtttttctataaataaatgatactaaacaagagaattcgtttttccataaataaatgatactaaaatatgtaacaggctgtgggtgaggggcaaccatacttgtaaacttgattttggcatcaacaaggaaaaaaaggagagatggaagagtactgtgtaacaagtacgctacaatagatgcataatatatttgtgcacatacaacatttaggtatgctgaagttagagaagccatcctgtgctttccaccgtatatttccccagcagcaatgtatatttgcatacttctatcgatgtcaagtgctctgaggacaagagtagtctcctcaggcgtcaatgggcaaaggccatcttttcttttcaagtctgagtcaatcaccttttcttttcaccatggataaagatacccgatcagttctta

SEQ ID NO: 32414 - DNA, 435 bp, Zea mays
  Clone ID: MRT4577_129577C.1
gagggataccgtgaccgcgcggcctactggtaacatccgactgcgaacgtgggcacgcactgagcggcggggcccgcgcggcctaattctactgttcgctaccttgatgtttacacctccttcacatggtttatcttcgttcgtctgcataggcgccgcccatttgcgtgtatgattgctaagacgctctgtgtcataatgttagcgctgtgttcattctcgccattcgcttacccatccatcacccagactaatactgttgatcgaaggatgctgttactcctggcaggatttcttttaagttaatcctatggaaaaaatgaaaattaatttgtctgcaaaaaaaataaacccaggtgacctttcttattgatccaatctataatacaacaccatgcgacttcttatttactaattataggaaaactcaattta

SEQ ID NO: 32415 - DNA, 589 bp, Zea mays
  Clone ID: MRT4577_129578C.1
attcggctcgagcaaatttttacaaccacaagggtcaaagaaagatgaaagaacaattgtttgtggacaagtttcaggaaacagtccagcatactttcttagattatatatccagtggatttgagctcaatttcatgggggctatagattttactgcttcaaatggagacccacgtgtaccccagtccttgcactacattgacccctctggcagacctaattcgtatcaacaggcaatgctgggggttggcgaagttctgcagttttatgacaatgataggcgatttcctacgtggggttttggagcaagggtacatggttatgtatcacattgctttaacttgaatacagctacaaatgactctgaggtggttggagttgaaggcatcatgtcagcatacacctgttctctttacagtgtttcccttgctgggccaactatgttcgggcccgtgatcaacaaagctgcagatattgcaagccagtcccttcaatattcaaacaataaatattttgtccttctcattatcacggacggagttctcactgacatccaagaaacaaagattgcattgccagggcatcagac

SEQ ID NO: 32416 - DNA, 356 bp, Zea mays
  Clone ID: MRT4577_129579C.1
acattacatttgggagagggatttttggcgggatggcatatccctcttaattgttacttacggcatgggtcggcacctcaacaagaaaattacgtccggccctacgccagcgagacagcctttaaaacaggaacatttttttctccccccacttgagagcacgaaaaattatcctctacaattatattattgaccgatttccgcatagcctaaataccaagctttctaatgcacctgccaacattaatccccattatttttggcctttgggggccccggtgcttggttggcattcactggtttcgctgggcattgcatgctggagccacggctcaaacaatattctgtgcctgctt

SEQ ID NO: 32417 - DNA, 574 bp, Zea mays
  unsure (1)..(574): unsure at all n locations
  Clone ID: MRT4577_12957C.1
aaaaaaaaaccaaaaaaaaaaaagaaaaaaaaaatttttaagaagaagaaaaagcgcccccaagggaaagccccacgcgcccgacgggggccaccanccccaccagcaccaagcggcaagagcgggacggggcaaagcaggagcaagggaaaacccacgccaaccagggcaacgcccggcgagcagcaggcaccggcagcggcgaagaaggccgagcccggcgaaaggccggcacccgacggggggaccaaaaanggaaccccccaaagaggggaaaaacccgagagggcaanaggcgcgccacacgggcgaggaaacaaaaaacaagagggaacgaagccaaaaccaaaaggcacacccgggaggcccggcagaaaaaaaacgaaaggggggaacgggggaaacccgaaggcgagcggcccgcataaccgagaaggcaaaggtttttgatagcccaaagggcaagaagaccccgaaacgcagcaggaactccagaggaagtaagggaaggcaggaaaaaaaggaagcccctgaaactgaaaaagccaaagatgctaaaaccggccagcacgcc

SEQ ID NO: 32418 - DNA, 249 bp, Zea mays
  Clone ID: MRT4577_129580C.1
ggcgtcacgcgtcgcgtcacacatccttccaaattcaaccacagctgtcatacattgagccacggcgctctaactaactgctgacaccttcatacaactactacaactgcaatcattcaaacaacttggtttaactaacccttaaggttactacacacaacccatcataggtggtgccctgcataaaaaggttcatcacatttaatacactgatgaacgcttattgctacacgcagttgcttacatgaa

SEQ ID NO: 32419 - DNA, 230 bp, Zea mays
  Clone ID: MRT4577_129581C.1
ggcagtaacggagaaatatgtcaattaccaagagtgtgcgagctttttaagtccgtaagcagtttttactgcaaatcatatcatggcacgtttgatgactacacaaacaaacaacattaccaaaagtggatattaatccgatattttgctttatttttctttctaaaactagcactacccatgttatacccctcgcctttatttttgcgcggtactcagcacagtgatga

SEQ ID NO: 32420 - DNA, 647 bp, Zea mays
  unsure (1)..(647): unsure at all n locations
  Clone ID: MRT4577_129582C.1
ctccctggcagccgccgccagnaagcctccactccagcgcccgagcgcgacggcacgaggccgtgagcacctgcagcccgcagaggcagtgccgctgcctgccttcgtccgagcgagcgagcccaggcggccaggccctaagggctgaccgagccgccgctggccgctgcgcgcgagcagccgctgagctgcctccgagccagccgccacccgccaggccgccagcacggtcgcgctgcccaccctggtacgccaatcctcatctctatgcggcgcccaagaaaactctgcacaaagctcaactggtcagctccttttgctaactctatgatcaattatatctgtatgtaagacctacatgtatgttctcaccggatcccagctctaagaggttgaaattagtcctcgtctcccactttgcaaagtcctggtggtctgaaacaatagaaaagccattgtatgtagcgtaaaaatgcatggaattcactatcacataatagcaaatctggatgctagacacacgtatcggtcttctgtgacaatcatggtacaaggtttacctcgatgattattcttttctgagacccatcatcctccaacactggtatatcattttatttaattctactatttaatttaatttaatg

SEQ ID NO: 32421 - DNA, 323 bp, Zea mays
  Clone ID: MRT4577_129583C.1
ctacaagcctttcttcctttcaggttctttttttaattattttttttattttttttttattttttgcttaaaaaaataacaagggtaggttctgtgaaagaaaccgttgaggagctcgccgacggaataagtcaaaaaaaccaacagggagcatgctttgcccaaaattgcaaacccttttcaaaaaaaatcaaaaaaaaacctgcccgggagggcggtaagggggaattttgcaaataaacaaaaaaatgggggcccgtggagcctgcaataagagggcccaactcgccccaaagggaggggaaaaaaaaaaaaaagggcgg

SEQ ID NO: 32422 - DNA, 236 bp, Zea mays
  Clone ID: MRT4577_129584C.1
cggctcgaggtctcctgcctcagccagtagctgagattacaggcgtccgccaccactgccgaataattacggtcctattctgatcgctttagcacctttttctattaggtgatcaaaccttggatctgaagacctctttgagaggcctgcagagagggcagggttgtggaactgctgaaacctgatagcccttcctaagtgattttctttgtgacttttattctgaggacttcaat

SEQ ID NO: 32423 - DNA, 509 bp, Zea mays
  Clone ID: MRT4577_129585C.1
cctcgaggccggccgggactgggcgttgacgccagctattaccgtatatggaatcttctctcttcaggagtgtgctgatgctcacacattctctctttgtgctgtgatagtcttactaccctgtggcactagactctactacctcccaagggaccaatgtccttgcaatggcaggactcttcgtttttctatatctgacgctgcatctattcgggtcctctgtcccctcgtgtgcacctcgtcacctgaccactcgtgcagtgactgtcttgtgactctaccgtctcttgatacctacccattctttccttctatgaccaatatcactgtcgtgcggggaataaattgcgaatctgttctgctcaataccttctcagaaactacatctaccgagttcatcatatcgacgcatgtactcgggactgactatgttagacacgccttccatgacatagctgtagcactactgacatctctatagcgcatgctccatactgtctgaggatcat

SEQ ID NO: 32424 - DNA, 345 bp, Zea mays
  Clone ID: MRT4577_129586C.1
ctcacaagcacaggaaggctcgatcgctggcacacaccaagcaaggagggcgcagaccgcaagcgtctcacaggctctccgtcgttccccaacactctttgcccggcgccatggccatgctggctctagcgctcctactgctgctgtccgtggcggcatccgcgcgtgccggatcctgcgcgagccacctcgatctgggcctgggcttactctcctacagagaccgccggcggtaatgccgcggctcggaggccaagtgcctggacaaggtggacggcctgatccttggggcggtgcctgcgtccgtggagtactaccgacacgctgtctaccgccgtggtagct

SEQ ID NO: 32425 - DNA, 300 bp, Zea mays
  Clone ID: MRT4577_129587C.1
cactcctgctcatctactggcgccgtatcctggctgctcggaccgggtccgtgtctgactccaccgcgccgggttaatagtgcatactggtcattatgactgatatggcggcgatgtacgagcgaaccgacacgggcccctccgaccggcggcatggaccttacgtagcaccgttgtacatggacgagaggatcctgaccgtgtaggcacggatcgacctgtacaagacggacgcgtgcccctaggcgtaccaggagcctgctcttcctcaagctgaagggactagaccacacgataggc

SEQ ID NO: 32426 - DNA, 1293 bp, Zea mays
  unsure (1)..(1293): unsure at all n locations
  Clone ID: MRT4577_129588C.1
gtgttaataggatcccaactattcaaccatataatgttttgccatagcacataacagtgctggcacatttcttgtaaccaatttttgcacaggtattggacgctgacacagcagctagcacaccacaccatcaacggatgctcgaggccggcggggccgggagttgcccgcaaagtgcaaaccaaacaccacccaagagaaagcggaggagggagcaatggcggagccgagccagcagcagcagcagctgcggtcgttcgtggaggtgccggcgggctcccacttccccatccagaacctgcccttcggggtcttccgccgacggggggtgcaggcgcaggcgccgcgccccgcggtggccatcggggacttcgcgctcgacctcgccgccgtcgccgacgcggggctcttcgacgggcccgcgctctccggctccccgtgcttccaccaggagacgctcaacatgttcctggggatgggccggccggcgtggagggaggcgcgcgccacgctacagaaaatcctatcagccgacgagcccgtcttgcgtgacaacgaagcgctgaggaacaagtgtctggtaccaatgagtgatatagagatggttctaccaatcacggttggaggttacacggacttcttttgttctgtgcaccatgcaaggaattgtggattcatcttccgagggccgcagactccagtcaatccaaattggttttatcttccaataggatacaatgggcgggcatcatctatagttgtgtctggaaccgatgtcactaggcccaggggacaaggacatccaacaggaaactccgctccttattttggtccctcgcagaagcttgattttgagcttgagatggctgccattgttggtccagggaatgaattaggcaaacctattgatattaatgacgccgaagaacatatttttggcctaactttgatgaatgattggagtgccagagatatccaggcttgggagactatacctcttggacctttccttgggaaaagcttcagtaccacggtatcaccatggattgttaccctagatgctttgaagcctttcatgtgtgatgctcctaagcaggtctggattaagccgaaagatcaaaatgacgcatcaattgtcacaaaaactaatttcaagcatctgtattggacgctgacacagcagctagcacaccacaccatcaacggatgcaacatgangncggnggatatatttgcgactggcacactgagtggactggacgggactccctccggtgtctgctggagctgaca

SEQ ID NO: 32427 - DNA, 778 bp, Zea mays
  Clone ID: MRT4577_129589C.1
ccggccggggtctccttttccgttcgacttccatcgagccttacgagtggagaagaacacaaaccaatcccagtggccacacgagatagtgcacccacgcgacacgcgccctatcgttgatagccgacacgccggcgccgtgggactcgctagcgcgccgttggcatcccgctggcctgcctcagcgctccggtttcctctcgtagtattccgttcagtttctaggatgtgagagcagcttttgcgttgatgataaaagtgaggatgcttggttatctggatttgtggtgctttatgtgatgcacgtgatcacatatttcaccaacatcattggtgtagtaaccattgctctggtctccatagtatccatcttgggcctaatatgcctctgctgcttagtgtacttccaactgtggatcagaagaagaggctaccggtggcttagctacttcaacgagtcatggctgactcgaataacattgatgctcgttgcattttggtggggtattggcgaggtactcaggctcacctttgtgaacggggaggggaggctgatctctgaccgggcatggcaagagaacgtgtgcaaattctacatcatttcaaatatgggatttgcagaaccagggctgttcctcttgctctctttcctcctcagcgtagctttgcagaagcaagagcttggtacctagaataggaaatggaaccagaagaccatatgcgcagtattcatcctctgctcgccttgtttgatctgggaagcttgtgttgtttttgt

SEQ ID NO: 32428 - DNA, 146 bp, Zea mays
  Clone ID: MRT4577_12958C.1
atatgcatgagcagccggacctgctagaccatggtgttcccgaccatcatggcatgcgagccgtacactctctcatctcgcggagctacgtggcataatacatgttctcgagacatttctacttgtatataaccactcagggtatc

SEQ ID NO: 32429 - DNA, 2013 bp, Zea mays
  Clone ID: MRT4577_129590C.1
cggacgcgtgggcggacgcgtgggcggcggggttgttgtcgcttgtggccagccgccagcacaaggcgatcgagagtggtgaccaccagtaaactgcaaagtgcaaaccaaacaccgcccacgagaaagcggaggagggagcaatggcggagccgagccagcagcagcagctgcggtcgttcgtggaggtgccggcgggctcccacttccccatccagaacctgcccttcggggtcttccgccggcggggggtgcaggcgcaggcgccgcgccccgcggtggccatcggggacttcgcgctcgacctcgccgccgtcgccgacgcggggctcttcgacgggcccgcgctctccggctccccgtgcttccaccaggagacgctcaacatgttcttggggatgggccggccggcgtggagggaggcgcgcgccacgctacagaaaatcctatcagccgacgagcccgtcttgcgtgacaacgaagcgctgaggaacaagtgtctggtaccaatgagtgatatagagatggttctaccaatcacggttggaggttacacggacttcttttgttctgtgcaccatgcaaggaattgtggattcatcttccgagggccgcagactccagtcaatccaaattggttttatcttccaataggatacaatgggcgggcatcatctatagttgtgtctggaaccgatgtcactaggcccaggggacaaggacatccaacaggaaactccgctccttattttggtccctcgcagaagcttgattttgagcttgagatggctgccattgttggtccagggaatgaattaggcaaacctattgatattaatgacgccgaagaacatatttttggcctaactttgatgaatgattggagtgccagagatatccaggcttgggagactatacctcttggacctttccttgggaaaagcttcagtaccacggtatcaccatggattgttaccctagatgctttgaagcctttcatgtgtgatgctcctaagcaggaacccgagcctttaccatacttagccgaaaagaatcacataaattatgacattcctcttgaagtctggattaagccgaaagatcaaaatgacgcatcaattgtcacaaaaactaatttcaagcatctgtattggacgctgacacagcagctagcacaccacaccatcaacggatgcaacatgaggccgggggatatatttgcgactggcacactgagtggacctgtatggagtaaacattgcaacttctatacccatagtatgaatcttactttgacatgtgccatttcaggaaccggactccctcgggtgtctgctggagctgacatggaacgggcagaaggagataccggtggggaatttgacccgcaagttcctagaagatggagatgaagtcatcttgacaggatgttgcaaggtactgtgagttcgtctttcctgatcaattcagatctaggcctctacagtgacgctaggctgtattttgattccaccatccgctggttcttcagggtgaaggctacaacattggttttggaacatgcaccgggaaggttctgccgacacttccatgagctaacacgtcttggcatcagttctgcgtgtctcaacggtttcagctatcagagagttgtccggtctcaactatcaaagagttcgctgcaagctgcccctgggaggttcctcggggcattcccctgaccaacaggttcttgacatcagtttcgggagttaaacactcctcaatctagcaaaagttgatgtaactgtttcaacggtctagttttcccatacgctatctagcaagggctgtgtgttccagtccaatatccatgtgggttgttttcctgggctgttgaaaataagaaatctggttaaaatgttgtgtcactcatctgttctcccaaaaaaaaaaggtgtccccccccaacagacatactgagctcgtcgaccctgaaattgattccggaccggcaggcgcagcagcttaacc

SEQ ID NO: 32430 - DNA, 254 bp, Zea mays
  Clone ID: MRT4577_129591C.1
acattacggttcagttgatcacccatcgcgcggtggcggtcactcagttgatctacattatcgactcactacacagaaacacactgtgcccaacaggccttaagtactccaaaacatcggacaccaactgatcatggtcacccagaacaattactggagctcactgaattatggagtacttacgcgccggatcgacatgggtcacccccatattcgaactacggtcccaggggttaatgcattttcgctaatca

SEQ ID NO: 32431 - DNA, 310 bp, Zea mays
  Clone ID: MRT4577_129592C.1
cacaggggtcacgtcagtctcctactaatttcaatagcacagcgagagcctcggaagaagaagaagcttgctgagcgccatggcgtgttccaactgcgagtgccaccgccggttcgacctgatcgtggtgggcgcgggcatgatgggcagctgcgccgtctactctacgtcctctcgtggctcgcgcagtgctggttctggtgcggttctacctgcttcaccaccggggcttctagcacggcgagtcgcgcaccatgcgagccacctaccctgaggcgcactaccctcacatggtgcgcctgtcctggcg

SEQ ID NO: 32432 - DNA, 445 bp, Zea mays
  Clone ID: MRT4577_129593C.1
ttttatcaaacacctgattaagattaaaatggattgaacgaaaaataaactggaaaaatcatgactaggaacacaattatccctgggatatagatcactaaccaacatcatggtgcaacccgcaaacctgcgtgagctcacatgcattcgtacccttaacggtaaatgacgaggccttaattacttgccgggaactaacctggtggcgtaggcccacacgttggtgctgaccgggcacaggatgcagtcagcaaggttttagatcgggtcattgccagagacgattgcctatactaataatcccaacatggataacatggcgaggcggccggtcttgagctacgtgactctagagctccgctaacgccttactgtcgactgctgaggccaaaggctacaaactgccgcctggcgaacgcgtccgtctagaccggaattcccgacc

SEQ ID NO: 32433 - DNA, 649 bp, Zea mays
  unsure (1)..(649): unsure at all n locations
  Clone ID: MRT4577_129594C.1
aaaccaccaacgaagaacgcgtcgccggccgatctccgagttaaatgctgccccctttctgacccttccttccctctcaacctcggtccccggccggcgtcgccattgcctctgcctcgactctctctttctctccttctctttcgccggattcaactcgactcaaaagcctccgccctttccataccttcctctgtttcgtttcttgcctttttggctccgggaaggaatttccggcattcacatgtgagtttcgccccccatccctttcttccccatctgttggtgtcaccaggatcaggatcagataggaaagcccaggctcagaagaaaccgcgtttggtttccgtgcgcaatccgccattgccgtttcttgcagctctcgcagtccatcccccgatttatactccgcacggggcacttcgtccaccgcccggcattgtttcccgttttctcctgttcgactgaatctcgattcgattcgattcgattcccgactccgttcggatcggcaaatcttgagccttccccggttcctggattcccaacccgtcgcgtccagagatctcccttatttcgtcagttcgtcggagggtagagaggcctgaacaatggcggnggcgaatctgggcgcctggctctgcgcgct

SEQ ID NO: 32434 - DNA, 354 bp, Zea mays
  Clone ID: MRT4577_129595C.1
ggagaccaacaagcggcatacacagcgttatgcacttgcaccaataaagcaccaatggggaccaagagatttacactctttacgctgcttgctatctgtgcatgtgttgctaacgcgacaataatcactgaatgctcacaagctgctatagctgcccttcttcccccataaattccatcaatgatagcttgaatgtgtgaaaacccagctctttaaccctataggctccaacaagcaatcagcacaagcaacataccattatcatccttgcttcaacaatcgccagccctatctatgctgcaaccattggtacaaaccatcagggcacactaggtgcagaaagtcgtgctatct

SEQ ID NO: 32435 - DNA, 783 bp, Zea mays
  unsure (1)..(783): unsure at all n locations
  Clone ID: MRT4577_129596C.1
ataactctccccgaaaggaagagaaactgaaccctcgaaaaagaaagccatttgtcccatttcccccaaaaccatgaacttctccgttggcgccggcggtagtggagatggcggaggcgagggcgggagggtgcaagcggagcggtggctggagattgcggcgaagcttctcgccgcgcgcgacctcgtcggctgcaagcgcttcgccgagcgcgcggtggaggcggatccgcttctccccggcgccgacaaactcctcgccgtcgctgacgttctcctcacctcccaggcgatgctctataccggagagcctgacccatacgccgtcctccaggtgccctccaaaaccaccgaccacggcgccatctcccgcgccttccgccgcctggcgctcctcctccaatccagcaacccccaccccggtgcggatgtagccctccgcatcgtcaacgacgcctacgaactcctctctgatccatcacgccagccactgcgttctgcacgtaccaacatcccttctggtgctccctctcatccagccgctgccgccgctcctgcagctgaggcaacggacttctggactgtgtgcccgttctgctgctacgtccatcagtatccgcgcgagctagttggccgcgcgctcaagtgcccaaacagtcttgccggncgggggggttggtggctgttgagatccctacacagccgaccatcgtgccgggcaccgagatgaccactgttgcttgggggttcttcccccttggtttccccactcggcggatctgg

SEQ ID NO: 32436 - DNA, 176 bp, Zea mays
  Clone ID: MRT4577_129597C.1
gctcccagcactgctgcacagaatctaggctcagagcttgagatctcaagatgggagatgaggagaagcgcaacagggccatcacggcccggagacagcacctgaagagtgtgatgctccagatcgcggccacagagctggagaaagaggaaagccgccgcgaatccgagaagcag

SEQ ID NO: 32437 - DNA, 498 bp, Zea mays
  Clone ID: MRT4577_129598C.1
ctccccccccccccccccccccccccccccccccccccccccccccccccttccaggatccaacctctttcaaaatcccctgttaaaaaaatgacccctgctccaaacttgatttcttgattaaaaacggggttctttttccttacaaaggacggcctgatcaaagttgttgtccccaaggccccattgtccagcaaatcttagtccttccaaattaattcggcctttcatttttttttttgctcacggggctagcaaataaaagcagcgcccatccccttaaaactctttcaggcagttttgttttccttttccggccaaaaagggaacccttttgaagtttaatcccacctgttcgcctttttttgaaaccagccttcgtttttttggcaaattcaaacccccgattttttttttttgtaaggcgggaaacaaacttggcccctgtcttcatgaaaaacctggggaacttacttaaaccctttttgtccctactgg

SEQ ID NO: 32438 - DNA, 719 bp, Zea mays
  Clone ID: MRT4577_129599C.1
tccattcacctgagaaaatccgtagcgaggatcacctgcccaaggtgttcagctacttcgacaagaacgggagcgggtacatcgagatcgaagagttgaaggaggccctctctccaagaggtgaccagaaggcgatcgaggacataatcctagacgtcgatatagacagggacgggaagataagctacgaggagtttgagctgatgatgaaagctggagtggactggaggaatacgtcgcggcagtactcgagagcggtgtacaacaccctcagccgcaagatgttcaaggacgcgtcactgaagcttggtagtaacaatggtccacttgctgctgcagccgtcaaagaacaacaagatgttgattgagtgatgtgtctactgcctgcaaactcgactaaaacagagaacacgagaactgtacccagttttccatgttttgtgtataggtcgccacattttggcaaggaaatgtatcaggggcggtcaattgactcaggttcaggtgcattgtgcatatgtcaagacactcccaattacaccctttatttttctcataaaaaaaaacaatgttgttatctaccaacatcagcaagctgtgttgtaaaacatatctttaatcgttattatctttctctttcgatctatcaagattcatgtggtagatttaagtgtaaaaatatacccccaccccataaggaaaaaaatatttttacaatc

SEQ ID NO: 32439 - DNA, 496 bp, Zea mays
  Clone ID: MRT4577_12959C.1
ggcgcgggccggccgccgggcgaggtgcgcgtacctgccgtcgatcgtcgccggatccatccaccatgggcggtggcaacggccagaagtccaagatggcccgcgagcgcaacttggagaagaacaagggggccaaggggagccagctcgagaccaacaagaaggccatgagcatccagggagcacgccgaggccaagcatcccaagacagacgtgtaccagtgcttcccccatctgaagaagtgaaaggcctgaacttagcaaccagtgctggtttggccagggggcgttccttgtgttgagggtgttcattccgtgttatcttcccgtcagtcatgcgtcctgtcctatgttaacctacataagaaagtgatgtggtgtccacttctagtgaaactactgtctgctgttaaaacctggttggtttcagaacgatgattttcgtgtgcaaaacagattactggtccgtgggagttgggccagtttgcattgtctt

SEQ ID NO: 32440 - DNA, 398 bp, Zea mays
  unsure (1)..(398): unsure at all n locations
  Clone ID: MRT4577_1295C.1
agccgcttcccgctccgatcgacctgctccctctccaccaccgaaccccaagggggccagcctcacccgacgaccaaaattccccgagttcaaagaaggcctcaacctcctccacaaagaacggggaatggttcctcaagaacaaaggatctggggcactgtcatgcgcaccctggggcaaaatcctacagaagctgagctcaaggacatgatcaaagatgtcgatgctaatggcaacggcaccatcgatttcccagagtttctcaaccttatggctcgcaagatgaacgacaccgactctgangaagagctcaacgaggccttccgtgtgtttgacaaggaccagaacggcttcatctcggacgccgagctccgccatgtcatgacaaatcttggtg

SEQ ID NO: 32441 - DNA, 585 bp, Zea mays
  Clone ID: MRT4577_129600C.1
cgttgctgtcgcattggtattggagttcaacaacacaacttaatgccacaaaaccgaccagctttggctcagttgccatctgagaagcttgctgagatgtctcaagatccacaactgttaaatatgattcgtcaagatctgcagaactcccagaacattggtattggatttcaacaacacaacttaatgccacaaaaccgaccagctttggctcagttgccacctgagaagcttgccgagatatctcaagatccgcaaatgttaaatatgcttcagcagcaatatcttttgtcacaactacaggtgcagtctcagacaccttttacacctcagcctccactctctatggtggacaagatgttattgctcaagcagcagcagcagcagcagcaactgcagcagcagcaacaacaactgcaacagcaactggagcagcaacaaaagctattgttgcagcagcaactgctctctcagatggtgcctcacgcacatcctaatcaacacactgatgattcttatgcattgaagtatacttctgtgccatctgatgattctaccagtcttggttttagaagaatgcaagag

SEQ ID NO: 32442 - DNA, 166 bp, Zea mays
  Clone ID: MRT4577_129601C.1
accaggtccgggtcgggtacggcagcaggggcgaggagttccaggacctaggactacacccagaagctaggaggtgacaacagcatcctcgacgagagggaacgcgcggctccaccggtgcggatgctctcagctgtccgctcgtgaccgggccttaatattgcag

SEQ ID NO: 32443 - DNA, 1171 bp, Zea mays
  unsure (1)..(1171): unsure at all n locations
  Clone ID: MRT4577_129602C.1
aaaaataaaggatcagagttgttcatgcaatggctgcctcattaaaaacctttctaggtaaaaactcactcctcgtgagaaaaccctagaaaggaaaaaagagtacaacccagctctaatttaatagttcatgtcaaggttgttcagttacatattacaacttacatcactagatttccaaatcaatagaatggagtaggaactaggaagataaaagtcataagggtcatcaagataaagtccttcaaatgcatcttcaagttcttggtcctgtgtacagtactgccctctagctttaccaagttcccagtctttcatgcaaagaagcatctctaccatttctggtgctacacgccttcgtcgttcctcgattatcctgccacagagactaaatgcagattctgaggatatagttgaaataggaacaaaaataacatccctagctaagatgcagagaacaggataggacaacttatgttcatgccaccagtttagggtattgaagtcctcatcaaacttctgcaaagtgtcactgtccaggtatgaggacagttctgtgtcaagtgaactaagaccaacactagagtgtgcttgttgaagcaaagcagatgctgatgttccagctgcaaggttaggagtactagaaccaggatatgaaaactcagaattagaatcagatccataaatcaatccccagttttgtttccttttacctgtgataggaggaggaggaggcacttgttgcctaactgcaccaaacttaacatcatatttattaaacatggtaaacaattcacttttcacacaagtaaaataaagtgagtagtcagtaccagatagaccagataaaattcttaagatattgctaaaaccccttagtttggctctaggatcaagtataaaagcaaatgcatagagcataggtatatccctccaatacttaaggaacttagatttcataggagcaacagcatgtctaagcaatgcatcattttcatgctgatttaaatgctggataatgtcaagaatattatgcataataagtggagatgtaggatagtaaaccccagaaagggtcacagtagcatcataaaacagttcaagaaactgaagcaacttttcagnccacataccaatgcgaatttgtcaacagattaggttcaccggtttt

SEQ ID NO: 32444 - DNA, 1010 bp, Zea mays
  Clone ID: MRT4577_129603C.1
gtgcaatggctgcctcattaaaaacctttctaggtaaaaactcactcctcgtgagaaaaccctagaaaggaaaaaagagtacagcccagctctgatttaataagttcatgtctaagagtacagtttacatcaccagatgtccagatcactagaatagagtaggaataggaagaatagtaggagattacaaagtgtagggccctaggcctaagggtcatcaagataaagtccttcaaatgcttcttcaaggtcttcgtcctgtgtagagtgttggcctctagcttctcctagttcccaatctttcatgcaaagtagcatctctaccatttctggtgctaggcgacgtcgtcgttcctcaattatcctgccacaaagactaaaagcagattctgaggaaattgttgagacaggaacagaaataatatctctagctaagatagagagaataggataggacaacttatgttcatgccaccagtttaggatattgaagtcctcatcaaacttctgcaaagtgtcactgtccaggtaagaggacagttctgtgtcaagtgaactaaggccagcactagagtgtgcttgttgaagcaaagcagatgctgatgttccagcttggccggttgagcagggaagccaccgccggaggagggaccgagggagcagggagcgccgggaggagggaccgagggagcagggaagccaccgccggcggagggaccgagggaccagggagcgccgggaggaggagggatcgagggagcagggagcgccgctgcgccgggtggatggagagcagccgagcagggagggagccagccagccagggaccaccgggatgaccggatgagggagcagccgagcagggagcaccgggaggagggagcagccgagcgccgcgcccgagtcaccgacgccgcgagacagagaaccgcggccaccgcaaggagacgcaggtgggagggaggagagtgcgttagggttagggttgccggtcgccccggcccggccgg

SEQ ID NO: 32445 - DNA, 1071 bp, Zea mays
  Clone ID: MRT4577_129604C.1
gcacgagggagactagtctcgagtttttttttttttttttttttatgtgtaccaccagatttttagataaaaaaggggatacatattcagtttgcagatcatagatacaatttgaacatattcagtagagtgggacatatcatatattcttgaaatgcaacaaattttcaaaactaaaatagtagtatttaggaaacaaatagtggaacggatctataagcacaagattatttatgaaaacattcaaaagagtagaatctaattcatgcgacgagccatgatctcagcctgcaagctcatgtagtattgctgctgtaactcactcatggaagttaggtccatggtcataattttttgttcttcagcaattgtcttcaagaaaatattattggtctcattctggatccgctctttctctagggcatgtctctctttgatgagttcattcatttctttgtcaagagcatatgcctttgcacacatcttatttcatttaaactccttcacggcatcagcctctttcatcttcgcccacagaatctccactgcttatgtcatagaatctgtggtttctagacccaatgattcttttggcttcatcttgccgtttggtcgctgtggtgcacctttttctggaatattagtagtgggatccttcttgatccccggtgtggttatatcatatcttcctatggtaggtttttgtgtcttcttttgtattttgtatgttttgtttgtagttgtaagcttctgaggcttatcatgtcattttggttgattcttcatctgcagccaaatatgtctgaattgaaaagacttctctttggggttttgagatttaaaaagcctctcagcttgctccactttcagcttctgatttggctttgatgatgagttattatccttaatgggtggaatctgatgcaactcatctggggttgtacagatgtcatgtaaagattcttcatatactccttcattcaacaattgggtgaaactaacaacatctccttccatttttatggaagaggtggagagcacatttaaaaccttggaaataaatgagcacat

SEQ ID NO: 32446 - DNA, 749 bp, Zea mays
  Clone ID: MRT4577_129605C.1
aaacagaaatataaagataagtaatatcaggattagagctatttgtgcaatggctgcctcattaaaaacctttctaggtaaaaactcactcctcgtgagaaaaccctagaaaggaaaaaaagtatagcccagctctgatttaatagttcatgtcaaggttgtttagttacatattacaacttacatcaccagatttccaaatcaacagaatggagtaggaactaggaagataaaagtcctaagggtcatcaagataaagtccttcaaatgcatcttcaagttcttggtcctatgtacagtgctgccctctagcttcaccaagttcccagtctttcatgcaaagaagcatatctaccatttctggtgctaggcgccttcgtcgttcctcgattatcctgccacagagactatgacaattggaggaggagccacttgttgcccaactgcaccaaacttcatatcatatttattaaacattgtacacagttcacttttcacacatgttaatggactgctaccattattaatggactgagatggaccatcctcatcagcgagcacaatcctcagatcattgttgatgaactgcgaatgactgttctcaccaccaacatcttgctccatcacagctcagaggccggatcaccagttccgtcgccgccaaggtggcgcgcaccggttcctcacggccttccacacatgtgaaaaccaccggacgcgtgggcggacgcgtgggcggacgcgtggga

SEQ ID NO: 32447 - DNA, 420 bp, Zea mays
  Clone ID: MRT4577_129606C.1
ggggcgcgcacgcgtccggctgaagaatgcggcaaagcccgtatagaggcagcgtaggaaggtaggctgaccaggggggtgacctcatctacgagggtggtttttcagaatcagctttttggtatctattgcgcataagttgggatttctttttcccttggtggctctgtctctctctctctctctctctctctctctccctggggccggatccaggtgctccggggataggtgcgtttcagaaacttgaactggatctggatgatctatctgggttctctcttttgggcatagaaaaaactgtgaaatcttctggttctgttctgctagatgagatctatgggcggacatatccaaagggatcctgtgatgggacctgggagtgggaggggtactgcatccggacgtgggggtttcttt

SEQ ID NO: 32448 - DNA, 609 bp, Zea mays
  unsure (1)..(609): unsure at all n locations
  Clone ID: MRT4577_129607C.1
gccggttccggtgcggggaagtgggacctcggnagggnnagtggtggctggccaagggagnanaagggnaggnaaatggnaggnntgctacctagnactnngctcaagttccnntcgacaacgtcgaggnnagttctaccgactggctattgtttggtttctattcggctatcaaaaattatggtattgggagcgtggcttgtcagccctctaaggggatcgnnnatgcaccgacnnctagcaaagnacaagtggtgtgtagatttccatgtgtcccagtagggacttaattnntattgaaggataaagaatatgcanntctcaagcagctctgtggnggaattgagggtnctgccagaattaggtgaaatttacccaattggtggtgcgggtgatcgtcttggtttagtggactcagatactggtgagtcccttcctgctgcgttgctcccttactgtgggagatccctgttggaagggctgatacgggatctgcaggctagagagtttctccacttcaagatctttggaggtcaatgtataaccccagttgcaatcatgaccagttctgtgaaggataatcatgaacatataattgcgatatgcgaa

SEQ ID NO: 32449 - DNA, 404 bp, Zea mays
  Clone ID: MRT4577_129608C.1
ctcgcgagcaagaatggactatccatggggcgacgtcactgccggggcggccgtcctgagtccacctcactacaccaaggggaccaacctcttcatgcacataggcggcaccccgggcggcaccgtcacgccaccccgaggtgccagtcagacacgcctcactccaaggcactgcacaagagctttctaaagacctgcgaggtgggggggtgcatcctcacactaccatcctgttctccgctggcagccgcgatagcatgaaggagctccgcgaggtcaccgtcaagcactcctggaacctgatgacgtcctccgtcctctaggggcagttcctgaacatgctcatcaagctcatcggggccaagaagaccatggagatcggggtgtgcaccggctacttcctc

SEQ ID NO: 32450 - DNA, 112 bp, Zea mays
  Clone ID: MRT4577_129609C.1
ggccaactgccataagcacattgccaacagcgcaatttgctcttactctgttttgagtgctgtcggaccattttcactgtacctctatgttcttttcccgtccttacacggg

SEQ ID NO: 32451 - DNA, 175 bp, Zea mays
  Clone ID: MRT4577_12960C.1
acggacacgtggggcaccttttagcacaatatttcggacagtattgtgaccctatatatttcctaccaaacttaatttattaagttattgtggtcctacagttcagtttagtggcgccggacgagatttacgcgagacatatgtgatcttgtttttgtgttcctatcatgaatgg

SEQ ID NO: 32452 - DNA, 288 bp, Zea mays
  Clone ID: MRT4577_129610C.1
caggcattgtggccattcattctggcttcaaactttaattcctttcctatcatggagcatgaaccagtcatatcctgttgaaagcctggaactgaaggataatctggcaaatgagacagcagcagagcatctcctcttaaggatacgtgccttggactcatgtttgaatcgaacagtctcaaagtggaagaacaaattcttgtcacttttttacagctttctttggagctgcttcagtccatctcccagaggcatttggtctgtatctttgctcaactgctaatttct

SEQ ID NO: 32453 - DNA, 257 bp, Zea mays
  Clone ID: MRT4577_129611C.1
ctcttaatatttttctactctataacaacgcccccagggggggatacaggagcaaaagcgggccaacaccgagccgacacaggacacgagcaccaggaaacaagccgccccccaaaaagagagggcgaccgaccaaacaggcacaggggcgggagaaacaacccccgaacaaaggaccaccagaggaacggggcccaaggcggagggcgccccccctccggacgaaggagccggacaaggaaggggacacggcacca

SEQ ID NO: 32454 - DNA, 161 bp, Zea mays
  Clone ID: MRT4577_129612C.1
ctcacactttcttcaacacgttcgatatatttagccatatatatgctatacttttttgtgtgcaagaattgcagggaggctgctttgctattgaatgtgccggatacatctttgctagaagtgggtataatctatcatgtgtaactgtaactacatttatc

SEQ ID NO: 32455 - DNA, 201 bp, Zea mays
  Clone ID: MRT4577_129613C.1
agattagttactttactaatgggggtgtttttctctttactgttcgccgactagtaatggatctgcttttaagaatttcgcgacacatcggctcttaaaagaatactttacaaaaccgaggataataacacaattgttcaattaaatctgggcttgcgatgcatgcgataaataaaaagatgggtttccttgttcttatat

SEQ ID NO: 32456 - DNA, 257 bp, Zea mays
  Clone ID: MRT4577_129614C.1
gggcacacaaagggaggtaccactaaagaaggcacaacagaagttggaaggactccaccaaggggtgctctaagcgtgagacatacagtaggagtaggagcatccaggaagaacaggaaagaacagggggatcaaccaaggatgtcgatgaagcatcggaagaaggacatagataaaaaggacgaacctcatcaaagacaacatcccaaaagatcctcatctgacgagcaactggatcccaacaatgatatccctta

SEQ ID NO: 32457 - DNA, 255 bp, Zea mays
  unsure (1)..(255): unsure at all n locations
  Clone ID: MRT4577_129615C.1
tatctacaaggagcaggtggcttgctagaagctacactacatatatagatcagtagcagcagcatcttttgatcgagtcgagtgtgtgccgaatttttgtctagctcacagcttttggatcaactccgtagcgctagcagtagcatcagctcatgctcaagcatacatgtgtgcagtgcatatttatgtcatatagtcgtgtatgtgcttgatgtgtacatatctttgttcattccatttctcncgctagtcatc

SEQ ID NO: 32458 - DNA, 449 bp, Zea mays
  Clone ID: MRT4577_129616C.1
cggactcgtgggcgtcctggggccagtgacccatatgcggcctgaacgaggggaacagggacctgatccatcagagagggatataccaggttagacagaaaggcgagtcgctctgatctccacaccgttgaccggaagctcctgactaggaatggaccgtacctggaggcggaactcaggcattgacttgtcacaaggccctgttaaacgcgcctgcggagagcgatccggtggccctggatatgagcagcatggtcaatgaccaagtgtggttgaactggagccacacctggcgctactggttgtacaagactcactgcagcggctgcgtgcggtgaagcttcctcgcaacctaccggcaggacaagcgcacatccatctgcggggatctatccaagagatggtaccacgtgcactgggacaagtctgaatcccatcgttaacttgct

SEQ ID NO: 32459 - DNA, 246 bp, Zea mays
  Clone ID: MRT4577_129617C.1
tctatcactagcgttcattctttcctcactttgatcacataaaccttcggggacacaacctggatacagacttgatgctcttgaacccatatctcctatcgaatctgataaagccactatacatgtaactggaccttaagctggagatctctagttgcacatcgctaatcacggctacacaaacgcttcaggctcttgtgctgccatcatattcatcagcggtcaatccgcaggcacacatgtcgg

SEQ ID NO: 32460 - DNA, 647 bp, Zea mays
  Clone ID: MRT4577_129618C.1
ggaaaagatccccagcccctggggcccatcgatcagggataacacacgagggaaggacctccgactgccaggggccacccgtcagtgaggaggcaagggaattgtctacctagaaaagcacccgcccccatataaacccctaggcactgagcccggggttggacgtagcggagcgacagagggggggggggggaccagaaggaaaccactcgagtgagttcgccgcctggcctaagacttctgacccaccgtaagtggctggccgcattgactacgattgacaccaggtcgcagtagagagccggtctgcccccactcatgacctacgcagcccctcgtcttatagtgcactcatgacctgcgcagccgtctggtcatcggcgcactcatgacctacgagcccctcggcccgcggagaactcgtggtctatcgagcctaggcctgagagcgcgaaccgtccacaaagcctacaacgcgacaagccacgctgagacccatgctgtggaggccaggggtcggcgttgcgcaaagatagtaatgatggtgctaaggcccacaccggccacgccagccgtaataatgagcatggacagagacgacaaggcgcatgcggacaaacaaccttgccacaataagacactcggtt

SEQ ID NO: 32461 - DNA, 294 bp, Zea mays
  Clone ID: MRT4577_129619C.1
aaaaggagccagaaaatttaatggggaatatttcaatccattttcaaaattaaaagttgcaaaaagtccaaggggaaaaaaatgatccaaacaatgataacttaaaaaagagtccaccctaaaaaaacttaaattgtgcaagggaaaaattctggtaaagttcaaaaattatgatcctttttacttaatcaaatcattattgtcattaggaaaaggttgtgcaattttttaaaaaagctaaatttaatgctggtggtggataaccatgtcgatggtaacttccggaggcttaaa

SEQ ID NO: 32462 - DNA, 416 bp, Zea mays
  unsure (1)..(416): unsure at all n locations
  Clone ID: MRT4577_12961C.1
tggnttcatggcagnacgcggnagnaagnanaccgatccagcgatgaggcaggaggcctgcgatacgggctccttaacgacaaagatcttgagcttctccatccacgggtggacgtgaacagcgccgcgtgcttgaccaccacgtagtcctcggcggcgcgtggctgggcgggcagctgttctcggacatggtggtgcacaggccaggccacctgttcttggactagcttagcttgggctacgactatgtctatgactaactggtcctattgcactcctttctgtatgtgtgccttggtggttaatggctatgctactgttacattttgtagggggttatggagcggttctgtttgctttgatgcatttgttttttgcttcctcggatggttttatatttatgatgcgaatgtcga

SEQ ID NO: 32463 - DNA, 536 bp, Zea mays
  Clone ID: MRT4577_129620C.1
acaagctttctttttctttgttttttgttttttttcagaaacgcatctttccctatagtgcgggcaagctcctatagctaacataatatcccccttacctgaccaccagccggtgaataaaggtaagagaaggccccacccttgaagggcgcggggggccaaaccccggtggggtttggcaagctacctggttgaccgcgggccactgcaacaatcatgaagagggtgccagcggttagcgccgcgggcttgttgaaccgcaaaaactgggggtggggcaagaagggcggctggctcccaccaacttgctgggttaatgggaataattgttggtgctgtaaataaacccgagaagtcaatgctgcccgttggttggatgggaaaaaccgccgggggccggccacaacttgctgggtggacggcccctggtggtgtttcaaataaaaaacacaggtcaaagccgactgttgggtgaatggacaaaaccgacgtctgctacaattggacgcaagggtttgttgccaaccctgctgcct

SEQ ID NO: 32464 - DNA, 775 bp, Zea mays
  Clone ID: MRT4577_129621C.1
ttgggacccccgggcttgccggggttcttcttcctccccgacacgtctctctctctcctccagctcccagccggcgtcctcctctaccgtggatctcccctgcgtgctggactttcctccgcttctccatccatggcgctcggctgctccaaatctctctcctattcgctcatagaaaccacgcgccagctctctgctcagctgccgcgtccttggccccaagctcctgcgcgcgtgtccctggccctctgctcgagctcgcctggtcgcgttccagctcggtcgctcccatggctcggctctgcgcgcgcggtgctctgtccctgcgcacgtccagcaccctggaatctcggatttcgccgcgcgcgagtctctctagcgaccgtcgagcctcgctgcccatcacgaagttctctgctcgccacgacgtgtcgagctttcgcgtcaagtttctctgttccgtgccggttgtccgtctttgatcctcgcctcgatgtcatcttgcccgtgcaacgcttgcttggtgctcaacaaaacgcctgaatcaggaccatcgtcgttctcgcgatcatcgaattggtttaggtacgataattaattacgtgatgcggaagattacccaagtcgaccccaagtgcgggctctccgcatggagatgctgataaacgaacctgcctgatcaagtgccaggacaatgatgacccgtgaagtggacatcatctaaaacactaacctagtgttacccaggcaagccccggtgcatgcaacccccttc

SEQ ID NO: 32465 - DNA, 1673 bp, Zea mays
  Clone ID: MRT4577_129622C.1
agtgatgcaacacatcacacatgcatggccacggtatttatacaaggatccaagaagccttcgtgctcacagcatacctttcatggtagctagctagtggcgtactgcgctcgctaccactcaacacgtctcgaccccgaccaaaaatgccgagtcttgcggcgttcttggtcctcctgctcccgccgctgctgctttccgctgctggtgccgcagaggcagaggagcttatcggcttcaaggccacgctgaggcacgtggacgcggacgccgggtacacggaggagcagctgctctcgcgagcgctacgccgcagcagtgctcgcgtggccacgctgcagtcgctcgcggcgttggcgccgggcgacgcgatcaccgcggcgcgcatcctggtgctcgccagcgacggcgagtacctgatggagatggggatcggcacgccgacgcggtactactcggccatcctcgacaccggcagcgacctcatctggacgcagtgcgcgccgtgcctgctctgcgtcgaccagcccacgccctacttcgacccggcgcggtccgccacgtacaggtcgctcggctgcgcgtccccggcgtgcaacgcgctctactacccgctctgctaccagaaggtgtgcgtctaccagtacttctacggcgacagcgccagcactgccggcgtcctcgccaacgagacgttcacgttcggcaccaacgagacccgggtcagcctgccgggcatctcgttcgggtgcgggaacctgaacgctggctcgctcgccaacggctccggcatggtcggcttcgggcgggggtccctgtcgctggtcagccagctgggctcccccaggttctcctactgcctcacctccttcctgtctccggtgcccagccggctctacttcggcgtgtacgccacgctgaacagcaccaacgccagcagcgagccggtgcagtccacgccgttcgtcgtcaacccggcgcttcccacgatgtacttcctgaacatgacgggcatcagcgtcggcggctatctgctgcccatcgacccggcggtgttcgccatcaacgacacggacggcacgggcgggaccatcatcgactccggcaccaccatcacgtacctcgcggagccagcgtatgacgctgtccgcgcggccttcgcgtcgcagatcacgctgcccttgctcaacgttacggatgcctcggttctggacacgtgcttccagtggccgccgccgccgcgccaatcggtgacgctgccgcagcttgtgctccacttcgacggggcggactgggagctccctctgcagaactacatgctggtggatcccagcacagggggcggcttgtgcctggccatggcgtcgtcttccgacggctccatcatcggcagctaccagcaccagaacttcaacgtgctctacgacctcgagaacagcctcatgtccttcgtcccagcaccgtgccatctaatgtagctgtaacttgagtttccgtgtacctttatttcgtttccgatccgttgctatttatgcatagatgtgttctatggattggtgattggtgcttggtactttggtagtactttgttgtctcttctcaacatctgatgattataatgactcttctcaacatctgatgatatcagtaggtgttggaggactctattgccg

SEQ ID NO: 32466 - DNA, 2801 bp, Zea mays
  Clone ID: MRT4577_129623C.1
tgggaccctcgaggccggccggtttcagtccaacggttctaaaaaaaaaattcaaggtttgtcttcggtgttgcagacgtgttcttcccacgcatgcttttaatctttttaaaatctccatttgcgtaagctcagtctgcagtttacaaatgctttgagtcctgcgctcctgtcctgctgttcttgtctagcagtaaacaagtcatttcctttgttgtcacatggtggctcgccgagtgctggtgcacacattctctcctcgttccaccttgctgctgctgctgcagttcttggcacggccttgtattgtatgaatatgattgtatcacatgccatgtgactatgtgagtagctgaccacggctcactgcgaggcgcacaggtacagcagcgcaggcgcagcggcagcccgccgctggatctctcccgaggctccggcgatggagcggtcctgctacttcccgctgcggtgggagagcacgggcgaccagtggtggtacgcgtcgccgatagactgggcggcggccgacggccactacgacatcgtccgccagctgctgcacctcgaccccaacctgctcatcaagctcacctccctccgccggatccgccgcctcgaggcgctgtgggacgacgacgcccgcttcgccgacgcggcccggaaccgcgcgtccgtcgctcgcagcctgctgctggagtgcgagtgcaggaaccaccgccccgccgcccccggcgccggggagaacacgctgctccgggccgggtacggcggctgggtgctctacgcggcggcgtcggccggggacgccgcgttcgtgcgggagctgctggagagggacccgctgctcgtgttcggcgagggcgagtacggcgtcacggacatgttctacgcggcagccaggggcgggagcgcggacgtgttcaggctgctgctcgaccacgccatgtcgccgaggtgctcgacgagttgccggaacggcgaagccagcgccaggcgcagctccgtgttccggcttgagatgatgagccgggccgtccacgccgcggcgaggggcgggagcgtggagatgctcagggagctgctcgaggagtccagcgtgtcgacgtatctcgacatccgtggatccaccgtgctgcatgccgccgctgggagagggcagctgcaggttgtcaagtaccttgtggcctctttcgacataatcaattcgactgataatcacgggaacacagcgctgcatgtagcggcctaccgagggcaccaacctgtcgtggaagccttggttgctgcgtctccatcaaccttgtcagttgtcaacaacgccggtgacacgtttctccactcggcagttacaggattcaggaccccaggattccgacggctcgaccgccagttggagctgatgaggtacctcatacgcgagagaaccgcggatatccagaagatcatcaacctgagaaacgacgcgggccttacagctcttcacctggctgtggttggctgcgcacacccggatctcgtcgagctactgatggccaccccgtccatcgacctgaacgctgaagacgctaatggcatgaccgcgctggcgctgctgaagcagcagctgcgctcagcgacgtccgaccggctcatcaagcagatcgtctctgccggaggggtcttgaactccagcatcctgagaacccggtcagccatcgcttctcagatcaagatgcagggcgggatcgcgagcagccccggcaccactttcaaggtatcggatgcggagatattcctgttctccggcatgggagcggcggagtctctgaggccaagctcctgctccagcaacgggaaggatgatgaccctactcacgcagacgcagactgcgccgagaaccgtggatcgtcggagaagaggctgagctccgcgagccgggccaaagaccgcctcaagatgatgctgagatggcctcgccacaaggacaagacgcccaagaagtcagaggacagcagcccgctggggtcgatcagcaggctgaacgagcacggggccgagacccctgctccgctgaggcagaagtttaccaagacgacggcgctcaacggcaagcggaccctagcggtgaagagctccaccccgagctcctcatccaccaagaagaagctcaacacgaagctcatccacggcatcatggaggccatgccacagctggcgccatctacggcgcggtccgcgtccccgacggacactttcctgaggtcctcggtatcgtccacgccgcagccgctggcgaagctgaaggacatctgcctcgacgacgagatctccatggtgacgccgcccgccggcaggctgaaggatagtgacgacgccatggaggacccctcgtgctccaacaactcgtccatggacgacggctgtggcgccgggacggcagagagcgcggcccggaagcacgggtgcggcaacgggaggctcatcaacatctgctttggcgcgcagggcctcaccgtggaggactcggcgagcgggcagcagacgagcaagatgttcaagcagcagtgcctcagggtgtcctgattgacggcgtggtgtctcgactacaacagcgtggtgtgattggtttggtgtctcgcgtgcagctatgtgtgcttgtttgctttgctccttgcacagccagcggtgaactggtgatccaatgaacttgtgcttgtgttaactgtgacgttgacgaatccacagctctttaacttcctcaaaaaaaaaaaaaaaaaaaaaaaaaaaaaaaaaaaaaaaaaaaaaaaaaaaaaaaaaaaaa

SEQ ID NO: 32467 - DNA, 943 bp, Zea mays
  Clone ID: MRT4577_129624C.1
ccacgatttattccaccccttcactccatgcgaaaccagaccctaagttatataagttttgattagctggaacgcttccaagtccattcctggacaaacgaacacacccttacacagaagggaacgcaaatgggcttattccaaagctcaggttcgcatgcactggtactaccgcaactatcaggacccaggttccataccatatgtattcagaacctgggggctgcaattctaagatgcaaaggtctattgcatcggctctcctctacagttatgcacagctaagccaaccaccctcggtgacccggtcaaaagtagcagaaaagaatagagtagaacctaccaccatctgtgtgacaagcctctgtttctcgaagagcattccagattgcggctcttcagattctctggcatcgtatgatgcctgcagcacctccatagcacagccatctctggctacccttgttcatgttccaccgcacttgattcaaagcgacagaattcggagggacgacattaaggtctttaggggattgaacacccttgtcgttccatgttccatcattctcttcctttgcaggagtggctgagattattgcaccagctccttgttcttcgctgtgtccatcggcttgatcatcgccaaattctgtggttaccatgcctgctgcttgttcttcacggtgtccatcatcttgttcaccatcaagttcttgatttacagcacctgctccttgctctttgctgcgtccatcatcttgatcatcatgagcttctagatttacggcatcattgtttcctgtgggggagttgagctgatatgtcagcaggctagtgacatcgcttgtagcaagcgcctgaactatactttgggatggttttgaaccctttttggtccccacaggcacatttggtaatggagatgtttgcagcctgctgccaa

SEQ ID NO: 32468 - DNA, 428 bp, Zea mays
  unsure (1)..(428): unsure at all n locations
  Clone ID: MRT4577_129625C.1
cccacgcgtccgcccacgcgtccgcccacgcgtccggttgtgctcacacctgcacccggtctgatctatggtcggtcgttttgactaaaagatgaagtttggtttgagtcctccaaatgagttcattcgcctccttcacatagatccttttcttgagggccaaagtgaatccattgacttgtgtaggctattttttgtttatatccatgtggccaaaacaagatatttagctgggatacagacaacgtgattcccgcattcatagtttgatcaggtaggtgaagtcgtggtgttgatcacgtggtttgcctcctcttgtggccatgtgttggtatggagtagcagttccttggtagtctgattattttgaagtagcatctttatctnttcggtacaccccgggacagcctctaaaaagtcttgtgctc

SEQ ID NO: 32469 - DNA, 283 bp, Zea mays
  unsure (1)..(283): unsure at all n locations
  Clone ID: MRT4577_129626C.1
actatcacatcccatgcacgcctacctaaccttgtatcctctaccaccgccgccctgtctttgcttttaaacatcccccttcattcccaaagcatctacctttcttcacactgcatatttctcatcactttaattcctattttttttcctatcacttctcctcctataaatgactatccctnnagtcctatattttaccaggcgggggtggttaaacnnatctacnacttcctnacccacaantnccaaaatttcaaaaaattcttcancnatcctatcactc

SEQ ID NO: 32470 - DNA, 416 bp, Zea mays
  Clone ID: MRT4577_129627C.1
aaaaaaaaaaaaaaaaaaaaaaaaaaaaaaaaaaaaaaaaaaaaaaataaagtccgtaacataaaaaaaagcgccggtcgctgtctggaccctggacaccttacggttgccttcgagggcttaccgttctggtgatgttccgtagaattgaatccctggcggcgggctaacccctgcgctgctgcgaaaaccctgccgtgtcccagttatggctctcaggggttacagctttctgtttccaggtcgcgtttgagcgacgatgcccgcactgagcgcgctttcctggcagtatggcagacgccttggccaacggaatatcccctggccggtgtcgtcgatcgcggcgggcttgtcgcttcccccgcgcgcgccctatggactggtcaggtcactgccccccttgcttttggtctgcg

SEQ ID NO: 32471 - DNA, 668 bp, Zea mays
  unsure (1)..(668): unsure at all n locations
  Clone ID: MRT4577_129628C.1
aattcggcacgagggaaaaccgtcaacatgcgtgaaatcgtacgcatcctcccaacgtcggaacttcactggatgcgcactcttatcccgtgttttgcagcagggtcgatatgtttagaataatagctaacgacggcttttcgagcaatagattcacctccagacaggccaatgcggtaaccaaatcggtgctgccttctggcaaaccatctctggcgaacacggcctcgatggctccggtgtttacaatggcacctcgggcctccagcttgagcgcatgaacgtctacttcaacgaggcctctggcaggtcactacactgagggtgccgagttggtcgaccaggtccttgatgtcgtccgccgcgaggctgagggttgcgactgcatccagggtttccagatcacccattcccttggtggcggtactggtgctggtatgggtacgcttctgatctccaagatccgcgaggagttcccggaccgtatgatnggctaccttctcggttgtgccttcccctaaggtctcagatacccgntgtaagagccctacaacgccacactctccatccaccagcttgttgagaactccgacgagaccttctgcattgacaacgaggccttgtacgacatctgcacgaggactctcaagctggacagtccatcctat

SEQ ID NO: 32472 - DNA, 620 bp, Zea mays
  Clone ID: MRT4577_129629C.1
tttttttttccctttttttttttttttgttgaatacttctttcttatcattgaggtacaccatacatccatttatatcttgagaagacatccacaataagaaaaccaactaaagacttctttcttactggggcattttttagccacctgttgcagcccacttcagacatcagctgcaaccgttttgtcaacattccatgacatgtctgaagttgggggttcagtggatgtggacattgtctgtgatggtaaaatataaaatagttcagataaactatatgaaattacatatactagatgaggaacaattttcttgctttaaaagacaagactgataaccatttgataaatattgatgcttttaacaatattaccgatgattattattaactgttcaacattattacttatgctacaacatttgaggggctcattttgttgacgaaaaatgatatcaataaggatactagtcattctattctacaaagactaataactcaattattactaactaaggatgatcatcaaattgttgaggctgataagtattactaatgcaatgcagttattactaatgttatgcagtaattcctaatgatatatagttattactaaattatg

SEQ ID NO: 32473 - DNA, 621 bp, Zea mays
  Clone ID: MRT4577_12962C.1
acggatccaccggagagatctggtctgccattcccaccctccttcccgtgaaccacaaacctaacgcggagcggcgcgggccggccgccgggcgaggtgcgcgtacctgccgtcgatcgtcgccggatccatccaccatgggcggtggcaacggccagaagtccaagatggcccgcgagcgcaacttggagaagaacaagggggccaaggggagccagctcgagaccaacaagaaggccatgagcatccagtgcaaagtgtgcatgcaaacattcatgtgtaccacgactgaagtgaagtgcagggagcacgccgaggccaagcatcccaagacagacgtgtaccagtgcttcccccatctgaagaagtgaaaggcctgaacttagcaaccagtgctggtttggccagggggcgttccttgtgttgagggtgttcattccgtgttatcttcccgtcagtcatgcgtcctgtcctatgttaacctacataagaaagtgatgtggtgtccacttctagtgaaactactgtctgctgttaaaacctggttggtttcagaacgatgattttcgtgtgcaaaaaaaaaaaaaaaaaaagaaaaaaaaaaaaataaaaaaaaaagaa

SEQ ID NO: 32474 - DNA, 476 bp, Zea mays
  Clone ID: MRT4577_129630C.1
cttttccttcccaaggtatccatacaggataagaagaatttccagcgtggaccaattagtacctgtcatggaattctcaatggcttctacatatgtatggcaaacagtatatagccttgcaacagcatgtgcaatggctagaatgccataagtgatctcattgggctcaatctttgctcttttcataccattgaacaccctggctagcccatcaatgttgtgctcattggcttgtattttcaacaggatgttgtaggttgacgtgtgagggaccacacgatcacctttcatctgagaaaggatcttggatatagttttcctgcgaccgggtgatgagtgaaggatgatcaggcggttgtaagcatacggcgagatcggcagggacaattctctcatcttcctcatgtaagcgtatgaatgcttaatgagattcagatctaaagcagccatgacaaggttgttgtagaggagctctt

SEQ ID NO: 32475 - DNA, 456 bp, Zea mays
  Clone ID: MRT4577_129631C.1
acacccttccgaactttataaacaataattaacagattaaattattcctttgaacgaccgttaacagggaagggtgtccatagccttggggggggtttaactgttttgcaactaaattaagttttcaatgagtccaaacttaaatggaaagaatttttttggcccttgccaaaaactactttaaagcttgcagcctataattttgttttaaaatgttaattccaacatgctactactgttgttagtaaagtagtcattttttttaagttgatttttttgatagcctttacatgccttcaattcaataccgattttaactggatccgatccatgccatgccatgccccttatcctgacttccagggctcggcctttttattccagacaaacctgtgcttggtcttttactggatcgtgttgtcgttttatacattattatttttttttttttttttt

SEQ ID NO: 32476 - DNA, 267 bp, Zea mays
  Clone ID: MRT4577_129632C.1
tacaaaaaaaaaaataaaaaaaaaaaataaataaaaaaaaaaaaaaaaaaaaaaaaagggagagatataaaaaaaaaaaaagaaataaaaaaaaaataataaaagactacctctttaaaaatcccaaccttacatcctcttcctttctacgtcttacctctactttagttttacctaatttctattcacttgcctttcttttccatctcataatctggcaaatcctttccgttccccaatttaatcgtcttgcactacatccccttt

SEQ ID NO: 32477 - DNA, 366 bp, Zea mays
  Clone ID: MRT4577_129633C.1
aagcgcgctagcatcgacctaacatcaatggctaccaatatattaaccctccttgctcttcttgctctttttgtgagcgcatcaaatgcgttcattattccacaatgctcacttgctcctagtgccatttttccacagttctttccaccagtttcttcaatgggcttcgaatacttatctgtgcttgcctacatgcaacaacatatgctttctgctagtgttttacatcaaccaattgcctaatttcaacaacaatccttgccacatataacaatacaagccatcacaacgcaacagcaacaacagttcctaccatcactgtaccacctagccattgagaaccctgccgcctactttcaagatcag

SEQ ID NO: 32478 - DNA, 426 bp, Zea mays
  Clone ID: MRT4577_129634C.1
agtaaatactcgtttggcattctgtttcaatttgtccgctgccatggcctttcttttttcggcttccggcattgtgttactttcgtgtccttgcatcagttacaagtacccacgacggtgcgacccaaccctattattcgctgcttttcacgcagtgatgccggcttctttttcaatctcttccttgctccaactccacttatcctgcaaagccttatcgagagatggtccgatagtctccttgctccaccactccccccagctggtcaagaagatctggtccggatcgctagggaaatcggatctggtgaaggcagcaagaatgctttgtgcccctgtagcaactggctttgcatcaggcatatccatggtgagcttgaatccgctgcttctaccgaggccagtgccaggaatcaagcctggcga

SEQ ID NO: 32479 - DNA, 782 bp, Zea mays
  unsure (1)..(782): unsure at all n locations
  Clone ID: MRT4577_129635C.1
ggccggnnggtaccacgttcaaaacggcaagtcgatcgatctgaaacacagatcgatcgacgaccagcagaagacgacgtacgtgaaaccgcgagacagtgcgaggacgactggggtgtggcggtgcgatccatcgacaaggccatgggacaacggcgctttgaggacgaacgcgcagctctggcgactgtggcaagcttgccgctcatcctaacgacagcccaagaaggcggcgccggcgcgcatgaacgacgacaccagtagtagtgacatgcaggtcatcacacccgcgccgctcgctatctcgacggcggctcgaatggggccggacgggtgctccggggaggacgtggcggtgtaccagagcagcgccaaccctctgcccagcggcatcccggcctacaccgtgcgcatcatcaacgtctgcagcggggggtgcaccgtctacgacgtccacgtctcctgcggcgacttcgcgtccacggagctagtcgacccggccaagttccagcgcgtcggcttcaacgactgcgtcgtaagggcggtggcgcgctcgagcccagcgagaccgtctccttccagtactccaactccttctcgtaccacctcagcgttgcgtccgtcgcttgccgttagataactgctggtgagccagtgccgttaaataactgaagccgtcggcccgtgatgatatatatatataacacctggagtagctagctagttccacgtacgtgnttggtggttgtgtttgagtagtctacctatgtgtacttcgatct

SEQ ID NO: 32480 - DNA, 925 bp, Zea mays
  Clone ID: MRT4577_129636C.1
ccggccgggctcgtaccacgttcaaaacggcaagtcgatcgatctgaaaccacagatcgatcgacgaccagcagaagacgacgtacgtgaaaccgcgagacagtgcgaggacgactggggtgtggcggtgcgatccatcgacaaggccatgggacaacggcgctttgaggacgaacgcgcagctctggcgactgtggcaagcttgctgctcatcctaacgacagcccaagctgctgctgctgctgcttctggacgccatctgtctttgcccacgcagaaggcggcggcggcgcgcatgaacgacaccagtagtagtgacatgcaggtcatcacacccgcgccgctcgctatctcgacggcggctcgaatggggccggacgggtgctccggggaggacgtggcggtgtaccagagcagcgccaaccctctgcccagcggcatcccggcctacaccgtgcgcatcatcaacgtctgcagcggggggtgcaccgtctacgacgtccacgtctcctgcggcgacttcgcgtccacggagctggtcgacccggccaagttccagcgcgtcggcttcaacgactgcgtcgtcaagggcggtggcgcgctcgagcccagcgagaccgtctccttccagtactccaactccttctcgtaccacctcagcgttgcgtccgtcgcttgccgttagataactgctggtgagccagtgccgttaaataactgaagccgtcggcccgtgatgatatatatataacacctggagtagctagctagttccacgtacgtgttggtgttgtgttgagtagtctacgtatgtgtacttcgatctgcattgtgtttgtgtgtgtctaactatttctacggtcgttgttgtcgctacacgtttttacgtctaatactatattctggtgaataaattgaagttatt

SEQ ID NO: 32481 - DNA, 238 bp, Zea mays
  Clone ID: MRT4577_129637C.1
cctcgagccggccgggctctagctcacaccactctccccagccgctcctcgagcacccccgtcccgcgccgcctccggctccggcgagatgtcacgcttcggtcgatccggcccgccgtcgacgatccgcagaacgtattcactcctcgatctcagcatcaccttgagcacgactggtgataacctcttaactctttttggccactgcactgagtctaggagggtattcaggcttatg

SEQ ID NO: 32482 - DNA, 189 bp, Zea mays
  Clone ID: MRT4577_129638C.1
tcgaccacacgtttcgattaaaaaaaggagggttttttttttgaaaaaaaaaggccttccctaggggaatggaaaaaaaaaaaaaatttcacatgcattaacacatattattgaactaaggataaatgggcgtcccctctaaaacaacaaagtttacgaaaatcgtattccgaccttttgaaaattttt

SEQ ID NO: 32483 - DNA, 441 bp, Zea mays
  Clone ID: MRT4577_129639C.1
aaaataatcagctcaacggcgcccaaaagggacataaggcttgagagctttcaattcttgccgttcctgatcgccgacaaaggcacaccccgaagtggcgctcgacggcgacgctacccaaacaacagggcacgtccacatctgagcttggcacaacacaaaaacagtaacggccgaggacaaccctatgggatggagtgacaagccaagtgttgcggaaccagatacaggatcaacgacagggtgcgccatttatgcctggccgctctcctggtaacccgggggccggtcggcgactaatctggcacactgtagctgactccagcagcaacagcctgccatacggacctagccgtaaacctacccaggggaggcctccgccaccttgttgacaacaccatgggcttgggggcaatcctacatacgataccagcaaaacgg

SEQ ID NO: 32484 - DNA, 892 bp, Zea mays
  Clone ID: MRT4577_12963C.1
gagccggccgccgggcgaggtgcgcgtagctgccgtcgattgtcgccggatcctccaccatgggcggtggcaacggccagaagtccaagatggcccgcgagcgcaacttggagaagaacaagggggccaagggtgcgcgcctcttttctctcttccttcaacgaccccccttccgcttcttggatgctatgtgttctcttcgagccattgctctgggagggcgctccgatctgatggatctgcgtgtttccgctgtgcagggagccagctcgagaccaacaagaaggccatgagcatccagtgcaaagtgtgcatgcaaacattcatgtgtaccacgactgaagtgaagtgccgggagcacgccgaggccaagcatcccaagacagacgtgtaccagtgcttcccccatctgaagaagtgaaaggcctgaacttagcaaccagtgctggtttggtcactacgatcgggccagggggcgttccttgtgttaagggtgttcattccgggttatcttcccgtcagtcatgcgtcctgtcctatgttaacctacataagaaagcgatgtggtgtccacttctagtgaaactacctgtttgctgttaaacctggttggtttcagaacgaagattttcgtgtgcaaaacaaattactggtccgtgggagttgggccagtttgcattgtcttagaatgtgcctcttgcccagcggaagaattcctttgcaaagacaatttttcggagttttagaaatcccttagaccttaggccttgttagtttgggcaggaatggtgggttggaacgaattctaaccggaatgttttcgcattaaaattaacgttgacaagcgggaacgtcgaaaagagggacgaaaagagggacgaaaagagtagag

SEQ ID NO: 32485 - DNA, 650 bp, Zea mays
  unsure (1)..(650): unsure at all n locations
  Clone ID: MRT4577_129640C.1
ttgggtacctcgaggccggccngggccggggtttctcgacgctcgtcgctcacactagatgatccgataccgatcacggacactgacgtcggcctagccatggaagactacggtgttagctcaccagacacgccatcctcacacttaccgtcctcgtccgacgccccatttcaccgaccgacatgcaatcacgtgagaccgcaggaagatggtgatgcatggtgaggtgaagaaggcgctgaacgagggattgaggccgctgatacacaggctctccagagacggaactgtcagccctgctcctgctgaaaagacagaagggtgaagtcgccacacaagatgattggaaacgattgctgctacacaggcgtcagaaactgctcttacaaagccggactacaacacgagggtgactccaatttcaatggtgccgctgatgatccaaatctacgtcttcctgatgaccataacatgtatggcctgaaccctactgttgcaaagatcttcaacgcgtcaggtcctgcttctgtgagagagaccgtcccttatgagatggacgtgagcaagatctcgcagactggaggttatgagccgagggcgtacatatggtacgagatcgagctctacgcttgccagaacgtgttctacaa

SEQ ID NO: 32486 - DNA, 200 bp, Zea mays
  Clone ID: MRT4577_129641C.1
acaagctttttttttttttttttttttcttttttttttttttgcttaagtgtttagccttgcgttgccttaatgagtgatctaactcacatccaacaccggggcgcccactggccgggctgcatgcgggaaaccagccgcgccagctggagcaaagaatccgccaacccgcggggaaaggcggcttgccaattgggcgct

SEQ ID NO: 32487 - DNA, 713 bp, Zea mays
  Clone ID: MRT4577_129642C.1
cgcttacagagatgaaagatacaggagcaacatgcaactccagaagatgagtctccctcgccgccgccaccttgtcctgctcgtctgcctcctggtcttcctcgtcttcgccgtgtccgcgtctacgagttccgccgaggtgtgccctagcgtgtcggtggacttcgtgcggcgttcgtgtcggtcgacgtgagtcacccgcgttgtgtgcgagagcacgctggtcccctgcgcggctggagtggggcgtagaccgcgcctgctgtcgcgtagcggccgtctggtggttggcgccgaccgactgcgcgcgactgctcctcctacatccgcggcggttgcggagaagagatgaatgactgcgacgttactgtgttcgtcgacgactatggagcctgtgcgtgagtcctctgcagagatggagcgtatggatcggtgccggtgcacctcgcttcgcttgggcccttgctagacgtccagacctgggccagctgcgcgatcaccgacatcgctccaccctgtctcgactccctcgacctgcagatcacgcgttgggcagcgactccgtgcgacaccgatcggggagaataagaagtagctgcctctcttccctgccattgatttttcattgatacacaatgatggaaatcgctcctttggccaccccatgtgagagtaccaaatgatgctgtcccattgatgggcattgaaatttt

SEQ ID NO: 32488 - DNA, 300 bp, Zea mays
  Clone ID: MRT4577_129643C.1
catgcctgaagacatcaccaagggaactcagtccctacccacagcctctgcctccaagtttcccagctctggcccggtgacccctcagccaacagccctaacatttgccaagtcttcctgggcccggcaggagagcctgcaggagcgcaagcaagcactatagaatacgcaagaaggagattcacagagagacgagcccaggaggctgactgagctcaaaggaacaggatggcacccagagccgcaggacggagactgggggcagccctcacccaactcacaacaggctggatgggtggg

SEQ ID NO: 32489 - DNA, 601 bp, Zea mays
  Clone ID: MRT4577_129644C.1
atcatttcttgatgtcatgttccactatttcatgctgatgatacaagattgacctttagggttgtttggattgtgggatcagagaagtgggatttggattaggatgtggggtgatataatgctaacctttaataaaaaataatgaagaattctgctcaataacccactaaaaaaataatgaagaattcagctgctgcagatgctataatttctccagcttcggcgactggtttggctgctgatgggacagatcacgttggtcagggcccagtcattatcggggatgtggcagatgctattgtgtctccagccacggcaataacttttacacgttctgaacctattttgagtttggttgagcctactgcggctgtggcagacattctgatgtctccagctggggtggctcccagtcttcttccttcttctggcgagcaggagacttcccagtctttgcagagagaagagttcattaaatctgttactcggcaaccttctaaattgcttcctgctcctccagtcatcttgaagaagaaggacaacaaactgccctccagatcggtgccacgtcgcaaccgcagatttgctggtgtaggcgttg

SEQ ID NO: 32490 - DNA, 448 bp, Zea mays
  Clone ID: MRT4577_129645C.1
ccgttggcccaagggggggggggcccggccactaaacgacctgggggggggggggggggccgaaatacatacccccccggggcccctgaacaagggcattggaaaatacctttacctaaccccaccgggttggggggccgggcgaccgtaccctttaaacttttcctgttccaccggccccgccgaagcggggacccatttgcttgggggggggggttccaggaacaaccccccccccgaggccccttggatttgggccccttaggagctggaagggtccatcagcgccccagccccttgtccccgggttggcccgaagccagcgagcttgtccggcttccggggggccccctcccttcttccgggcgggggggcccccccttgtggcccgggggaggggccgggacccccccaatgggggggggggaaacccccgggccgggggagg

SEQ ID NO: 32491 - DNA, 303 bp, Zea mays
  Clone ID: MRT4577_129646C.1
gtctcgtgttcgacgaaaacactctgtgatggggtttctaatctgaagaatcgatgcccaaaatatttggacatgctcaatgatctaagatcctacctatcacatgtctatcccaagctgaatacaaattcttttcctggatgatgatatagccgcccagagggacctaactggactatgggaggctgatcacaatggtaaatgcaaatgttgaccgggtaacatggggtgagtaggtgacaccgactagatccgggcctacatgaatcacacccacaccgtgttcaatgtcaagcgcctcat

SEQ ID NO: 32492 - DNA, 474 bp, Zea mays
  Clone ID: MRT4577_129647C.1
ggaagataaataacttaattcctaaaaccaaacacgccctaaagggccattaccaggttactttgggctacgggcaatttttgcatgtttccggccatcgatttttccaagaaaggcccaggggtccatcagcttttccgggttacccggggcataaaaacgggggtccacagcactttttttttacttttaggggagccgcaaaaagctcaatccattaaaaaactttcctttatttttaacaacagaccccccaaaaaacttttgggggggaaaattcatgtaagccaaaagggcatgaatacattgttttgactggcccactggtgcgggaaaaaccagggaaacttttcatgagtcatttttgggccccggtgggaaagggaatgggcccacaaaagcttttgcaaccggggggggggattgcatgctggaaggattcctgttttggggtttttgggggggttttttttt

SEQ ID NO: 32493 - DNA, 525 bp, Zea mays
  Clone ID: MRT4577_129648C.1
ttttaacacagtactgtctccatcaataagagaaaagaaaatacgcataaggtatcatgctatacgagaccagtttaggcaagaaagggaaagacggaatctactcctcgtcatcctcatcagaggccttctgctgcaggaggtagcgaccctcgccgttgggggtggtctcgtgctgcagagtaagcttggtgaggtggccgatgatgttctccatctgggtgtcgtggtggctgcgcttcttgcgaccgatgtcggcaagagaggggatggagttgaggaggtagtagacgatggcgatgacgatggtaacaccgatggagtaaccccagatgacgacaacggtgacaatgtcagtgtggccgttaagggtctgggtccactgggacatggggttgttgaggggaatctggtaagggttgccggcgagccaaccgaaaacacagaagagggtggcaagaacgtcgacggcaccgatggcgatgatgagctgccacgaggggaaggtctgaccaccacgggtga

SEQ ID NO: 32494 - DNA, 1053 bp, Zea mays
  Clone ID: MRT4577_129649C.1
atggccatcactttccaacacaagatcatcctcagccctgggtccatgttctacttcggaacaatttcatccgtggaaaatgaagaaggaactctacaccgcatcgcggacccgccagagagaaggtctccctcaacaatctccgggaaagtcggagcgaagctggaaagagcacaacctccaatgcctcgagaaaagaccaccttcagcgagctaggagccgagagtccaactacccggagaactccactgtccacctctccaatagaaagatggacacggatcacaaggaagaaggatcgtcaaactgctcttctggtgcctctgccctcaaaggagaacagaaagaagctcattgcaaggacaactccattctaccctgacgtcctcttcatcgggagagtggaatcaccccccatctccgacgatgaaccaaccgcgcctggggaagaaccacctcagcgagaatctcaccgacgaaggaaccggcgccggaatattcgacgacatcacgaggccggagaacgggacccaacgcagcccgtatcacgagacgaggcctcagagataggagaaactccagaagaacaggtcttcagggagagaaggaattcccgacgacgcgatcatcgacgagttcaagaacaagctgtacaggaggcaaggcaacgcagagagaatcctctcctcgggcgaaacctaaaccctgacttcgcccgcgccatgaacacgttgagtgaggaagacacatgtggggtattggcgctcactccacgtcttagggccattcagtggccccccaacttcaaggtctccaacgtcgacaaatacgagcccaagcaggatccgggaggctggctggctgtttacaccaccgtcgcccgagccgctggagcaaccgaagacgtgatgactgcatacctacccatcgtcctcgggcaggatgctctgcaatggctgcgacacttaccccgacactgcatcgatgactggagcgatttcagtcggcgcttcaccgccaacttccaatccctctccgacaagccggcgtag

SEQ ID NO: 32495 - DNA, 551 bp, Zea mays
  Clone ID: MRT4577_12964C.1
cccacgcgtccggccacccgtccgtgaggttgtctttctgtccttgttttttttttttttgtttgccttgcaagtggtcattcaggccatggctcacactgacactgccacccatggtgatgcgtgacacattattcctcactcatggccgttcaatgactcaactagctatctagccagcgggtatactacagcacataatgttcttcagtggggaacacctccggcagcagcgtaggggcttggattcagttgctgcaggccctacatctactacagttgttgttatatttgtgcccacaacaaaccccatacctgcactctttgcgggtgctgctgtgggatggactggaggaccaaaccaaaaatcgcctggtcccggtgctgaggctccactctgcctgagctgctggcaacactgttgccgtaacaactggcactgaggcgagcattagggcgtcgccgttggactgcactgatgcctgaagaactcgacgcactggcccaggatcggggtgctgccaacgccgcatgttccctgcagctggcac

SEQ ID NO: 32496 - DNA, 1393 bp, Zea mays
  unsure (1)..(1393): unsure at all n locations
  Clone ID: MRT4577_129650C.1
cttctccctccggccgttggtggggaggaggacggaagatagcatcgccaccagcttcttttcctccctcctcctccatcatccatctctctctgcctcttccttccacgctgaaggaagccggttcgggcgccctgctctcgctcagctcggcacccccgcggaaaccgaaccagtagagcccagccccgtcttcttggttgctcgtctctctgtttgtcagcagcctgctgctgctcttgcttcggcttcagagaggcgccagggcgcccagcggattgcctccgttctcggttcttccgaagaagagacagtagaagatagagatcagaaggattgtctctcatggggaactgcttggggggcagctcctacgtcaacaaggtctcctccactgcaaagccagagagtcctcctaaggtgcagagcccgtcggaagtggaccggagcgacgaccgcaagctgccatcgaacccgggcgaggtagaggccctgcggcggggcgcgtcggcggcgacgcggcggaacccgctcgtggccttctccttctccgagctcaggacggtggccaacgacttccggaaggacgcgctcatcggcggcggcggattcggccgggtgtacaagggttccttcgcgtcgccggccggggcggcagacccgagcggcggcaccctcccggtgccggtggccatcaaggtgcacgacggcgacaacagcttccagggccaccgggagtggctggcggaggtgatcttcctgggccagctctcccacccgaacctggtgaagctggtggggtactgctgcgagggcgagcaccgcgtgctggtgtacgagtacatggccctgggcagcgtggagtcgcacctcttctcgcgcacgtcgccgccgctgccgtgggccacgcggatgaagatcgcgctgggcgcggcgcgcgggctggcgttcctccacgacgcggagccccgccccgtgatctaccgcgacttcaagacctccaacatcctgctggacgcccacttcaacgccaagctctccgacttcgggctggccaaggacgggccagtcggggagcagtcgcacgtgtccacccgcgtgatgggcacctacggctacgcggcgcccgagtacatgatgacgggccacctcacggagtccagcgacgtctacagctacggcgtcgtgctgctcgagctgctcacggggcggcgctcgctggaccgntcacgcccgccgcgggagcaggcgctcaccgactgggcgctgccggcgctgccgcacaagaagcgcgtgcagggcattgtggacccaaggctggcgggtgccggntgggactatgagtcgaccgacagggccgtgcagaagatggtcatgctggagtaccattggc

SEQ ID NO: 32497 - DNA, 373 bp, Zea mays
  Clone ID: MRT4577_129651C.1
acattaggccaatgttcatttccagattccataaaataactcatttgctgtgaatagggagcagcaaccacactttacttgcaaaagaaaaagcaccacccccagggggcggaaaccaaaccacaagggcccccccagggggtaagtaaccaacccaccgggagggggaaaaagaaaccccctctcacaccaaacatggggaggcctccaccaccctagggagcaggcccggaccgaaggggcccaacagaattcaaacgagccagcgggtaaacaaaaagaaaacacgggggggggggagaccaagggatcaccccccaagagcgcccgggtggcccctcggaaaaacacaaactgggggccaagggacaga

SEQ ID NO: 32498 - DNA, 229 bp, Zea mays
  unsure (1)..(229): unsure at all n locations
  Clone ID: MRT4577_129652C.1
ctcgctcgcgtccgcacaaatcccggctcccccgctgaaaaccctncccacctncggnggcggcggcggngctggcgaccgggtgtntnntncggngagnntncccnctaaaacaagaaaaatggatgtacctgnngngaccntgnngagaactatgaagnctagaccctgggcangtggaagaagccactacttatgctaatgggcaggaaaagnacaaggaagaacc

SEQ ID NO: 32499 - DNA, 400 bp, Zea mays
  Clone ID: MRT4577_129653C.1
atccaaaaagagagagtggaaaagatggcgcggttgatcacagtggtgtggtgcgcggtggcggtgctattatgcgccgcggccggtgcgtcgtgggtggaggaggcggcgaacccgatacgaatggtgtctggcgtggaggcggaggtggttcgggtgatcggggagtgccggcgtgcgttgaagtttgctaggttcgtgagcaggttcgggaagagttaccaaagcgaggaagagatgaaggagaggtacgagatattctcgcagaatctcatgttcatccgctcccacaacaagaagcggttgccctatactctctctgttaatcattttgctgattggacttgggaggagttcaaaaaacacaagacttggaactgcccaaaattggtctggcact

SEQ ID NO: 32500 - DNA, 272 bp, Zea mays
  Clone ID: MRT4577_129654C.1
ctccgctgggccaccagctttgaccgccgcctcccttccgcctccgctactgcgacctctccacaccactcatccgcaggagcggcggcagcggcagcgacgaggtcgtagccgacatcgacgagctgccgcacaaccgcgaactcaaaggcaagatgctcgggcgcgctccgaagaatagcgacaacaccaagtactacgagatcctcagggtacccaagtctgcgtctcaagacgagcttacgaatgcctaacgcaaggctactatgcag

SEQ ID NO: 32501 - DNA, 170 bp, Zea mays
  Clone ID: MRT4577_129655C.1
atatcgccatcatcaaaaatacgtatgttttatataaaaaatttcaatccactccaaaaaacttttattttgtgcctcgactaaaaaataaacaatcgttaacacacacttctttgttcttatagaccaacttcttatcaaaggaaccttataaccaataggtgtacatt

SEQ ID NO: 32502 - DNA, 1187 bp, Zea mays
  Clone ID: MRT4577_129656C.1
cccacgcgtccgcccacgcgtccgcaaaaccctcgccctcccaaaaactactcacgtctcgccgccccgccgtatcaccctttctcggcggccggcctcttctcttcacggactcgcaggtcatcgagatgtcgtcggcggaggcgaaggccgcggcgaaggcggtcccggagtctgtgctgcgcaagcgcaagcgggaggagcagtgggcagcggacaagaaggagaaggccctcgcagacaggaaggaggcgcttgacagccgcaagatcatatttgctcgcgccaagcagtacgcccaggagtacgacgcccaggagaaggagcttgtgcagctcaagcgtgaggctcggttgaaggaggtgggttctatgtgagcccagaggccaagcttctgtttgtggtccgcatccgtggtatcaatgccatgcaccccaagacccgcaagatcttgcagctcctgcgtttgaggcagatcttcaatggtgtctttctcaaggttaacaaggcaactattaacatgctacggagggtggagccatatgttgcgtatggatacccgaacctgaagagtgttagggaattgatctacaaaagaggttatgggaagctgaacaagcagaggattccgcttagcaacaacaatgtcatcgaggagggccttgggaagcataatatcatctgcatcgaggaccttgttcacgagatcatgacggttggcccacacttcaaagaggccaacaacttcctctggccattcaagctgaaagcgccccttggtggcctcaagaagaagaggaaccactatgtggagggtggcgacgctggcaaccgtgagaactacatcaacgagctcatcaagaggatgaactaggctctcttgtatcttgtgagaatgcattcgatgtcggcatggatatgcaattttgttccatggctgtcatacgtcacgacttcaactaggaaatgggtcctgtttatgtttgcagttgcctctgtaggttttaatacatcaagacataaaccaacacgtgccccaagtgtcactcgctagggctaccaagattgttgcaaaaaagatagcactttttcccgtcactgattatatatttagttctagtttaaaaaaaaaaaaaaaaaaaaaaaaaaaaaaaaaaaaaaaagggcggacgcccaagtaaattata

SEQ ID NO: 32503 - DNA, 321 bp, Zea mays
  Clone ID: MRT4577_129657C.1
gaaaaccctagccgccgccaccgaagcggcctcccaggtaagcaggatcgtccagcccgccggcgcgtgaagcgcaatccccgcgtcacgaactcccccccgaaatgccccaaggggcactttacgggcccctccttcgttcggccggttcttattttcccggggctttccaccgaactcccccacaagtacaacctgcgcttcattccgatccccaaggaccaccaagttcaagtccttccccgcacctaccagggccctgaggggaaaggggtgcaagtgtaccccccgccgttggttattcacgtcgagcggatcacc

SEQ ID NO: 32504 - DNA, 1653 bp, Zea mays
  Clone ID: MRT4577_129658C.1
caccctttctcggcggccggcctcttctcttcacggactcgcaggtcatcgagatgtcgtcggcggaggcgaaggccgcggcgaaggcggtcccggagtctgtgctgcgcaagcgcaagcgggaggagcagtgggcagcggacaagaaggagaaggccctcgcagacaggaaggaggcgcttgacagccgcaagatcatatttgctcgcgccaagcagtacgcccaggagtacgacgcccaggagaaggagcttgtgcagctcaagcgtgaggctcggttgaagggtgggttctatgtgagcccagaggccaagcttctgtttgtggtccgcatccgtggtatcaatgccatgcaccccaagacccgcaagatcttgcagctcctgcgtttgaggcagatcttcaatggtgtctttctcaaggttaacaaggcaactattaacatgctacggagggtggagccatatgttgcgtatgggtaagtttgtataaatttagctgccgtgagtgcatttttggagtgttgggatgcattttaacacaacactgctgtggctgccgcttcatcagttttgagaatgaaacactgaagtacggctgttgagaaggggctgtaatcagcagctgcacactcccttgtatcagttcccacctaagaatgtgatccttcccaagggatatctaagcacaaaaaatgccgcatcactcataagattatcaagaattcaggttgcttttgggttcaaagaatgcaacagttaatttaatttgtttagactgtttagctcctttattaactgtactataacctgcatattggtgtgatatttgcagtaacttttccagagttgcattaattaattcacattcacatgaatcagccctgtggcaccaaatccctgagttctgataattttcaaaccagaaattccacttgtttatcattatgatgtccagaagcatgaacatctacctttcatctctccagatacccgaacctgaagagtgttagggaattgatctacaaaagaggttatgggaagctgaacaagcagaggattccgcttagcaacaacaatgtcatcgaggaggtttttccatccacaactaccgtgctgaatctgattacatccacattccaatttccgccttatgtatattttgcttaccttctgttcattatagggccttgggaagcataatatcatctgcatcgaggaccttgttcacgagatcatgacggttggcccacacttcaaagaggccaacaacttcctctggccattcaagctgaaagcgccccttggtggcctcaagaagaagaggaaccactatgtggagggtggcgacgctggcaaccgtgagaactacatcaacgagctcatcaagaggatgaactaggctctcttgtatcctgtgagaatgcattcgatgtcggcatggatatgcaattttgttccatggctgtcatacgtcacgacttcaactaggaaatgggtcctgtttatgtttgcagttgcctctgtaggttttaatacatcaagacataaaccaacacgtgccccaagtgtcactcgctagggctaccaagattgttgcaaaaaagatagcactttttcccgtcactgattatatatttagttctagtttgac

SEQ ID NO: 32505 - DNA, 1631 bp, Zea mays
  Clone ID: MRT4577_129659C.1
gctggtttaccactatggctgcggccttatgaagtaattgttacttcagcttatacagcactaattgagaccatccctgatacggcatcaatccattccgtcaaaagtaggtttcccaatatttcaagtctccgagactactatgtagccaagtatgaagagaattctccaaattttaaactcgcacagagaaactttgttgaaagtatggctggatattcaattctgtgctacctacttcaggtgaaagatcgccacaatgggaatcttctaattgatgaggaaggacatattattcatattgattttggtttcatactgtcgaactctcctggaggtgtaaacttcgagagtgcaccatttaagctaacgagggaactccttgaagtgatggattctgatgcagagggaactcccagtgagttctttgattactttaaggtgctatgcattcaaggtttccttacttgccggaagcatgcagaacgtattatacttcttgtggaaatgttgcaggattctggctttccatgtttcaaaggtggccctcgcactatacaaaacttgaggaagaggttccacttgagtctaactgaagagcaatgcgtatccctggtgctctcactgatcagtagcagcatggatgcttggcgcactcggcaatatgattactaccagagagtattgaatgggattttatgattttccccacaggagcaacgaattcatccagaaaccaattttcttgtatccttggagcaaaccatgggattgcataggtcagttttgggctgatctatgctggcaccccatatcagatttccaggagaggactaggttattgatcactgtgttttcatgtggcattgcacatttgtggtcaactagggaaacagattggtgccgcattgtactttcatgggaccccccctctgaaagagttgagaagtgtacagtcatcggcagtcatctagttagcgctttgtgctaggaggttgtgaccagtggagctctatttggcatattggaatttggaatccggctacattgttgtacagacctttgattgacgtagcttggagaggatgtaggagtgaacagggccatgctttgaagcgaacaagttataggcatatgggagctggggatcatccgagacagatgccgctcgaagtgtcactgtacttgttgtgtggtatccctatagcaccaaagtagatggagatgtgctttgctaaaaaaaagataaagacccagtgttggccgctctcatatgtcactaggtctgaaaggaaattggccgctaatttgcgcgaggcctgtccttcagagaggtgctttgctgcatttgtaaattatcattactgtacagggaccatactgtcttagcattctgtttttaagttgttaagattttaattccttctttgtgggtgtcttggtcttcgaagatctaggtgattggtcttccaagatctaggtgatagcttgtttgactagcactatgatcagtgttcgaaagtacagttccatgtgtcatgaagaaaaacactgcaagatttttaatacatttttgatgtactataagaacaaataaaaatttcaaaaaaaaaaaaaaaaaaaaaaaaaaa

SEQ ID NO: 32506 - DNA, 745 bp, Zea mays
  Clone ID: MRT4577_12965C.1
ggtcgaccccgcgtccggtggggactgcccacccccctcgccacttcccgtgaaccacaaacctaacgcggagcggcgcgggccggccgccgggcgaggtgcgcgtagctgctgccatcgatcgtcgccgggtccatccaccatgggcggcggcaacggccagaagtccaagatggcccgcgagcgcaacttggagaagaacaaggggtccaaggggagccagcttgagaccaacaagaaggccatgagcatccagtgcaaagtatgcatgcaaacattcatgtgtaccacgactgaagtgaagtgccgggagcatgccgaggctaagcatccaaagacagatgtgtaccagtgcttcccccatctgaagaagtgaaaagcctctgaactagcaaccagtgccgtggtcatggagttgaggaaatgtgtctgttagctatgcggtttggtcacagtcagtacaggtcaggagctttgcctgtgcggagggtgttaattccgtgttgtctgccgtcaatcatgcgtcctgtcctatgttaacctatacataagaaagtgatgtgtccacttccagtgaaacctattgtctgccgttaaaacctggttggtttcagaacgatgattttcatgtccaaacagattgctggtccgtgagaattgtgccagtttgcatgttctaaatatgtctcctggccattgcaagaatccctttgcaaatacgatttattgtagttttactccgaag

SEQ ID NO: 32507 - DNA, 322 bp, Zea mays
  Clone ID: MRT4577_129660C.1
gatcggctgactgtgcgcctgtctttgacggcgtactatatggacggacacaactctatcccggaggcgggcgctctaaaggctatttaccagagtttaaattcgctcggcacgctcatgtgttccttgattaagacgagggtgggactgttccagagcctgaacagtatgagtgtaccctggattctgataccggaaagcacaacctggcgggtgacgatcatggataatgtgtgctactctggggaggaaggtagtcacactacaaaccgaaggaagggatctgcagctctaatcgtatacagtgcgatactttttgcca

SEQ ID NO: 32508 - DNA, 305 bp, Zea mays
  Clone ID: MRT4577_129661C.1
aaaacaggggtgtgcttttttctcagcaacgcaccaatggattaccctagggaggggggtataatataattaaaaccccagcgtgcctgccaggggcacaccgaaatacatagggcgtgtattttcctcacaacaggaaaagacccaaaaccacgccaatgcaaccacacagattgacgtatgccatgcaaaaccacaagcccgagactaaggatacgggcattaacaatcggcggctgatcctaactaggtttgctcaaagacaatcaactaagccacagggatactggctaggaccttgaaat

SEQ ID NO: 32509 - DNA, 151 bp, Zea mays
  Clone ID: MRT4577_129662C.1
aagcaataccttaagcaaggactaatgtctcaagcgcaaccccctacgttcacaagcgcactggatacacgttacatttcaggataaccatgcttctgcgatataggaaccacgtaccggtgagtattactctcggacgattcctgacaag

SEQ ID NO: 32510 - DNA, 414 bp, Zea mays
  unsure (1)..(414): unsure at all n locations
  Clone ID: MRT4577_129663C.1
cgcttcctctacctcctcccagccgagccagcgccggtcactccaggtcataggtggtccccgccaccgtgccctctccactggccgtcgcgtacgccacctccagcgaacacgcctccacgcatcctccacgggcagctcgctgtcgcgacacatcttctctctctctctacgtgcgccctcgccagcccgagtcctctctcttcgctcgcgccgccaccggcaccgtgcctgcgctgccttgcatctcccgaccaccagttgtccttcccttcatcctcctctcacccaaacagtcgtatgggcccttcgccgccgaccacgtgctcgggtgcagctacctccaaatttcccagaccgaggcggcacgacaggcgtncagcggcaccattcggctttagaagatggagcggg

SEQ ID NO: 32511 - DNA, 2142 bp, Zea mays
  Clone ID: MRT4577_129664C.1
acacaaatgagagacatgtattgcaatttgcaatgctctatccgctattttacttcattgccgcatttgattctacctgtctcgattcttactttgtctaaaggagtttctgaaaaatttactcaagcttcagataatcagaagttggaagcaaaatctcgccttcttgacctggtcaataaaggtgtagaggcatcgctagtgcagcttcttgagacaggcttgttgcatgctgatcctcatcctggtaacttgcgttatactcctgaaggccgtgttgggtttctagattttggtttgctgtgcatgatggagaggaaacatcagcgtgctatgcttgcaagcatagtgcacatagtaaatggtgattgggcttccgtcgtttatgatttgactgaaatggatgtagttccaccaaaaaccaatctacgtcgtgtgtccgtggatttagaggatgcattaggcgaggtaacctttgaagatggcattccagatgtcaatttttttaaggtgcttggaaaaatttggtctgtggcatttaaatatcacttccgtatgccaccttactacacacttgttctccggtcacttgcctctttggaaggactagccgtggcagcagatgggactttcaaaacatttcaagcagcatacccatatgttgttcggaagcttctgtccgaaaattcacttgaaacaagaagactcttgaatcaggcaatttttaacaaaaggaaagagttccaatggcagaagattgacgcgtttctaaaattggcttcagcaaggaccaacttcaagtataacagtgaagttttgccagagcctgacatgaagtccatgaatgtggctagccttgtggagatcagtgatgcatattcacttgaccgtgctatagctacaccagagagagcattgcatactgcaaacctgtgtgtgaggcttttattatctaaggagagcattgtgattaggagacttattatgacagcgaatgcaaaatctcttgcccgtgatctgatctccagagatgctttgatgttccgggtgctccttagtaaggttattgcggatgttgtctaccaatggatgttgagtgccacaggcttgaaacgagttatggagaccaagatccagacgcccatgaccacaggaaagaacgagggacatctggtgctggctgaagaaccatcgaccctgatggtactccaggcggcagtaaaagaccgaaggattcagctcatgttcaccaagtttgtgagggagttgagagaggagcccgtcttgatgattagggtgagctggaacgtgttcctcatctcggtctcatctgccgctgtaggcctgcaccgtttcttggtgttcttcttgaaggaggatggtgccaggttcttggatgacaaggtcaagaaaatgaagatttggctgatggagttctcgaagcggacggctaatctggagattcaaggaattctgtgaatgttggtggcttttggttgaaggatttaatagctgcttcgcactctggtttttggagttactttctgcatcgagtgaatccagttcctgtttacgctggctgtctgagcttgcttggctgctggtgttcccagagatttataaaaacagggttttcctccgtcattccgccgcagctagtatataatagatggttcttggttgttcatgtactgtgtagctgtatataatagaaacattgcaggatcagtgagtaattctgtggccgagtaaagtgcagtggtggaaggcatgtgttacctactggatataaatatgatgatgtgaatgttcagttgaaaaacttgggtgacatgaactgatgaactatagctgatgcctgcactttagaaatttagctgttttagtttgtctaaaatcaaaatcttcgacatacgttaatttggttctgtcctccgccactgtgcccactgcccacttatgttattttcatgtttgaaggaccaacttcaagtatagcagtgaagttttgccagagcctgacatgaagtccatgaatgtggctagccttgtggagatcagtgatgcatattcacttggccgtgctatagctacaccagagagagcattgcatactgcaaacctgtgtgtgaggctttccga

SEQ ID NO: 32512 - DNA, 737 bp, Zea mays
  Clone ID: MRT4577_129665C.1
actcgtctctcccctgccagccgccgccgccgccacccggctcctccgcgacctccacctcaccgccgcccagatccaactccgccgacgagcccaaccgcctccaccgtccccatccgcgccgtcgtcgcagagcgagcctcaacgacggccccgtcgtcctccgcctccagcgggtcccgccgcccctgctgctccgtcccccgacacctcttgccaccggagttggccctccagccaaggtggtgcaatggcctcaggcatcatgttccgacgtctttccaagacactcaccatgagcccagcaacagcactggcatctggtatgaccagccagcaccaccagcttcagcagcgtgcaccggtgagtggcacgtccaagggcaaggcgaagctcaaagctgggatgcctctgaggcgtagcgtcatagccaagaaggggggcgcgcctgccactgctgggagcggcggcgctggccgtggtcgccgtgaagccatggagcgtattactcagattgcagagtcttgtctgaagtcctccactcctctacggcacctgtcccccaaggagcgtctccgcgaggcaaagcgtgaggagcttgggctcatctccatggaacggcaacgtgagcttgacgctgccaaggctaaagctaaagctaaatccaagggtgccagtggaggtgatggtgaccgtgttctgatgggtccgccgggccttgactatatcagtcttg

SEQ ID NO: 32513 - DNA, 1577 bp, Zea mays
  Clone ID: MRT4577_129666C.1
ctatgcttgcaagcatagtgcacatagtaaatggtgattgggcttccgtcgtttatgatttgactgaaatggatgtagttccaccaaaaaccaatctacgtcgtgtgacaatggtgcttgggaaaaatttggtctgtggcatttaaatatcacttccgtatgccaccttactacacacttgttctccggtcacttgcctctttggaaggactagccgtggcagcagatgggactttcaaaacatttcaagcagcatacccatatgttgttcggaagcttctgtccgaaaattcacttgaaacaagaagactcttgaatcaggcaatttttaacaaaaggaaagagttccaatggcagaagattgacgcgtttctaaaattggcttcagcaaggaccaacttcaagtataacagtgaagttttgccagagccggacatgaagtccatgaatgtggctagccttgtggagatcagtgatgcatattcacttgaccgtgctatagctacaccagagagagcattgcatactgcaaacctgtgtgtgaggcttttattatctaaggagagcattgtgattaggagacttattatgacagcggtatgtatcacatcttatctgcacacttctttacttgtgttgtagcaacggcccacctgaccgacatttgagattgacgtagttagctcactccgaatcctattgtgcagaatgcaaaatctcttgcccgtgatctgatctccagagatgctttgatgttccgggtgctccttagtaaggttattgcggatgttgtctaccaatggatgttgagtgccacaggcttgaaacgagttatggagaccaagatccagacgcccatgaccacaggaaagaacgagggacatctggtgctggctgaagaaccatcgaccctgatggtactccaggcggcagtaaaagaccgaaggattcagctcatgttcaccaagtttgtgagggagttgagagaggagcccgtcttgatgattagggtgagctggaacgtgttcctcatctcggtctcatctgccgctgtaggcctgccccgttttttggtgttcttctttaaggaggatggtgccaggtttttggattacaaggtcaaaaaaattaaaatttggctgatggagttctccaaacggacggctaatctggagattcaaggaattctgtgaatgttggtggcttttggttgaaggatttaaaaactgcttcgcactctggttttggagttactttttgcatcgagtgaatccagttcctgtttacgctggctgtttgagcttgcttggctgctggtgttcccaaaaatttataaaaacagggttttcctccgtcaatcccccgcagctagttcagatccaaagcctatataaaaaacagcgcccccttagaacataaaaaaggttcttggttgttcatggactgtggagctgtaaaaaataaaaacattgcaggatcagtgagtaattctgtggctgagtaaagtgcagtggtggaaccgtggaaggcatgtgttaccccctggaaataaaaatgataatgtgaatgttcagctg

SEQ ID NO: 32514 - DNA, 336 bp, Zea mays
  Clone ID: MRT4577_129667C.1
cacactcgaggtccgactgcaatgctctctctggtgtagctatagcacggtcaagtgaatatgcatcactgatctccacaaggctagccacattcatggacttcatgtcaggctctggcaaaacttcactgttatacttgaagttggtccttcaaacatgaaaataacataagtgggcagtgggcacagtggcggaagacagaaccaaattaacgtatggcgaagttgaaactgtgtatgacaaagtaagaatcgagacaggtagaatcaaatgcggcaatgaagtaaaatagtggatagagcattgcaaattgcaatacatgtctctcatttggg

SEQ ID NO: 32515 - DNA, 397 bp, Zea mays
  unsure (1)..(397): unsure at all n locations
  Clone ID: MRT4577_129668C.1
tgggcgcgacgaatagatgctcagctgatgacatgcatggatgaattccaccagaatattggtggggatggcacggatgccgatccatctgaaaagaaacccgggtacgttattgacattggagctacaaataggcccgctgctgtggatcaagctcttcctaggccaacaagatccgatcgagagatatatgctgaggttccagacgtgaatgcaaggaaacagatactgatgatgctagctcagcagcttcgacttgaagggcaatatgactttacaaagatagcaagggccacaccaggctatgttggtgctgactngaaagcattagccaataatgcacgggatctggcaatgcatagaatgattaataaaagaagagctcagccttgctctg

SEQ ID NO: 32516 - DNA, 324 bp, Zea mays
  Clone ID: MRT4577_129669C.1
cattcttaagacccaaacaggtgttgagtttttatggtttgatgtctcactgaaaaacgacagacaggccagctttagttgcacgagtacacatcaagacatgcgacctttacataacaatccaacatatgtttggcgcacattgagctgaactcaaatcgagctccaacctgacagttgtgctagagacactctaaaagtgagcatttgcaccgggcacatacaattactccaaacatgagcatgggtggaaagggcatttatatcacggaccacacatgcgtgaaaacgagaaccggatatccggcggtagtgtatgctatc

SEQ ID NO: 32517 - DNA, 1185 bp, Zea mays
  Clone ID: MRT4577_12966C.1
atggcgccaaagcggaagaggcagagcaccattgttgcaatcatcccgcctatcgaccccaacagccacctaccattcgctgttaaccatatgtctatcgtttctgaattcgacctccttcatctcgttgaaattggggttttgcttccaaaagagctttgctcttggcggatttgctgcggcgtcaccgttccgatagaggatacccatgaatctgtcatttacgttccttttcttattctaataacagaagccaaagtgctgcttgccgagatctgctcactgaaggatgggggtctaactgctgaagctgtagttgctgactttgtattcaagaacattcaacccttaaaggatagggcctaccctccttacttgtatagcggtgtcaacgattctacctgggtcacgaacagaataattcccactaaagatctgctgagtcgactggaaatgatcttgaggggcagggtttcaaatgctggtgctcgtgtggcctattctgcatggaacctgccaccacttaggccattatctaagtttgtgtccaaccctccttcttgtgacggtagcctgggtcttagagtgcgaccctcttctgaggacattgaggctttgattgctccacttcggagtcttcccgaggatgaaagacagactcactttgagatgccagcttgcactgatgacgctgagatagatgttgttcttagcctgctggctggggaatcatccgactctacccgcaccgagccaatggccatcacaactgggcaagcatttgatgaagaggtggaaattcggaaacccgaaggtgcccgcccaaagcgtccacgccgagtgaaccgcccgactgcacttgtcaaggagaaaaggaagaagaggcgactgcagcgactgtcgtgcttggatcaggatgcaggcccttctgtaccggttcccgatgatgtcccggcagaggccattcctgaggttggtgctaagggttgtgatcctgcacaggctactagctgcatgtttaacgaagacgaaggggaagaagaagaagcagtcccactgatccgcaagaacagccgacactatagaggcagcgaggggggtagagatattccttctctagctttgtcggcacttgtcagtcttcaggggcttttaatatcagattttgatcaagtactggagtag

SEQ ID NO: 32518 - DNA, 467 bp, Zea mays
  Clone ID: MRT4577_129670C.1
agcccaaagcaagggtgtcatctcagggctaccaaaatccatccgacaaacgtccgtttttaaacaagaaaaagaaaaagggaaataagtttttctctcccccccccaagcagcaagcacccaatgcaggcttaattgacgggggggcaaacccggggtatctccccgtcggccccggtcttgaggcccatcctgccgagcttggccatgggggcaacaaatgcctcaaaaaaggcgggggcgttggcggcaaaaaggttgacggggggtcggaaacggccgtcggaaaaaaacacctggtcggaggcaaacaggcccttgttgtaacggaggttgttaaaaaaggccttgtcaaaaaccctgggcggggggacccccaacatggcaaaccccggggggctgtaactgagggggcccaccccccccaacgagcgcaagaagtccaagttcatcggggggttccaccc

SEQ ID NO: 32519 - DNA, 288 bp, Zea mays
  unsure (1)..(288): unsure at all n locations
  Clone ID: MRT4577_129671C.1
cgctcaatgaccactaacaagtccattacctcttctgacaatgacccagttcgacttgagattagaaagcagttgcaacaagtcatggattatggatcaccagaagggagccagtacatttgtttgccactcatctattgattgagaagaagttaagagatgtttttgcaaacttgcagacaaaagaaggaagaatcgcttggcttcgcaatgcttacgagatagatctgaanaagtgcacttagctgctggtcctccgacaacagaggcttatggtcagtattatcg

SEQ ID NO: 32520 - DNA, 1135 bp, Zea mays
  Clone ID: MRT4577_129672C.1
gtaccctcgagtcctgccgggcggcggcagcacaacatcagaaccttcccaaatcctctcctcccccccccctctcgcgcctcctacctctctccagtcggttcccacgccttgccgcgctttacctctgcggcgcactcccgttaccatataacccgcgcgccggctccggcgagattcgaccaaactccatggggctcgagatggtggaggtcatgtccgagactgttcctacggttgtgcctgcggcagcgagggagaacggggtggatatttacccgctcagccgctactacttcggcgccagggacgccgccggcgtgccccgcggcctcgagaccgccgctgaccgcgcgctacggctcaaggcaaacttcgcggcgcacgggctccgcacgagcgtccacggcgtcctcttggtggagctgttcgatcacccgcacgtgctgctgctgcaggtccggaactcctccttcctgctccccggaggccgcctcaggcctggcgaggaagaggtccgagggctcaagcgcaagctctccagcaagctctccgttgtcgacgatgcggaggccgttcaagaagaagactggcagattgggcagtgcatcgggatgtggtggagatctgaatttgaggccatcccgtttccctacatgcctccacgattccgtgcggcaaaggaatgcatgaagctgttcctgatcaggctgccgatgtcccggcagttcatcgtgcccaggaacatgaagctcctggccgtgcctttgtcccagattcatggcaatgctcaggtttacggtccaattatagccgccattccgagcctactatccaagttctccttcaacgtcatcagcgactgaattgtggaaaccaaccagaatgttgaggggttagtagacgcatgcatacttggctagttgaagtcatagaacagtgtgcgataccgatgggagcttgtattgagaagtagctcatctgtttttttttgtgtgtataacgtatccccctcctgggctcttgctgataatgatatgtatgtactgtatgtgtttctcgcgacctgtgtatgaccgtgtgagaaggattcagttctgtacaataactcattttgatttatttttgctcttac

SEQ ID NO: 32521 - DNA, 464 bp, Zea mays
  unsure (1)..(464): unsure at all n locations
  Clone ID: MRT4577_129673C.1
ccgggtacgacccacgccgtcctttaaacacgaccgggcgtacatagctacgaggtagcgcgcggaacataagccctacatnccctacaaacacgcaactatttcagggatgatacttccgggcaaaacctgaccctggagctagctagcagaatccccatttacagagaaaaagcctagattcccccnnnnaaatgggtccactctgcccacctaacgttgatctgagcctggaagcacctaaaggatagacttgcggttgagaactatagctattcatataaagtagaaaacagcttgacctagaactaaggtcttcaacaaggcttaattgagccctaggtgcaggcggctcgctgaaaaacacaaccaagacaagcatatctgccggactagctaactaatacttctctctaagggtgtactctggcgtaagaagaagagtatccacactatccaactga

SEQ ID NO: 32522 - DNA, 286 bp, Zea mays
  Clone ID: MRT4577_129674C.1
aatgactctgatcagtcgcgcattgttttacatctgtgctgctgttgtctacggccatatcatctggacatagcacatgtatcttgtatttgagccactggcatgaacacagccgagtgcactaaaggactagacatactatcatggtatcccaagcacgctcttttatccaagtttcagagtgtctgatcgcgtcaatcattgatacaatcaggctatgacctagctcgggggctggcggtggtggccttgcttcagatttgggtgcgcaacagtttaggtttct

SEQ ID NO: 32523 - DNA, 686 bp, Zea mays
  unsure (1)..(686): unsure at all n locations
  Clone ID: MRT4577_129675C.1
agtatacaaaatatttattaagtttgatcatcttttatttaatacagtaggtagaagctccttttatctatggagcaagtagaaagaagagacatgaagatgatctcgatgggcataaagtggttttggtctttcatgtgaggctcttcctatccccgttcttaaagggcagacttgagcggaggatatcttggttcttggtggtatctctcaagaacgactggtaccataagccagaagctttgaggtctctatcagcagtgacattattgaaatcaacgtaactaagtccgaatctgacggtgtagccgttgcagaattcgtaattatccccaagagaccaaacaaagtatcctttcacgttgacacgcttctccttgatggccttgcggagaaaacatagatgactgcagagataatcaatccggttgtaatcgtgaaatgcttcggtgaagggtatggggccaccggaggtactgaatccgttctcggtgacatagattaaagggtcaccgtatttggttttgaagtgctccattacgtttaacatccctcttgggtggtaataactgcctttagagaacggtggaccagnggggttgaccatttgcatcaagagatgtaagggtttgcgagtngagtccgtcatgggcagtgagtttttccggaggacttgggtcaggggc

SEQ ID NO: 32524 - DNA, 392 bp, Zea mays
  Clone ID: MRT4577_129676C.1
ttcgctttatccttcttgtcttcctctgacttccctgaatcctcaccaacatactgcgtctggttatatttcttggtttgtctgcaagtgcttgtaccgctaccattctgcagcaatgctcacaagctttctatagcttcatttcatcccccgtacctctcaccatctagctctatccttattgttaaaaacccaaatctttaacacctataaggatccaacaatccaatcggaaattggatcttacctttatcaccctttgaccctccaaaaaattatcaaaacctattacagtaattacactttggtgcatttattggcacaaaaacattaaggctcaaacaactacaacaacttgtgctttcaaaaccttggtgctaactttaacaaca

SEQ ID NO: 32525 - DNA, 346 bp, Zea mays
  Clone ID: MRT4577_129677C.1
attcggctcgaggctgtttgggaaggtttttttgtctatgggcccggggtaccttcccatgggggtttttcacagctctttgttgttaactaccatttcatcaccacagactatatgacctacaggttgaagatcaccacactcagacggccatagaagatgctgcaacattacgctaaagagcttacagagctttcttttgcgaaacaagcccgatacctctttgggcatggtgaaactttatgaaatcccaaggggcgaggctgaagctacgtatgcaatggagaccgcgctccaagtacctgtcacggacatggatgctgcccttttaacgggtggttctaag

SEQ ID NO: 32526 - DNA, 403 bp, Zea mays
  Clone ID: MRT4577_129678C.1
cagactcgtggtctgctgactctcaggcactgcgcacatactccatgtatgtacttcggagattagcactgtgggtgctaggggagtgcataactggaacgtgaataacttcccatgtggcctagaataaagctgactcctatctcctgatatgaggttcagggtagcctgatgacctctagtacctccaactatgaggtctgggcagtgcaaccaagagcatggatcagaagagagctgtgaatagccacgcatgggtagtgccatctcccactgaggcttcagtcactgacatccctcattccatggcagttggatataatataaccttacagaatatgggatgtgttgatgatcctcagctagactgctaccttgcgcctctgttctcagactggggctg

SEQ ID NO: 32527 - DNA, 309 bp, Zea mays
  Clone ID: MRT4577_129679C.1
accaagagacgagacaattacaacagggccttataaaaaaccacgccttccatggaccatggagcctcgtaggacctgggtctaccccacagatacaagcgtacccgctgggaggggcctatatgtgccatatgaggaacgcccttgccgaggactaggcctgcttgcatgacacagccccatagatattctccacctcacattttatatattataacgaaccctgcttgcaaggttggcctgatatggaccctggggaagctcataaaccatgaaccatgatgatctccttgccacacaacgccaccc

SEQ ID NO: 32528 - DNA, 593 bp, Zea mays
  Clone ID: MRT4577_12967C.1
attgggacctcgagccggccgggaaatactttcgaaaacctagacccctgctccattctcagccgacgtcaatcccttcacgtgctccgcaaccgctgagtgagaagaagagatgggcggcgagggcgatggcccggctatcgagatcgatctcggcacgacgtactcttgcgacggcgtgtggcagcacgaccgcgtaaagatcattggcaacgaccaactgaaccgaaccacgccctcggacgtagccttcaccgagtccaaacgactcatcatagaggcgggcctgaaccaggacagcatgatacacatcaacaccgtgtttgatgtcaagctgctcatcgctatgaggttaaatgatgcagtgtaggcagaatgatatcaagttgtggacattctgggtgatttctgacactgaagggaaatcaaagattggaggccggtaatagggagacgcaaaccaaggtgcctgtgagcacatatcccctagggttctcatcgagaacaatgagattgctggatgttagctgtgtgaacgccatcaagaaggctgtggtcacaaaacctgcctactttgatgactcgacgaggga

SEQ ID NO: 32529 - DNA, 661 bp, Zea mays
  unsure (1)..(661): unsure at all n locations
  Clone ID: MRT4577_129680C.1
cccaaagagcacgcagcgcagcactgaagcaccacttcctgcactcactgtgctagctgctcaaaccgtagtagtaacagtccatcaccaccaatggctcccaaggttgcgctcttccttgccctgagcctcctgtttgctgccaccgcgcatggctgcgaacccaactgttctggcccagtcgtcccaacgccgccagtcgtgccgactccgtcgtcgcacagccacgggcgctggccgatcgacgcgctcaagctcaaggggtgcgccaacgtggtaaggctcctcaagggccggctaacccaataccaacaatggtgccccttgctggaaggtctggtggaactccaccccccattgtggctctggaccgccattaaaggcaaaggcctccggatccacctcaaaggggcccttaacctcaacttcatcctccacaaatgggggaggatttggccagaagaattcacttggcccaactaaacttgggattccctgggtggtccatctcgcgaatctatttaacaacatggcgggctcctggaatattaacgaataaatttggcggttccaattctttcgctggaccatccacgattggatttgtgtggaggtatatttgaaattttaatggtccataagaaatattcgcnggttttcc

SEQ ID NO: 32530 - DNA, 131 bp, Zea mays
  unsure (1)..(131): unsure at all n locations
  Clone ID: MRT4577_129681C.1
gttggttaagtgttgttatgacttgtaactgtgagcagttcaggtttttatgttctttggcnagatgngccgattatgagcaacatgggatacaatttatagattcggagaactgctggactgacaacttt

SEQ ID NO: 32531 - DNA, 809 bp, Zea mays
  unsure (1)..(809): unsure at all n locations
  Clone ID: MRT4577_129682C.1
cgggaaaacgccccactgcacgcacctcacgtcctcacctcacctcacctcctccctcggcggaaacatcccactgcccagcccctcttcacgtctttcctcctccggcctgtgttacggaagcctcggcagctggaggatctatggcctgagcgcccccgccggacgacgggagagaggttctgtttgatcttcacatagcagaggactagaagacattcacacgtaccatcaatcaaattgcaaatctctgaatcgactccaaggtctgacatgcttggtgtcttaccagaggcaattgatatataacctggagctgtagtagtctaccggactctctaccgaaccagtagtatggccgaccctccaacctcccgcatggtgcagcaccccttcggcgacatcccaacgcagactcccaagaaattcctatactctggtagcccacagcacctctgccatccataccagtcagcttcggacgcccacgtcgcgccgcagcgtcactacaccgtgaggtctcagtctcagtctcactctcactctcactcaccggatgctgggtctgaagaccgtgagacgcacaggcagtacacgctggactcctcttcggcttccggttgctcagggcacggttctccctcctgtcagagtgtccgcgctgggagtggcagccctgtgtctcactctcatgacgacagccactccggctccaccaatggcnacggatcgcctgcgagcgcgtcgtgtgtcaccgaggaccctactgatctcaagcaagaactgaaggatcttgaggctgtgatgct

SEQ ID NO: 32532 - DNA, 354 bp, Zea mays
  Clone ID: MRT4577_129684C.1
atcattataaaagtttcgaatagtttgtttcatataaacttccttggtacgtaaaatagcatcacaacttctttagtttactgggggaggagtataactgcaaaggtacacacaatcaagggaatctagatgaaagtagcagcagggcactgcctgaagtcccaacacaaacatagaactaacttctccggcagcaacacaagccagtcatttagctgaaacaccaaagaatagtctagcgccaatacataaaaatacagggagggcatcattagaagaaaccaggggccggctcctaaaggaagacacggatccgcgatgacaagaggccgagggttcccaaatcttaaagag

SEQ ID NO: 32533 - DNA, 601 bp, Zea mays
  Clone ID: MRT4577_129685C.1
cgggcaaaaaaaaaacgccccctggctgacctaccttcctacctcctcctggagaaggggacgacggcccaaaccctcttcacgggttccctcctccgggctgtgttactgccctctgtctgctcgaccagcttgggagcctggctgtgcgctctccgatcgagtacggaagcctcggcagctggaggatctgtggcctgagcgcgcgggggggacgacgggagagagcgtgtgcggtttggcgagtgacgacggaagaagctgctgtcttcgctcttgctttgcttcaatcttcaggggtctggtcatcctcatataacagaggactagaagacatccacacgtgccatcaatcaaagggcggatctctgaatttacctcaaaatgggacgtgcctgtgtggatataccagaagcaatggataacttggaggtgtaggaggctaccggactctctactgaacaaggatgggcgaccctccaacttcccgcatggggcagcaccccttcggcgacatcccaagccagactcccaagcaattcctatactctgggagctcacagcacctctgccatccataccagtcagcttcggacgccca

SEQ ID NO: 32534 - DNA, 373 bp, Zea mays
  Clone ID: MRT4577_129686C.1
ggggtagaataagccttataaaaaccaaccacggggtgctcaattttttaataccacaggttcacccatcccgggtttggacaagccacttttaataaaaaggccaaaattacttcgggccgggagaggccttaaaaataaggggaaataacctcatttcgggggtttctttgcctaacctgggggaaaaaaaaccaaaccgcttgcctggtgactaaagggggaccccttattaaaaacaaacccaaggggggggaaaaaacaaaaggcgcgtaaggaacctgaacccctaaaaagaaattgacaaagggtgatttcatgccaaaaattaaaaattgtctggaaaaaaaagaggggcctgagggggctgggg

SEQ ID NO: 32535 - DNA, 918 bp, Zea mays
  unsure (1)..(918): unsure at all n locations
  Clone ID: MRT4577_129687C.1
tcgaggtaccctcgggaaaagaaaaaaaaaacgccccactgcactgcacctcacctcacctcacctcctccctcggcggaaacatcccactgcccagcccctcttcacgtcttccctcctccggcctgtgttactgccctctgtctgctcgaccagcttgggagcctggctgtccgctctccgatcgagtacggaagcctcggcagctggaggatctgtggcctgagcgcccccgccggacgacgggagagaggttctgtttcatcctcatataacagaggactagaagacatccacacgtaccatcaatcaaattgcaaatctctgaatttacctcaaaatcggacgtgcctgttgtcatataccagaagcaattgataacttggagttgtagtagtctaccgtactctctactgaacaagtatggccgaccctccaacttcccgcatggtgcagcaccccttcggcgacatcccaagccagactcccaagcaattcctatactctggtagctcacagcacctctgccatccataccagtcagcttcggacgcccacgtcgcgccgcagcgtcactacaccgtgaggtctcagtctcagtctcagtcaccggatgctgggtctgaagactttgagacgcacagcaggcagtacacgctggactcctcttcggcttccggttgctcagggcacggttctccctcctgtcagagtgtccatgccgggagtcgcagccctgtgtctcactctcatgacgacagccactccggctccaccaatggcaacggatcgcctgcgagcgcgtcgtgtgtcaccgaggaccctactgacctcaagcagaaactgaaggatcttgaggctgtgatgctgnggacggaacggacccagagaccgtggacagtctcgagatcgcatagc

SEQ ID NO: 32536 - DNA, 381 bp, Zea mays
  Clone ID: MRT4577_129688C.1
ggggaagtattaagaataatgacgaagctgaacctaagacagccaccgggggtgaggatgaagatgaagaaggcagtcaaggctgttaaatgtaacccctataggtagtatgtcagaacaattactacacttattggcgatttctgataccctgggaggttcaacaccggtgattaccctcgtttataatgatgcactctggttgaatgctaatcccacttcaaagaattctattcatctgagcctgggacgctgtactggtttaaaggctcggggtgccagctctccgagggcctccattgggggatgatgagttagtgaggaattagcccgctacggatgatgctataataagcgagttgcacggttcctttggggaga

SEQ ID NO: 32537 - DNA, 113 bp, Zea mays
  Clone ID: MRT4577_129689C.1
agagcaacctgaactgcacctgctcactgctcaaggccaggggcatgatccagactggggacctcgtgatcgatctctcggacattctgcagtccatccaggtgatgaacgta

SEQ ID NO: 32538 - DNA, 599 bp, Zea mays
  Clone ID: MRT4577_12968C.1
ccggccgccgggcgaggtgcgcgtacctgccgtcgatcgtcgccggatccatccaccatgggcggtggcaacggccagaagtccaagatggcccgcgagcgcaacttggagaagaacaagggggccaaggggagccagctcgagaccaacaagaaggccatgagcatccagtgcaaagtgtgcatgcaaacattcatgtgtaccacgactgaagtgaagtgccgggagcacgccgaggccaagcatcccaagacagacgtgtaccaatgcttcccccatctgaagaagtgaaaggcctgaacttagcaaccagtgctggtttggtcactacgatcaggccagggggcgttccttgtgtcgagggtgttcattccgtgttgtcttcccgtcagtcatgcgtcctgtcctatgttaacctacataagaaagtgatgtggtgtccacttctagtgaaactactgtctgctgttaaaacctggttggtttcagaacgatgattttcgtgtccaaaacagattactagtccgtgggagttgtgccagttcataaaaaaaaaaaaagaacgtcctgtccagcgcaaaaaaaaaaaaaaaaaagcg

SEQ ID NO: 32539 - DNA, 541 bp, Zea mays
  Clone ID: MRT4577_129690C.1
ggccgcttttttttttttttttttatataaaatcgcgggagctgtatttgcatccatggatgaacatacagacacgaacacaatcgaacatataagaccatgataggtcatatgacatatataaaaccttaatatagcatatttgaagaaaccgtttttttgctgaaaccagactaaagcagggggaggtagacaccgatcgaagcggggagcatggacgagcctcgtccatagaatcccataaagctgctgccgacggccgccgagatgcacaaacgtgtgcagatctggatgcctcatggtccccaaggtctggcaaggctggggacagctctgaacgaggcaaggggaggcaaaccttggaatgcgccgtacggtccagaaacttccttgacgtattcagagttatcaagagcgagcttgcggacgttgccggcaagtgcacccaattgcacaccagtgcgcgtcggaccacctgtgaccacactggaggtgaactcgatggaattcacgggaacgcaggggcgcacggtcaggctct

SEQ ID NO: 32540 - DNA, 624 bp, Zea mays
  Clone ID: MRT4577_129691C.1
atggcaacaaggaaaccaagggatgcagcaaacaagttgtgccttgctatcccaccagtgaaaggtgctcttgctgttcttcctagcgtatgtaaactgaacacaattcctgtcatgttgctcatcaatgatataatgctttctggatgtactaggtgttgcattagacgccaagaggaactaagcaagctcacagcccctggtttggttgcacaaaagaaggctttctttgaagaatattacaagagggcaagacatctcaaggctcagggggtattgcaccaggctggagccgcagtggaggagaacgatagcagccaggcagatgaattgccagcagctatgtctgagccttccactgatgttgagagcaaatgccaggatgctcatgagcacggacagcaagcttgccaaacattcaggaggagagttctagctctggattcatcagatcaggaaatggtactcaaccatggctcagtgtcattcggtagatttgctgcagaatcattatcatgggaaagaaggtcagtgtttgaacataacagacgccaagaggaactaagcaagctcaaagcccctggtttggttgcacaaaagaaggctttctttgaagaatactag

SEQ ID NO: 32541 - DNA, 497 bp, Zea mays
  Clone ID: MRT4577_129692C.1
gtcaccattcccagaaatcgaagttagacatgagataaagaagttggaggggaatggaaagtctagccttgcaggtaaacataagaccaccctccattggtttggcacaggagcaacgctctatattgatccagtgtcagggagaggagaccagggtcaagtggggtggtctgagtatggtgtggattatggcaagtctggatcaattcagaccactctgactgaatggttacctggcatgggttataatgaagtggaccccgttgtgatgggtggcctgctggacgcattgtctggaaggcaagactatacgatgctttttattaaggcagcgttaatcttgaggacgcttagtgtggcatacagcgttaacgaaagtgaactggaagggcccgatgaattgcccagcgtacaagttgggacaaagagggcaaagataggagcaatcggaaaagtgagtgtacagtcgacctggatgctttcacagacagggaagc

SEQ ID NO: 32542 - DNA, 344 bp, Zea mays
  Clone ID: MRT4577_129693C.1
cttggattctgttcatcggcagcgctcgcccttttttttttttttttggacctacatggagacggggttattaggcagctttccaaacttttacatcaacgatgggtgatattcacatattcgggaccttttaatctaaacgcacacctcaaactatttgaagttgcaatcattcactaaatgccctatttgacagaccaccattttgcattatcaagatgcggggctcacttaaaacacgctcaccataatctcccggtattccatgcttaccttgcgacacggcagatatgcaactcactgcgtttgtaagggcaagattttcatacagatctaatgcagga

SEQ ID NO: 32543 - DNA, 136 bp, Zea mays
  Clone ID: MRT4577_129694C.1
cacacacttgcgccctcttttactcaaagaaaccataccatctcctcttttcactaaaactcgaggtatacggcctcgaccgcctacggttcaaggaacgtccctctctccgtcacatgaaagaaccgcaaggggg

SEQ ID NO: 32544 - DNA, 355 bp, Zea mays
  Clone ID: MRT4577_129695C.1
acgatcgagtacagtcgggtaggtaatctggtggtacgacgactgacgacgacatggcggtcaccaggagcaaggggtcatcgtcctcgagctctgcgcagcgggcagcagctgccgtcctgctcgtggcggtgtccgtactggaggtgggctcagcagcggtgtgcgacatgagcaacgagcagttcatgtcgtgccagcccgcagcggtcaagacgacggacccgacggacgcgccgttgcaggcgtgctgcaacgcgcttgcagcggcggaacctaagtgcctgtgcggctacaagaactcgacggggatgggcgtatacaacatagaccacaagcgcgccatggagctttc

SEQ ID NO: 32545 - DNA, 337 bp, Zea mays
  unsure (1)..(337): unsure at all n locations
  Clone ID: MRT4577_129696C.1
aaaaaaaaaaatntttgtttgaacaaaaaaaaaaaaacaaaaaaaaaaaaaaaaaaaggggggcaaaacaaaaaaagggcgaagaaaaaaaacaaaaaaaaaaaaaaaaaaaagggcggccggggcggccgctccaaggtatccacccttatcctccccgtcattggacttttctatggtcttttattgtgccccctaaatttggtcgacccggccccctttttacaccggtgaagccggggaaaccccccaggtaccccccttttaaccctttccccctctcccctttttgccctttggcaaaactcccaaaagccccccccctttccccctttcc

SEQ ID NO: 32546 - DNA, 438 bp, Zea mays
  Clone ID: MRT4577_129697C.1
gtggaatcgccggatcagagtgaaggcaggcaaaccagagagatagagtgatgtgcgatgcgagaagctaggagattcgagaggggaggcagggagctaggtggtgggcgggaatgggggtatatggggtaggacatgagggtcgaccgggcgggccgctaacagagcactctagcgagagcaggatgtgtcgtaccgtcccacgtgcatggttttcggcctaggcaaaacttgctcccctggccataccagcccaggctcacgaactaccgggccaggccgtgcacgggtcgggcgaaaaacacgggtttcgggccaggcttaagctccatgtacaactatggcaactggccggctcgtcctttataagtactgcccgccggcttggtttattctttggggggatttgttacaccaccacaccaactgacccacacc

SEQ ID NO: 32547 - DNA, 978 bp, Zea mays
  Clone ID: MRT4577_129698C.1
gcgacgctgaagaggccgatggtgcggaggaggaggagagggacctgcgggaggcgttcgacgtgttcgacggcaacagggacgggctcatctccgccgaggagctcggcaccgtgctgcgctcgctcgcctgcaccggcagggccgccgccgattgccacgacatgatacgcctcgttacaagggcccattctttggtggaatccgtctgtctctctcttctccatccgtgacacgtccagcagctctatcgaggtcgaggactagccgccgccgccgcacctgcacgcacgccaagggatgggagagcgagagagggatccgaggaggtcaaagatgatctaccgcaagtggtcactgctctcatcgacggtcgtcatctggtgcggcgtcgccaccgccggcctggccggtatcttcctcttgggcggcaaggagaaattcagtcagtagagaggcttaggcagcaggacagagccacgatcggcatgcaaaactagagaggaagcatatctgctaatatatctactttgccatctaagctcggaggtgagaaggtagtttatgatgctaccaagaaaatcttctcaagctccagtggtctagctgaagatattctattcttattcacagattggttgtcactacttagagagattgtcaatattgaaacaagggtacacacctaattctttgtattcctcttgcaatcatccactttcctcacaacttgcttgagactaaattgctttgttgttgctgttgaatcctctgctactccaagcttctttgatgtcgagtgtaatgttgtaactggctatcgtttgttggccgaacatttggctagcgtggatgatatatattgcaatgtgaatccaataagcaggagagtgatcaatgtatgtaatcattgtacactaacatttgtcgaatattttgtatatcatttcaaggcacctaaatattttctgaagaatt

SEQ ID NO: 32548 - DNA, 323 bp, Zea mays
  Clone ID: MRT4577_129699C.1
ttttgttttttttttttttttttttttgttttttttttttttttttttttttttttttttaaaaattttggattgaagaaatggccgcctttttttttagcccttggcttacaaaatcaccaccccggggtggcatccttaccgccctagttggtgtttggggggaataatgaacaagggttgcctttggcaaacaaccccccccggggatgaaaaagcttgggctcccgaccggagaggtttacctttttttttagttattccccgcccgtgcccgggttctttaccttgggcggcgggagaccgaggtccccgctattttt

SEQ ID NO: 32549 - DNA, 106 bp, Zea mays
  unsure (1)..(106): unsure at all n locations
  Clone ID: MRT4577_12969C.1
cnnttccccttgggacttgtgtcagnggggcagtcaataattaccccacgaacagtatggtctggnatcgtcatgntacagtagggcgatgccggtgtagtatgtt

SEQ ID NO: 32550 - DNA, 1366 bp, Zea mays
  unsure (1)..(1366): unsure at all n locations
  Clone ID: MRT4577_1296C.1
attgggtacctcgaggccggcccggccgggacgctctttcctccatcccaacgtctccagtctcgcgctctctccctaaaaacctcgtcttcctccgctcgtctgcgttctcggccatcggtactctccaccggcgctccagagttcatcggtactctccaccggcgctccagagttcatcggtactctccaccggcgctccagagttccagctcggtgggctcgacgcctttggcgaggaggaaaccaggattgaggacagagagcgatcagccgaagaagtcggtgcgctgccgaccgttgtggtggtggatcctattcgcttccaagaagacacgaaatatcatcgtcctcaacgcctcacagtcatctatgcatgccatagcgtacgccgagggcgataaataatatggtgcaaaatccatcattaatgtttgggagcccaagattcaccatgctaacaaatttggcttgtcctagctctggatctttgggggttcatttaaggaggatgtcaacagtatagaggctggttgataggtattgtaaagctgagtttatgagttcagcctgctcatagatacttatgtcaaacaaatgatgaccatttttacagtcgtctagaacttgactgtctaacatttatgtcatatttggtgcatcagtttagccctggccacaacaccactaggttgttcacatacttgactgtaaatctcacaagttatgcatttcagtacttgattagtccacattctaccattgaagtgtcaactcaatgactgttgcatcgctttgttgttatctattttgcagaaatagaataatgcgtaccaggccacagggtgctagatgttgtgctctggttttattcagataaacaccaagatggctatcgcgactagcattctcaacatctcaaactacgcaggctcccaatgtgatatcagcatcttgatctagaagggcagcggatttctcgagggactacgacgggatgcctctagatgtacaaccccgactcccacttcttcctcttcctcatgtactggaccgattgcagcctagctggcgcgcttgggctactcangatcctaatctacaaggnttnngtagatgggagtaccaccgtgacttggggagctaacttgggaaaantgatctcttagtttcctcaagggtaatttatttctgtaattgnctctctctgttntcaatttaatccaggtnccatttaatccaatcnggggcctaatgaaatttaaatntaantatcctccaaaactggaatttaaaactggaaatccatggccttaatangcnngggttacaggacnggtaaaatnacccttttcccggccaacca

SEQ ID NO: 32551 - DNA, 732 bp, Zea mays
  Clone ID: MRT4577_129700C.1
ccacgcgtccggtgtattcatgcgactggggagttctgccctgggtatgtcttgaaatcttgacttcactgccatcgattcaaagttctattttttccctggcttctaatccttctgctttgcaatgtgtcctatggtttatttacaagtctgttgatttgatgattcctatgttgttgactttaaatgtgatgtgtttattgggaagggagtaaccaatgcatgtacacacttgttgacttgtgtactccaagggggtgtgcacctagttgtggttgatctgttgcttcgtttgcatagatatgtgttggaactcactgacacgtggccgagcgacggccttccctccaacaatatgtttccttgctttatgcccaatggtggccatggacacatcgcgaaatggatggagtatgttatagggtttttagcaaattaattttaactcgttgcatatgttaggctatctctagcagcttactcattctcatctcatatttccaactctattctgtaaacagtacagtctacagtgcaaaatagtgttttgcacagccatatgcacgatctgttggccatagccttaggtcaaagggaagtaattttgtttgatacaatttgatacctgttactaagattcagattcggatatgtatcgttgcattgcactggtggagcagagacattttgagtcaacactttgattatttagcatatagacacatatcaatg

SEQ ID NO: 32552 - DNA, 252 bp, Zea mays
  Clone ID: MRT4577_129701C.1
tcgcgacgcgttcggattcttcctgggcaagtttttggtgccctggtcattgagcactttggttgatttcagtttaggatttgaatgatgctgggttaaacaatgacttggctggcattaggtattaactaatgctaattaacctgccaaaaaaaaaaaattcaagaaattaaacggctttacataaaattaccacaaacaaaaggacaaagaaaaaaaaaggggcggccgttttagaggatccaagtttac

SEQ ID NO: 32553 - DNA, 902 bp, Zea mays
  Clone ID: MRT4577_129702C.1
cattgggtacctcgaggccggccggggttttctactctcttgccgggatcctggccaccagttcccgccatgccgccaccgccgccgcagcgtccagcttcatcccacgttggccgcgccaacctcttctccgcctcaccgcctcccctctccaatcgccgctacccccatcatcggtcgttgcccctcccgcccgtctccccacgccgccgcgaccccaagaagcactcccagcagccttcccaagaagaaccgacagacagcggtccaacaagaacggtcacaaccaacccggccttccgcgcggcccatctccgtaccgcgtaccgcaagcccgtgcctccagccgcagccgccggcgaaggcgaggccctcctcgccgccgacccaaccgatgccgcctcggggcgcgctgtcgtcgtgggtccctcgggcctttccttccgcctccccggggcgccgttcgacttccagttcagctactccgaggcgccccgcgccccaccgctcgccatccgggaaccggccttcctgcccttcgcgccgccgaccatgccgcggccctggacgggcaaggcgccgcttctgacaaaggaggagaaggcgcggcgccggggcgtgcggctgcacacgccgctcgggcaggagacgccgcagacggtgagcgcgcacgggatcatgatggaggtcagggagaggaggaaaatggacctggccagggtgagccccggtgacggcaggagcagggaggaggtgctcggtgagccgctcaccccatctgaggtgcgcgcgctcgtcaagccgcacatttcacacaaccggcagctgaacattggaagagatggcttgactcacaacatgttggaaatgatacattgtcattggaggcgccaggaaatctg

SEQ ID NO: 32554 - DNA, 614 bp, Zea mays
  Clone ID: MRT4577_129703C.1
cgcgctcctctctctctctcctcggctcctcctattccccctccgcgtctcgcggccgtaaccctagcccccccgcgaagcgccatccgacggcgacggcgacgacgtcgtgggatctgatctggacctctggattgcctccgccggggtccgtgtcggtggagctgcgcccgtggttgctcgattttgtgcccgccccagcttccgattggggctaaatatccccataggctcgagtttcatcttgggagggtgaatatgctatttgtgatatccaatttttcatcacatggatgaattctgaagatttggttgtatataagtcaagacagtaagggacattgatttatttccacaatcaatatgggggctaattgttgcatagctgccaagcagaggcctgagccatcagtagcttcagttgaagtttcggcatacaggacaagacactcgccgtcatggagcttccggtgggacaaccgcacacacatagaggatataatggaaaacgctgcactgttttccaatcacagtagtggaaacattcgtccagaactaaagagtggttccattgcaccaaccgaaggccatcccaatgaggacaatctctctga

SEQ ID NO: 32555 - DNA, 376 bp, Zea mays
  Clone ID: MRT4577_129704C.1
ggaaaacacatacacatcttctctcaaaccaccgccgccggctttatatattgggagcaccttaaacccaccccaatccagccccccgccatggacgcgctcacggccactaacaaatgctcttccccgtccatgacgacattcccgatacccatcgtgaagccacctacatcaccacaccaagccagtcaccatctcgaggacttgctgcaggagcaacacaagctcggtccataccagcacctactaccaatctacctcaaaccatttaatcaatacataattagaacatcaaacctaatttataactttagagctagaagaaatcagatgttgccaccaattgcaactacgaaccacatgcatccattgcccc

SEQ ID NO: 32556 - DNA, 261 bp, Zea mays
  Clone ID: MRT4577_129705C.1
ggccaacaacctactccgtccgctcgcgctcctgctggccgtcctcggctgcgcgctgtgtgcccgcgccgatgccaccgagttcgaggtcggcggcgacgacagatgggtcgcgccggcggccagcgacggcgagatgtacaaccagtgggcgtccaagaaccggtctctcaggcgcgacgtcatacacttgaagtacagagaggactcggagctgctggtgaccgaagcccgataacacagttggcgaacgaacgactc

SEQ ID NO: 32557 - DNA, 322 bp, Zea mays
  Clone ID: MRT4577_129706C.1
ggggggaggggagccccaaaaaaaaaaaattttttgatacaaaaccccccaaggtccagggggaatttggggaaaccccggttgcatatacgggcttgcaacgaaaatagcaaaacaattgaggggatgccctttttaaaaaacccggggggccgggggggggtaccccccaatttctttgaaaaagccttttaaaactttgcatcggggggggaaaaggaaacctttttctggccccgtgtgctgtgggaaaagggaaagggaagggggaggaaccttctaagggcttttgtagcctgggggaaggggccacccccagttt

SEQ ID NO: 32558 - DNA, 289 bp, Zea mays
  Clone ID: MRT4577_129707C.1
cctggaactccgactgaaccctgaacaagccgtgagtgagcagagatggcagcatactgactagctgagcagtgtgcaaagtgcggtgtgcagggaaagacaagggagctagagcagcacgctgtacctgccccggtatgacctcaccgatgatgccatgtgatgtcgatgccggcgtataggcaggccttgtagtgcgcgtccacgatgtgccgcccgtaggagcttgtcgcggtccgacggcgcagtatgaaggtccctgccactatcattgcgtcagctgatcaaa

SEQ ID NO: 32559 - DNA, 623 bp, Zea mays
  Clone ID: MRT4577_129708C.1
aaaaggaagcaggagcaggacgagccccgagatctcgcctcaggattgatgcatcattggcgactgcactgcacttcttcgccatcgatcctgtgggtcccctgattctccactccactatggcgccactaatccactccactccatctaatcaatttccagtgtatcgccaaaacacgcatgctttccttcctcgccatgccaagcatcgcccgcccgccctcgcacaagagagcatgccatggcccatggcctccgcggcgcgccatgccatcctcatatatacgacgaacatgtgctaagcttgccgccgcgtgcgaccgcgcctctccctccgctcaagcaagcaagcaagctagctaccttccttttccttgtgatggatcggaggcatcgtccttagcttgccttcacagccagccagccaaaccaccagctagctagctagccatgcccgccagtgccgccaccacaaccaccgcctcctccgcggctccctcgttgttgccgtgcttgcatggccatgcacacggcagggcctcggccgcggcggcctgctgcctactcgtgctcgtgactttcctggtggtggccgcctgctggtgggaccccaagacgcgaga

SEQ ID NO: 32560 - DNA, 301 bp, Zea mays
  Clone ID: MRT4577_129709C.1
ccgaccggagcgacgccgagtcacgcgccggccatgtccgccgttgcgactgctgcgagcgtgaggacacgcccgaggtactgacagaatggcgcgtggcctcagagttacaggcagtcgatcgacgtgctgagcgcggatgccataccgacgatgaactctatcatggcatcgagcccgaaccataccagattcggaagctacttggtacatgactgtagctgattgttactgaataaaggaaaggtcttggagctaccgttcatcaggtcattgctgacgggctagctgctgaagctga

SEQ ID NO: 32561 - DNA, 1482 bp, Zea mays
  Clone ID: MRT4577_12970C.1
cggaattcccgggtcgacccacgcgtccgcgtgtattttatggcaacttcctgtcggttaatagttcctcgcggctggattgacggcccagatctcctcaagagcgcgttcccggcacggcaccgacggcgacgggcacggcctcgaattaaaaactgccgttgggcgactccgcacggatccaccggagagatctggtctgccattcccacgctccttcctgtgaaccacaaacctaacgcggagcggcgcgggccggccgccgggcgaggtgcgcgtagctgcccgtcgatcgtcgccggatccatccaccatgggcggtggcaacggccagaagtccaagatggcccgcgagcgcaacttggagaagaacaagggggccaaggggagccagctcgagaccaacaagaaggccatgagcatccagtgcaaagtgtgcatgcaaacattcatgtgtaccacgactgaagtgaagtgccgggagcacgccgaggccaagcatcccaagacagacgtgtaccagtgcttcccccatctgaagaagtgaaaggcctgaacttagcaaccagtgctggtttggtcactacgatcgggccagggggcgttccttgtgttgagggtgttcattccgtgttatcttcccgtcagtcatgcgtcctgtcctatgttaacctacataagaaagtgatgtggtgtccacttctagtgaaactactgtctgctgttaaaacctggttggtttcagaacgatgattttcgtgtgcaaaacagattactggtccgtgggagttgggccagtttgcattgtcttaaaattaaaaaaaaaaaaaaaaaaaaaaaaaaaaaaaaaaaaaaaaaaaaaaggaaggcaagataagctagctaggaaggcaagggatccgatggacaagtacgagcccgttcgcgagatcggggcgggcaacttcggggtggccaagctgatgaggaacaaggacacgagggagctggtggccatgaagttcatagagcgaggaaacaggatcgacgagaacgtgttccgcgagatcgtgaaccaccgctccctccgccaccccaacatcatccggttcaaggaggtggtgctgactcccacgcaccttgcgatcgtgatggagtacgctgcgggcggggagctgttcgagcgcatctgcgacgccgggcggttccacgaggacgaggcgcgctacttcttccagcagctggtttgcggcgtcagcttctgccacgccatgaacatctgccaccgggacctcaagctggagaacacgctgctggacggcagcccggcgccgcgcctcaagatctgcgacttcggctactccaagtcctcggtgctgcactcgcgaccgaagtcaacggtgggcacgccggcgtacatcgcgcccgaggtgctgtcgcggcgagagtacgacgggaagcacgccgacgtctggtcgtgcggagtcacgctctacgtcatgc

SEQ ID NO: 32562 - DNA, 478 bp, Zea mays
  unsure (1)..(478): unsure at all n locations
  Clone ID: MRT4577_129710C.1
aaaggaacacgccggccggggaaaaaataaaagggggtttccgaggaacccccgccccgggaaaaaaaaaaaaacccccgggaacccaaaaataacccaaacacccaaaagggcgggggcggttttccctctcctttttttttcaacacacacccaaacccaagggccacgggcgcggggggggttttttttcaaaagaagcccccctaccaaaagaaaacatgcaaggggggacaaacatgcggagggagctaaatatgggaaaaacgggccaaccccggggcccccacgtacgggggaaaaaatatggatcgttttaagggggcccccccccccccccggcgttgttaagggttaaattccccccgaaacaaccgggggaggggcttatggggtaggggatcccccccccccccttggaggggatgctggcgggtttccccgctttaaggcccctaacccccggggnggggttttt

SEQ ID NO: 32563 - DNA, 277 bp, Zea mays
  unsure (1)..(277): unsure at all n locations
  Clone ID: MRT4577_129711C.1
accacgacggcagaacgggaaancgngagagacanaaaggagaagcnggcccccgncgcccaagacnacgagcaggagcnggagaccgcnaagagcagcnccgccggggggaggagcnacnagcngcccgnagggcaggncaacacgaacggcgcggagaggnncagaagcccagaggngcnnnnccagccgacgcngancggaaaggaagcaaccggcaaccacgagaccaccaacaacgggaacangaaangagacaaaaaaaagaggaaggacc

SEQ ID NO: 32564 - DNA, 763 bp, Zea mays
  Clone ID: MRT4577_129712C.1
tgggttttagattgtgaagaggagaccagttgcttcttttaccgtgtgccgctcactgaaccagttgcaacttccgagacaccggacaccggagagagacaggggtgaagggggaggatgctggttcgcagggctcgcaggcggcgatggagaggggcgaccagcagagcgcaacaaaccaaggctggctgctgagccgctcctccatgccccagtgaagcaggagatcgtcgtgcatcaactggccggagacgccactgaagatctccaggacgccgccgagctgagcgctgacggaatggccgtggacgcgcgccgacccgtacgtcgcccggactagcgcggggacgtcgcctgccccgctcgggtggtacacggccaaggcccccggaagtcacgagccatcgcgtaagattgctgcagccgagttcgacttcagttccaattcagccggcgacagctgttaatccgcgtccggcaagaattgggagctctccggtaaataaaagggggcggccgcggtgggagcagcggctccaactcgattcgttcgcctccctccccgatccctagatccaagacacagcatcgatgggcggcgaaggtgctccagctccgtagctccgacggcaaggtgctcttcgcctccggcgtgggactatcgcccggccgccgcccaagaacgtccgctggaagacgcgggtgccctcgcgcgtcttcgcgaaggtgctccagtactggaccaagcacaccttgcaagggc

SEQ ID NO: 32565 - DNA, 1325 bp, Zea mays
  Clone ID: MRT4577_129713C.1
cattgggtacctcgaggccggccgggattgtcctccgattaggcggagcatgccccgtttcgcaccgcacccccgcgattacgcgattcgcagggtccttcatcattgcaaaaacacgcataacttacattgtcatcttcgctcccgtgacctacatcgtcgtgtctcggcttggcttggcttcctcctccccgacgaccaccccgcgcttctcctctccccccgtcccaccttccgagaggcccgacccctgataccacgctgagggcggtggtattaggagattagcgatggcgaggtggcggccggcggcgctgctggtagtggctctggcggcggttctatcggcggcgtggcgggcggatgcgctatcggttacggtgaccgacaccgagtgcatccacgagttcgtgccctatgagggcgacaccgtgtccgggaacttcgtcgtcgtcgaccacgacatcttctggagctccgaccacccaggaatcgacctcacggtaacgtcaccaggtggcaacactgtgtacacattgaagggaaaatctggtgagaaatttgagtttaaagctccaagaggtggcatgtataagttctgcttccataacccatatggagcacctgaaactgtttctttctacatccatgttgggcacatacccaatgagcacaatctggcgaaagatgagcacttggaccctatcaacgttaaaatcgcggagctgaaggaagcattagaatccatcaccgccgagcagaagtacctaaaagcacgcgaagctcgtcaccgacacactaatgagagcaccagaaagcgtgtcatgttctatacgatggcggagtacctggctttcatggctgctagcgcgttgcaggtcctctacatccgccgcttgttcagtaaaaatgtgggatacaacagagtgtaggatagaaatctacttcaaaggcgacagtggaagcaccttatatggtcggaacgggaaacattctctgccagtttgacaaattgtagttctgcaccctctttttttttgttagtttataagaaacactttaatttatcatcatgtacttttagcaacacttgtgatatgttaagtgcatttggtgctgaacattgttccataactaatcttcagaggattgttatgaaagttagtattagatgtaccggaaaaaaaaaaaaaaaaaaaaaaaaaaactcgagatctctcgtgcgtagtttacttcctttgtatcttaagcttctcagcacctgcctactctgttcttatccatgaatatactaacatcttacgtgctctgccaatattcggacc

SEQ ID NO: 32566 - DNA, 761 bp, Zea mays
  unsure (1)..(761): unsure at all n locations
  Clone ID: MRT4577_129714C.1
aattcggcacgaggtcgattttcccggcccacctgcgagctcgcccccgctcggccactctctccccttcccccgatcgaccttccccccagcccacctgctgccgtttccccagccagtttcggcgcattccctcgtccttttggctttcagttgcggcgtcgcggcagggcggtttcgcagcccttggctgccgcgccgtcgttcttgcccaagttccggtctgggcttcgccgccggtgattctggcggtttcgtgatccgtccccgcgcaccggctgcgggcgcggaaaggcggcgcctttcccgctcgccgcaacgggtgctccgtgcgtccgctcggtcggtaacccctgcctctctcccgcccgcctcaacacccctcgcgatcacggggaagcgtcgccgtcgtggcccgtcgacgggggagtgcggtcagtggtggtgtcaacaaagtctcgccctgctttatttttttttctccatggtggctcgcgtcgcgtcgtaatcggatcattaattagtcttccagcctaggtcaatcccgggcctcacggcgtgttcttgactcgtgccgtgttcgacccgtgacgcctgtggttggcgggcggaatgggtcgagctgtctgctcttgattcttcgcaccgcggccaccggctcgcggcacaaatgctgtgtgagggcngaaggggtcaggcttgggagcggagaaggagccgactcttggtccgtgtccgtgcgtgagctcgacgtatggtcg

SEQ ID NO: 32567 - DNA, 155 bp, Zea mays
  Clone ID: MRT4577_129715C.1
actatggtaagacgttcaagaaaccaaagacctcttatgacaatgaccgtcttgatgctgcactgaagctgatcctttactatcgactctggcccaagcctcagcttttgagggatcaaaatacactgagcaacatccttaatacttcatggcac

SEQ ID NO: 32568 - DNA, 274 bp, Zea mays
  Clone ID: MRT4577_129716C.1
acagtgctgcatggccaacatgcactgcaagatatagcaccagcaaccacatgactcatgatggccttcagcacatagattgagtcccactgccgctacttaagcacattatacaagcagatctacgacgaggagatcccagtgtgctctatgatgcacacactggcacataccgccagcttttgcatgctgatctactgatcaaactgaactaagatgatagtgacaatgcaggctgggaacacttcacaattagcatggagactactgatct

SEQ ID NO: 32569 - DNA, 218 bp, Zea mays
  Clone ID: MRT4577_129717C.1
gagcttgctcgctgacctagtcctacctattgacttgcttgccatggcctgcatctactgtgacgacgtcaccgggcttggcttcagcttacccttatcagaccactccgtgatcagaaggatgttcttcatcatgctcgcctatctcctcaaggccaccagcatcgcctacatggtaaaggctgacatcgccctgtttgctctgcgggctcaacacc

SEQ ID NO: 32570 - DNA, 756 bp, Zea mays
  unsure (1)..(756): unsure at all n locations
  Clone ID: MRT4577_129718C.1
gccggcagggcttcctccaagaatcaaaaaggcttgatagcatacttgccatgtcttttgacgatctcccacatgacctaaaatcatgcttcctctactttgctgcattgcctatgaacacgcctgttgaggctcgcaaattggtatgcatgtggatggcagaggggtttctaagaccaaaagatgggagaacaatggagaaagttggaagaatctatttgaaggagttggttatgaggcatctagttaagttagtgaagacagacaatgccggtggtggtgatgaatttgtggccgtccaccataaggttcatgaatttttacagcacgaagctcaagaagctaactttgtggatatccacaacggtgacgatatcccttctttggcaactactcgtcgcctttctctacaaaattatacagataaatatgctgctctgtccagctctttgccaaaactacggtctatcttgtccaatttccaggaagaggttgaagatgatgaggaagatgaagataatgaggaaagtgaagatgacgaggaagatgaagacagtgaggaaagtgaagatgacgaggaagattcagaagaggaaggagccatggaggcagggcataaggtagaaggtgatggggatggagaggtagaggtagaggtagaagaagatgaaatactgagattgtgttatgtggagacatgaaacaatgnnggagttgagggatcgttttgaattactgaggaagggagggaaaatg

SEQ ID NO: 32571 - DNA, 698 bp, Zea mays
  unsure (1)..(698): unsure at all n locations
  Clone ID: MRT4577_129719C.1
gggtaccctcgcggccggccggagcctaacccgcgctaaaaccctaacctaaaccaccagcgcaccaccacccaatatatacgcgccccccccacaaaccatcgttctctttagtcccacatcccactccgccgctgccgcaccgcgcctatgtcgctcgacggagtcttctccacgaccgaggccctcgcgcggctactagcccgctgcccgacgctccactccgacccgcgtctccacgagcttgcctcgtcgccggccgccgcgccccccgctcgcgacgacgtcaccgccgcgctcgccgagccactgctgcatccgcgctacaccatccccgtgctgggctgcttcctcccgcttgcgccggcccttatcaaccaggccgtcgcgctgctccgcgccagactgcacgcgtgcaacgatgacgctcgcgccaggctgcaggcgtggaatgatgacgccgcccacctggaggatgaggccggngagagggacgtccgcgtcattgagttctacctctccaggcgtaggctcctgcggctgcacgagatcgcgtgcctcgcgctagcgcgcgccctcgacctcgcaccctacttgctcagatctgtattgaactactacaagttttcaccaccaccattccaaaggcttctatgtgcaagtttgacatcacaagttccttccaaggaactgcattt

SEQ ID NO: 32572 - DNA, 357 bp, Zea mays
  Clone ID: MRT4577_12971C.1
aaaacaaaccttaaaaatatatgttgggaaaacgggcgggtaacttatttaaggggggggggagggaaaaacaaacaagggcgagggggttttttaagggaaaaattgaccagaagaaaatggaccctggggaggggggatgatatagagacctttggggggatacgcaaaaacagtgaacaggccgcccagtttaaaaagtggaaaaagggaaggatttttttctaaaaatgaaaaaactttggagggggagactttctagctccaagcgaaaaaacagggttttttgaataggggccagaaaattgggttgggtgctcatcatccagaccagagtgttggaaaactttgaatgca

SEQ ID NO: 32573 - DNA, 289 bp, Zea mays
  Clone ID: MRT4577_129720C.1
ggccccaaaaaacacctttgcttttgttaaaaggggcttttttttattgacagaaaccccgggattggggtataaaaatattttttgggcttttccaaaaacccaaaggccccccacccgttttggggaacccatccggtcatccatgtccaaggggggggggcgggtcaaaagggacccgcccctggcgcctaaaggccccgggataaaacatttttggggcccggtggatgggccctataaaaagaaccccccggtgtttggttcataaatcggggggccccccttt

SEQ ID NO: 32574 - DNA, 156 bp, Zea mays
  Clone ID: MRT4577_129721C.1
ggggcacgccctcttttgtgcttttgtgctctttcggttggttgctggctcggctggggtgtgctccgggctgtctccccgcttgcgcgggggctcccggcctcttgggcttgctgctcgcggtgcgccctgtcttttgtttaccggggcgggccg

SEQ ID NO: 32575 - DNA, 593 bp, Zea mays
  Clone ID: MRT4577_129722C.1
ccccaacaaaaaaaaaaaagttggggagcaatttagggggaaaaaagtcccccctttacaaacggggaaaatttttaaacaattttaacaccctaaacccccgggatattgaaaaacccaaatcccccaaaaaacaattaaaacaacgggtttatacttttgccaaccaaaactggaaggttttgggggggtcaacccccccccgggaaaggccccactttttaaaaggttccaaggagcctgccccccccgttaataaggggcattttggggaaacccaccggaaatttcctgggggaaaacgggttttgggcccaaattttttttcttggggtaaacagcccccctcagaaggggatgggccccccagaaccccctgcccaaggggatggcccccacaaaattttaaagaaccaggtggcccttcaccgggcaaggaaaacccccaccgcccggggaaaacgggcaaaacccaaaaaaattaaggttttgaaaaaaaataatgggcccccccaaaaccaaacctttaaggggaaaatttatgcccccggtggccgggaaagaaaaggcaaaagaaaaactttaaaattttt

SEQ ID NO: 32576 - DNA, 368 bp, Zea mays
  Clone ID: MRT4577_129723C.1
cccacgcgtccgatagagatttagaatcttgagagggaagtcattaaccttgcggggcaactatcttcaacacatggtgagcaagcaagctccattgttcatactattctttaggcctacatccttcgagcagacaatgtacaacttcatgatcatcttcatgatgcaaatgaacagttgagacattatgaatctctactagaagatatacacaaggagtcaaaaaggaagattaaatcccttaccgattcactcaatgtatctaaacaaaatgaataaatgctgaatatagatgccgacgatgtcataaagctgatagaagctgctaaattcaatgaagaaaattttataataacttcaaatgaact

SEQ ID NO: 32577 - DNA, 477 bp, Zea mays
  Clone ID: MRT4577_129724C.1
ccggaacttagccgacgagcgctgatcaaatcaaccggagaagcaaagctatagatctactatctccttcacagttgctatcagagatgtataataatatgggaccccggcctggaatggcaatgcctcaggcaaatcctcagcctagcccatttgggaatccgttctctggacctggctctggacttatccggagtggcttgggagcttatggggagaagattttcggttctagctctgagtatgtgcagagcaacataagtcgctacttctccgatcctcaatactattttcaagtgaatgaccagtatgtgaggaacaagttgaagattggtctacttccattccttcacaggggacactggactcgaatatcagaaccagttgggggtagactttcatacaaaccaccgatatacgatataaatgcaccagacttatacattccgcttatggcctacggcacttacgctgttc

SEQ ID NO: 32578 - DNA, 269 bp, Zea mays
  unsure (1)..(269): unsure at all n locations
  Clone ID: MRT4577_129725C.1
agacgtaggctntgcttcgcctggaggtagtgactggtggtctctagatcactggtgtgataaacgccgcatttcacgtccgggggattgtggtggtacgacagtacacaggtgtgagctgatgcgtgagtgcgctggtgtgaacgtctttcatgcgtccttgcatttgagacatcgcctgcaaggggacgctacttggattatcatgtggccttgtttcaatcgaatggagccactgggccccaacactggctgtgagatttagagtc

SEQ ID NO: 32579 - DNA, 308 bp, Zea mays
  Clone ID: MRT4577_129726C.1
ctcacgcgttcgtacccacgatataggtggaaaccatagctcctggtcggatcacgctactaacgtcggtctccgtccgttctgactgcccatccaccgagcactggaccgacgatccgagtccacatgaaatccttctcttctgcaaggttgactgaccgtatgcgtatgctagctcagaacctagagtaccaaatcatggcaagggactgctcagtgcacggagttctgatctgcgatcgcttttgcccgaactggtcgcgctgatgagtgcacatgcgtctgattctgagtcaggaaaacatgat

SEQ ID NO: 32580 - DNA, 205 bp, Zea mays
  Clone ID: MRT4577_129727C.1
gtgaacctcgaatccagacgcagttctactcgcggacgccaccaaggagctgggccatgcccggcactgtcggcggccatgtcctcaccagagtagagggctggccactgtctggatctaagttcacttactcgggcaggtgaagcaacccgtctactccagctgccactaactacagttccatgagctggagctacaccagcgc

SEQ ID NO: 32581 - DNA, 285 bp, Zea mays
  unsure (1)..(285): unsure at all n locations
  Clone ID: MRT4577_129728C.1
tcctctgntcattcttaatgccgcttatgactcttggcacggtggcgttaactctttgttattgcattatttgtccaaagaacagatctttcagctggaatgaagtattttccataatctaacttcaaaaactcatcattagtttcacatttctttatcagataaagaacattttggctccgcgagcagctcatccttacggaaaatggcaaagttgtcaactagacatcaagaatttccatccaagtcagatcaaagttatgcaaggttagtatagaatcaaaa

SEQ ID NO: 32582 - DNA, 724 bp, Zea mays
  unsure (1)..(724): unsure at all n locations
  Clone ID: MRT4577_129729C.1
tggtacgcctgcaggtaccggtccggaattcccgggtcgacccacgcgtccgcctggctgtaggtagcgactacagttagggggcacctagcattcaggccctcatcctcctccttcccagcagggtgtcacgcttctccgaagactggatgactgccatggaggagtcacagtcggatatcagcctcgagctccctctgagccaggagacattttcaggcttatggaaactacttcctccagaagatatcctgccatcacctcactgcatggacgatctgttgctgccccaggatgttgaggagttttttgaaggcccaagtgaagccctccgagtgtcaggagctcctgcagcacaggaccctgtcaccgagacccctgggccagtggcccctgccccagccactccatggcccctgtcatcttttgtcccttctcaaaaaacttaccagggcaactatggcttccacctgggcttcctgcagtctgggacagccaagtctgttatgtgcacgtactctcctcccctcaataagctattctgccagctggcgaagacgtgccctgtgcagntgtgggtcagcgccacaccttcagctgggagccgtgtccgcgccatggncatctacaagaggcacagcacatgacggaggtcgtgagagnctgnccccaccatgagcgctgctccgatggtgatggcctggctcctccccagcatcttatc

SEQ ID NO: 32583 - DNA, 1957 bp, Zea mays
  Clone ID: MRT4577_12972C.1
aaacatataatcggttgagtcattaaatagcagaaatccgtcaatttctacatcttgagtcatatgaacacatttatctttctacacacgtaatcttaatgatactcagattctctacgctagattctctcagaaaagcaggtaaaaaaagctgaaccaaacagtataatatgtgtcacgtcatgcggtgccggctatcatgaagctaatccacggaccggacggcctttcatcagaagttgaacaagcgcatctgatctcccggttgccacgctggacgatgatctgcctctttcttccctttcgttatccgcatcaatgtcagcgccagtgaattccctgagcaacatagcagcagctggctgtaacctcctcctggttttctctgtcctagaaccaaaagcttccttatctgtatccgcagtttcgtctgcctccctgcccttgcttggaggagcctttgcagctttcgctgaggcatgatcacacttttcgtctggagcttgaccaccgtctataccatgctccagttccacgttagccttttctacagcagacacacatcttccagatttctgcttcagttcctcaagcttcttttcagaaccaaccgttccaagcaaggaagcctcactagagcgggtaccttctgtgtcaaagttcacttgctgtgaagagctacaagattcatggtgcttctcttctcttatattgatatcaagctgaatatccttattctctagtgtgatcttactcagctcttccgtttcttcatcactttgccctgtgaagctttgatctgaataactagatgcaggcattgcaccaccagtgggtgcaggtgttggcacagtaaaactttcagatttatctgattccttatgaagcgcttgtaactctacatggaaattatcttctgaagcatcattagatcccaggtcagcttgatttgatatattaactaaactctgagcagcttgaccaaatgatgaagaatcatcatggtccacagagtcatcttcatttattggagaactcttgcatgaacaataccttacagccttcagctcctttttcaactccatgatttcgatatctttatctctaatcaattctttcatgctttcaacagcattctcggactccaaaagtttgtgcttatattgtcttaatacagtcaataaagcccttgcaaagtttgtcattattgcttcgcttctggatacccttggcatctctgggttaagagacacgtgatgcacgccatctttttcagaaactttagaaatatcatctgtatcaacattttcctttcgttcaaccacaaggactgcaggcttctgaaccttcctttttttcttgttctcttggcaaatcaaggaaacattgattctcttttgcgaagccaggtcaaaagaatcatcaagactagtgtactttattttcatgtaaggagatgcttgtctaagcaaaaatgatgtatccaaataatcatcatcccctggcttcacattcaagatcaaagtcattttcttccttccttctaggtagtctcttaagtaccttgtcaacatggaattcttgaaatgcttttccaagggtttcttctggtttttctgatgttctaacagagacctcaaacagagactgaaaaccatggatgtgttgttgatgaagttactttctaacagccttgaaccttgatttctagttctcttttcccgttctgcgccagcaaggtctgctatggtcagaacagcactactaagtagatgttcactgtctgcacgtatagtaatgatgcactgggatcgacttgagttgctgttagcatttgttgcaaccgtgctgcgctttagcataccacgtgaaaccaagctctcagcatctgcaggatttgaaagggaaacctcttgaagacctttaatcactgactgctgaagaacacactccacag

SEQ ID NO: 32584 - DNA, 256 bp, Zea mays
  Clone ID: MRT4577_129730C.1
cttatgtttcatataaacgcgtagctggtcatcagggctggcctcacgggggtctcgggcattaccttgtactccgccggcgccaagagctctttcacctccgaggtccttacggcgagcgcgctcggaatggggatgacctacctggtacccgtgcatcactggaaatggttcatctcaatcgcgacgactccggcctaggcccgtttgagctcgacgccctgcaagactgccggatccaaattcatgacacaag

SEQ ID NO: 32585 - DNA, 804 bp, Zea mays
  Clone ID: MRT4577_129731C.1
gggccccgtcctcccccactccacctgcccgtttctcgctccgaagcttctcctctcgcgtctcgtaccaggtcaggagggagggagggagacgggagaaccagggagcggaggcgtgcgtgctgcggcctgcggcctgcaggaccagagatcggggactgagctagggtctgggactgggaggcggagatgtcgacgccggcgaggaagcgcctgatgcgggacttcaagcggttgcagcaggacccgcccgccggcatcagcggcgcgccgcacgacaacaacatcatgctctggaacgccgtcatattcgggccggatgacacgccgtgggacggaggcacgttcaagctgactctgcaatttacagaagattaccccaacaaacctccgactgttcggtttgtttcgaggatgtttcacccaaacatttatgcggatggaagcatctgtttggacatcctacaaaaccagtggagtcctatatacgatgttgcggcaatattgacctctattcagtccctgctgtgtgacccaaacccaaattctcctgccaactctgaagcagccagaatgttcagcgagaacaagcgtgagtacaaccgcaaagttcgcgaggttgtggagcagagctggacagccgattaaaactttcctaggtctgttttattgacttaaccgttaaaaatccccaggtatcgttgtggtccttgtgggtcagtcccctgttgtattgctgcctgccggttttcctaatatagtggtgaacggtgtcatgaactccgatattggtgtgtatgcaaa

SEQ ID NO: 32586 - DNA, 387 bp, Zea mays
  Clone ID: MRT4577_129732C.1
tcggcgtggtcgaggaggtgggcgccggggtgacgcacctgtccgtgggcgaccgcttggcgctgtagccgggcgttaattgttggcgctgccgcctctttacggattgatgttccaacctgccgttggccttgactttattgctcgtcatgttgttaacaggttcttctttcctctggttgtaatctattcttgcctttattttaaactattcttttaaggttattatttttgtattcatgtctttttctattattttatagttaatttattttggggggctgtatttttttataatttactttttttattataaattttcttatatttcattattttattttttatatttattatctaactatatattattctattcttatttta

SEQ ID NO: 32587 - DNA, 1340 bp, Zea mays
  Clone ID: MRT4577_129733C.1
cattgggaccctcgaggccggccgggacacacgtcgctcgcgcttcgcgtcggttttatgcacgactccttttcgacccggctggccggctccccacctgctcgcctctcgctccgaagcttctcctctcgcgtatcctaccaggagggtgggagacccagggagcggaggtgtgcgaagctcgcctcgcaccacgcgctgcggcctgcggggcgagagatcggggcctgagctagggtctggtggcggagatgtcgacgccggcgaggaagcgcctgatgcgggacttcaagcgcctgcagcaggacccgcccgccggcatcagcggcgcgccgtacgacaacaatatcatgctctggaacgccgtcatattcgggccggatgacacgccgtgggatggaggcacgttcaagctgactctgcaatgtacagaagattaccccaacaaacctccaactgttcggtttgtttcgaggatgtttcatccaaacatctatgcggatggaagcatctgtttggacatcctacaaaaccagtggagccctatatatgatgttgcggcaatattgacctctattcagtccctgctgtgtgacccaaacccaaattctcctgctaactctgaagcagctagaatgttcagcgagaacaagcgtgagtacaaccgcaaagttcgtgaggttgtggagcagagctggacagccgactgaaactttatccgctccgccaggcggtgtaaataaagcatctgtctttcctacttggccggtctgttttaccgttagaaatcctcagctatcgttgtgttcttgtggttcagtcccttgttgtagtgatgcctgcgggttttcctaatgtagtgctgaacggtttcataaactcggatattggtgcatatgtaacagatatagctaagtcaagttgttgcttggtttgcataaaaaaaaaaaaaaaaaaaaaaaaaaaaaaaaaaaaaaaaaaaaaaaaaaaaaaaaaaaaaaaaaaaaaaaaaaaaaaaaaaaaaaaaaaaaaaaaaaaaaaaaaaataaaaaaaaaaaaaaaaggggggggcccttttaaaggatccaattttacttcccctggcatgcaacgaaatattttttttttagggcccccaaaatcaaattccctggccccgttttaaaaacgctggaatgggaaaacccctggcgtccccaaattaaatccctttgaaaaaaatccccttttcaccagttgggtaaataaaaaaaaggcccgacccattcccctttcccaaaatttgccaaccctaaatgggaaagggacccccccctgtaccggccaattaaccccggggg

SEQ ID NO: 32588 - DNA, 908 bp, Zea mays
  Clone ID: MRT4577_129734C.1
gccggccgggctgggacacacgccgctcgcgcttcgcgtcggttttatgcacgactccttttcgcacccggctggccggctccccacctgctcgcctctcgctccgaagcttctcctctcgcgtatcctaccaggagggtgggagacccagggagcggaggtgtgcgaagctcgcctcgcaccacgcgctgcggcctgcggggcgagagatcggggcctgagctagggtctggtggcggagatgtcgacgccggcgaggaagcgcctgatgcgggacttcaagcgcctgcagcaggacccgcccgccggcatcagcggcgcgccgtacgacaacaatatcatgctctggaacgccgtcatattcgggtatcagcccgcctatttctgtgatgttaggccggatgacacgccgtgggatggaggcacgttcaagctgactctgcaatgtacagaagattaccccaacaaacctccaactgttcggtttgtttcgaggatgtttcacccaaacatctatgcggatggaagcatctgtttggacatcccacaaaatcaatggagccccatatatgatgttgcggcaatactgacctctattcagtccccgctgtgtgacccaaacccaaattttcctgctaactctgaagcagccagaatgttcagtgagaacaagcgtgaggacaaccgcaaagttcgcgaggttgtggagcaaagctggccacccgactaaaactttatccgcccccccagatggtgcaaataagcccctgcctttcctgctttgtcagtctgtattatcgtcctccccccttaaatatccccagccactgttgtgttcttgtggttcagtcccctgttgtactgttgcccgccggtttcctaatgtagtgaatggtttcgtggactgg

SEQ ID NO: 32589 - DNA, 1224 bp, Zea mays
  Clone ID: MRT4577_129735C.1
gtcggtccacgcacgccgctcgcgcttcgcgtcggttttatgcacgactccttttcgcacccgggtggccggctccccacctgctcgcctctcgcgcatcctaccaggagggtgggagacccaggcagcggaggtgtgcgaagctcgcttcgcaccacgcgctgcggcctgcggggcgagagatcgaggcctgagctagggtctggtggcggagatgtcgacgccggcgaggaagcgcctgatgcgggacttcaagcgccttcagcaggacccgcccgccggcatcagcggcgcgccgtacgacaacaatatcatgctctggaacgccgtcatattcgggccggatgacacgccgtgggatggaggcacgttcaagctgactctgcaatttacagaagattaccccaacaaacctccaactgttcggtttgtttcgaggatgtttcatccaaacatctatgcggatggaagcatctgtttggacatcctacaaaaccagtggagccctatatatgatgttgcggcaatattgacctctattcaggtatcactcattttgtcactcaacctatcatgttgaaataacttcgttttgttctaacactgcctgtctattatactgctctaatggattattgtatccagtagaaagcccatgcaattggtccaacctaactgaattgacatttttataattgaattgccatatggttttggataaatactccagttctatatgaacagtgaaagaatgaaaacggtttccccattacctgatttcactagaaggttggtcacaagccatttactccctccatttcaattcaaattgtaagtcgtttggacttttgcgaaagggtctctagctgagttggttaggtggtctgagtaacactccttaggtcctgagttcgaatcctagtgggagcgaatttcaggctaatgttaaaaaaggtcaatcgttggttcccctggttgtgtgcatatgagatggactgacctatggggaccggatccttgtaggggctgagggctcaaagcacgagtaaagatccgacctataggggggcggaccctcatgttgcacgggggatcagctttcgtgacctttctcggtcggggctccgattgagctgcttcttaatataatactgggggggcggtctttcccctactggcccgattttttagtcgtttgcaattttctatgcacataccttttgc

SEQ ID NO: 32590 - DNA, 392 bp, Zea mays
  unsure (1)..(392): unsure at all n locations
  Clone ID: MRT4577_129736C.1
cgacccagcgtttgcgcctctcgctccgaagcttctctcctctcgcgtctcgtaccaggaggaagggggacgggagagacccagggagcggaggcgtgcgaagctcgcttcgcgtgcgcgtgctgcggtctgcggggagcgggagattgggccctgagctagggtctgggactgggaggcggagatgtggacgccggcgaggaagcgcctgatgcgggacttcaagcggctgcagcaggacccgcccgccggcatcagcggcgcgccgcacgacaacaacatcatgctctggaacgccgtcatattcgggccggatgacacgccgtgggatggaggcacgttcaagctgactctgcnntttacagangattaccccatctnacctgcaactg

SEQ ID NO: 32591 - DNA, 363 bp, Zea mays
  Clone ID: MRT4577_129737C.1
ttccacgcgtgcgcccacgcgtacccccacgcgtgcgttcacgggcgcggcgcgaaacaatggcgaccacagcgccgttgctctcgccccatgcgcgcttgccctacccatatccggcgccggctctcgcccctacatctcgtatacgccctcgacgcgtaagcgaggcggctgcgccttcggcgggcgcgcggcaccttgttcggccaagttcggcaaagttgacaccgccgacgccccggctgaggccgaggaggccgggggcgcgacagatggtgggctggcgcaacccgcggaggaggacgacagttgcttgccatcggctttggagggcgcgattccccagtcagggaaggcgagcgc

SEQ ID NO: 32592 - DNA, 1030 bp, Zea mays
  Clone ID: MRT4577_129738C.1
atccaaagaattcggcacgacatcagactcaggaggcgacgcgcgcttggaggtaacgcgatcacggccgctcgggtgaagggggcacgtcacgtcacgccgctcgcgccgcgtcgttttcgcacccggggaccaggctcgggcgctcggctccgtcctcccccacatccacctgcccgtttctcgctccgaagcttctcctctcgcgtctcgtaccaggtcaggagggagggagggagacgggagaaccagggagcggaggcgtgcgtgctgcggcctgcggcctgcggcctgcaggaccagagatcggggactgagctagggtctgggactgggaggcggagatgtcgacgccggcgaggaagcgcctgatgcgggacttcaagcggttgcagcaggacccgcccgccggcatcagcggcgcgccgcacgacaacaacatcatgctctggaacgccgtcatattcgggccggatgacacgccgtgggacggaggcacgttcaagctgactctgcaatttacagaagattaccccaacaaacctccgactgttcggtttgtttcgaggatgtttcacccaaacatttatgcggatggaagcatctgtttggacatcctacaaaaccagtggagtcctatatacgatgttgcggcaatattgacctctattcagtccctgctgtgtgacccaaacccaaattctcctgccaactctgaagcagcgagaatgttcagcgagaacaagcgcgagtacaaccgcaaagttcgcgaggttgtggagcagagctggacagccgattaaaactttattcgcttcaccagatggtgcagataagcatccacctttcctatgtctgttttattgatttaaccgttaaaaatccccaggtatcgttgtgttcttgtggttcagtccccctgttgtattgctgcctgccggctgccggttgtcctaatatagtggtgaacggtttcatgaacttggatattggtgtgtatgcaaaagatatagcaagtcaagttgttgct

SEQ ID NO: 32593 - DNA, 265 bp, Zea mays
  Clone ID: MRT4577_129739C.1
tcccactcgtcctaaaaataaatatataatataaaaaaaaaaaataaaaaaaaggaaaaaatgaaaaatattaaaaaatagaaataataaaaaaataaaaaaaaaaactaaaaataaaataataataatattttacataatatacttatacatacaagtaaaacaacaatgatccatgtatttattattacgttcatacacttcatctatgtactcttctatatattacatgtaataattcatccgacaattaatttactacaca

SEQ ID NO: 32594 - DNA, 387 bp, Zea mays
  Clone ID: MRT4577_12973C.1
gggacgggagtgcaccggttttagggataactactcttgaaaatttaccaccattccggtttacaatgaaataattaacgggacaaacgctaggggggggaatctgctactggtaccctaggcactggcattggtaaaagagggttaaaacacaaccaaggcccaccgatgggtcccttggcactgacgtcggttttcttagcgcatgggacatgcacgacctttgggtgggaccggtatgcatgggatggttcatccttttaccctattctcgggctcggcttggttggtgggcttggggccacttgtggcagcttgtcattatgcttcatgcattggccacctttcccgggcgtggaagagaatggctttctggcacttttaatg

SEQ ID NO: 32595 - DNA, 1669 bp, Zea mays
  Clone ID: MRT4577_129740C.1
ttccagcgtccgcccagcgtccgtatacagccaataaaagaacagacatcatatcacttgggattatgtatgcctgtccttcattatatagccaataacaaagcaagattatagaacttatgtttgtaaattgaatatctgagatattgacttccacaatagctaacgaggacagactacaccatgtagccctgcacctactgtaaatcattagactatctccggcagcttacccatcatatctctcatcctatctcctatttgaactccactctacgaacggtgcagtccacaatctacattggaaaacaatgttttaggtgaccatatgagtaacctgctggatacggttttattagctactagctagtcaatggccatgggccatggcttcaattattcagtaccactttaccaggttactccaattgtattggcatgaatgtgttaacctttatttggttgattcaactcattagaattacgtgtatcacaattcaagcaccgtcagatggaagttagagaaaccttttgtgattgataaatgaaacttaagtaccatgtggttcaggagagcatgagacccttcctcagtggaagtatttggtactaaatttcatctgttgacagaaaaaaaatcaaccttctatcgcctgaaggactaaaactctttttttctcttatatgatttgtattgttgttttctgactacatctttcagcatattccatccattgtacatatactttgatttggtttgttaatgccacaatcgactagcttagttcaatcacctatttgggacttctctatgatataggtgaacatcaaccataatatagtttgcggtatgctataccattagacgtggttcacctcagtgtcttttattggcagcagaacaaaccgtctgctttctgattttaactgtcagtttgctaacatatgtcaagtttacacttgtaggcacgttcaagctgactctgcaatttacagaagattaccccaacaaacctccgactgttcggtttgtttcgaggatgtttcacccaaacatttatgcggatggaagcatctgtttggacatcctacaaaaccagtggagtcctatatacgatgttgcggcaatattgacctctattcagtccctgctgtgtgacccaaacccaaattctcctgccaactctgaagcagccagaatgttcagcgagaacaagcgtgagtacaaccgcaaagttcgtgaggttgtggagcagagctggacagctgattaaaactttagagctggacagccgattaaaactttattggcttcaccagatggtgcagataagcatccccctttcctaggttcctaggtctgttttattgacttaaccgttaaaaatccccaggtatcgttgtgttcttgtggttcagtcccctgttgtattgctgcctgccggttttcctaatatagtggtgaacggtttcatgaacttggatattggtgtgtatgcaaaagatatagcaagtcaagttgttgctaggtttgcagaaaccgcatcctcctttctcgctgcacgaacggcctctcacgaggtgctctcctgtggaggctgttcatcctgtttctgtgcttctggtaactggtaagtcatgaatgaaagctttagcagttgtacgtgaa

SEQ ID NO: 32596 - DNA, 387 bp, Zea mays
  Clone ID: MRT4577_129741C.1
aggttgaaaggccggacaggggcgcccggggggggaaccaaacagagcgggaccaaggacgaaagaaaggcaggcaaagaccaaaccggggggaaaagggaaaaaaggtaaacccccggaaagaaaagaacccaaaccacgaaaaaaaaaaaaaaaaaacccaaaaaaaaaaaaaaaaaaacaaaaagcccagaaaggcaacgaaccaaaattaaaggggaaaaccggaaaaccccgccccccaaaaaaaaaaaaaaaaaccccggcaaaagaaaaaaaggaaaaagccccctaaaggaccggtcgggtactggaacactgccccccttccctcggtcgttcccggccggggcggggtacccgggtgccggaaggggggtttacccc

SEQ ID NO: 32597 - DNA, 640 bp, Zea mays
  unsure (1)..(640): unsure at all n locations
  Clone ID: MRT4577_129742C.1
ccggccgggatcatcactcttcacttgccataactccttacctagtcactatccccttattcccaaatcataatccaccatgtcttgtgattggaagcctccagcctttggcactcccgtctggatgggtatccctgccacagacgtgactcgcgcctcggaattctacaagactgttttcaacttttcttttggcgaagccaccgagaagtaccccaaagaccaactcatgaagtttgacttcaacccaagccttggcctgtcaggcggcattcaaaaagcccctgaccacactggaaattttgcccctgggaaaggggggatatgcatctactggtatgtcgagaatgttgacactatcagccctattattgaaaaggctggcggtaagatgttgagtgaaaaggaaaaggaaggcgagcatggtttataccggttctttgaggacaccgagggatcagtcggtgctgtgtatcaaatggcttgagcgggatagaacaaggggatcgaaagacactaagcagcattacaatcnctcctcgcaggattttcttcgacatagtcttcccaatacaaatcttgcgaaagtaaaaatgacctataattaatgctgaaaaaaaaaaaaaaaaaacccgcggcc

SEQ ID NO: 32598 - DNA, 339 bp, Zea mays
  Clone ID: MRT4577_129743C.1
aaaaaaaaaaaaaaaaaaaaaaatttaataaaaaaaaaaaaaaaaaaaaaaaaactgaaggaaaaattaggccgggcgttcctttattaacgatcttactttcctcttctttcaattccatatctttgttatcttgtcccctaacttaaattcattcgacgggattttataactcaactcttgggaaatcaatttccatacctcccttaactgactcgtcttgcattacttattttctagatgaagcagataacctaagacttccgctccatctcgtttttctaacaatacctttacctaaaattattttggatatctccctctcttttttttttaatt

SEQ ID NO: 32599 - DNA, 302 bp, Zea mays
  Clone ID: MRT4577_129744C.1
caacaacaaaaaaaagttgcactaggtgcagcattttgggaacaaactgagctagaactaactacaaggccgtaaagccagtgtgaacctctatagaaaggtctatggttacaaaacatatttacgaccaaagaacactacactaagtcacccgcaactgaagattctcaagtttcgtgttacacaaatttgcttccattaatcgggaggaaaaaaaacagatagagcgcatgggccatgccccaatgggggacatgttaaatggaacttcggacggaacaaaagacgcactgcattttatt

SEQ ID NO: 32600 - DNA, 306 bp, Zea mays
  Clone ID: MRT4577_129745C.1
gtgtcccagagacggaggctggagagagcggctgatacgcattatctttgccactgggtccagtagggtggtctagggtaggattggagctgtcctttctgaggagtgagaccagccaagaggaaggacctagaagcagtgacccccccaacccctggaagctctggggacgagctcttctgcagggtcccattgtctcatcagctctcagtccccactcccagtcacgagtcacttccaagcagggtccctggaaatctgacctaaggctctgaccctgaaggacagagaccagagagatggaac

SEQ ID NO: 32601 - DNA, 342 bp, Zea mays
  Clone ID: MRT4577_129746C.1
gggcgccatgttctgggaattggcttagcgtggtcgcgggcgagggtcaccgtataagagtttgaggttaaagttatggggataaagtcaacagtgactgcgttgataaatgatgaggttgcagtatttgaagtgagtgagactgtgtgggaggatgttgagggtgctaaatttcctgctttataggttgtttgcgggttgtgggatgtggtcatggaggctggttagtggtctggggcggaatttgggcgtgatgcggagcattagttgcgcatgtgagaggtcggtctgggttattgtagggttgttggcggggtggttgagtggagcgggatcttttgc

SEQ ID NO: 32602 - DNA, 572 bp, Zea mays
  Clone ID: MRT4577_129747C.1
ggtaccgcggccttccctcgagtttttttttttttttttttttttttttttttttttttttttttttttttttttacacaccaccaaattttgtagggctttgccccatactggccttaaagagttgggggtacatcacacaggggacacattggggccctaaaaccaacaaaaccgcaccctgttttagggccccaaaaccctgatttgttttttagacgcctatttccttgggggggccccccaataggtctccaaactacccatatcccctgtgacaggggtggttaaaaaccccattggtttactgaccccggggggggcgccccacctggggaaaagggctctccttggggatgactcccatggaaagggggcgcccatccccaagttggtcgccggggaaaagaaaacccttaggtgtgggggggatgcccttttgggccggctttttttcctcaaccttgaaaatgggctggtatttttaaacctcgaagtttttggcttcgccggtgaaggctttgacaagaatggactccaaactgccaaggggcacacctggtggtgggtgc

SEQ ID NO: 32603 - DNA, 352 bp, Zea mays
  Clone ID: MRT4577_129748C.1
attcggctcgagggcgacactgcactttttatatatctggtgatacggctgcgcgtgctgcatctaaaaagaagaacaccgttgaagactaagaggaacaccacgaagagtcgttggacaacgctgtggaacgcaagacctaatgccatgaggatgcaaccagacttatgaacggtgcaagagagatcaagaactggacctgtagggacgtagaggctcgtaccctcgaaactggtaagagtgggcacgccgattgacgctggaacatcatgcgcagatacaggggcaaaaagcgcgagaatattgggcatgaatcacacatcagatacgtaaacaatggcaaccgcactga

SEQ ID NO: 32604 - DNA, 787 bp, Zea mays
  Clone ID: MRT4577_129749C.1
tagccaagttcgaattggcactcgtagcatctattctttccggtccggcggatgttcgatgctgatatttgcggccatccgactcgccagcgcggccgggagtagggctgcataagtcccgtgggctcattgcgtgttcgatcgatcggatccccatacgatctactagctagctaagctacacgactcgaccgaggaggaggagcgctcaggccgtatagaaacttggagcatgtcgttaaccacccaagtgtttgggcctcccggctacaggcggtggtggatctattacatcgtcaacgatactgatcaattgagtaaagctctgaaccgacctgatcacctggtggtgttcatgttctcggcggagtggaacgaaccctgcaaggcgatgaagaaaccgttcagggacatggccagggctagaaagatgcaggccgtattctgcttggtggacatcgacaagcttaaagatgctgtggcgcagcagttccaagtggaggcgctgccgacgttcgtgctgtacaagaacggcatacagaaagggagggtcgttggcgccaaggtggacgacctcagagccgccatcgacagcaacatatgattccatctccgatcgatcgatccattcgtgctgcatgcatacgatcgactaataagaacatgaggctagcaaaagacgacggatcggatcgatcgtccataaataaacaaataacattattattaatcctcatttctcatcgtttgctctcaaaaaaaaaaaaaaaaaagcggccatcgagct

SEQ ID NO: 32605 - DNA, 796 bp, Zea mays
  unsure (1)..(796): unsure at all n locations
  Clone ID: MRT4577_12974C.1
atactgttacgcacgcccagagatgagacattgagttccctagccgagtgtgtactagcagtctaactaccagttaggtcgtacgagagctcgcattcatcatgtcaggatgagaagcaacaccacttcttcaaccaccacaagaaggtacgagagacagcccggcggcgagtacgggtactccgagaccgaggtggtaaccgcctccggcgagggggagtaaacaggagaagaaggatcgtacaaggagcacaagtacaacttgaacctctgcgaggtcggggtcatcgccgtcggtgtgttctcactctacgagaaccacgaggcgtggaaagaacccgagcacgcacagatgcactaatgatcacggaggaggtcgctggcgctacgtccggcagagccggaggttacttattccacgagctccgagacaacaacaaggacacacaagggactgctaggtaggataccggcgagaagaacctgctgcacctcatcttctgaccgtacgaccggacggcgcgcgagcgacttaggtatctctggtgcacatcatcacagacctgattaattctgcactgtctgcgagcgctgtttgatggttcaaaataatgagttgctgtccggaccttgatagctgcttgtcttgcgatgaatgacagagctcgagtgaagaagaaccagtggtggatttggccatacgtctagagagacgtgtgcctgcgatctctacattctaactgcatgccagtatagttgtgttcgatgataagtgagagncgtgtgatgtgtggct

SEQ ID NO: 32606 - DNA, 692 bp, Zea mays
  unsure (1)..(692): unsure at all n locations
  Clone ID: MRT4577_129750C.1
tctctttggtgggcgtgcgatcgtccattgtgctactggtgggctgcctggtgcccgtcttgccgnnnnnnnnnnnntntgtgtggtgtgnnngtgggtgttttttttttgttttttttttgttttttttttttttttgtttttttttttttttttttttgtggttgnnggnngggggggggggnggggtagatcatgtgcggtgttgtcgtgaaggtgaagccggcggcgagttctggtgcggtgaagcccgtggacatcgttggcaatatcttctaccgcgtgcttgcatgccccacttcttaccgttcgtgttcgggccggagcaggccttctacgtcattgtcgagagcgttcgcgactcacctcatcctgtgatggatcgtgacgttcttgcttttctcacaagattgatccgaagcagacgtactacctgtccatggattacctgcagggccgcgctctcaccaatgccgtcgtcaatcttgtgatctccggggtatatgcggaggccgtgttgaagttcggctacgagctcgaggccctcgcggggtcttgtataagatgctgctctagggaatggcggtttgggtaggcttgcttcttgctttttggattgaatggcaacattgaatttgcctgcttggggctatggcctgcgttaccgatatggactgttcaaacattacatt

SEQ ID NO: 32607 - DNA, 539 bp, Zea mays
  Clone ID: MRT4577_129751C.1
attcacatcccttctttcattaggcgccgccgcctgctctctgatgccagctccatgccgagaacgcctgcaacatgctatccatggatagaaaacaaaccataccccccaaccaggacaggcgagccgtgcctgacctgaacatgaagactactaggctgtgatgaagatcacgtctgttgatgcttccccgtactgtgcgttcctggccccgagttagaaggaaaatgaacattcatggacgctcttgaggctgcccgaattgcctgcgatcgatcacgtggacacgtctccttatgatgatatgttcgatcttcaagacggtgcacaccccttccatgacctccgtatcaccgagatgctcactagtgttcgtgctgatggactccacactaccaatgaccgccgtgccctcttgggatcctcatgctctctgggctcttgcgcacactgggaagaacctcctttctgttcaaggtgataccccgaatgctgctgatggcactcaaactctgcgtggcaccaagttaaagatccct

SEQ ID NO: 32608 - DNA, 371 bp, Zea mays
  Clone ID: MRT4577_129752C.1
gaaatccacataccgagtatcgctagtggctccaaagcaacccctccgccactgaacaagggggggaccctacgtactacatggccacatctacatctgcgaagggccctctccattcgtcgtggactaacagcagcagcagcggccctagcggcgacttgtagatggtcctgaggaagagcgcaggcttcagccagtggaggaggaggccgcggttgctaccttctgctcccgcgacgacggcacatgatcctactgcatctagaccacgctgccgacagggccaacgatgaaagccgaatggactgacgccatatcgtacgtgtcaaccatggtttaggacttactgaaacctaacacatgtacctgat

SEQ ID NO: 32609 - DNA, 750 bp, Zea mays
  Clone ID: MRT4577_129753C.1
tttttttttttttttaccaactatttacatttccaagctaagtttacaacataagaagaatggtaattattaccaagtcctgataatacccaaagtgcataacttattaaaataattggaagggtgaagcctctccataagagatacacataaacattctaagcttcaaggcctccacatgaagtaactatttataagataagggaataaaacttctccttagtgcaggagaagatcccaaaatccttctacccaacctttagttagatagctccatccacttgatgagcaggcattggagtagactccttcaaacaccacttcttctaggtgttctcggggagtgccggtcacggtgaggcaagaactctgacgtggagaaaaggactaggtgccggcaacacgaaaacaaaggcgagcgtcgatagccagcttggagactcggcacggctgagaaggggctcggcgagctcgatgaatggacgaggagtgaggggacgccgacgaggtggctccacggtggggcgaagcacagatgctaggagccggtgttgagcgttgctgctccggcgagctgcttagtggctagacggcgttggagagatgggggaagatgccgacatcgaggacaccattacagggagagcactctcgacgtcggctgaggagcacgtcgcgagggaggaagacacgggcctgactcgcaacgagcaccctgacgcggcggaccccaacagggggatctggtcc

SEQ ID NO: 32610 - DNA, 515 bp, Zea mays
  Clone ID: MRT4577_129754C.1
ttcttccgcttgcttgattgctccagagtattagcatcccaccgagtcctccgagcactatgaactgtgctgctgactacctgcttgctgacctcgctggcaacgccagcccctccgctgacgatttgactgccattctggagccacctgtctgcgacactgacaatgaaaagatggaactcctgctgtcccaactgagcggtaaggacatcaccgagctcattgccgcgcatactcagacagtttgcttcactaccatgcgtcggccgcggtgccgctgttgcggcatctgcacctgcctgttggcggagctgctcctgcagctgaggcaaagaaagaatagaatgtgcaagacaaggaacaaagcgatgatgatatgggcttcacgcctcttcgactaggctgcacagtcatcacagtattgccctggacactgaaaccacatggaaaaccatagacatgactatatttctaagcgtctgctttatgttggaaagcaccggaaagactgctac

SEQ ID NO: 32611 - DNA, 866 bp, Zea mays
  Clone ID: MRT4577_129755C.1
acaaagtacactttacattccagaactcaagttttacatggtagaaagagatgtatttattacaagtcctgatagtactcgatgtgcataacttattacaataattggaagggtgaagcctttccataagagataaaaacattctaagcttcaaggcctccacatgaagtaactaaccaaaagataagggaatagaacttctccttattgcaggagaagatcccaaaatccttctacccaacctttagttagatagctccatccacttgatgagcaggcattggagtagactccttcaaacaccacttcttctagatgttcaccgctacggtgctcgcgcaaactcaatcaaagaacactcgaattggccggtccacaaggcgatgggttcgaagcggcgttcactgacggcgacatgatgttcccaaggatctcggggagtgccggtcacggtgaggcaagcactctgacgtggagaaaaggactgggtgccggcaacacgaaaacaaaggcgagcgtcgatagccggcttggagactcggcacggctgagcaggggctcggcgagctcgatgaatggacgaagagtgaggggacgccgacgaggtgactccacggtggggcgaagcacagatgctgggagccggtgttgagcgttgctgctccggcgagctgcttagtggctggacggcgttggagagatgggggaagatgccgacatggaggagacgattacagggagagtcctcgcaacctcggctgaggagcacgacgagagggaggaagacgaggggctggaaacgaacgagcaaactgagcgcgtgacgggataagaatgacggaaataactagcccggccggcctcga

SEQ ID NO: 32612 - DNA, 542 bp, Zea mays
  Clone ID: MRT4577_129756C.1
gccggccgggctcccgaaccaagcaacaattgacactttattttataataccttaatcaacgaataaagaatacagcccaactccctcgttcccaagctctgagataacacgcgtgaatttcaggatactcaacttagtgacctcaacgaactactaaccgccggtacatggatatgctacaaacaatgaacaaataaggatgtggatccaagagcttccgacttcatccacctgaatcacaatgtttgctcactccagaagagcacgaccatgtacaaaacttctacctaagggggtcaattatcttaacaaggtgatactatatacttatgccttgtctctgcatattttataccccccaccccacataacagagtgcttcttgatcccttgcatattcgcttatcgacagtgaatcaaccatgtcctctctgctaaaaataacaaagctccgtgaccatgaggaaatatacaatttagaggcgatattattttcgacaatgcgcatgaaaaagcgacacacggcccctaacaacgcgat

SEQ ID NO: 32613 - DNA, 695 bp, Zea mays
  Clone ID: MRT4577_129757C.1
ttttttttttttttacaaacaatttacatttccaagctaagttttacaacataagaagaatggtaattattaccaagtcctgataatacccaaagtgcataacttattaaaataattggaagggtgaagcctctccataagagatacacataaacattctaagcttcaaggcctccacatgaagtaactaaccataagataagggaataaaacttctccttagtgcaggagaagatcccaaaatccttctacccaacctttagttagatagctccatccacttgatgagcaggcattggagtagactccttcaaacaccacttcttctaggtgttcttagtgcaggagaagatcccaaaatccttctacccaacctttagttagatagctccatccacttgatgagcaggcattggagtagactccttcaaacaccacttcttctaggtgttctcggggagtgccggtcacggtgaggcaagaactctgacgtggagaaaaggactaggtgccggcaacacgaaaacaaaggcgagcgtcgatagccagcttggagactcggcacggctgagaaggggctcggcgagctcgatgaatggacgaggagtgaggggacgccgacgaggtggctccacggtggggcgaagcacagatgctaggagccggtgttgagcgttgctgctccggcgagctgc

SEQ ID NO: 32614 - DNA, 811 bp, Zea mays
  Clone ID: MRT4577_129758C.1
ggccgcttttttttttttttttggagatagagcggaagacttttacaaagtacactttacattccagaactcaagttttacaaggtagaaagagatgtatttattacaagtcatgatagtacccaaagtgcataacttattacaataattggaagggtgaagcctttccataagagatacacataaacattctaagcttcaaggcctccacatgaagtaactaaccaaaagataagggaataaaacttctccaccgctacggcgctaccgcaaactcaatcaaagaacactcggattggccggtccacaaggcgatgggtttgaagcgtcgttcactgacggcgacatgatgtttccaaagatctcggggagtgccagtcacggtgagataggactctgacatggagaaaaggactgggtgccggcaacacgaaaacaaaggcgagcgtcgatagccggcttggagactcggcacggctgagaaggggctcggcgagctcgacgaatggacgaggagtgaggggacgccgacgaggtgactccacggtggggcgaagcacagatgctaggagccggtgttgagcgttgctgctccggcgagctgcttagtggttggacagcgttggagagatgggggaagatgccgacatggaggagacgattacagggagagtcctctcaacctcggctgaggagcacgacgagagggaggaagacaaggggctggaaacgaacgagcaaactgagcgcgtgacgggataagaatgacggaaatgactagaagccccggccggcctcgaggtacccaatg

SEQ ID NO: 32615 - DNA, 642 bp, Zea mays
  unsure (1)..(642): unsure at all n locations
  Clone ID: MRT4577_129759C.1
cgcagtaatcacatttgatacacacaaattggagatagagcggaggacttttacaaagtacactttacattccagaactcaagttttacacggtagaaagagatgtatttattacaagtcctgatagtactcgaagtgcataacttattacaataattggaagggtgaagcctttccataaaagatatataaaatcttctaagcttcaagttctccacatgaagtaactaacctaaagataagggaataaaccttctccttgttgcaggagaagatcccaaaatccttttacccaacctttagttagatagctccatccacttgataagcaggcattggagtagactccttcaaacaccacttcttctaggtgttatagatcacggtgctcgcgcgaggttgatcggggaacacgtgagttgtatggtttgcggtggagctacccacaacgccagatcacggcgacatgcccctgcttgagtcagcctagccacgacaaggtgattactcgggtgaatgtggtcaccagactaggtgttggcgcacgcagttctggacagcctaccctgggatggggagaggagtttggcttgcagcacaaaccaccaagacgccaaataacaagctggattttncccggcc

SEQ ID NO: 32616 - DNA, 192 bp, Zea mays
  Clone ID: MRT4577_12975C.1
tgatttatgtgcttgtatatgtgcttgcatacccggtatacccgcacaacccaaaaaaaacaatataagaaaaagggaaaggctctaaccgaaaaaacgaaaagtatgacatcaacctcgttagttgtaaaaaagacacaaacgacgccgattcagtagagacctaatcgttgactctgaagtaagatgtac

SEQ ID NO: 32617 - DNA, 483 bp, Zea mays
  Clone ID: MRT4577_129760C.1
tttaaaaaaaaaaaaaaaaaaaaaaaaaaaaaaaaaaaaaaaaaaaaaaaaaaaaaaaaaaaaaaaaaaaaaaaaaaaaaaaaaaaaaaaaaaaaaaaaaaaaaaaaaaaaaaaaaaaaaaaaaaaaaaagagggcgggccctttgaagggcccaagctttcctaaccggctgggtaaaccctgatgtgttcccttttgggtccccttgaattaaatcccgtgcccgcttttttaccccgtgttaatgggaaaaccccgggtccccccaacctaaacccccttaaccaaaatcccctttggaccgggcggtttattgaaaaatggccccccccggatggcctttgcaacacgccccgaacccgatacgttaacgggacccccccctaagcccccctttataccccgggtgtctttgtgttccccccaggggggcctcttccctttgcaagcccttaaggccccgctttttgggttgctttccc

SEQ ID NO: 32618 - DNA, 719 bp, Zea mays
  Clone ID: MRT4577_129761C.1
ccctcgcgttcgatgaggctcaatcaccatcacatatggataatttagtctggcttccacctggtgctgtaattcagcaaaatgcaggtttccctggtgatttgagcaagcacaataaatttttggatgggaacagtggatgtgatcactgtggttcactattccacaagggtcagggttcggtgactgatcctatctatatgaatcctcgctggactcggccagtccaacaacattttgaccacgatctcgtgcctcatgccgatcccggtcaccatgctaattcttgtccagattactgccgccctggtgatcattatgtgggaggtcaagatgttagattggaaaatggtgtttatgttaaagagcaaaatggtggtcatcctcccatgttctataatgagtcacatcctcacgatagagtctggcatgtgcataccaagcaaagtcatcagcgataccaggatccaaggctgcatcatcctgctaatggtagagtgatcgagccatacattatggatgccaacaaagtatatgaagttcattcagcatctcttgctcgttctagccatgagagtcctcactattatcacggtagcagtgaggtcataaatgacacgtatcacaaccgacaagttcgaggcagtgggttgtaatggtggctaggggattcttcaaaccctgctggctgcacatacgacccactgcctccaacttgt

SEQ ID NO: 32619 - DNA, 344 bp, Zea mays
  Clone ID: MRT4577_129762C.1
cgacccacacgtccgcgtacacatttttttttttattacacaacaattcaattctcatcccatcccacacaactcagtgaatatgtataaaacctttttcatactcacacatttctccttatttatcccaaaatataatcaaaacatttttcctttttacaacaacaacatttttttccatttaaccaacattcttttacaaatcctaccactcttattcaaccccccacacatttttctcccatcttttaaattttttatatattaatactttaataaaaaattcctaatccttattttttcataccttttaattataatatttttaaaacatctatattttt

SEQ ID NO: 32620 - DNA, 386 bp, Zea mays
  Clone ID: MRT4577_129763C.1
gatcttcaataggattacgcagaaggatgttgcttcatggaacactatgatcttgggatatgggatgcatggtcaaattgatgttgcatttgaattatttgatttaatgaaggatgatggcatcgaatatgatcatgtatcttatattgcagtattgtcagcatgtagccatggtgggcttgtagacagaggaaagaagtacttcagtcaaatgatcgctcaaaatattaagcctcagcaaatgcactatgcttgtatggtagatcttcttgggcgtgctggacaactgagtgaatctgctgaaataatcagaaacatgccttttcgtgctaattctgatgtttggggagcattgcttggctcttgccgtatacatggagacattg

SEQ ID NO: 32621 - DNA, 628 bp, Zea mays
  Clone ID: MRT4577_129764C.1
ttatccgattcgcgtctctctcgtattcgctcgatcgctgctgctgcatcgggccccttccacgaagcaccactaccacagactgaagcggctagtgcgtgagagggatcggcaggtcgaaggaaactagggagatcctgctcatgcaaaacaggcagccgcgtaaccggatcaggacgacgtctgcgagggctcggcagatagcacaggcacgactcaacggaaagatactctggtgtatccccgcacctgctccgagaggatcaaggtctactacttgagggagtgtgcgcgcgctacaagtcctctgcctcgttcatggacctggagtccggcaccatgtcagcccatgagctgtagtcccttctcagaatcttccgcccacgacgcattccctagagacggtcacggaggcgagagcaactgggtctagggtcactactgcgagagaggacgagctcacggactgcgtcctcctcgaagtgcgcaaggaagcctagaaccgcgactgactccgaggcgatccactgatggcactctgtgggtgtaggcaatgactctggcatgagcacgttgctcatcagcaagatgctggaggtaaactctatgcgcctgatgatgaccttct

SEQ ID NO: 32622 - DNA, 453 bp, Zea mays
  Clone ID: MRT4577_129765C.1
ggaaaaactgggggaggggttccaattcccaggaaaaaacatttttttagccccacaggggaaggttttttaccccgggggcgaggagaaactgcccccccaaaacacccccaaatttaacttgaagaccggggagacaattggggccctagcatcccaacaacagatgggataatagcataagggggaagacccacaaaacaaacccgggggtctttttttttcctccataaaaaaaaacccagtttaggggacctcctccattttggtttcgccagggtaatcctccagagggggcatgggggggtaagcctccggagcctccttgtccttgtggatgctcaggcccaatttgagcatgcgggggatgcggctgccaaaggggttgggatcgtcggggctaaagccaaaagggagcagggccgttttaaaagcagaatgacaagggcctta

SEQ ID NO: 32623 - DNA, 548 bp, Zea mays
  Clone ID: MRT4577_129766C.1
cccgggcttctgccaaaatgtcccactaataaggtcttgtggttctagtcgctacatcctcaaaagaagatgactttctgtcggctgcaactcatggtgctgctagagcttgagtctgtacattacatgcagataaggaagacttacgagttcataaagaggcatctaattcttagggtgctaatgattctccagttacattagacacctgttctactggttttgctaatgctaaggtaacaatcttagtcgctaccaaggagatactaagctgtcctaaaaggtctaataacggcaggtcttgggttggatacaaataactgcaacgaggcacaactctattacctaacaatcatgaaggacaccctacaagtgaaatatgaagaattgcctcatttggctaaagatatacgatcacgatatgctacaatataaagaaatagctgacaaactaacagaaactgctgatgctgcagagactgctgcttctgctgctcatacaatggatgaacagacgcatcctctgagttctgagcatgctcgactaa

SEQ ID NO: 32624 - DNA, 187 bp, Zea mays
  Clone ID: MRT4577_129767C.1
tgtttctcagcgccgacgtcatcgtgggggcgactgcagagtttgggcgcactcccagagcttcccctagttaaagcctgactaggacgctggcatcataactgactttgatgaacctggtactcttgcaccaactggtcttttcgttggaggcacaaaccacatcgtgatccaaggccaacctgga

SEQ ID NO: 32625 - DNA, 112 bp, Zea mays
  Clone ID: MRT4577_129768C.1
agtacttgacccctagtagaggtgtacatctggctgtgtcgggcttggttggcatgacataatgcgtggatcgtgtctaggtcggaagcccacagattggtatggtatgact

SEQ ID NO: 32626 - DNA, 531 bp, Zea mays
  Clone ID: MRT4577_129769C.1
agatcgaatgtcacatctttactatataacaggagttctatacaaaaataattaaataattacattataaggaaacaacggtgcagcaacccaaaagttgactgggagacgacggcctagatctctcacgaactcatcgcagcatcctccatgcgcctcatcctgtggtacctgctcttgacctgggacttgagattccaggtaccaacttgctcttcggatgacacgtatcctcacgcactcgagaagacgacgatgcggccggtcgacgctgcagtgccgcccgaggattcccggtgaggattcggccaatcaccggcaagcaattcgtctcccccgccaacttccttgctctgctgaccacatgcaccatctgcacgacttggtgatctcgcccgatcccccagcgatcgagaggctgggcgatggtgaacgcgaggcgtggtcgcaatggctctattctctctctctcctactcgtcgttgtgcttcagcgtaatcatccatgtaaggtcgcgctagctcccaagcc

SEQ ID NO: 32627 - DNA, 598 bp, Zea mays
  Clone ID: MRT4577_12976C.1
gactcctatgggcgattggttccctcgaggccggccgggcccgcggaaacgataccggcgcggaggccatctacagccagaagttccccgacgagaagatcctgagcatacgcacaccgctgcccgctgcgctctccataggacaacgcacggacccaacaccaagcggctacccagtctcttcatcttggacgcatcgacgacccctatggctgggacgggctagcaccgtcatccttcggcacaggtgcatgcaagagtgcatgcgacgaccgtcgaagtgaccatgcgtaggaaggagcgacaccctcaacagcatccacctccaaggtgctcaaggagcgctgactgcggacagcatctcctagatctctctgatctggactgctcgaacgacctccctccggcatcgacatactccccctgtgcccgatcctttggatctgaataagatggacgtcgatcatgaacggcgaactgatgacatcactggaacgctcccagagctgtgtatgcgtctcaagcataacctagctccgcctgtgaagcctctgctcgtatagtggtacacctagaatcatctgaaaattttgcaaaa

SEQ ID NO: 32628 - DNA, 495 bp, Zea mays
  Clone ID: MRT4577_129770C.1
gggtacctcgaggccggccggggtcgccgttccctgctggtggctctcctctcctgatgtctgtgctgctcactgccgggagctcgccaaggaaacctgatgaggactcggggggcgccaccttgaacaccttggacagcgattctcttggggacgtcattgtcttgatgacccctgattcctctgacaatcagcgccaatttggtgaaaccattgacgtacccatctgcactggataactatgaccttcaaaaggacaaatgcttcgacgcttctggtgagctggctctcatgcctcatgctaatatgcatgttaggatgcttgacgatgatcactatgtggtatacgcggagagaatggatatatacaatatggatgtgcgagtcctcaagaacatgtgctgatgcctgaagctgatgtactagctgccacacaaataccatgctttcctgggatctcaggctatcatatagcaaataccgctacttcttgaa

SEQ ID NO: 32629 - DNA, 333 bp, Zea mays
  Clone ID: MRT4577_129771C.1
ggatatacacacacgggcacaaggaacaaataaccaaaaccgggcggggacaccaaaagccccagacccgagaaggcccggaaagaaaaccaggcaaaaaaaaacccacagaaccagacccggggcccccccccgggcgccgcggcccccaagaccggccggccccgcgggggccgggcgggaccccagggggacgcggacaccgcccggacaaaccccggggggcccagccccggccgcggaccccccccccggaggcgggccgggggacctgccggccagcaaggtgctgaccccccaaaccggggccaggggacaaaggggccacccccc

SEQ ID NO: 32630 - DNA, 339 bp, Zea mays
  unsure (1)..(339): unsure at all n locations
  Clone ID: MRT4577_129772C.1
gagctcacnatacggcggccgcctcgttgcgagagaccaccgcggtggctgtggcgcggtccggaggaggcgccgccgcggggagctgcgccatctgttgggcgttgtcgaccgtgacgacccccgcccacctcgggcgccacgcccacccgatgagaaggccgacgagcgcggcgagcgagagcggtgccgtcagcgcggtgagctccagggcggcgccgccgagggtctgctggcgaaagatccccattagtaggtcgaggagagccgacattttggctggcaactggaatccgtagcaaaagatccgaacttccaccacagaattcttgagacacg

SEQ ID NO: 32631 - DNA, 682 bp, Zea mays
  Clone ID: MRT4577_129773C.1
tctccctccccctttctctctcttctctctctaccaccccaggccccccgatctcctcctcccactccgatcgcccgaccgatcgccgagcttccctgttccctccccgcccccgcgacgccgcgacgccatggagccgccgcacgccgagcaggtcgtcgcctctgtagaagcaggaggagagggtggcactgcaagcccgggcaccggcctcgaagggccggtgcttagcgcgggggctggacggcggtgggtaaggggaggacggggagctgggggcggggcaggaggcggacgcacgactaccggagcggcctggcgaggccgactgtggctactacctccgcacggctaccggaccggcctggcgaggcggctgcggctatcgctggtggcgtcgtggggtacggtgacagcgaggtgttcagccaaaatgtcttcggagatacaatctgcggttcgtgacgtcgtcagtgcaagacaaggccgaagctagccctgaccagaagcaggagcgtagcaccaagaaagatgaatctggcgatcaagaatccgaagctgtcggcaatgcggtgccatgaaagggtgtttgcaaatatgtacaaaacataataacatgtgtaggttttgtgaatgattttgttgtggtgcttattgatggtttatgtgatgtggatctatc

SEQ ID NO: 32632 - DNA, 473 bp, Zea mays
  Clone ID: MRT4577_129774C.1
gacactctgttgcaacatattgttgtatgcacgtatgtaggagcatcgaccacagagagcggtctatatgaaagcacctgctgctgttgtaagtaagcggcaggggtcaccatggttagatgactaagcgctgaaagaaactgctgtatgagaagttgatgatgggttgcaactacaccagctagatcaagcggactggatgcaagcatatcatgaagcaagtatgcgacagggttcaccatgactaggcggatcagtgctggtaagaactgaagttgctgatgcgatgcgatggtgtgtatcagttagatgtaccaaggattgttggtgaacatgggcaaggggatgttgtaagacgctcgtcacactggctggctgtagactataggtttgcacagctgaatgttccatggccatagaagtaactggagggaggaaccgtggaattacaaaactaggaccgagaaaaccct

SEQ ID NO: 32633 - DNA, 238 bp, Zea mays
  Clone ID: MRT4577_129775C.1
gtcgctgcgaaaaaccacagacacgcggaaggacatgctcccgtccgaccgagctctcgactctctctctctccctctctcccaagacgtgttgagctgtttcccagtccttcgtcaccttacctccgcccagactcaccagcgcagtcccctcctcttctcttcttcataagcccactcaaacagaagtggagcggagttctgcagagtaccactagcactagtaagtaaccttggg

SEQ ID NO: 32634 - DNA, 443 bp, Zea mays
  Clone ID: MRT4577_129776C.1
tggtgtttgcctccgctttctttcgcgccgcagcgcaccacaggctgtgagaattcatcgcggccaatgaatactctccttggacgccacaggcgttgcaggttatactgaaatgcgttcctgtgcccttggtgggcttgggtacggtcgtggtggaggatggcatttacggatgttctgtgcgagaagcaggaagaaacaagattaagattgatgtgatatgaatgtctggttgatgctgcaggttggagtatgcgacgggtgggtggaaataacttttacctgatgccaggcaacaggtaaatgcttccgaggcaacaggcggatgctgaagcgtcttttttttttcaatgatgcactttcacccgatcagaagcgtgtcatttctatgggcttggatcgtcttgatgagaaccattgggtttaataaagtctctttgtcg

SEQ ID NO: 32635 - DNA, 965 bp, Zea mays
  Clone ID: MRT4577_129777C.1
cattgggtacctcgaggccggccggaagcctccactccgacctacggcctgctgctgtctgttgggccgaacgggaggcacgaggcggagagcggagaggcgttccgttccatccaagctgatggcaacgagttctccagggcggcggcgcacgggcacctcctgcctaccagaaggcctccgcaccgagctcttctcatcgccaccatcaccagaaggcttccgcccctctctccagtgtctctttctctctccatcgcatggctctcgcgtgcgccactcacgcgcgccgcttcctcctcgctggcccggcgagatctttccacgcccagccctaccaggccaaggtcggcgtggtggagttcttgaacggcgtcgggaagggggtggaagcgcacgccgcgaagctggaggaggctgtgggcggcgacatgcagaggctcctcgaggcccgcacgctgcggctcaagaagcttggcatcccctgcaagcataggaagttgattttgagttttgctcacaagtaccgtcttggtctctggaagcctcaagcagaacccaggaaagttgaataaaattggtttgttcttgaaagctagtctactgttggactgaggcttgtttgggacattttgaatatttccttttgtaatttaggagccacaaatctttgttctctgtctctggccatacttatttgcatccattgtgcaattttttctagaaaatttccaacttcgcgtggaataacaaaccgcaacaggtgcagccccctgtgataatctatcacttattaactgtattgttcctttggattcttaccaacaacattgcagttgtattaatgtaatctaagcaaattgattaggttcagattctcagaaagatacattactgtgcattagagttccagtcaatttatatgtagacaagtcaaacatgttgtaatgctatggggtgtttct

SEQ ID NO: 32636 - DNA, 941 bp, Zea mays
  Clone ID: MRT4577_129778C.1
attgggtacctcgaggccggccgggatgattaaacagaaatggtgtaccatcatgtagcgttagtatagtgttttaagagactagaccatttagactaacaataggaaaaacaggcttttaatgtcaatgtttcttcctatctatgtttaaccaaatcttgttttacttggaccctaggttaaagcaaaatccatttaacatgttgctatgtgctaatttctgtttgcaacatttactggtggattaagacatgttggatctttattgcaaacattggttcttgatttaaatattgtttaccgtttagttatgtaaatattgttttataaagcatcaatgttaagattgagaacgagcatctttactaatctaaattattaattattcccctacaatgcagaggaagttgattttgagttttgctcacaagtaccgtcttggtctctggaagcctcaagcagaacccaggaaagttgaataaaattggtttgttcttgaaagctagtctactgttggactgaggcttgtttgggacattttgaatatttccttttgtaatttaggagccacaaatctttgttctctgtctctggccatacttatttgcatccattgtgcaattttttctagaaaatttccaacttcgcgtggaataacaaaccgcaacaggtgcagccccctgtgataatctatcacttattgtctgtattgttcctttggattcttaccaacaacattgcagttgtattaatgtaatctaagcaaattgattaggttcagatccaacaaccgggaaaaacaggattttatctcagaaagatacattactgtgcattagagttccagtcaatttatatgtagacaagtcaaacatgttgtaatgctatggttgtttctgtggttctacactgccctttcaagatgtaattgcattaccttt

SEQ ID NO: 32637 - DNA, 243 bp, Zea mays
  Clone ID: MRT4577_129779C.1
gggcgggggctaaaacccccccagaaccatgcattttcaattcacaacttacaatattcccaaattgcaatttcttacaatgtccaaccccgattatggacctgattacctttttttttaccgcccacctttttttaacccaaaaaacaaccacccgcttacaaaggttaaaaaaaaaccacctgccaaatccccacagggaagcccaaattaatgaccaattttcttaatcccggccttgcc

SEQ ID NO: 32638 - DNA, 602 bp, Zea mays
  Clone ID: MRT4577_12977C.1
ggacaagagttctcctgatatggcaaacaaaaggattcagaaggaactcatggatctgcaaaaggacccaccgacatcatgcagtgcagggccagctggagaggatctattccactgaccatatcaaaggtcctcctctccatcagctcgcttctgactgaccccaacccagacgaccccctcgtccccgagatcgcccacatgtacaagaaccagaggccgcgctacgaggaaaccgcacgggcctggacccagaagtacgcgatgggctagctgattctgtctcgccgaacaatactgtcactggcaagaagatcatcatcacgatgttgtaagaattaagttgaaccggtttccccgtcgtgtgatggtattaagaccaaagttcttgtgcgtgtacagtacttttgaagctggatagtctgaatcctgtgccagaaccaaaggtcttcgctttgttccctgaagagcgtttgtgaccatagaatctgcatgcgtaaccttgccagccaagaaaacagtagctgcttgtatgatgtcgagatgatatagttcagatgggtggaaccgtgcagatgaaacagtccagtggtcttgcgttc

SEQ ID NO: 32639 - DNA, 262 bp, Zea mays
  Clone ID: MRT4577_129780C.1
ggagaagtaagtgaagaaaaaaaaaagaaacaaatatgaatccactgcagaaccttggtgaggagctgggatatggaggacactttggtcaacaaacgcagccagctgtgtgttatctcgacatggagttaaatggtcatcagaccgttcacttgcacgattcttatatgaaccaccccaatataccacaacacttggtggtctctcaactccagcaacaacaacagaacctcagaccattcccatccacttcagcgtcatc

SEQ ID NO: 32640 - DNA, 332 bp, Zea mays
  Clone ID: MRT4577_129781C.1
gcgagagcgcacatggcagctgacggggcgggggcacccattttcttttctttatatagcactcgtacagttgaacggcgcctaagtacatgaacacgaggaaaagcaaaggctgctatattgattacatgaaagcgcaaaagctaactaaactgacgcagagattgctgacacacaaaaactggacctatcctgaacaactgaaacatgtaccatacgtggagatatcgccagaaaaagggggacgcactaataatcagagctgcagcctatgctatatactcgaaatggtgtcgcaagaactgcgtgtaaagcggaaataaaacacgcct

SEQ ID NO: 32641 - DNA, 1908 bp, Zea mays
  Clone ID: MRT4577_129782C.1
atgggtaaagaacagtaccacaacaacttcggttgttatgggtttatcgcccgtcccaacgcaagccacccagtaccaacatttcgaaagagatggcccagggcttggatggaagaatggttttatgtgaaaaatgatttgaaagcaagggaagatattaaggaagtcattatgcgccccatttggtcccgcttcggcctccgaaggccgaagggatttaattcaaaaacatatagccttcagggtgtggccgctcgtagaaagctaggaaatgccgaaggagacctcactaactctagcgaaggtgatttggtccggttgaaatatacattcaggtttggggaaaagttcgatgaaccaaacgacgactggctgaaatgtatcgaagctacaagtgatgaactgcttggagcatattccaaggcagaagataatgcactatctgtagccttcggaggttggggaaagaagagactgaacagagttttttacgtgattggcttcgtttaccccgactatcgctacccgctgtggggacaaggaaaaaagaggaaagctgctacttcggccaccccggacgagcctgtgccgaagggaaaaaagttgaaagttctgacccaccggccgcgttatatcgaactggttgtactacctaaatttgatgaagggacctcttcagccgctaagacaaaagagaccgctcctcctgcgaagaggactgaagagccggctataatgccgaagttaccttcagtcaaggtggttgaaacgaaggttgataaggctgaaaagccagaaattgaagaaataatgaagatgccagaggttttgagctctctagaaaaggaggagaatggtaaatgtattggatgtgctagaaacaatcgaaaccttgagttccactcctacagggaaagttgtcgaagcttccaaggcacgaacgaagctgatgctaagcaagcagaagtcgaagctgcagtaattgaggctgaaaccgatgctgggccttcagtgcctgctgagacgaagctcgccgcgaccgagcaaaagaccgagggaaaatctccagatactggcatagtttttgagaaaaacaataaagaattatccatctgccgggagatggctagaagtatgggttttccgaagctcgaagctggcctttgtgctatgacgaaggataaccttgcagacagtcttgcatacaacagtctgaagggcttaatacttagcaacgccctaagggcgcaaaagaatgctgaagacgagagctgcactatggctttcaacaaccttcgatcagaggttatcaggctgagaaacgaagccacggaaaatgacaaaattctactttcattggtggataaagtagaagaagatgaagctagcttcaaaacccaatccgaagcccaaaaaattgagattgaagaccttcagaagcaattagccgaagctaaagagaaatgcacacttgcagaagctaaacggggaattagcgaatactggacaaattatttagagaaaaacgttgaagaacttcgcacatccaaggaaagatgctttgaaaaatccttggactgtgtgaagaaaataaaaaccagttttgccaacgtgggtgcctattcttccgaagaaaacttcatacgaggcgaccccgaaggcgttattgaatggataagttgggaggccaaagcctttgaagaaattctaagtgatcgcggggatgtctgcgcgttctctggtgcgcgggggatttcagccatcttggagaaggcggaatgcgaccttatcaagaccatggccctgggcgaagctgtcttctccgtagatgatacaaaggacccctctgctgaagcaagtttaataggcaggaaattttacagtgacatctgggcaaatggtggctga

SEQ ID NO: 32642 - DNA, 1873 bp, Zea mays
  Clone ID: MRT4577_129783C.1
ttcataattgttccacatggtcttgtaatctgtcgatgcttgtcagaacttggggcaaaatgacaaggcccaaagagtgaatagccaaggatttgcatggcatgaaatggaggttccgtcatatctatagaggtcaacctcgaaggcatcttctgacaactggatggagttcatttatcaataagaagaaactagtctcaggggatgcagtcttgtttcttagaggtaatgatggtgagctaagattgggtgtgaggagagcagttcaactgaaaaatgaagctctacttgaagctgtcaactgtactgattcgaagctacttatgctgtctgctgtcgccaattctttggacaacagaagtatatttcacatctgtttcaacccaagggttggtgcatcagaatttattgtgccgtattgcaagttcttgaagagcttgaactatcccttttcagttggaaccagatttaaagttggctgcgagaatgaagatgctaaggaggcccacgcgtccgtgatcataggtattagtgaagttgatcccatacactggcctggatcaaaatggaaatctctcctgataaagtgggatggtgctactaagtacagccaccagaatagagtatctccatgggacatcgagggagttggcagctcagttttagttactcaccgtctttcctcttctgtttcgaagcgaacaaaactgtgcttccctccaagcgatttggacacaccaattctagatggaaatggtcgtccagactccgtggaaactgaacgtttccacagggtcttgcaaggtcaagaattggtgcaccctagtattcatggtgctgcatgctctcattcatcagatagccccagatgtcaaggctcttatggcaggagattctctgctgatgtgtggaactgcaagatgaatgatgtaatgagtgggcctcgacacctaaatgccactgggtttgcttaccagcccctaggcttcagtgaatctgtcaaattctcagaggtcttgcaaggtcaagaaatgtctcaggcggttccttccttcatgagatctgctttcaactctggcacgcagaatggcagggttcgaccatttgattatgtgcagagatcagatgcaactcaaggatacgctctccagcagtttaatctgccagcaacagaagtgcattcgccctcttctgttcttatgtttaaccaaaccatggtaccacatgctgagctagatggtgcgaccaaccgtgaagaagtacatggcagcaggtacttgtcatccaatgcaatagggagagaagctgaaccatggccatccatgcagcagcaaagagcgagtgtaaatggaagcgagcctctcgacacaactgaagcctcagctcctgcaaggaacgctgaatctggatcggtcggcaggggcgcggggcgaagcaactgtaagctttttggtttctccctgactgagaagatccttggaacggatggtggtggtgtgaaagaagggaactacgaagtggaccgtcaaactccccgggtgctagacttgtttgggcacggttctacgcctggagctctgcatgctctctgtgctgctcccttgggaatatgatgctgttctgcctagttttacaacagttagatttatgtaatccttcagccattttcatcgcgttgtacttgaccaatatgtccagcgtatgatttccagttttaattgtatgctgatgctacatatcctctcttgagatccatgcatgagaattctggcagaatgaacagaggtaaattgatgtccagctgttttctttatgaacaaataggtaaattgatgtttaatttcagaataaaaaccatggcgaatttgatagt

SEQ ID NO: 32643 - DNA, 127 bp, Zea mays
  unsure (1)..(127): unsure at all n locations
  Clone ID: MRT4577_129784C.1
tactatacaacaacggacggtngcggcacagggggatttctcatcggtgccagcccctaccacgcaacgcctatgctcagtcatggctgcctacggtggttgttgactgattcttagccagttgttg

SEQ ID NO: 32644 - DNA, 133 bp, Zea mays
  unsure (1)..(133): unsure at all n locations
  Clone ID: MRT4577_129785C.1
ccgggtccaaacagtacttgcttgcataagcagcatagggctgcgnctactcaaaatgtgctccgtatctcaaagtcaaagtgacgacttttggaagattatatatacctagcaccctggagcattggccact

SEQ ID NO: 32645 - DNA, 444 bp, Zea mays
  Clone ID: MRT4577_129786C.1
gacataatgatggacaactcttatgtgtgttcagaaaagaaaaaaacaaaactaacagggtgggcaaatctttttataacagctagaagatgatattccgtgcactaggatggatggataaaaaaaagaattgcagcctaattcctcataccacacccaaatcgggcatgcgaagaaatgccaacaaatactatattaagcaagaatgaaaccctaaaaagagtcgagcatgatggagggatgtagccttgagggctgctcagctcatgatgttttcttaatttcttcactcacacaaattggggatctgtataggttactcaagaacgacggccgtctcgacaccatagccgacttgtggatagccatggaggccgcgactgacgggaactgatttgattgcatggagcaacagaaaccgttgcctcgccgagtgagcattag

SEQ ID NO: 32646 - DNA, 298 bp, Zea mays
  unsure (1)..(298): unsure at all n locations
  Clone ID: MRT4577_129787C.1
cgggnacttccccgattcggcacttcggctcgtcctcctcgcggcgaaaccctagcccgcccccatggacgatccctcctccgcctccaacaagcacaagcgcaagcgggggcgcaagcccaaggcatcgccaccctccctcgaccgctcctccccctctccctcggtcgcccccactccgactgggcaccatggccgcaagccgcgacgtcatgaggcccttgccgacatggacgccacgcgtactccgtgcccgccctgccgtggggagccgaaggcggggggaaacagaggcgat

SEQ ID NO: 32647 - DNA, 174 bp, Zea mays
  Clone ID: MRT4577_129788C.1
gcttgcggcagctccggagtccaggcagcacgctagtcggggggcgcggcggaggagttatggatcggtcgtttctccccgtggcggcagcggccgtcgccctgatcctcgtgtgctgctccggcctatgcctcggcaagcggttcgttgcgagggaacgctaggacctcagct

SEQ ID NO: 32648 - DNA, 266 bp, Zea mays
  unsure (1)..(266): unsure at all n locations
  Clone ID: MRT4577_129789C.1
gaggaactcaagatgctgaccatctcattgaggagacagggcatatttgaatctggaccgtaagtgctacaggacaatgatggggaaaaaagacatctctgtggaatggttggcatggtatcatagnaaaaagactagagaagatagaatttgggccaagccttgaaaagagtatgggtcgaattcagctggtgaaggatggcgaatttccagacctgtaggatgatctaattactccctactcacagagttggagtaattaagtc

SEQ ID NO: 32649 - DNA, 706 bp, Zea mays
  Clone ID: MRT4577_12978C.1
acgtctataatcccattcccctccttcaagccctgcggcgatttcgattcttcccctctatctccaggtatacccatcggagcagcactgacgaaaattctccagatatggcaagcaaaaggattcagaaggaactcatggatctgcaaaaggacccaccgacatcatgcagtgcagggcctgctggagaggatctattccactggcaggccacaatcatgggtcctagtgacagcccctatgcaggcggggttttctttattaatatccattttcctcctgactacccctttaagcctccaaaagtgaacttccaaacaaaagagcaatggagccctgcactgaccatatcaaaggtcctcctctccatcagctcgctcctcaccgaccccaacccggacgacccccttgtccctgagatcgcccacatgtacaaaaaccagaggcagcgctacgaggaaactgcacgggcctggacccagaagtacgcaatgggctgattctgtcccactggacagtacttcccctgcaaagatcgtcacggtgttgtaagaatcaagttgcaccgttttcctgtcgtgtgatggtattaagagcccagatggctgtgtgaattgtactcgcttctcagaacaatgtctctctgtgtgtacagtgcttttgaagctggatgatctgagttctgtggtaaaaccttggtttgcac

SEQ ID NO: 32650 - DNA, 544 bp, Zea mays
  Clone ID: MRT4577_129790C.1
ttgtgttttttttttttttttttttttttttttggtgtttttttttttttttttttttttttttggggggggcccttaacatcatttgggttcaaaattgacccccccccccttgttattaaaaaaaaccccgaccgggggaatttcaggggggggcactttaccccctttacccccaccaccccggggaccccctttttttttacaaccccccgcggggcccggaaagtgtggggcaacgtttttcaccccggggggaacctggccacccaggggatgggggccaacctttttgaccgggcggaggccaacttccccaccggtttccaatgggttttcaggggccaggcccggggcaacccccccttgatttggccaaattggttggcactgaaaaggccacttttgctgggccttgggggtttttaaaacccacccctgctctttttttgcttgggatcactttttttattcctggggttggggattggtgggcctggtctcgtgggggccccccccgtttatttggcccttttttttgggg

SEQ ID NO: 32651 - DNA, 269 bp, Zea mays
  unsure (1)..(269): unsure at all n locations
  Clone ID: MRT4577_129791C.1
tcttcctttttccccgacctaattttttctggagatggggcaataaaaaagacggtccggtccntnaaagcacnccagatctttgacagccgcggcaaccctacagtcaaggtcaactttttttcttaaaatgaacctttttaaattccactttttccaattgaacattaacttgtgtatattaaactcttgaatttaaggattgtggctcttactattttgggaaaggtgtctccaaaagctcttaacaaattttaattttttttatt

SEQ ID NO: 32652 - DNA, 399 bp, Zea mays
  Clone ID: MRT4577_129792C.1
gactaacacatttgttcgcgacgatgggatccctcactaataggatgatgtgcatgggtgacgtcctggcagcgctcgtcgccggcgggtcatgcgggcccccgaaggcgccgaccggtcccgacatcaccaccaactacagcgggaagtggctcaccgctggggccacctgtctcgggcagcctagcggtgccggcgctcctgacaactgccgtgcgtgcggtatcaagaacgtgaactctgccaccctacagcggcatgactgcgtgcggcaacgaccccatcgttaaggacggcaagggctgccgctcatgctacgaggggagatgcaaggaaatacctgagtgctcgagcaatccagtcacggtgtacatcactgacatgaactgacagcctatc

SEQ ID NO: 32653 - DNA, 174 bp, Zea mays
  Clone ID: MRT4577_129793C.1
acttccgttttggtgcttgatgccacaaggggggaaaataaaggcccaagtggttaatgggtcaacttccacttgggagattttggaaatagtagaatagagtttttgttttgtcaaaaacttttattggctcttattggctctattggcaaaaggtgggtttttttggggaga

SEQ ID NO: 32654 - DNA, 719 bp, Zea mays
  Clone ID: MRT4577_129794C.1
cctcgaggccggccggaaagtctagcacagcgcgatctcaacctttctgctcactctcgctctaccgaccccgctgatccctagcctacgccttgctgcctcccggtcattccccctcgcgccagcgcgcacccggacccgagccgcatcatctctcctgccatgttccagaacatgccgagccaccacttcctatatctcctgccacggcgacttctacaactacgacatcttcttcgacgccgcacttgagatccccggcttcaatgccaacgcttacgaatatacgcacactagttagctcaccaccattcttcgatcaaacatgcccactcatgccaccgaagcatggcttactgctccgaaaggaccatttgcctgctgatactgacgttccgtgggaacaaaacccgacatgactcaccctactatgagacaagtacccatacagctatatcttgagtacaactacccgctctgcggcaaactctgaacctgaacctgatggcttacccaatcctgtgagaagatcgaccccgaatataaccttcctgacggacatctggatctggatcaccccacagacacccaagccgaaggtgacacaacgataatgatcgagcacctggacaaagtcctgcaatgtacctcctacacgatatgttccccatcatactcatcaccttcaaataatcaactgcattttatacatttgtgac

SEQ ID NO: 32655 - DNA, 1764 bp, Zea mays
  Clone ID: MRT4577_129795C.1
gtggggggtgattctctctttcttctcttcctcagccgccaggaaggtggattcttttcgagctcttgcccagctgattataggtagcggccggctattcttcttgtccggctatccgttccaggacttcggattaagaggcgacgagatgatgcgacgctgcgtctcggcgttggcccgccgccgccgtccagatcgcacggttgatactatgaaggcacgattccaatgtttggttaacatttcctcttcaataagggacactgacagccaaaggtgctcaagtacgtgtgctaattcctgtgctaccgatccagatgttttatcgagagaaacatcgtcatcagaaatgcttgttgattcatttgggaggttccacaattacttgaggatctccttgaccgagcgctgtaatctgaggtgccagtactgtatgcctgctgaaggagttgaactaacaccaaagtcagagcttctgtcacatgatgagataattcgaatcgctgacctttttgttacttctggtgtgaataagatccgattaattggtggagaacctaccgtacgaaaagatattgaagatatttgtttgcatctttctagtttgaagggactgaaaactcttgcaatgaccacaaatggaattgttctttcaaagaaactcccaaagttgaaagaatgtggactcaatgctttaaatataagtttagatacactagtacctgcaaagtttgagttcatgacaaggcgtaaagggcactcaaaggtcttggaatcaatagatgctgctgtagaacttgggtatagccctgttaaggtcaactgtgtcatcatgcgtggtataaatgatgatgagatctgcaattttgttgaattgacgagacacaagcccatcaacgttagatttattgagtttatgccatttgatggtaatgtttggaatgtgaagaagctagttccttatgcagagatgttggacaaagtgcggcaaagttataaaggagtagagagacttcaagatcaccccacagacactgcaaagaatttcaggattgatggacatgttggcactatttcatttattacatcaatgacagagcatttttgtgctggctgcaatagattacggttattggctgatggaaacctcaaggtgtgcttatttggcccctcagaggtaagtttgagagaacccatccgtactggtgttgatgacgctggactgaaggagataattggtgccgcggttaaaaggaagaaagctaaacatgccgggatgtttgatattgccaagacagcaaatagacccatgatacatataggtggctgaggtgtgcagaatttcctcatgtcgaatatgagccaataaaatggatttgccaactgctgggttgctgcctggttttacctgaacgaccatgaaaaagttctctgatgcaatggaccaaactctttccgagtggtttaaacattagaggaggaagtggagtgtattggtcactgcagtcatacaatttagatccgtatacttgaacaaatgaacagtgtcacagaaactcactcagtcttcgcgtgccaaggtgttttgggttgtgtacttgtatgttgtatgctcataatgtcacgttgtgtaagctctcttttgagatctcaccgtttgtgaattaaactgctaccttgagatcaatcgcacatcctcgtttccgttttagaaatgagcatttcagaattcaaaaagaaaaaaaaaaaaaaaaaagcggccgc

SEQ ID NO: 32656 - DNA, 337 bp, Zea mays
  unsure (1)..(337): unsure at all n locations
  Clone ID: MRT4577_129796C.1
cggncgcgtgggtgcgtactggcttgttatgtcacctgatgggtctggagggacggacatttttttcctgtgcagcgatagaccggattgttgcgtgtaatggtgccttctctagaggcggttgtgtagtgattgactctcgggtcctgggcaagatggaaggcgttgagtcctacaaacgtaaaacatggtgggacattttgtaagatccaaggttactgacacacctgtaccacgtcatgaaaactgttatagaagactgctaaataaaatttactggtcggaggtttacaacgtgacaagtgaataaaccatagctgtacgcaacttaatctga

SEQ ID NO: 32657 - DNA, 914 bp, Zea mays
  Clone ID: MRT4577_129797C.1
tgcaccagagcgccaagaagggaaggttggcttctccttcctaccctttccgcgctgcaaccgccaaattctccgactgcctcgcactctcgcagacagcacgtggggggtgattctctctttcttctcttcctcagccgccaggaaggtggattcttttcgagctcttgcccagctgattataggtaggtacgtggctggatagagcctactgctggatagagcgtctcagggacgggttgactctttctggccgcatcagcggccggctattcttcttgtccggctatccgttccaggacttcggattaagaggcgacgagatgatgcggcgctgcgtctcggcgttggcccgccgccgccgtccagatcgcacggttgatactatgaaggcacgattccaatgtttggttaacatttcctcttcaataagggacactgacagccaaaggtgctcaagtacgtgtgctaattcctgtgctaccgatccagatgttttatcgagagaaacatcgtcatcagaaatgcttgttgattcatttgggaggttccacaattacttgaggatctccttgaccgagcgctgtaacctgaggtgccagtactgtatgcctgctgaaggagttgaactaacaccaaagtcagagcttctgtcacatgatgagataattcgaatcgctgacctttttgttacttctggtgtgaataagatccgactaactggtggagaacctactgtacgaaaagatattgaagatatttgtttgcatctttctagtttgaagggactgaaaactcttgcaatgaccacaaatggaattgttctttcaaagaactcccaaagtgaagatgtggactcaatgctttaatataagtttagatacactagtacctgccaaagtttgagttcatga

SEQ ID NO: 32658 - DNA, 290 bp, Zea mays
  Clone ID: MRT4577_129798C.1
gtcacttaaaacgacttaccatttgcaaccgaagataagggactaatggtagcattggttctgtgcaaacattcatgactctcaacagggagtttggtaagtacctttgaagccacaccagtgacagctaggatccctttctgaacacgctctatactggaacgcaccaagaaggaatcaaatatatctcaaatcggggcggaagaatggaagataggaaatcgggtttaagaaaaagaggccctcttgaaaggtagaatgaaggcaagagtaagaatgtactacgactc

SEQ ID NO: 32659 - DNA, 1760 bp, Zea mays
  Clone ID: MRT4577_129799C.1
cccgggctctctttcttctcttcctcaccgccagaaagtggattcttttcgagctcttgcccagctgattataggtaggtacgtggctggatagacccccgggttcaccaagatatatcttttggaaaaaaaaaaaataataattactgctggatagagcgtctcagggacgggttgactctttctggccgcatcagcggccggctattcttcttgtccggctatccgttccaggacttcggattaagaggcgacgagatgatgcgacgctgcgtctcggcgttggcccgccgccgccgtccagatcgcacggttgatactatgaaggcacgattccaatgtttggttaacatttcctcttcaataagggacactgacagccaaaggtgctcaagtacgtgtgctacttcctgtgctaccgatccagatgttttatcgagagaaacatcgtcatcagaaatgcttgttgattcatttgggaggttccacaattacttgaggatctccttgaccgagcgctgtaatctgaggtgccagtactgtatgcctgctgaaggagttgaactaacaccaaagtcagagcttctgtcacatgatgagataattcgaatcgctgacctttttgttacttctggtgtgaataagatccgattaattggtggagaacctaccgtacgaaaagatattgaagatatttgtttgcatctttctagtttgaagggactgaaaactcttgcaatgaccacaaatggaattgttctttcaaagaaactcccaaagttgaaagaatgtggactcaatgctttaaatataagtttagatacactagtacctgcaaagtttgagttcatgacaaggcgtaaagggcactcaaaggtcttggaatcaatagatgctgctgtagaacttgggtatagccctgttaaggtcaactgtgtcatcatgcgtggtataaatgatgatgagatctgcaattttgttgaattgacgagacacaagcccatcaacgttagatttattgagtttatgccatttgatggtaatgtttggaatgtgaagaagctagttccttatgcagagatgttggacaaagtgcggcaaagttataaaggagtagagagacttcaagatcaccccacagacactgcaaagaatttcaggattgatggacatgttggcactatttcatttattacatcaatgacagagcatttttgtgctggctgcaatagattacggttattggctgatggaaacctcaaggtgtgcttatttggcccctcagaggtaagtttgagagagcccatccgtactggtgttgatgacgctggactgaaggagataattggtgccgcggttaaaaggaagaaagctaaacatgccgggatgtttgatattgccaagacagcaaatagacccatgatacatataggtggctgaggtgtgcagaatttcctcatgtcgaatatgagccaataaaatggatttgccaactgctgggttgctgcctggttttacctgaacgaccatgaaaaagttctctgatgcaatggaccaaactctttccgagtggtttaaacattagaggaggaagtggagtgtattggtcactgcagtcatacaatttagatccgtatacttgaacaaatgaacagtgtcacagaaactcactcagtcttcgcgtgccaaggtgttttggttgtgtacttgtatgttgtatgctcataatgtcacgttgtgtaagctctcttttgagatcg

SEQ ID NO: 32660 - DNA, 1021 bp, Zea mays
  Clone ID: MRT4577_12979C.1
ccggccgggaagagaagcaacgactgcatctctggtctcccacgtctataatcccattcccctccttcaaagccctgcggcgatttcgattcttcccctctatctccaggtatacccatcggagcagcactgacaaaaattctccaggaactccaagaattcatctggcccgagggtggcgcacagccgagttgtagcctgagagcggatgaggaatagcaaggagaattttttgtgtagagccagggtttgaacccgtgacctggtgaaagggaccctgctgccttcaccagtgagatatggcaagcaaaaggattcagaaggaactcatggatctgcaaaaggacccaccgacatcatgcagtgcagggcctgctggagaggatctattccactggcaggccacaatcatgggtcctagtgacagcccctatgcaggcggggttttctttattaatatccattttcctcctgactacccctttaagcctccaaaagtgaacttccaaacaaaagtttatcacccaaacatcaactctaatgggagcatttgccttgatatcctgaaggagcaatggagccctgcactgaccatatcaaaggtcctcctctccatcagctcgctcctcaccgaccccaacccggaccgacccccttgtccctgagatcgcccacatgtacataaaccagaggcagcgctacgaggaaactgcacgggcctggacccagaagtacgcgatgggctagctgattctgtctcgccgaacaatactgtcactgccaaagagatcatcatcacgacgttgtaagaaattaagttgaaccggtttccccgtcgtgtgatggtattaagagcccagatggctgtgtgaattgtactcgcttctcagaacaatgtctctctgtgtgtacagtgcttttgaagctggatgatctgagttctgtggtaaaaccttggtttgcacttcactttgttccctgaaatgggtttgcgaccaaaaaaaaaaaaaaaaaagcggcc

SEQ ID NO: 32661 - DNA, 1391 bp, Zea mays
  Clone ID: MRT4577_1297C.1
gggtacctcgaggccggccgggccggggttacaagctacggtgggtacggtccctccaccagctccctcccctcgcgttgtcatcttcttccttccgctgcctcccatagctcggtgggctcgacgcctgtggccaggaggaaaccaggattgaggacagagagcgatcagccgaagaagtcggtgttttaacatggtttgtgaggatggtcaccaagtatgtccacatggtttgttttgctgaaattgaagagctcggtagcttcattgacgtattgtgattactgaactattgtcactgcttgatgcagcatgccatagcgtgtgccgagggcgataaataatatggtgcaaaatccagcattaatgtttgggagcccaagattcagcaggctaacaaatttggcttgtcctagctctggatctttgggggttcatttaaggtggatgtcaacagtatagaggctggttaatagaaatagaataatgcgtaccaggccacagggtgctagatgttgtgctctggttttattcagataaacaccaagatggctatcgcgactagcattctcaacatctcaaactacgcaggctcccaatgtgatatcagcatcttgatttataaggttaacatttagcaattaaagcgctccttccgccttaacacattatattagtttgtatatacaatgtacatatacaatctacaatatatatgatggggtacaaatatgaactatagtttgcccccaaattttctctctttattttttcagtgcattaacattgatagtattggttttttcctaggatattatatctaaatagaagttcataactattcgtaactttaattaaatgggtgttcgcctatatttttaagaaaaggagaatcgatagttttaaaaaaaaaaaaaaaaaaaaaaaaaaaaaaaaaaaaaaaaaaaaaaaaaaaaaaaaaaaaaaaaaaaaaagagaagaggggaaaaaaatttatttaaaaaaaaaaaaaaaaaaaaaaaaaaaaaaaaaaaaaaaaaaaaaaaaaaaaaaaaaacccctccccccaacaccccaaaagggaagaattttagaaaatttccaaaaaagggggggccgctgggaggtttttaaaagggccccaaccccccctaagggggggggaaaaaaaaaaaaggggggggcgtttaaaaaaggggggggggaaaaaaaccgggcgggccccaaaaaaaacgcgggggagaaaaaccccttttgcgcgcggggggatataagaaaaagggcgcccccaactttcttcttccaagaggtggcgcccccaagagggaaaagaggcccccctcttagagggcgcacaaaacggggggggggggggggccccccccaagggg

SEQ ID NO: 32662 - DNA, 175 bp, Zea mays
  Clone ID: MRT4577_129800C.1
ttccgtcttattcatcgcgctcgccttcggcgattgggcaggctgacggcccgaaacccacaccttgtctgctcagatctcccggtgcatgtgtccctccgtgcgctttgtcatggcgaaccagggaggagcactactgggaggtgccgggatccatgacgatggctgcgaaaag

SEQ ID NO: 32663 - DNA, 259 bp, Zea mays
  Clone ID: MRT4577_129801C.1
ctggccgggactcctatccatccatccatccatccatctcttccccacgcacacaacaaaagatctagaaaaaaaagcacacagcgagcgcgagcgagaggcgcgctgttgcggaaatgccgctcccggcgttcctggcggcggcggcgaggctcgccgtcctgctggccgccgccgtgactgcggccaacgcgggctccttcgcgcgctaccggcgcgcggggctgcgccagatcctcaaccccattgacgacaccga

SEQ ID NO: 32664 - DNA, 585 bp, Zea mays
  Clone ID: MRT4577_129802C.1
gacatgtaataattattcgattccaaaccaaaaagaggtggttgcaatgaacacaacaacatggggactacatgaaatgtattccatgtaaaaaaatggaatgaggttcaatatgcggacctattgcaccaccatatacattagggcccatgatggagatcgagcgccccatgacaggcccttatgacatgcggagcatgctccagcttcttctccgacactaagagcggaggaaccagcctcaccacattgcccttaccggcagtcagggcgaagactccggtgtccatgcacgcgtcgaccagaggaccatctgtcacgtccaggtagacgccgacgagaaggcctaccccgaggacctccctcacttgcgggttcccaatcatcttggcgcgaagcagatgcttgaagctctcccctttccttgacacctagttcaaaaaaccgggtctcgtgatcttgacgaacaccgttattgcggactggcaggcgataggcccgactgcaaacgtggagccgtggacgccggacatgatggctgcggcgatcttctccttaaccaggacaacgcccatgggaatgccg

SEQ ID NO: 32665 - DNA, 409 bp, Zea mays
  unsure (1)..(409): unsure at all n locations
  Clone ID: MRT4577_129803C.1
ccccccaggaaaatttatgaaaatccccttaaaaagggtttccaaactaccccttaaggggaaaaaataatttttaaaagttttttttttggtttgcctgacacccgtgcttttttttttttttccccatcctttggggcccccatgttttttaaaatcaggttgtccttttttttttccccgttttggagtaataataacctaaggaaaatgcaggtcaaatcccctaaaaattcttntgcccaacccgacggacgggttaaggcccaatttgggttaattttttttccaaaagggtttacccttttcgggcccccaaaacttgaaacctttttggaataagggccccccancctttttttaacccaattttaaaaaaaaccttgccggcattttaagaaaggtaaag

SEQ ID NO: 32666 - DNA, 302 bp, Zea mays
  Clone ID: MRT4577_129804C.1
gaataggaacaagtttgacacaaagaaacaaaagggcggggagacataatccatgcccaaattatctaatttaactactaaataggtttgggcccccctttttatgcaagaaccgtgaggctactttaaacgaccatcctttcatagtttgctgggcacgccccttctcagaaatacccccggcttttttgcctgacccacctggatcctttttcccaaggccgccctaagatgaagctccttttgcccttcctgggggttgcctttattaacaggacccttccgaagactttccctaatat

SEQ ID NO: 32667 - DNA, 410 bp, Zea mays
  Clone ID: MRT4577_129805C.1
attcggctcgagggcgtgtccaacactccagttttagtctcccgacagcaccgtgccgttccacgggacgcctgtagaacgactgtcgtttttatactggtgagtgcgcaaatcatgctccactagatgagggctggcaagctgggactgactgagcctgagtacgtgcccacctaccatgatcgctcggttctatacacccaacagctgataatggccggcgacagcatgtagatcgcactacactcccactagatcatggactgcatctagggcgacaacggcgacccggtcatggtgaccggccggaggaacacctggcgtcgaagagtgatcgagaacagggagaagcacaagggcagcttctagaccatccacgtgctgcttgtagccttttgctatgtctagtt

SEQ ID NO: 32668 - DNA, 564 bp, Zea mays
  unsure (1)..(564): unsure at all n locations
  Clone ID: MRT4577_129806C.1
accagttacagattaaacataatttctttacagactttttgaacatactgattgaccccacatttacaaatgttctccatagcagacttcactgcaacacagagtcacagaccatggagtcaggtccaattcaccacatgtaagcattaatgaaaccacaaccagacattattgggattcagttcacatcacacatacaccagaggttggaagtttaagaagctaaccataacctaacaaaccagcatctccaaacctcaaccatttgcctctatttgatcacaatcaaagccaagggccaccaacactctaatcagtgacttcgcctcgtcagtcttcttcctcggcaacagtggcggatccacgtggggggcaaagggggccgtggccccccctcaatttttagtatctcttatatgtaagtatagaaaaaaaatgttttagatagatcaaactagttctatcctaggtctcttagttggatcagttcaattctcctaattgncatccttcttctcattccagtcttacatctatctatctgatcccattctttcaacatca

SEQ ID NO: 32669 - DNA, 562 bp, Zea mays
  Clone ID: MRT4577_129807C.1
gtgccgtcaagagaccgctgttggtgttgcctactacaagaaccagttgatacgagatttaacatctaattagggcatcagctgacactgtctggtggagataccggtgcctgacgtactctctcactcaacagagcgacataaacggggtagcagctgatgtatcactgtacctcactctacgctccccaacggacggatgacggattgacgacatttttcttttccctaccagccaacgacgaggctgtacattgtgtgctgtgcttgttgacaagctgagacctgcggcgtatatctttgattcaatcaccctccttgctctgccatcccattgtttacgtagagcaagaggaaccggggagctttgcatcgctgatagcgaagccgttctttgtacacaggcttacattcaatgtgagaagcttcccccctccttgacagatctccaagttgtaaacctgtaatcacctgtaagatatgtgatgatgtacaacaaacaactttgacagaccaatggctagtcgagttgttgggttacttatgtacggagatctgtttt

SEQ ID NO: 32670 - DNA, 908 bp, Zea mays
  Clone ID: MRT4577_129808C.1
ccggccgggacctacctgcaggctgtggcctccctcaatgtctccaccgagctagggttttgaggcggcggcggcggcgtcccattaagctggactgctccgcgccggcggccgggctcggccgctatctgtttgttgtgttagggtttcgtctcgtgtataaggcgttcggagctcgcaaatcctttcctctctcgcgttcgaggctaggtagccgtcaccatgagccgctcggggcagcctccggatctcaagaagtaaagcgcccgcatctgtacatggacaagaagcttcagattaagatgaatgcaaaccgtgttgttatcggcacacttcgtggattcgaccagttcatgaatctggtggtggacaacattgtggaggtcaatggaaatgacaaaacagatattggaatggtggttatcaggggaaacagtgttgtaatgatcgaggcactggagccagttgcgaggtcacagtgaatcattgttctttagcactagcagcgtgaaaactgatgtaaaagatatcagtggaccctgttgtatttgactaatgcttttgcacagcaacataacttcggaggtggaatgtctatccctttttctatgggatgcttgtagctatacaatcatcgagctcttaaattacatgatctaacgcatgctcatcgagctcttaaattaaaaaaaaaaaaaaaaaaaaaaaaaaaaaaaaaatgcatcatttaaaaaaaaaaaaaaaaaaaaaaaaaaaaaaaaaaaaaaaaaaaaaaaaaaaaaaaaaaaaaaaaaaacccccgaagaatttccggtggattccattcccattacccccattttggtggcccgcgaattaaaccgggtttttccaccccaggggaagggtgggcaacaaaaagaaggggg

SEQ ID NO: 32671 - DNA, 202 bp, Zea mays
  Clone ID: MRT4577_129809C.1
cgccatcggcagccgccacgcgcgaatgccatctgtgctacttcgctcgtcttctgtcgccggcgctcagcgcgaatgtcccatacgatactccccgacatgcacagacggtcaggtacgcgggagccggcttcattcgacgtggcagttctgcctgagcggcaatacggctccgatgcgccggagcgtcacaccactggcc

SEQ ID NO: 32672 - DNA, 456 bp, Zea mays
  Clone ID: MRT4577_12980C.1
tcgatttgtctcttcaccataagcataggaaatgaaagcagactctaggtgttcaggcatgtcaacaatcttaggggcgctagcccgaacaaaagcgaaaagcgcgggtaaggaaagaaagacactgcgcgatctgaggggcacaaacctttgtgacctaagtcagatctgagggtgttgaccttggtctgtacaaaccaaactgatactctgcaaggatattaaatcaacaggttaattgaacagatgacacttgacacgagtacctgctggtacggtattattcaagtgtaccctgccgaataccctacacaaacattaacaacattattgcctgcattggcgcagctctagccatgactcgagatacataaacatttctctgctcatcttatggacagtatgctctaactatgctggcttcaagaactgcaatgtacccaagagttgctagca

SEQ ID NO: 32673 - DNA, 331 bp, Zea mays
  Clone ID: MRT4577_129810C.1
ggggccattgaacaatccaacagaaatcccttcccattcacacgattgggaattccctttcaccccaaaaaacgggttgccagaaagggtacaaacaccaaacaactggtgaccctaacaccccccaccgaccccgacagggggtaaggaacccgggaccacccccaaacggaaaggggggggggggtcgagcatgggctaacctaacgccctaacccccgaaacccaaaagggggcggccctggcgcttgaacccgtaaaccaactccatgggtgggaagggtttgccccgggccgtccccgtgtaagggacagggtttcggggggaccc

SEQ ID NO: 32674 - DNA, 325 bp, Zea mays
  unsure (1)..(325): unsure at all n locations
  Clone ID: MRT4577_129811C.1
caggaaccgaaccggaaagctcgggacgacccacgcgcccgatcaaaacacgagcggacaaccaanacaatttgttgataaagagaaaaccccggcgaacaccaccaaaggagaagaaagncaaagagggagacccaaagcagacagaacggaaacaaccacccggaaaaaaaaaggaaaccacaaaaaagtcgaaaaaaaagcgacacgggaaagaaaaaacaaaagggagcgcaaagaaggtgaaccgacaaagaaaccaaaaaacagggaaccaccaaaaaaaacaccagaaaaaaaaaaaagccaggaccaaaaaaagaac

SEQ ID NO: 32675 - DNA, 588 bp, Zea mays
  Clone ID: MRT4577_129812C.1
tgtaaccaggtagtgacgctgtggataaataatagacgttatgtgttgtattcaaaaaaaaaaaaaaaaaaaaaaaaaaaaaaaaaaaaaaaacaaaaaaactgaaaaaaaaagaaacataaaaaaaagggaaaaaaaacacactagccaaaaaaaatggtcataaaagaaaaactgaggggcgcccctccacccccactttttccccccttttacggggggttagccccccccgggcagcctggggggcctaaggtgtgagctggctaacattatttgcggtgcactcactgcccgaccttccagcccggaaaccatgctgtgccagccgcggggctgcttggggcggcccccccccaacagttaggtggggggatctaacgccctttctctcagtggataactcgcctcctcgccctcggtattatcgactcccccccccggcgggggggggctcattggctggagggcccttttcccccttctcagttaattacccaggagggatcgttcgtgcgggggccggcggggggccagccatcttcagggggccgcgtcgctgacccccatacatgggctacgcccccc

SEQ ID NO: 32676 - DNA, 538 bp, Zea mays
  Clone ID: MRT4577_129813C.1
gaggtgcgcctgcccaggtccgcgccgcctctgctcctcgttcttctctgcgagacgtgtagctccttcctgcgcgcgccggccgccagttcgtcttcaacgtccagccatggagctcctgcgcgtcgcgacttcccttcccccgagttctccctgccatggcgcaccctccctgctcggcctttgctcctctggcgccatggaatccttgcgtgcgtgaagcttcctgctcgacggcgctcctccctgcgcccagccaagccccttcatcgcgctcagccgctctcctttctcctccgcaccgcgctcctctgctccagcccgccgagcagctcgcccgagctccttccctgcttccatgggcgctgcgcacttgcccctgctcggctccctttcctgcgcgtgcccagccgtggtctccagctcaccggacgcgggcctctgtctgtgccgtgctccctgcgcgcttggtcctgccatctccatggcactcggccgcgcagcgtcttcctcagtcatggagagttcctcgctgcca

SEQ ID NO: 32677 - DNA, 1469 bp, Zea mays
  Clone ID: MRT4577_129814C.1
cctgcctcctcccgtcaggcgcaggatccaccgctccatggaccccgcaccggagccgattgctggaggcggtggcctccagcgccgccccgcggccgccgcaaggagcggagtgggcgcacaggagccgcctccgcgcgggcagcttgccatccacgctgacgtcgaaccgccgccgcggccgtggcccgggatgcagaagctggccatcgtcgccatcgtgcacgagggatgcctccagtttctcccggccacgcacttccgggaccccaacgacccccagcgcaactggatccccttcgacggctcgcggaatccaacgggttctttaaatgatgttggaagtgtagatgtcttctcttggataagctgtttggatcttcgcactctcgctgtgctgacaaattccaccctgtccagctcaagtgatccacataatatatctttccattacttaatacctgaaggaggcaacgataaattgtcctacctcaagctaaaagtcttgctacctgattcagatctcactgttactagtcagaagcaaatcaaggacaagctaaacgttgccactccagaaggaaattttctttggttattccacactgaattgtcaccctttcttatcgcaaaatctcagttgtcgaaaaagagatttgtttatatcgctgcagattccatcataaagggcaaagtcgaagatcttggtcgcatggaactaggcggttacgccattggcgctgttgaagattgcagcaagcgtctcagcgattatatcagtatggatgttcttagtgccatacaaagagcgggagctgcattcagttgggtgcctaaagaaccttataacgaggatgcatgcctacttgattttgacgtgctattgatggagcctcgcaagctggagaaaaccctgattacttccatcatgtggtgggctgatgccattcgtttagccaatcaaagggacctgattagactggccgtaactctgtccttcaatggcaagtacacgaggctcccttcaaactggaagcgcgcagatgatgacaacgctgatatcctcaacttcgatggacccaagaacgtctgttctgaagatgggcgccagcatgagcaaccaggctacggcgcaacctggcagcaataccttcatcagaaatctgaagccatactgagcacctaaataacggcacttcgccggacacaaattttccactgtcaccgagtggaagctgactgttggtattgacctgtaaaccctccatagaatgcattttgtactccagtactctattccagcacagaggaagcatgctctcgcttccgtatgtataattcaggatacaagagattttttttttggcggctgacgccggaaagttttcctggttccagttcagtttactcttttttttcaaaaaaaaaaaaaaaaaaaaaagcctaaaaggtggatcaattgccacgcc

SEQ ID NO: 32678 - DNA, 184 bp, Zea mays
  Clone ID: MRT4577_129815C.1
aaaaaaatatttctcctaatttttaaaatattttttttttttggggtttttttttaaatattttttgcttacccccaaatcggccccgggggtcgacccggaaaccccgggccggaccctgatggcgtaccaagggtccctataaagaggggcataaaaactggccgggaaaatggggaagggc

SEQ ID NO: 32679 - DNA, 332 bp, Zea mays
  Clone ID: MRT4577_129816C.1
ataattcaagtcatcgggggatgggatgattgttggagggcttgctaacatatcaaacactcagaaaagcatcaggggtatatgctacatttcttgctccttttgggtgaccaaacaatccccacaaaagcattggtgtttgttagtttctgaacactatttgatgtttatttccgttctttgttaattcaggagatggtttaattttcgggaggacttcttccttctctttttactgcctccaattatattatatccttgattgtattctgcttttatttcttattgggtcttgtagaatagatcatgttttacttgactgcatcttaccc

SEQ ID NO: 32680 - DNA, 3079 bp, Zea mays
  Clone ID: MRT4577_129817C.1
gatcaccgaaaaccaaacggaggcctcgtgtctgctttcgcccatccctgctcttgccccgtttctcccttccatccttcctcctctctctctctctctctttttcgctcccgatttccaaatctcaaataataaataaccagaagggaagcgaatcttctccatcaacccagcaaatcgctcgttcgagcgtcccactcgacgagaaattctcacccatcacctccgcgtcgctccccccgttcgccgccaggggcccaatttcgtgtggacaggcacaggctgctgtgatcctttggtggatgggggcagcgcagctagccaccggaggttgcctagtttgaaatttaaccgcgttaccgaagtggtactccgtagttcttatggatcaacttgccctgcttgcgacggagctgggtgactcgtcagactttgaggtggagggcatccagaacctcactgagaacgatgtcagtgacgaggagattgagcccgaggacctggcgcggcgaatgtggaaggacagagtcaggctgaggaggatcaaggagcggcagcacaagcttgccctgcagcaggcagagctgcagaagttgaggcccaagcccatatccgaccaggccatgcgcaagaagatgtcaagggcacacgacgggatcctcaagtatatgctcaagctcatgcaggtgtgcaatgcacgcgggttcgtttatgggatcatcccggacaaggggaagcctgtcagtggcgcttccgataatatcagagcttggtggaaggagaaggtgaagtttgataagaacgggcctgcggcgattgagaaatacgagtctgacaacttagtatccgctactgcccagagtggtggaactaagagccagcacagcttgatggatctccaagatgccactcttggttcactgctttcctcattgatgcagcattgtgatccaccgcagcgcaagtacccattggagaagggtgcttcacccccgtggtggccttcagggaaggaggaatggtggaccgccctgggtcttccaagcggccaagttcctccttacaagaaaccacatgatcttaagaaggtctggaaggctggtgtgcttacaggtgtaatcaagcacatgtctcccaattttgataagataaggaatcatgtacggaaatcaaagtgtttgcaggataaaatgactgcaaaagaaagcctgatttggctgggagttctacagagagaagaaagccttgttcacagaatcgacaatggcgtatcggagattactcagcgcagtatgccagaggacaggattgcagacacaaatagcagcagtaatgagtatgatgtgtatggttttgaggatgctcctgtttctacatcatctaaagatgatgaacaagatctgtctccagttgcacaatctgctgtggagcatgttccgaaaagaggaagggaaagagcttacaataaacgccctaatcagatcattcctggtaaggcaaaagaaccaccaaagagaaaaagaacacgccacagctccactgttaccgagccagatgcacacagagttgttgatgcaccagaaaactcaagaaatttgatccctgatatgaatagattggatcaagtagaaatcccaggcacgtcaaaccagattgtcacctttgaccatgggggcaccacaactgaagctttacaacacagaggagatgctcaagtacaggtccatcctcctggtgctgaggttaatagcttctatagtgctccaactgcaaaccctactcctataagcatatatatgggtgaccagcctataccttatcaaaataatgacagcacaaggccgagatctgaaaatagttttcctgtagatgctcatactggtttaaataatcttcccagcagttatcagaacttacctccgaaacaatcactaccacttcccatgatggatcatcatgtggttcccatgggtatcagggcacctactgatagcattccttacggtgatcatatactaggtggtggaaattcaacttctgttcctggagatatgcagcaactcatagattttcctttctatgctgaacaagataagtttgttggcagttcctttgaggggttgcctttagactatatcagtatcagtagtccaatcccagatattgatgacttgctgcatgatgatgatttaatggaatacttgggaacataacattcggtcaggatgagtctgctagcatttgttttcatccattttagtctcactggagtcatcatcctaacttaagtatggagggctaaacttctcattttgttgccggtcttgtcattggagaccaaccatctgttgtatgctgagtgatgacttgtattctttggcaataatgtgtcatacagtgacacaattgcacatgtggaaggtgaacatggcctaagttaaatatgatatctttctggagataatatctgttgaagaaagggctagatttttttttatagttttagaatccttgagatatgattgttttcctctgtcatcctatctttgtctatggcttttgccatctacaaaaacatcgggaatccaacactgtatatgcaataaagaaatgaaaaaaatgattttgccatcctctgtgaaagggggttgaaaaccagtttgatcaaactggaaacggggtctcaactcgctaatgactttaggggcctggatgttgtggaagcatcaaaaaggctgtttttaagggggctgcccccagtgtccagcttgtccttggatgaatttgggagtaaaaaaacccctaaagcatgactggagctaggggcttggaacagcttataactgctgccccgtaaacaaaaaaaaggttcacccgctagggggttcctgaacaattaatgggtgtgtgttgtggttgggccttttttttttttggaaaaaagtttttttaaaaaaaaaatatgcaaagaaaattaaaaggggcccctccccactgtttttcattcaaaggatgggcatgcagactatttcccccccaaaagccctaagaaaattattaaatgtcagattcttttttt

SEQ ID NO: 32681 - DNA, 1727 bp, Zea mays
  Clone ID: MRT4577_129818C.1
cccacgcgtccgcttttttcttctctgtgctctagaagattagtattgtagggcttctgtgcagcacccaagcaggaattcagaaagaatgcctggaagcatccacatctcagccactcaaccaccagtcatcacccctctgtttctgcaagtcactgtgggcaacagagaatacagtggaaacatagaacaagatgctttatctttccccgttacatcacttcgggagagtatggtaataatgctgtacagtgcagacggggcattgatatcaaaatcagagctgaagacaaaagagattgtggagtcaggaactatggacacagtatttgctcttgatagcgggggagaaatagttcttcagattcagttcttgctcaacgatgatgaccgcaagcgaatccaagaaatgagaaattctgcgatgaagatgaagcagcaagggctgcttggggatggcaatgaactcaatttttcagacagcgcattgtctaaacggctgacggagaagatttccaacatccgaagcaaagcagctgaacgatctgagcttcagaagagcatgtcactggatgatttgcaagagcgggccgtgttccctggaatcgatgcggatccacgggtgaaggcctcaagggactcgttgctgcaagggggtgtaaggttggaagatcccggtggctccaagcagcggctgagccaggccgaagtcgaagccttggcatcgccggtggaaggggagaggcggcgcctaggcctggacgtagcatccagcggcgggcgaggggtcgtgggagaggcggagcaggaagtcagcgacggggcaggggcagtggatgcgatcagcacgtggccgccggacaggccgggccctggctccaagaaaggggacagcataccagagagcagcaaatcaagtagtgcagtgaagacgatgataagtagctttgaaggcaccaccaccccacagggtatcgtttcagaaaccgactcaggcagccgcagcacgcaggcaggcaaaacagccatcatccctgttgatgatcaccacaaagcttcaaatcacaggtctcagcatatactagtagaaacgatcgcacctgcacaactacaaactattaggacgccaaaagcagccgaaagcagaagccgacgcagagcaagcaagcagcacaacgagctgcatccaagaactcgcgtccggtcacaggcaaagcagatgcagatgcagatgcagccaagggactacgtggagcgtcccttgaactatctggttgcgacgtcgagcacctggatacacccgcacatctgcgtcacgggcgcgaccaagcaactgaaagacctccttgagcttgagcacctcaacttccaacgcaccgctactaagggacagcaaggtacccgagagagaaaaagcgacgaatccattgccgccgccgctgctcgggctcgcagcggtggtttcctgatgataaacgggtggctgatagttcagggggtgcgtgctgcagttgtgctcacggtttgctgcggggccatgttcttcagcagcagcagcagatgaagaaatctagcagtgcctacccctaatttttgcatacacaagccacagccacaatgtaattgtcaagttttactgatggatctggctagcactgtaacttacttcaccgaccgacatattatgggtcccacatgcagaatacgacgacctctcctgctcctcc

SEQ ID NO: 32682 - DNA, 1227 bp, Zea mays
  unsure (1)..(1227): unsure at all n locations
  Clone ID: MRT4577_129819C.1
gttcacccttctcgctagaaatgttgggttgctctaaagaaatgtatactggccatggtaaggctagagaatgacatgtgtgtctggttttatatgtttcttcctctatttgattgtgatataaatttctatagacgttgatgcataggtcctctgttaaacttgtgtttgagatgctttcgtgcgattaatcgaaggactaatgaaaagccgtatacaattaaataaatgcttgtgatcgtaatgtcgtattgtgttggttaattataggtagtaatcgtcgttcttctagtggtgttgatgtggtgcgcttgatgaagtgtagatagctaatgctagcctatggttgtttacggtgtcttacaatttagtgcttggtcgctaccttgtatttgtatatcttgtgatattcttcattatattcatacatatgcatcatgcatctcatttaggaccgagagatgatgatcgtgcgggataaaggacatggagtggagctgactccaagacggtgttggcagacgccttgaaaatggacagacagaacaaaggccaggataggagatgctcgccaagcgagtacctcccccagcaaacactacctaagtgttaaattaaaggcaagccccggttttatgcataacctgttatttatgctattttactatacttaatgattgtaggattgattgtgcacttaggtgtaggagttgactgaaaccctagttgcatgatctcaggattcctgttgagatgaatactagtatgctaggtcgaggtagctgctttattaattaggatctcggtagaagtcgagtgatttttctagcactcgcgcgaggtcatgaaattggttgtatccactttcttatcataatgatgctgggnttgtggacaacaatccatggggattggttgtccacgggatgaaaattggaataaggattaaggtgtggtaccgtgagtcaagcgtttgaacgtactaaacatataccgagaaatatggtaaatcggtaagcctagtacctgattgaacctggcagcagattgccctcctcacgcgacctgagacgaggtctcccattccggttatggtgggtacaagtgcggtcactgcacgacggcagtcggggtcagtgaggcattgtacgccaaggcggtgagcccctctctgctgacggngaatcgatggggacggttgatgtgtgtggggaccgagtgccctgc

SEQ ID NO: 32683 - DNA, 226 bp, Zea mays
  Clone ID: MRT4577_12981C.1
gtaaaagcatactacgattaaagcaaaagggacgtgccttattgacggcacgcatcttatcacaaatacaaaaagcacataataataaaaccctatcaaaaacccatgcaaaaaacataaacatcaccaatcggaaaagactatagtggtaaaaatgaacaaacacaaggcatcttatactgaactgggggccctgacgaacctatctacacttagatcgatcggg

SEQ ID NO: 32684 - DNA, 372 bp, Zea mays
  unsure (1)..(372): unsure at all n locations
  Clone ID: MRT4577_129820C.1
cgacccacgcgaacgngangagagggggaaggaagncncancnnacctcaagaaagnnggggacaacccncgaaagagagcacncgnncccagggggggcnnngagggngacaacacgancgagaggnccaccaaccgggaccggnacaaaggcccaacccngcnngaggctcgngaccagancaccgagcccaagagaccctcggacaagcccctgcgtctccccctccaggatgtgtacaagattggtggtattggaactgtgccagttggtcgtgtggagactggtgtcatcaaacctggtatggttgtcacctttggtccaactggcctgactactgangtgaagtctgttgagatgcaccatgaggc

SEQ ID NO: 32685 - DNA, 163 bp, Zea mays
  Clone ID: MRT4577_129821C.1
cggacgcgtggggtcgccgtccttgcaagcagacccgccgcgcccagcgcggagggatgctttggatggctcgaccgcatcggctacgctggcgcatgagttgtattagacccttgactgcttgtaggacccccactgacgtgcggccgactcccggcgcccg

SEQ ID NO: 32686 - DNA, 187 bp, Zea mays
  Clone ID: MRT4577_129822C.1
tctacaaaggcacagtggagcgggtcacggccccacgcaccgactccacgcatcctcgtcagggcgaactatccggagcacaaacacatccaccgcggcggcaacctcgcctccagatgccacgccgatccctggacagcaggcaaaccaagcaagaggaaggcttatccgcgaagctgtaagacga

SEQ ID NO: 32687 - DNA, 383 bp, Zea mays
  unsure (1)..(383): unsure at all n locations
  Clone ID: MRT4577_129824C.1
tcgagaatctcttcaaaaataatccagattatataggtcgattggggtaaacaaacaggcccttanccattttttctgttagactgcagatagttcttagccttttgattgccattattttttaatagctttgtgccccgtaaattacaggctttacatacttggcgtgccacataatataatatgtatttgattttcatgataagacattaatatatgatagtatgatgtatcttaggttcctggaagtaccatgagagactcttttttggtgaatggtgttgcattcaagaagacgttttcatatgcaggatttgagcaacaaccaaagaagtgtggatggcttcagtttgcgctttgcctatatgaacataagccacttc

SEQ ID NO: 32688 - DNA, 109 bp, Zea mays
  Clone ID: MRT4577_129825C.1
tcggcaccacaccgtccggccacgcgtaggccgacgcatatgctcatgttaacgtgcgtttacgcgtgatcctgagggcgctagaacctatgtggtgatctaaatgaac

SEQ ID NO: 32689 - DNA, 283 bp, Zea mays
  Clone ID: MRT4577_129826C.1
cacaaccttaaagcccccttgatcgaacagccatagataaggctggacattctcctgggtacaaggggcattactctaaatacaaaaactatggggtacttatggacatgttgccgtcatgctgttctgacacatgttattcaaaaaggtatgacaaaccccagtttgtaccaaaaaccccaaatcttttttagatggcttcccagttctgggctggtctgggtttttaacttaaacggccactggttgttcttcgatctcgctgggtccagcataacttggg

SEQ ID NO: 32690 - DNA, 590 bp, Zea mays
  Clone ID: MRT4577_129827C.1
ccttgggcgtctgcttcaaagctccggctcggatgcccatctcctttgctccctgtgcacgccacgccgcgctccatctccttcccccgcgcacgctgctccatctctcctagccaccgagctcctcctccggccgtgcttgcctacaatacccatggccgacctgtgttcacgcctggccgagctccgcgccatagaactccatgcctggtcgcgacctcgccggaaagcgccgtggccttctcctccctagctcggggccctcccatcttctccagcgcgtctccctccctgccctccggctccgtgcgcgcgcgcctcgcttcttgagcgcccggccagggctcccctgaccatggcagctgagctcccggtggtggatcttctgcaagttcccctatagcttcctccccgtccccttgttttccccatggccggagccttttccagccgtgtgccagtccccagctccttccctgcggcgcccgctcccttctctgcttcccctgcttgttcctatggcgcgcacccatatcctttggtcggtcgttggcgtagcccctggtccctgccatggccgtcggtccctg

SEQ ID NO: 32691 - DNA, 231 bp, Zea mays
  unsure (1)..(231): unsure at all n locations
  Clone ID: MRT4577_129828C.1
ctcactcactctctccctcgttccctcctcgtcgttctcccgtgtccgccgtgcactgtctgtctctggtggcggcgactgggcggcctccgccgctgccctacgccaggatcccaggctgcatcttccgtacgccaggatgagggcatcgccgcagttgagntggagcggagatgagccngggcgtcgcggagccgctgattctcatctgatgtgcagatgtaggtatgg

SEQ ID NO: 32692 - DNA, 4317 bp, Zea mays
  Clone ID: MRT4577_129829C.1
atggacggtgatcggagggtgatgtatgacgggtggagaaaggatggggcacattcgaatgaatggatgggtgtaacaaaggcttttcttgagcacgctttcaaagatgcaactggtcgtctagtgaagtgtccttgcaatcgctgcgagaacaagtggcctcagaagaaggaagaaatggagaaacacctttgcaaaagtgggtttatgtcgaactaccttgtatggtaccggcatggagagtctattagacacgttgacgcggatgtggagcttgatgacgatcatgataggatggacgatatgttgcatgatcttggtagggaggttgaaatgaacgctgaggagccggggcagcttccacgcgatgctcaagaattcttccggctactcgccgcaggagaagagagactgcacgagcacactcagatgtcagttcttgggactctcacaagactaatggcgataaagtcgaagcacaacatttcaaacagtgcttacaacgacatcgtccaacttatgggcgaggttctaccggagaatcataagttgccaaaaaatatgtacttcgcaaagaagatgttggctggtcttgggatgacatatgagaagatcgacgtgtgtcccaacagttgcatgctattctttgaggaggatgacaagctggaccgttgtaagcattgcgaagcttctagatatgtcgaggtgacaaatgatgagggtgaattggtagttacgaaggtcgcagctaagcaacttcgtcggttgcccatcattcctcggctttcaaggttgttcctcaacaaggaaatagctctgcatatgacgtggccaaagaatggtgtacgtctcgtcactgatccagacttaatggtccatccgtcggacggtgatgcgtggaaggcattagacgagtttgatcccgaatttgcaaacgaccctaggagtgtacggcttggtctatcgacggacggattcacacctttcaataccagtgcaagcccttactcgtgttggcctgtcttcattgtgccatataatcttcctcctgagttggtcaataaagaagagttcatgttccttgcactagtcatcccaggccccgagcatccagggccaaagctgaatatgtttgttcgccctttaattgaagagctgaaacaattgtggagaggtgtgaaggcttatgacagccatactgaaaaggagtttaccatgcgcgctgcttatttgtggtcagtgcatgatctgctggtgtatggagattggtctggatggtgtgttcatggtcggttgtgctgtcccatatgtatgaatgatacggatgcattcagattgaagcatggtgggaaagtgtcattctttgatgctcatcgacgttggactccattcaagcatgatttcaggaattcgcttactgcattcagaagtggagccaaaatcagaaatgggccaccaaagaggcaaactgcaccacagataatggcatggcatgcttgtctgaagcaaggagaaaatgataggtttcaaggctacggggaggaccacaactggacccatatttcatcaatatgggaccttccgtatgcaaaagccttgatcatgccgcacaacatagacttgatgcaccaagagcgtaatgttgctgaaagcatcataagcacatgtttcgatgtgactgataaaacgaaagataatatgaaggcaagaaaagacatggctgaaatttgtaagagaccgatgctcgagttgaaagtaagcgataaagggcatgagagtaggccgcgagctgattactgcctcaagccagatgaaaggaaagaaatatttaagtggttgaagaatctgaaatttccagatcggtatgcggcaaatctgaaacgggcagtcaatctgaagaccggtaaattgatcggtttgaaaagccatgactaccatattattatggagaggctgatgcccgtgatgtttcgaggctattttaaggatgagctttggagcatatttgcagagctgagttacttctatagggaagtatgcgcaaagacgatatcgaagaggttgatgcagaaatttgagaaagaaattccaattcttatttgtaaatttgaaaaggttttcccgccaggattcttcaatgtgatgcaacatctaattgtgcatttgccttgggaagctttggtaggcggaccagtgcaattcaggtggatgtatcctatagaaagggcgttgaaaaagctcagggcgtctgttcggaacaaggctagagtcgaagggtgtattgcggaggcttttgcccttaaggagatatctcaattctcaaccaggtatttcgctcgagccaacaatgtgtttgctccttcagtgcgacttcatgtcgaaaatgaatcgccccaaagcacccttcaaatttttgcgaatccgggtaaagcagttggaaaagggagtgtacgtcacattgaaggatcagatttgaacacgctaatgctatatatgtatagcaatattgacagcacacaggaggcgttcgacatgtttgatgaagaatgttggaaatctactagtaaacctacggccatccaattagaaaatcttcgacgtgatgggttgaaaggtggaccaaacttcgtgcagtggtttcgtaattatgtttccaaaaactctgtgcacccagacttgcagcaaatggcacatacctctgtgtccgtccggaactatactcgctatgatgtaaatggatatcgcttccgaaccgcgaaattggagaagagtcgaccattggcagccaccaccaatagcggtgtgttggcaagttcatatgttgacgatgacaaagtagtggactattacggtgttcttcaaaacattatagagttgattttcgatggccccaaagaacttaaagtcgtgtttttcgagtgcgactggtttgatgctcatagtgggactcgtgtcgacaagtatggtaatgtcgaggtgaagcatagctctaggattccgagcagtatgagcgatgttgtccttgcaaatcaggcaaaacaggtgtactacctgccatatcctcacccaagccttagggcttggtgggttgcaatcaaagtcaacccacaagtcgtcgctccagagagtgctgactacaagataaaggggcagaaaatgagcaaagcattaggggccaatgagatctacctcacagaggagcagtacctggagagcgttgtggattggctggcgaaggacatggaagcctggaggtggttggcaaagagatgggcgtcgcctgattggattgcagagtcgaacaagcaccgtgtcaaccgtggcactgaaggaccagggcataggtacggcgccgatggacaccttggtaccgcacgccgcatggaagctgaaagtggagttgctccaagttttatggaggtttacgtccgtggtcaccgtggccctgatccggcgaaccctgatgagctatgcagcgaggcggcaagggagaaaatgaatgcatatggggaggaaatgactcaacgccatgggcctgatttcgactggatgcattcagacttagatgcttcggcgttgtaccacagtggtgggggtagaaagcatggcaggtttgcctttggcaccggcgttgtggagtacaacaggacattaggtcaagggaaaacatcatcttcggcagggagttctcgctcctccaaatctgctcgagaggctcagctggaggaggagactcgggcagcacaggagcaggctcgagcagcacaggagcaggctcgagcagcgcaggagcaggtcggacagctgacgcagtatatgacttcttattttcaggaaatgactactcgactcggccctgatatgaacttgccagcttttcgccctccccaggcacaaggatggggacagtggccaggacaagctccagcgtcgcagccacagtggactggtgttgggtggacgcaggcaccttcaggcacttggacacctccaccaccccaaggatcgcagccagtcccgggatgggtgccaccggtctttcagccaccggcgggctctcaaccatttcaagcgtggatggcaccgccaccgacggggtgggtgccaccacctcaggggtggccagcacaacagtacccgtggatgcatgcacagcctcctcctcaccatggatcacagggttcagcgtcacatgctcagggatcggagggtgctgtcaacgtccaagacttcctcgtccatggttctggagggagtggccaccttcctggtggcggaggagggagtggccaaaactcacatagcccgccggagtga

SEQ ID NO: 32693 - DNA, 231 bp, Zea mays
  Clone ID: MRT4577_12982C.1
actactaggcagccgccgcccgcgttttttaatgcagacaagcacgacacgagcgagggggggttttttctgttagctaccacgaagatcgtaaaccgcggcaacgcgaaatgcggaactgatgccatgcccccggcgcctcgctctgccatgttaactgctacaaacaagataccgggcatggcagtgcacggtgcacacttggccctcccccctcgagcataaccgccc

SEQ ID NO: 32694 - DNA, 184 bp, Zea mays
  Clone ID: MRT4577_129830C.1
gagatggtgggcggagaattaggggatgacggctgcggcaccaagggaaggtatggccggcccctgggtggcagcccctgggaggtgcgcgcgcgatgggcaagcaagaaggctccccctgccaggctcctgggtgggccaagctgggctatgggctgacggtggagtgatcgattgccctgcc

SEQ ID NO: 32695 - DNA, 4017 bp, Zea mays
  Clone ID: MRT4577_129831C.1
atgggcatagattcacatttaagcacttgtgttggcactcaatcaccaaaatacttagaaatggcccataggcacatttccctttcactttcaaggttgttcctcaacaaggaaatagctctgcatatgacgtggcaaaagaatggtgtacgtctcgtcactgatccagacttaatggtccatccgtcggacgaagagttcatgttccttgcactagtcatcccaggccccgagcatctagggccaaagctgaatatgtttgttcgccctttaattaaagagctgaaacaattgtggagaggtgtgaaggcttatgacagccatactgaaaaggagtttaccatgcgcgctgcttatttgtggtcagtgcatgatctgctggcgtatggagattggtctggatggaattcccttactgcattcagaggtggagccaaaatcagaaatgggccaccaaagaggcaaactgcactgcagataatggcatggcatgcttgtctgaagcaaggagaaaatgataggttccaaggctacggggaggaccataactggacccatatttcatcaatatgggagcttccgtatgcaaaagccttgatcatgccgcacaacatagacttgatgcaccaagagcgtaacgttgctgaaagcatcataagcacatgtttcgatgtgactgataaaacgaaagataatatgaaggcaagaaaagacatggctgaaatttgtaagaggccgatgctcgagttgaaagtaagcgataaagggcatgaaagtaggccgcgagctgattactgcctcaagccggatgaaaggaaagaaatatttaagtggttgaagaatctgaaatttccagatcggtatgcggcaaatctgaaacgggcagtcaatctgaagaccggtaaattgatcggtttgaaaagccatgactaccatattattatggagaggctgatgcccgtgatgtttcgaggctattttaaggatgagctttggagcatatttgcagagctgagttacttctatagggaagtatgcgcaaagacgatatcgaagaggttgatgcagaaatttgagaaagaaattccaattcttatttgtaaatttgaaaaggttttcccgccaggattcttcaatgtgatgcaacatctaattgtgcatttgccttgggaagctttggtaggcggaccagtgcaattcaggtggatgtatcctatagaaagggtgttgaaaaagctcagggcgtctgttcggaacaaggctagagtcgaagggtgtattgcggaggcttttgcccttaaggagatatctcaattctcaaccagcatgtttgatgaagaatgttggaaatctactagtaaacctacggccatccaattagaaaatcttcgacgtgatgggttgaaaggtggaccaaacttcgtgcagtggtttcgtaattatgtttccaaaaactctgtgcacccagacttgcagcaaatggcacatacctctgtgtccgtccggaactatactcgctatgatgtaaatggatatcgcttccgaaccgcgaaattggagaagagtcgaccattggcagccaccaccaatagtggtgtgttggcaagttcatatgttgacgatgacaaagtagtggactattacggtgttcttcaaaacattatagagttgattttcgatggccccaaagaacttaaagtcgtgtttttcgagtgcgactggtttgatgctcatagtgggactcgtgtcgacaagtatggtaatgtcgaggtgaagcatagctctaggattccgagcagtatgagcgatgttgtccttgcaaatcaggcaaaacaggtgtactacctgccatatcctcacccaagccttagggcttggtgggttgcaatcaaagtcaacccacaagtcgtcgctccagagagtgctgactacgtgagtacgagcagggacaacgatgatgctatttttcaaccagaagcggcgtcgactcaagacatagctcatcgattccatgtgaccaatggagaaggacttgaaaatctctattgcaattcaagctacttaattgaagaacctaggtcaaagcgcaaacgacctgtcgtcgttagaagatcattgaacatgttcaagcataggagatcgaggaggagtgggggcagcgcggccagcgaggacagctcgggcagtgggctttttcagggcacctcacagagccgacagaggcagcagcaacttctcaactgtttagacgaagtgcagggtgaggagggtgagcaggagactcctcagcaggatgctcatgtgcagggtgaggagggtgagcaggatgaggaggttgaccccatgggggcaggcagcgcgggcgacgcgtcagatggttctacgtccttcaggtataagaagagcaatgcgcttggtccgagacctgccgagaggaggctcatccggccgcatggagaatggtcatgggaagacttgacttgggacggtacaggcagacgtcccaaggtgaacgcggtgttgggtagcctctgtcgcttctactaccctggcatggtggagctcaatggcgagaggttcgcggctatgcagtgggctgactggggtctaaaggactatgtccagccaggggagtcaggggaaagcagtagcggagggggaagttcggaaaaaaaacgaaggacttgtcaggtggctgtgtgggacgagttctgggggaggttccaattgccggatgacatcgaggacgatcaggctcagtgggcacgtgtgaagaggcactttcggaagtgcgctgataaggtcatcaaggatgccatgtacaatgctcgcatcgcggccgtcaactactactacaagaagataaaggggcagaaaatgagcaaagcattaggggccaatgagatctacctcacagaggagcagtacctggagagcgttgtggattggctggcgaaggacatggaagcctggaggtggttggcaaagagatgggcgtcgcctgagtggattgcagagtccaacaagcaccgtgtcaaccgtggcactgaaggaccagggcataggtacggcgccgatggacaccttggtaccgcacgccgcatggaagctgaaagtggagttgctccaagttttatggaggtttacgtccgtggtcaccgtggccctgatccggcgaaccctgatgagctatgcagcgaggcggcaagggagaaaatgaatgcatatggggaggaaatgactcaacgccatgggcctgatttcgactggatgcattcagacttagatgcttcagcgttgtaccacagtggtgggggtagaaagcatggcaggtttgcctttggcaccggcgttgtggagtacaacaggacattaggtcaagggaaagcatcgtcttcggcagggagttctcgctcctccaagtctgctcgagaggctcagctggaggaggagactcgggcagcacaggagcaggctcgagtagcgcaggagcaggttggacagctgacgcagtatatggcttcttattttcaggaaatgactactcgactcggccctgatatgaacttgccagcttttcgccctccccaggcacaaggatggggacagtggccaggacaagctccagcgtcgcagccacagtggactggtgttgggtggacgcaggcacctccaggcacttggacacctccaccaccccaaggatcgcagccagtcccgggatgggtgccaccggtcttccagccaccagcgggctctcaaccatttcaagcgtggatggcaccgccaccgacggggtgggtgccaccacctcaggggtggccagcacaacagtacccgtggatgcatgcacagcctcctcctcaccatggatcacagggttcagcgtcacatgctcagggatcggagggtgctgtcaacgtccaagacttcctcgtccatggttctggagggagtggccaccttcctggtggcggaggagggagtggccaaaactcacatagcccgccggagtga

SEQ ID NO: 32696 - DNA, 374 bp, Zea mays
  Clone ID: MRT4577_129832C.1
attcggctcgagactagttctagaccgcctttttacacggattgaccagatgatttatgatgagctataggtgggtaatgaatggcttagcttgacttttcacctgcgaggacgttgacgttatctaccgcgacgtgttgatcgtatagggttgcgacaacactcttatcacaagtctctatcggtactccgacagcaaggtgaagagcgagacctgcaccaaggccggcctgctgctcgtgagctgctagaccacgaacaaagctaccgtcgcctacgtgaagatcaaccggctcaccctatgggagatcgtcttaacgtttggcgacgtgagggtcaacgccgtccgatgcgaggaactggtgaccgttgat

SEQ ID NO: 32697 - DNA, 5042 bp, Zea mays
  Clone ID: MRT4577_129833C.1
atggacggtgatcggagggtgatgtatgacgggtggagaaaggatggggcacattcgaatgaatggatgggtgtaacaaaggcttttcttgagcacgctttcaaagatgcaactggtcgtctagtgaagtgtccttgcaatcgctgcgagaacaagtggcctcagaagaaggaagaaatggagaaacacctttgcaaaagtgggtttatgccgaactaccttgtatggtaccagcatggagagtctattagacacgttgacgcggaggtggagcttgatgacgatcatgataggatggacgatatgttgcatgatcttggtagggaggttgaaatgaacgctgaggagctggggcagcttccacgcgatgctcaagaattcttctggctactcgccgcgggagaagagagactgcacgagcacactcagatgtcagttcttgggactctcacaagactaatggcgataaagtcgaagcacaacatttcaaacagtgcttacaacgacatcgtccaacttatgggcgaggttctcccggagaatcataagttgccaaagaatatgtacttcgcaaagaagatgttggctggtcttgggatgacatatgagaagatcgacgtgtgtcccaacagttgcatgctattctttgaggaggatgacaaactggaccgttgtaagcattgtgaagcttctagatatgtcgaggtgacaaatgatgagggtgaattggtagttacgaaggttgcagctaagcaacttcgtcggttgcccatcattcctcggctttcaaggttgttcctcaacaaggaaatagctctacatatgacgtggccaaagaatggtgtacgtctcgtcactgatccagacataatggtccatccgtcggacggtgatgcgtggaaggcatttgacgagtttgatcccgaatttgcaaacgaccctaggagtgtacggcttggtctatcgacggacggattcacacctttcaataccagtgcaagcccgtactcgtgttggcctgtcttcattgtgccatataatcttcctcctgagttggtcaataaagaagagttcatgttccttgcactagtcatcccaggccccgagcatccagggccaaagctgaatatgtttgttcgccctttaattgaagagctgaaacaattgtggagaggtgtgaaggcttatgacagccatactgaaaaggagtttaccatgcgcgctgcttatttgtggtcagtgcatgatctgctggcgtatggagattggtctggatggtgtgtccatggtcggttgtgctgtcccatatgtatgaatgatacggatgcattcagattgaagcatggtgggaaagtgtcattctttgatgctcatcgacgttggactccattcaagcatgatttcaggaattcgcttactgcattcagaggtggagccaaaatcagaaatgggccaccaaagaggcaaactgcaccacagataatggcatggcatgcttgtctgaagcaaggagaaaatgataggttccaaggctacggggaggaccataactggacccatatttcatcaatatgggagcttccgtatgcaaaagccttgatcatgccgcacaacatagacttgatgcaccaagagcgtaacgttgctgaaagcatcataagcacatgtttcgatgtgactgataaaacgaaagataatatgaaggcaagaaaagacatggctgaaatttgtaagaggccgatgctcgagttgaaagtaagcgataaagggcatgaaagtaggccgcgagctgattactgcctcaagccggatgaaaggaaagaaatatttaagtggttgaagaatctgaaatttccagatcggtatgcggcaaatctgaaacgggcagtcaatctgaagaccggtaaattgatcggtttgaaaagccatgactaccatattattatggagaggctgatgcccgtgatgtttcgaggctattttaaggatgagctttggagcatatttgtagagttgagttacttctatagggaagtatgcgcaaagacggtatcgaagaggttgatgcagaaatttgagaaagaaattccaattcttatttgtaaatttgaaaaggttttcccgccaggattcttcaatgtgatgcaacatctaattgtgcatttgccttgggaagctttggtaggcggaccagtgcaattcaggtggatgtatcctatagaaagggcgttgaaaaagctcagggcgtctgttcggaacaaggctagagtcgaagggtgtattgcggaggcttttgcccttaaggagatatctcaattctcaaccaggtatttcgctcgagccaacaatgtgtttgcgccttcagtgcgacttcatgtcgaaaatgaatcaccccaaagcacccttcaaatttttgcgaatccgggtaaagcagttggaaaagggagtgtacgtcacattgaagcatcagatttgaacacgctaatgctatatatgtatagcaatattgacagcacacaggaggcgttcgacatgtttgatgaagaatgttggaaatctactagtaaacctacgaccatccaattagaaaatcttcgacgtgatgggttgaaagagttgattttcgatggccccaaagaacttaaagtcgtgtttttcgagtgcgactggtttgatgctcatagtgggactcgtgtcgacaagtatggtaatgtcgaggtgaagcatagctctaggattccgagcagtatgagcgatgttgtccttgcaaatcaggcaaaacaggtgtactacctgccatatcctcacccaagccttagggcttggtgggttgcaatcaaagtcaacccacaagtcgtcgctccagagagtgctgactacttgaacatgttcaagcataggagatcgaggaggagtgggggcagcgcggccagcgaggacagctcgtgcagtgggctttttcagggcacctcacagagccgacagaggcagcagcaacttctcgactgtctagacgaagtgcagggtgaggagggtgagcaggagactcctcagcaggatgctcatgtgcagggtgaggagggtgagcaggatgaggagggtgagcaggatgaggaggttgacccaatgggggcaggcagcgcgggcgacgcgtcagatggttctacgtccttcaggtataagaagagcaatgcgcttggtccgagacctgccgagaggaggctcatccggccgcatggagaatggtcatgggaagacttgacttgggacggtacaggcagacgtcccaaggtgaacgcggtgttgggtagcctctgtcgcttctactaccctggcatggtggagctgaatggcgagaggttcgcggctatgcagtgggttgactggggtctaaaggactatgtcgagccaggggagtcaggggaaagcagtagcggagggggaagttcggaaaaaaaacgaaggacttgtcaggtggctgtgtgggacgagttctgggggaggttccaattgccggatgacatcgaggacgatcaggctcagtgggcacgtgtgaagaggcactttcggaagtgcgctgataaggtcatcaaggatgccatgtacaatgctcgcatcgcggccgtcaactactactacaagaagataaaggggcagaaaatgagcaaagcattaggggccaatgagatctacctcacagaggagcagtacctggagagcgttgtggattggctggcgaaggacatggaagcctggaggtggttggcaaagagatgggcgtcgcctgagtggattgcagagtccaacaagcaccgtgtcaaccgtggcactgaaggaccagggcataggtacggcgcctatggacaccttggtactgcacgccgcatggaagctgaaagtggagttgctccaagttttatggaggtttacgtccgtggtcaccgtggccctgatccggcgaaccctgatgagctatgcagcgaggcggcaagggagaaaatgggcatatttctaacagaaatgactcaacgccatgggcctgatttcgactggatgcattcagacttagatgcctcggcgttgtaccacagtggtgggggtagaaagcatggcaggtttgcctttggcaccggcgttgtggagtacaacatgacattaggtcaagggaaagcatcgtcttcggcagggagttctcgctcctccaagtctgctcgagaggctcagctggaggaggagactcgggcagcacaggagcaggctcgagcagcacaggagcaggctcgagcagcgcaggagcaggttggacagctgacgcagtatatggcttcttattttcaggaaatgactactcgactcggccctgatatgaacttgccagcttttcgccctccccaggcacaaggatggggacagtggccaggacaagctccagcgtcgcagccacagtggactggtgttgggtggacgcaggcacctccaggcacttggacacctccaccaccccaaggatcgcagccagtcccgggatgggtgccaccggtcttccagccaccagcgggctctcagccatttcaagcgtggatggcaccgccaccgacggggtgggtgccaccacctcaggggtggccagcacaacagtacccgtggatgcatgcacagcctcctcctcaccatggatcacagggttcagcgtcacatgctcagggatcggagggtgctgtcaacgtccaagacttcctcgtccatggttctggagggagtggccaccttcctggtggcggaggagggagtggccaaaactcacatagcccgccggagtgatcagtgaggagtgagtagtgagtagttagtagcttatggacttatggactctagacttatggactagagttttgtgaattgtgtatttgaatggacaatggacttttggacttatggatactctaaacttatgtgaatggactatttatgtatatgtgaatgtgttttgtgaattatgtaagaggcttgtgaatctgtatatgtccattgtgatattgtgt

SEQ ID NO: 32698 - DNA, 4840 bp, Zea mays
  Clone ID: MRT4577_129834C.1
cctttgaaatggacggtgatcggagggtgatgtatgacgggtggagaaaggatggggcacattcgaataaatggatgggtgtaacaaaggcttttcttgagcatggtttcaaagatgcaactggtcgtctagtgaagtgtccttgcaatcactgcgagaacaagtggcctcagaagaaggaagaaatggagaaacacctttgcaaaagtgggtttatgccgaactaccttgtatgggatgttgaaatgaacactgaggagccggggcagcttccacgcgatgctcaagaattcttccggctactcgccgcgggagaagagagactgcacgagcacactcagatgtcagttcttgggactctcacaagactaatggcgataaagtcgaagcacaacatttcaaacagtgcttacaacgacatcgtccaactgatgggcgaggttctcccggagaatcataagttgccaaagaatatgtacttcgcaaagatgatgttggctgatcttgggatgacatatgagaagatcgacgtgtgtcccaacagttgcatgctattctttgaggaggatgacaagctggaccgttgtaagcattgcgaagcttctagatatgtcgaggtgacaaatgatgagggtgaattggtagttacgaaggtcgcagctaagcaacttcgtcggttgcccatcattcctcggctttcaaggttgttcctcaacaaggaaatagctctgcatatgacatggccaaagaatggggtacgtctcgtcactgatccagacataatggtccatccgtcggacggtgatgcgtggaaggcatttgacgagtttgatctcgaatttgcaaacgacccttggagtgtacgacttggtctatcgacagacggattcacacctttcaatagcactgcaagcccttactcgtgttggcatgtcttcattgtgccatataatcttcctcctgagttggtcaataaagaagagttcatgttccttgcactagtcatcccaggccccgagcatccagggccaaagctgaatgtgtttgttcgccctttaattgaagagctgaaacaattgtggagaggtgtgaaggcttatgacagccatactgaaaaggagtttaccatgcgcgctgcttatttgtggtcagtgcatgatctgctggcatatggagattggtctggatggtgtgttcatggtcggttgtgctgtcccatatgtatgaatgatacggatgcattcagattgaagcatggtgggaaagtgtcattctttgatgctcatcgacgttggactccattcaagcatgatttcaggagttcgcttactgcattcagaagtggagccaaaatcagaaatgggccaccaaagaggcaaactgcaccgcagataatggcatggcatgcttgtctgaagcaaggagaaaatgataggttccaaggctacggggaggaccacaactgccatatttcatcaatatgggagcttccgtatgcaaaagccttgatcatgccgcacaacatagacttgatgcaccaagagcgtaacgttgctgaaagcatcataagcacatgtttcgatgtgactgataaaacgaaagataatatgaaggcaagaaaagacatggctgaaatttgtaagaggccgatgctcgagttgaaagtaagcgataaagggcatgagagtaggccgcgagctgattactgcctcaagccagatgaaaggaaagaaatatttaagtggttgaagaatatgaaatttccagatcgatatgcggcaattctgaaatgggcagtcaatctgaagaccggtaaattgatcggtttgaaaagccatgactaccatattattatggagaggctgatgcccatgatgtttcgaggctattttaaggatgagctttggagcatatttgcagagctgagttacttctatagggaagtatgcgcaaagacggtatcgaagaggttgatgcagaaatttgagaaagaaattccaattcttatttctttggtaggcggaccagtgcaattcaggtggatgtatcctatagaaagggcgttgaaaaagctcagggcgtctgttcgcaacaaggctagagtcgaagggtgtattgcggaggcttttgcccttaaggagatatctcaattctcaaccaagtattttgctcgagccaacaatgtgtttgcgccttcaatgcgacttcatgtcgaaaatgaatcaccccaaagcacccttcaaatttttgcgaatccgggtaaagcagttggaaaagggagtgtacgtcacattgaagcatcagatttgaacacgctaatgctatatatgtatagcaatattgacagcacacatgaggcgttcgacatgtttgatgaagaatgttggaaatctactagtaaacctacgaccatccaattagaaaatcttcgacgtgatgggttgaaaggtggcccaaacttcgtgcagtggtttcgtaattatgtttccaaaatctctgtgcacccggacttgcagcaaatggcacatacctctgtgtccgtccggaactatactcgctatgatgtaaatggatatcgcttccgaaccgcgaaattagagaagagtcgaccattggcagccaccaccaatagtggtgtgttggcaagttcatttgttgacgatgacaaagcaaaacaggtgtactacctgccatatcctcacccaagccttagggcttggtgggttgcaatcaaagtcaacccacaagtcatcgctccagagagtgctgactacgtgagtacgagcagggacaacgatgatgttgtttttcaaccagacgcggcgtcgaatcaagacatagctcaccgattccatgtgaccaatggagaaggccttgaaaatctctgttgcaattcaagcgacttaattgaagaacctaggtcaaagcgcaaacgacctgtcgtcgttagaagatcacataggagatcaaggaggagtgggggcagcgcggccagcgaggacagctcgggcagtgggctttttcagggcacctcacagagccgacagaggcagcagcaacttctcgactgtttagacgaagtgcatggtgaggagggtgagcaggaggctcctcagcaggatgctcatgtgcagggtgaggagggtgagcaagatgaggagggtgagcaggatgaggaggttgaccctatgggggtaggcagcgcgagagacgcgtcagatggttctacgtccttcaggtataagaagagcaatgcgcttggtccgagacctgccgagaggaggctcatccggacgcatggagaatgcctctgtcgcttctactaccctggcatggtggagctcaatggcgagaggttcgcggctatgcagtgggccgactggggtctgaaggactatgtccagccaggggagccaggggaaagcagtagcggagggggaagttcggaacaaaaacgaaggacttgtcaggtggctgtgtgggacgaggtctgggggaggttccaattgccggatgacatcgaggacgatcaggctcagtgggcacgtgtgaagaggcactttcggaagtgcgctgataaggtcatcaaggatgccatgtacaatgctcgcatcgcggtcgtcaactactactacaagaagataaaggggcaaaaaatgagcaaagcattaggggccaatgagatctacctcacagaggagcagtacctggagagcgttgtggattggctggcgaatgacatggaagcctggaggtggttggctaagagatgggcgtcacctgagtggattgcagagtccaacaagcaccgtgccaaccgtggcactgaaggaccggggcacaggtacggcaccgatggacaccttggtaccgcacactgtatggaagctgaaagtggagttgctccaagttttatggaggcttacgtccgtggtcaccgtggccctgatccggcgaaacttgatgagctatgcagcgaggcggcaagggagaaaatgaatgcatatggggaggaaatgactcaacgccatgggcctgatttcgactggatgcattcagacttagatgcctcggcgttgtaccacagtggtgggggtagaaagcatggcaggtttgcctttggcaccggcgttgtggagtacaataggacaataggtaattcatctatctcatcacgtgtcattgaattcaaagaaatgactactcgactcggccctgatatgaacttgcccgcttttcgccctccccaggcacaaggatggggacagtggccaggacaagctccagcgtcgcagccacagtggaccggtgttgggtggacgcaagcacctccaggcacttggacgcctccaccaccccaaggatcgcagccatttcaagcgtggatggcaccgccaccgaccgggtgggtgccaccacctcaggggtggccagcacaacagtacccgtggatgcatgcacagccttctcatcaccatggatcacagggttcagcgtcacatgctcatggatcggagggtgctgtcaacgtccaggacttcctcgtccatggttctggagggagtggtcaccttcctggtggcggaggagggagtggccaaaactcccacagcccgccggagtgatcagtgaggagtgagtagtgagtagtgagtagcttatggacttatggacagagacttatggactagagttttgtgaattgtgtatttgaatggacaatagacttttggactctagacttatttgaatggactatggactatttatgtatatgtgaatgtgttttgtgaattatgaataaagcttgtgcatccgtatatgtgaattgtgatattgt

SEQ ID NO: 32699 - DNA, 356 bp, Zea mays
  Clone ID: MRT4577_129835C.1
cgcaaccgccctgcggcggtgcccctcaaaaatgggcgccgtgcggcggccctccgctgtgcggaggctgcgcgtggtgcctcggcggcggcatcggctgctggtcgccgccgccgcagcagccgatgtgctgccccgggccgtcgctgtgcagagggtgcaacgggtgcaagatcgtgcgcgagaccaagttcagctacgaggagtacccttccagtgcatgtgccatcatgtgatctttgctcctacttgtgttcttcgattgctcagtcctgaattctggtcaaacgagtagcggtctcaaagaaacattgtttttcctgcaaagaaaaaaaaagctccttttctgctgtggc

SEQ ID NO: 32700 - DNA, 611 bp, Zea mays
  unsure (1)..(611): unsure at all n locations
  Clone ID: MRT4577_129836C.1
aaaaaaaaaaaaaaaaaaaaaaaaaaaaaaaaaattaaaatttaccaaggaggaaaaatttaaatccaggcgctgaagctacggcngggaccccccgcttggacacccccccccccttgcccccccctgagggatggatccatgacattggcgcccctaaaaggggaattgcgcttgcccaaaaaaaaaaacgctgggggggttggcacccagttgatgaccaaaagggccaaattgaaggccggggccctgaaaatcgtccatcctgaaaaaagccggaacaacgaaggtccggttcggggaaaggtttcaaaaaacgtgctggggctgggggggctgtttggcctcggcctcggccgccgccgccgacaacaacaaaaaggggccgcttataaaaattgcggccgaacccggcccgtttggttggttggggggggnnggtgatcagagaggaccgcgacgggaagggcccccgttcgtcgtccgtcaggttcaccggggtgatgtngtggatgctgaacctctttttgtctttgccgccggagttgagcctgatgaggttcttttgcgcgtggttggccacttgggtgggcttccgctttggacttttt

SEQ ID NO: 32701 - DNA, 3246 bp, Zea mays
  Clone ID: MRT4577_129837C.1
atggacggtgatcggagggtgatgtatgacaggtggagaaaggatggggcacattcgaatgaatggatgggtgtaacaaaggcttttcttgagcacgctttcaaagatgcaactggtcgtctagtgaagtgtccttgcaatcgctgcgagaacaagtggcctcagaagaaggaagaactggagaaacacctttgcaaaagtgggtttatgccgaactaccttgtatggtaccggcatggagagtctattagacacgttgacgcggaggtggaacttgatgacgatcatgataggatggacgacatgttgcatgatcttggtagggatgttgaaatgaacgttgaggagccggggcagcttccacgcgatgctcaggaattcttccggctactcaccgcgggagaagagagactgcacgagcacactcaaatgtcagttcttgggactctcacaagactaatggcgataaagtcgaagcacaacatttcaaacagtgcttacaacgacatcgtccaactgatgggcgaggttctcccggagaatcataagttgccaaagaatatgtacttcgcaaagaagatgttggctggtcttgggatgacatatgagaagatcgacgtgtgtcccaacagttgcatgctattctttgaggaggatgacaagctggaccgttgtaagcattgcgaagcttctagatatgtcgaggtgacaaatgatgagggtgaattggtagttacgaaggtcgcagctaagcaacttcgtcggttgcccatcattcctcggctttcaaggttgttcctcaacaaggaaatagctctgcatatgacgtggccaaagaatggtgtacgtctcgtcactgatctagacataatggtccatccgtcggacggtgatgcgtggaaggcatttgacgagtttgatcccgaatttgcaaacgaccctaggagtgtacggcttagtctatcgacggacggattcacacctttcaatagcagtgcaagcccttactcgtgttggcctgtcttcattgtgccatataatcttcctcctgagttggtcaataaagaagagttcatgttccttgcactagtcatcccaggccccgagcatccagggccaaagttgaatatgtttgttcgccctttaattgaagagctgaaacaattgtggagaggtgtgaaggcttatgacagccatactgaaaaggagtttaccatgcgcgctgcttatttgtggtcagtgcatgatctgctggcgtatggagattggtctggatggtgtgtgcatggtcggttgtgctgtcccatatgtatgaatgatacagatgcattcagattgaagcatggtgggaaagtgtcattctttgatgctcatcgacgttggactccattcaagcatgatttcaggagttcgcttattgcattcagaagtggagccaaaatcagaaatgggccaccaaagaggcaaactacaccgcagataatggcatggcatgcttgtctgaagcaaggagaaaatgataggttccaaggctacggggaggaccacaactggacccatatttcatcaatatgggagcttccgtatgcaaaagccttgatcatgccgcacaacatagacttgatgcaccaagagcgtaacgttgctgaaagcatcataagcacatgtttcgatgtgactgataaaacaaaagataatatgaaggcaagaaaagacatggctgaaatttgtaagaggccgatgctcgagttgaaagtaagcgataaagggcatgaaagtagaccgcgagctgattactgcctcaagccggatgaaaggaaagaaatatttaagtggttgaagaatctgaaatttccagatcggtatgcggcaaatctgaaacgggcagtcaatctgaagaccggtaaattgatcggtttgaaaagccatgactaccatattattatggagaggctgacgtccttcaggtataaaaagagcaatgcgcttggtccgagacctgccgagaggaggctcatccggccgcatggagaatggtcatgggaagacttgaattgggacggtacaggcagacgtcccaaggtgaacgcggtgttgggtagcctctgtcgcttctactaccctggcatggtagagctcaatggtgagaggttcgcggctatgcagtgggccgactggggtctaaaggactatgtccagccaggggagccaggggaaagcagtagcggagggggaagttcggaacaaaaacaaaggacttgtcaggtggctgtgtgggacgagttctgggggaggttccaattaccgaatgagatcgaggaggatcaggctaagtgggcacgtgtgaagaggcactttcggaagtgcactaataaggtaatcaaggatgccatgtacaatgctcgcatcgtggccgtcaactactactacaagaagataaaggggcagaaaatgagcaaagcattaggggccaatgagatctacctcagagaggagcagtacctggagagcgttgtggattggctggcgaaggacatggaagcctggaggcggttggctaagagatgggcgtcgccagagtggattgcagagtcccagaagcaccgtaccaaccgtggcactgaaggaccggggcaaaggtacggcgccgatggacaccttggtaccgcacgccgcatggaagctgaaagtggagttgctccaagttttatggaggtttacgtccggggtcaccgtggccctgatccggcgaaccctgatgtgctatgcagcgaggcggcaagggagaaaatgaatgcatatggggaggaaatgactcaacgccatgggcctgacttcgactggatgcattcagacttagatgcctcggcgttgtaccacagtggtgggggtagaaagcatggcaggtttgcctttggcaccggcgttgtggagtataacaggacaataggtcaagggaaggcatcgtcttcgggagggagttcttgctcctccaggtctgctcgagaggctcagctggaggaggagactcgggcggcacaggagcaggctcgagcagcgcaagagcaggttggacagctgacgcaatatatggcttcttattttcagggttcagcgtcacatgctcatggatcagagggtgctgtcaacgttccagacttcctcgtccatggttctggagggagtggccaccttcctggtggcggaggagggagtggccaaaactcccacagcccgccggagtga

SEQ ID NO: 32702 - DNA, 4043 bp, Zea mays
  Clone ID: MRT4577_129838C.1
ctagatatgtcgaggtgacaaatgatgagggtgaattggtagttacgaaggtcgcagctaagcaacttcgtcggttgcccatcattcctcggctttcaaggttgttcctcaacaaggaaatagctctacatatgacgtggcaaaagaatggtgtacgtctcgtcactgatccagacttaatggtccatccgtcggacggtgatgcgtggaaggcattagacgagtttgatcccgaatttgcaaacgaccctaggagtgtacggcttggtctatcgacggacggattcacacctttcaataccagtgcaagcccttactcgtgttggcctgtcttcattgtgccatataatcttcctcctgagttggtcaataaagaagagttcatgttccttgcactagtcatcccaggccccgagcatccagggccaaagctgaatatattgaagcatggtgggaaagtttcattctttgatgctcatcgacgttggactccattcaagcatgatttcaggaattcgcttactgcattcagaggtggagccaaaatcagaaatgggccaccaaagaggcaaactgcaccgcagataatggcatggcatgcttgtctgaagcaaggagaaaatgataggttccaaggctacggggaggaccataactggacccatatttcatcaatattggagcttccgtatgcaaaagccttgatcatgccgcacaacatagacttgatgcaccaagagcgtaacgttgctgaaagcatcataagcacatgtttcgatgtgactgataaaacgaaagataatatgaaggcaagaaaagacatggctgaaatttgtaagaggccgatgctcgagttgaaagtaagcgataaagggcatgaaagtaggccgcgagctgattactgcctcaagccggatgaaaggaaagaaatatttaagtggttgaagaatctgaaatttccagatcggtatgcggcaaatctgaaacgggcagtcaatctgaagaccgagctgagttacttctatagggaagtatgcgcaaagacgatatcgaagaggttgatgcagaaatttgagaaagaaattccaattcttatttgtaaatttgaaaaggttttcccgccaggattcttcaatgtgatgcaacatctaattgtgcatttgccttgggaagctttggtaggcggaccagtgcaattcaggtggatgtatcctatagaaagggcgttgaaaaagctcagggcgtctgttcggaacaaggctagagtcgaagggtgtattgcggaggcttttgcccttaaggagatatctcaattctcaaccagcatgtttgatgaagaatgttggaaatctactagtaaacctacggccatccaattagaaaatcttcgacgtgatgggttgaaaggtggaccaaacttcgtgcagtggtttcgtaattatgtttccaaaaactctgtgcacccagacttgcagcaaatggcacatacctctgtgtccgtccggaactatactcgctatgatgtaaatggatatcgcttccgaaccgcgaaattggagaatagtcgaccattggcagccaccaccaatagtggtgtgttggcaagttcatatgttgacgatgacaaagtagtggactattacggtgttcttcaaaacattatagagttgattttcgatggccccaaagaacttaaagtcgtgtttttcgagtgcgactggtttgatgctcatagtgggactcgtgtcgacaagtatggtaatgtcgaggtgaagcatagctctaggattccgagcagtatgagcgatgttgtccttgcaaatcaggcaaaacaggtgtactacctgccatatcctcacccaagccttagggcttggtgggttgcaatcaaagtcaacccacaagtcgtcgctctagagagtgctgactacgtgagtacgagcagggacaacgatgatgctatttttcaaccagaagcggcgtcgactcaagacatagctcatcgattccatgtgaccaatggagaaggacttgaaaatctctgttgcaattcaagcgacttaattgaagaacctaggtcaaatcgcaaacgacctgtcgtcgttagaagatcattgaacatgttcaagcataggagatcgaggaggagtgggggcagcgcggccagcgaggacagctcgggcagtgggctttttcagggcacctcacagagccgacagaggcagcagcaacttctcgactgtctagacgaagtgcagggtgaggagggtgagcaggagactcctcagcaggatgctcatgtgcagggtgaggagggtgagcaggatgaggagggtgagcaggatgaggaggttgaccccatgggggcaggcagcgcgggcgacgcgtcagatggttctacgtccttcaggtataagaagagcaatgcgcttggtccgagacctgccgagaggaggctcatccggccgcatggagaatggtcatgggaagacttgacttgggacggtacaggcagacgtcccaaggtgaacgcggtgttgggtagcctctgtcgcttctactaccctggcatggtggagctcaatggcgagaggttcgcggctatgcagtgggctgactggggtctaaaggactatgtccagccaggggagtcaggggaaagcagtagcggagggggaagttcgggaaaaaaacgaaggacttgtcaggtggctgtgtgggacgagttctgggggaggttcgaattgccggatgacatcgaggacgatcaggctcagtgggcacgtgtgaagaggcactttcggaagtgcgctgataaggtcatcaaggatgccatgtacaatgctcgcatcgcggccgtcaactactactacaagaagataaaggggcagaaaatgagcaaagcattaggggccaatgagatctacctcacagaggagcagtacctggagagcgttgtggattggctggcgaaggacatggaagcctggaggtggttggcaaagagatgggcgtcgcctgagtggattgcagagtccaacaagcaccgtgtcaaccgtggcactgaaggaccggggcataggtacggcgccgatggacaccttggtaccgcacgccgcatggaagctgaaagtggagttgctccaagttttatggaggtttacgtccgtggtcaccgtggccctgatccggctaaccctgatgtgctatgcagcgaggcagcaagggagaaaatgaatgcatatggggaggaaatgactcaacgccatgggcctgacttcgactggatgcattcagacttagatgtctcggcgttgtaccacagtggtgggggtagaaagcatggcaggtttacctttggcaccggctttgtggattataacaggacaataggtcaagggaaggcatcgtcttcgggagggagttctcgctcctccaggtctgctcgagaggctcagctggaggaggagactcgggcagcacaggagcaggctcgagcagcacaggagcaggctcgagcagcgcaggagcaggttgggcagctgacgcaatatatggcttcttattttcaggaaatgactactagactcggccctgatatgaacttgcccgcttttcgccctccccaggcacaaggatggggacagtggccaggacaagctccagcgtcgcagccacccgggaccggtgcacctccaggctcttggacgcctccaccaccccaaggatcgcagccagtccggggatgggtgccaccggtcttccagccaccggcgggctctcagccatttcaagtgtggatggcaccgccaccgacggggtgggtgccaccacctctggggtggccagcacaacagtacccgtggatgcatgcaggatcacagggttcagtgtcaaatgctcagggatcggagggtgctgccaacgtccaaggcttcctcgtccatggttctggagggagtggccaccttcctggtggcggaggagggagtggtgaaagggaaatgtgcccttgggccatttctaagtattttggtgattga

SEQ ID NO: 32703 - DNA, 322 bp, Zea mays
  Clone ID: MRT4577_129839C.1
aaaaaaaaaaggcaggggttttttttttccgaccaaggcaaaaaacacaaacaggggggggaacgggaaaacagccaagtatctttagctagggggccggaaggacccccaccacctccaacaggggggtctcaaaggccccaacaaggttccctataaactggggggggaccccgggggggggggccaccttctgcctgtaccccctaaacccctcgccgtaaaggggggcggcctccccgccggagccaaaaagttccttcctttccagctggggggaggggggcaggcactcaacccaggggttggcctggttttgcag

SEQ ID NO: 32704 - DNA, 259 bp, Zea mays
  unsure (1)..(259): unsure at all n locations
  Clone ID: MRT4577_12983C.1
tctcctcttcttgccggatctccacaccccattccaccccgcccatgggtgcccccacccctcgncgctganntgtgggnacnctggcccctgctnccncgnnccgttttcgtttgcccnnnnganccctnngnnnttaggttttgctgctacnacagtttctatcgtcgacgnngagaggagnatnnagttcntatcttgtatgcgcccgtatctatgtnnacccctggtcgttaaaanttggtatttgtttagatcc

SEQ ID NO: 32705 - DNA, 3486 bp, Zea mays
  Clone ID: MRT4577_129840C.1
atgaggcagcgacgtggagtggtcgggacagtgaccggagtaggggactcggcgacagagggcgctgcgacggtggtgggcgcggcggcggcggaggccgagctagcgcagcgcgacgacatgggtgagtttggtgagaacaatagtgttgtcgtgattgagcttggcattagtggcgaagaggttggcacctttgaaatggacggtgatcggaggatgatgtatgacgggtggagaaaggatggggcacattcgaatgaatggatgggtgtaacaaaggcttttcttgagcacgctttcaaagatgcaactggtcgtctagtgaagtgtccttgcaatcgctgcgagaacaagtggcctcagaagaaggaagaaatggagaaacacctttgcaaaagtgggtttatgtcgaactaccttgtatggtaccgacatggagagtctattagacacgttgacgcggaggtggaacttaatgacgatcatgataggatggacgacatgttgcatgatcttggtagggatgttgaaatgaacgctgaggagccggggcagcttccacgcgatgctcaggaattcttccggctactcgccgcgggagaagagagactgcacgagcacactcagatgtcagttcttgggactctcacaagactaatggcgataaagtcgaagcacaacatttcaaacagtgcttacaacgacatcgtccaactgatgggcgaggttctcccggagaatcataagttgccaaaaaatatgtacttcgcaaagaagatgttggctggtcttgggatgacatatgagaagatcgacgtgtgtcccaatagttgcatgctattctttgaggaggatgacaagctggaccgttgtaagcattgcgaagcttctagatatgtcgaggtgacaaatgatgagggtgaattggtagttacgaaggtcgcagctaagcaacttcgtcggttgcccatcattcctcggcttttaaggttgttcctcaacaaggaaatagctctgcatatgacgtgcccaaagaatggtgtacgtctcgtcactgatccagacataatggtttccaaaaactttgtgcacccggacttgcagcaaatggcacatacctttgtgtccgtccggaactatactcgctatgatgtaaatggatatcgcttccgaaccgcgaaattggagaagagtcgacctttggcagccaccaccaatagtggtgtgttggcaagttcatatgttgacgatgacaaagtagtggactattacggtgttcttcaaaacattgtagagttgattttcgatggccccaaggaacttaaagtcgtgtttttcgagtgcgactggtttgatgctcatagtgggactcgtgtcaacaagtatggtaatgtcgaggtgaagcatagctctaggattccgagcagtatgagcgatgttgtccttgcaaatcaggcaaaacaggtgtactacctgccatatcctcacccaagccttagggcttggtgggttgcaatcaaagtcaacccacaagtcgtcgctccagagagtgctgactacgtgaatacgagcagggacaacgatgacgctgtttttcaaccagaagcggcatcgaatcaagacatagctcaccgattccatgtgaccaatggagaaggccttgaaaatctctgttgcaattcaagcgacttaattgaagaacctaggtcaaagcgcaaacgacctgtcgtcgttagaagatcaggtgaggagggtgagcaggatgaggagggtgagcaggatgaggaggttgaccctatgggggcaggcagcgcgggcgacgcgtcagatggttctacgtccttcaggtataagaagagcaatgcgcttggtccgagacctgccgagaggaggctcatccggccgcatggagaatggtcatgggaagacttgacttgggacggtacaggcagacgtcccaaggtgaacgcggtgttgggtagcctctgtcgcttctactaccctggcatggtggagctcaatggcgagaggttcgcggctatgcagtgggctgactggggtctaaaggactatgtccagccaggggagtcaggggaaagcagtagcggagggggaagttcggaaaaaaaaatgaaggacttgtcaggtggctgtgtgggacgagttctgggtgagtttactttcgggaggttccaattgccggatgacatcgaggaggatcaggctcagtggacacgtgtgaagaggcactttcggaagtgcgctgataaggtaatcaaggatgccatgtacaatgctcgcatcgcggccgtcaactactactacaagaagataaaggggcagaaaatgagcaaagcattaggggccaatgagatctacctcacagaggagcagtacctggagagcgttgtggattggctggcgaaggacatggaagcctggaggtggttggctaagagatgggcgtcgcctgagtggattgcagagtccaacaagcaccgtgccaatcgtggcactgaaggaccggggcacaggtacggcgccgatggacaccttggtaccgcacgccacatggaagctgaaagtggagttgctccaagttttatggaggtttacatccgtggtcaccgtggccctgatccggcgaaccctgatgtgctatgcagcgaggcggcaagggagaaaatgaatgcatatggggaggaaatgactcaacgccatgggcctgacttcgactggatgcattcagacttagatgcctcggcgttgtgccacagtggtgggggtagaaagcatggcaggtttgcctttggcaccggcgttgtggagtataacaggacaataggtcaagggaaggcatcgtcttcgggagggagttctcgctcctccaggtctgctcgagaggctcagctggaggaggagactcgggcagcacaggagcaggctcgagcagcacaggagcaggttggacagctgacgcaatatatggcttcttattttcaggaaatgactactcgactcggccctgatatgaacttgcccgcttttcgccctccccaggcacaaggatggggacagtggccaggacaagctccagcgtcgcagccacagtggaccggtgttgggtggacgcaggcacctccaggcacttggacgcctccaccaccccaaggatcgcagccagtcccgggatgggtgccaccggtctcccagccaccggcgggctctcagccatttcaagcgtggatggcaccgccaccgacggggtgggtgccaccacctctggggtggccagcacaacagtacccgtggatgcatgcacagcctcctcctcaccatggatcacagggttcagcgtcacatgctcatggatcggagggtggtgtcaacgtccaagacttcctcgtccatggtgctggagggagtggccaccttcctggtggcggaggagggagtggccaaaactcccacagcccgccggagtga

SEQ ID NO: 32706 - DNA, 1092 bp, Zea mays
  Clone ID: MRT4577_129841C.1
atgggggcaggcagcgcgggcgacgcgtcagatggttctacgtccttcaggtcatgggaagacttgacttgggacggtacaggcagacgtcccaaggtgaacgcggtgttgggtagcctctgtcgcttctactaccctggcatggtggagctcaatggcgagaggttcgcggctatgcagtgggctgactggggtctaaaggactatgtcgagccaggggagtcaggggaaagcagtagcggagggggaagttcggaaaaaaaacgaaggacttgtcaggtggctgtgtgggacgagttctgggggaggttccaattgccggatgacatcgaggaggatcaggctcagtggacacgtgtgaagaggcactttcggaagtgcgctgataagataatcaaggatgccatgtacaatgctcgcatcgcggccgtcaactactactacaagaagataaagggtcagaaaatgagcaaagcattaggggccaatgagatctacctcacagaggagcagtacctggagagcgttgtggattggctgtcgaaggacatggaagcctggaggtggttggctaagagatgggcgtcgcctgagtggattgcagagtccaacaagcaccgtgccaaccgtggcactgaaggaccggggcacaggtacggcgccgatggacaccttggtaccgcacgccgcatggaagctgaaagtggcgtttctccaagttttatggaggtttacgtccgtggtcaccgtggccctgatccggcgaaccctgatgtgctatgcagtgaggcggcaagggagaaaatggtttgcctttggcaccggcgttgtggagtacaacaggacattaggtcaagggaaggcatcgtcttcgggagggagttctcgctcctccaggaaatgactactagactcggccctgatatgaacttgcccgcttttcgccctccccagggttcagcgtcacatgctcatggatcggagggtggtgtcaacgtccaagacttcctcgtccatggtgctggagggagtggccaccttcctggtggcggaggagggagtggccaaaactcccacagcccgccggagtga

SEQ ID NO: 32707 - DNA, 523 bp, Zea mays
  unsure (1)..(523): unsure at all n locations
  Clone ID: MRT4577_129842C.1
tttttttttttttttttttttttttttttttttttttttttttttttttttttttttgtttttttttttttttttttttagggaaaaaattaaaatccgcccgtaagccaaaaaaagagcaacaggcccaccaggggcaaataaaaaaaagccaggcgccccacccttatggcgaaaaacacgagggccaaaacaaagataacaattgtgggactggcaggacctgggagccggaaacacgggggcaaaaaacccccggatgggggaccattcaaaaaaccaataatattggggaagacgcccaggaaaactttttgggccggaaaaccggcacaaggaggggggccccaagctaacaacacgggacgaaaaatttttggtctggtaaaccaaaatccaaaggaatttctaagataagaaaccagcagacaccggcaacgggcgaaaaaaggacggaatccacggatttgtcccttccggcagataaaaagacccgnggaaaagctaaaaggggggtgagggg

SEQ ID NO: 32708 - DNA, 2910 bp, Zea mays
  Clone ID: MRT4577_129843C.1
atgtatcctatagaaagggcgttgaaaaagctcagggcgtctgttcggaacaaggctagagtcgaagggtgtattgcggaggcttttgcccttaaggagatatctcaattctcaaccaggtatttcgctcgagccaacaatgtgtttgctccttcagtgcgacttcatgtcgaaaatgaatcgccccaaagcacccttcaaatttttgcgaatccgggtaaagcagttggaaaagggagtgtacgtcacattgaaggatcagatttgaacacgctaatgctatatatgtatagcaatattgacagcacacaggaggcgttcgacatgtttgatgaagaatgttggaaatctactagtaaacctacggccatccaattagaaaatcttcgacgtgatgggttgaaaggtggaccaaacttcgtgcagtggtttcgtaattatgtttccaaaaactttgtgcacccagacttgcagcaaatggcacatacctctgtgtccgtccggaactatactcgctatgatgtaaatggatatcgcttccgaaccgcgaaattggagaagagtcgaccattggcagccaccaccaatagcggtgtgttggcaagttcatatgttgacgatgacaaagtagtggactattacggtgttcttcaaaacattatagagttgattttcgatggccccaaagaacttaaagtcgtgtttttcgagtgcgactggtttgatgctcatagtgggactcgtgtcgacaagtatggtaatgtcgaggtgaagcatagctctaggattccgagcagtatgagcgatgttgtccttgcaaatcaggcaaaacaggtgtactacctgccatatcctcacccaagccttagggcttggtgggttgcaatcaaagtcaacccacaagtcgtcgctcgagagagtgctgactacgtgagtacgagcagggacaatgatgatgctatttttcaaccagaagcggcgtcgactcaagacatagctcatcgattccatgtgaccaatggagaaggacttgaaaatctctgttgcaattcaagcgacttaattgaagaacctaggtcaaagcgcaaacgacctgtcgtcgttagaagatcaggtgaggagggtgagcaggagactcctcagcaggatgctcatgtgcagggtgaggagggtgagcaggatgaggagggtgagcaggatgaggaggttgaccccatgggggcaggcagcgcgggcgacgcgtcagatggttctacgtccttcaggtataagaagagcaatgcgcttggtccgagacctgccgagaggaggctcatccggccgcatggagaatggtcatgggaagacttgacttgggacggtacaggcagacgtcccaaggtgaacgcggtgttgggtagcctctgtcgcttctactaccctggcatggtggagctcaatggcgagaggttcgcggctatgcagtgggctgactggggtctaaaggactatgtccagccaggggagtcaggggaaagcagtagcggagggggaagttcggaaaaaaaacgaaggacttgtcaggtggctgtgtgggacgagttctgggggaggttccaattgccggatgacatcgaggacgatcaggctcagtgggcacgtgtgaagaggcactttcggaagtgcgctgataaggtcatcaaggatgccatgtacaatgctcgcatcgcggccgtcaactactactacaagaagataaaggggcagaaaatgagcaaagcattaggggccaatgagatctacctcacagaggagcagtacctggagagcgttgtggattggctggcgaaggacatggaagcctggaggtggttggcaaagagatgggcgtcgcctgattggattgcagagtcgaacaagcaccgtgtcaaccgtggcactgaaggaccagggcataggtacggcgccgatggacaccttggtaccgcacgccgcatggaagctgaaagtggagttgctccaagttttatggaggtttacgtccgtggtcaccgtggccctgatccggcgaaccctgatgagctatgcagcgaggcggcaagggagaaaatgaatgcatatggggaggaaatgactcaatgccatgggcctgatttcgactggatgcattcagacttagatgcttcggcgttgtaccacagtggtgggggtagaaagcatggcaggtttgcctttggcaccggcgttgtggagtacaacaggacattaggtcaagggaaaacatcatcttcggcagggagttctcgctcctccaaatctgctcgagaggctcagctggaggaggagactcgggcagcacaggagcaggctcgagcagcacaggagcaggctcgagcagcgcaggagcaggtcggacagctgacgcagtatatgacttcttattttcaggaaatgactactcgactcggccctgatatgaacttgccagcttttcgccctccccaggcacaaggatggggacagtggccaggacaagctccagcgtcgcagccacagtggactggtgttgggtggacgcaggcacctccaggcacttggacacctccaccaccccaaggatcgcagccagtcccgggatgggtgccaccggtctttcagccaccggcgggctctcaaccatttcaagcgtggatggcaccgccaccgacggggtgggtgccaccacctcaggggtggccagcacaacagtacccgtggatgcatgcacagcctcctcctcaccatggatcacagggttcagcgtcacatgctcagggatcggagggtgctgtcaacgtccaagacttcctcgtccatggttctggagggagtggccaccttcctggtggcggaggagggagtggccaaaactcacatagcccgccggagtga

SEQ ID NO: 32709 - DNA, 365 bp, Zea mays
  Clone ID: MRT4577_129844C.1
ttttctgatggttcgagccaagccctagtaaggggatgttcgacggaggaaggtgcttcccagcacgttctcaattgcatctctctcattgttcatttcaagttatgatatctatggcttgtatctatctatcattccatctttttatatattattaaattttattataatttttttttttattttttgtcttcttttttttattcatcttatttttatattttcttattttttattttttatctttacatttatttttttaattttatattttattatttattatacttgaattatttattaatttttttattttttttatttattattttatgttttatcgttgggtttttgtattatttttt

SEQ ID NO: 32710 - DNA, 284 bp, Zea mays
  Clone ID: MRT4577_129845C.1
ggaagacaatacacgtacaacgatttatatattatatatatgcctgattgctcttttatatactcctatacctgaccacacaagccacaccatgcagtacacatgtacatcaccagcacgggagtaccaaatggaaaaaggttggtagagcgacaacacagcagacagttcgaaaagtccaaagtttgaaacaaacacaccggaacgcgccaaaacgcctgggctacaataaaaattttttttaaaacaggcacacaggatttttaccttggacgcaaaccggg

SEQ ID NO: 32711 - DNA, 436 bp, Zea mays
  Clone ID: MRT4577_129846C.1
attactctcatgggccaaagcccgcgtcctgcaaagcatgttatgatgcacgaccaatcacatcgcacacatgcacacacaggcccatcgactgtgctgtaccctccacctgaagatacaacacgaactcggtgttgctgtcgatccccctgagcatgccggaaactaaggatctattatggaggccgcctcgcttcaccagtgccaaccggaggaggcgctggaggaaacagatcatgagtcaggcgttcacgccccgctgtaacctacacgggctggcctacgcctgactgatactctgactgctccagcaatcgcttcatgcggcactggagcagcgagagcgtctgcataatagatgctgatcttccttctaccacaacgggatgctcaacaccagctagctctggtggatcctgatgctgatgacacacca

SEQ ID NO: 32712 - DNA, 662 bp, Zea mays
  unsure (1)..(662): unsure at all n locations
  Clone ID: MRT4577_129847C.1
ctcaaatgataattnagagacttaatttagaatagtcttggagacagaagcgggcccagatatttgatattgggtattcaaaaattcaaaaaattaaagaaattagtgctataacgctattttgtataatacattattggtaaattactataaatcacaaaaattttgggtattcaatgaatacccatgaatacccagtgggcccgcctctgcttggagatgctctaatacatattttctattatataaatatactacagacttatatatttggggccctagattttatgggggccctgttccggtgaacaccttgcactcccgctggcacgggcttgagttgcattatagcttaattattttattcattcttacaaatatccaaccgaacagtgacgggggagcgtgctgatgaagaggtaagagaataccgaaagacttaatttcaagccatggttgttagcaaacctgcatgctgtgtttctaacacggaatcaaaactcagacaatcgacaagctgatagaaacaggcgacggcgagcaaatctttcagagagcgattcaagagcaagggcgaggaagggtactggacacgctgcaggagatccaggagcgccatgatactgtgaaagagattgagaggaagctttttgatctgcagc

SEQ ID NO: 32713 - DNA, 472 bp, Zea mays
  Clone ID: MRT4577_129848C.1
aatataaaacttatcaacaaacaatcctaagcatgaactagtgccagttactatttgaggctattaatatgggccaaatactatcataatcaaatatttcgcggagtcaattttatagtcaatcaaagagcttaaaacactgaaacctaagacacctctgcactatcagcactaatagtcggcgacaaggaagcaataaacggaataatctaactacgcagccatgggagaggttttttttttttcgtcactagtttacctcatccgcaggtcaatgtcacaggggatatcaaaattgacaaagctagaatgtcaccaattccagcaccttcacgggagcttgagcatcagaggagctatgtatgtctgtcacgagggcaggactgacgaaagagtttctgggaaggatctgagatggatctcctccctgtcactgttttgtgccaccgttgctgaacggaaaggcactgcc

SEQ ID NO: 32714 - DNA, 227 bp, Zea mays
  Clone ID: MRT4577_129849C.1
aataaatggcaggtcactgtattttggcggggctgaggaagtctgtagatcagaatatgccattactgcattttcctttcccctttctagctagcatggcaataacaatgacgtgtatcaaacagcggcgcggtttaaggaacttcatatactcccggcccttgtgtctgagtctttgcctgtaataagaacgtgtatatgcgtgaaacctatcaattttgttattt

SEQ ID NO: 32715 - DNA, 211 bp, Zea mays
  Clone ID: MRT4577_12984C.1
aattcccggggggacgagctctcatgactgcggccgcccttggactttccggggaaccctttttcacgagacggggcagtcaataccggttgcataatgccaagccaaaacagtacaatcagcagacaaccaataggactgtctgtacaccaccacaggtccccgagggctttacgggccttgctcttaactacaaaacacatgcacacaa

SEQ ID NO: 32716 - DNA, 1215 bp, Zea mays
  Clone ID: MRT4577_129851C.1
ctgctgcttcagcagcagctgttaatttcaaccgccatgatgcatccaccacgcttcagagcgcagcaacatgcatacctcctccaacaacggtccggtcagtgtcgatgagggacatgggcacagagatgacgcccatcgcaagccaagagccgtcccggaccgggacgccggtgagggcgacgagtccaaactgctcccagccaacgactccacggcggacgctcggcggccccagcgcagtcggctccttcatcagccacggaggagaatgcagcagctcggagctgagcgagcaggagctgcagaccaaaaccaggagggagatcatgctccttggcacgcagctaggcaagaccagcatcgcggcatgggcgagcaagaaggaggaggagaaggacgcctcgctctcgctgaaaccggtgcccatggaccagtcgacgcagaacataaccgcgatccgtgcggctgcgtgggaggaggcggagaaggccaagtatttagcgagattcaagcgagaagagatcaagatccaggcttgggaggaccatcagaaagcccagatagaagctgagatgaggaaaatcgaggttcgcagactgttttctgttcttctgttcagtttgccatagatgttcaggttcagaagaacatacaaaaccaaagggtgcagcgcggagctgtgtttgtggatactgcattgttggtatcgatagttttaaccatggcccgtgctttgcgttcctttcctcaaggtcgaggtggagcggatgcgtgcccgcgcgcaagacaagctgatgaccaagctcgcgtcggcgaggcacagcgcagacgagaagcgtgccgcggcggagctgaaacggaaccgtgcagccgcgaggaccgctgagcaggcagagcacatcaggaggaccggccgggtgccgccgtcgtttggctgctggaactggtgctcatgaagtgcccatggaagatgagtcgcccgttgagaatgagtcgcttgtaagctgttgtaactatatatatatatacacacacacacgcgtatgtaagatgtgagatccatgcgtcctgtgctgtggtggttactgtgtaagtgtaacagatgtaccgaattcaaggccgagcttggattcctagtccacatatgtgataaacttcacaccatgctagttgtgactggatttgatttgtgctctacttgatgcttatgct

SEQ ID NO: 32717 - DNA, 184 bp, Zea mays
  Clone ID: MRT4577_129852C.1
cgaattactgagaccagaggcgaacacgtgacgcctgcaccgctgggcccaccacgcacaaggatgaatcacggcccatggtagaccttttatcggatgcccgctccggagactactgctgttccagacctggaacatccatcagatgaactagacacagctaccgatttcaagacgcaactac

SEQ ID NO: 32718 - DNA, 275 bp, Zea mays
  Clone ID: MRT4577_129853C.1
gttacgcgcaggccatctagtcgtcgcgctttcgatgacgcgtactccatgaccacactcggtgatagctcgttagtacgcatgaaagcgaatgtgctcaccaacttgatctcgtcgagctgcgacaataaagatactatggatgccatatgggctggaaccttgtgcagactaaatttcacagtatcggagcaacacttgtacgagtcgacaagtttggaaacatatactctgagaaactacatgacactcagtactgaaggcatacgtgggta

SEQ ID NO: 32719 - DNA, 340 bp, Zea mays
  Clone ID: MRT4577_129854C.1
tcgatcccagatcagcttggacagtctgttacccactgagaaaatcatggcactagggtccgggatctatcttctgtgcgcaagatcttaggctgcccgtcaggacgctttgtcgttctccggcacagcgaacggtgtcaccagcgcggcatcagggaaaacaccggcctgacttagctacgtgccgatctaggccgaccatgtgatcggtatagcacacacacactctaaacttttacaggtcctaaacaatctccaaatattctatttgtcagacagatggctacaaagacattgtgcatgtatatttaggagtttgtaatcatctagaatggtgcac

SEQ ID NO: 32720 - DNA, 369 bp, Zea mays
  Clone ID: MRT4577_129855C.1
gggggaggaaaaaaaaagaaaaccaggttgggggtcatttttaaaaaaagaatcccaattggccccgggggggggggggtaaaaaaaccccaggggtcacggggtgggggcccataggaacaaaccccgccccaagaaccccggggggatacatttatgcccattaacaaaccccgggggatgaaaaatggcccaaacccggaccctaaggggggaaaaacccaacggatttcgggtttgggggccccaatggcaattttaaaccaggccttgcacaaaaatttggtttaaaattttgccaaaaaggagcctggagaggtccatttttttatccccagcacaaaaggctactccgggggaaatggtccg

SEQ ID NO: 32721 - DNA, 301 bp, Zea mays
  Clone ID: MRT4577_129856C.1
gccgaccatcgacataattaaactcgtggtctagtgcgccagaggaggacccgcgcacctgggccgcgccgactacgctgttgcgctcaatacaactgtcatgacgcgctccaggaggggatggtacgtctcatcatcctctacgagtacacgaaggcgcggcacgcacaatcctactcacctgtactgtgagctctcgctagtacattgaccctgtgactgagacacttaaggtatgcacgtcagaggtctgggaggttatcaaactcacggacgacaaccatgcgctgcacacgcacat

SEQ ID NO: 32722 - DNA, 301 bp, Zea mays
  Clone ID: MRT4577_129857C.1
tttttgtgttttttaaaatgcacacgggcttattttacataaaagggaacacaacacatgaacaacagctaaaaccatgcctatcaccattgaaatcaactccatgccacagctaacaataccatcatgccccaggtgttggcccaagtaagcccgaccatgcatacatgttcataaacgctgtacgagaccacaactacatccgaaccaagacggtgttaacctacaaaccctgcccgaaaaaccatctaaccaactccagactgcaaaacaatcgctcctaaataaagatccctaaatt

SEQ ID NO: 32723 - DNA, 310 bp, Zea mays
  Clone ID: MRT4577_129858C.1
tcaggccgcgcaataccctcgttcgcgattttggcgggtcatgggtttggccgtgtcctcgggctcgcattcggaatataaatgggaacgttcgccgatccctgaccgtatgaccggcagggtgtagccatcatggcgtgcagatagcacagggaaaaaaactgagatccggtccgttgattgaggtcgcaatcgcaccatcgtctatgccaactcaatgcgtctgatgatcgcgggcgcgcgccgtacctggccatacccttgggcgacggagactgctgctgagcgctgagaacagataattgatgct

SEQ ID NO: 32724 - DNA, 641 bp, Zea mays
  unsure (1)..(641): unsure at all n locations
  Clone ID: MRT4577_129859C.1
ggccgcttttttttttttttttttatatcaccagaggatacaatggaaccttaaccctgtcctgaacatatatacaccgtcaaggtctccaccaaacttatcttaaccaactgagccacaaaggcatcacattagcatcttgccatacaacattactgtaaccaactgtcttagcattgcccttattgcaagatataaacctatttacgaccctatcaaactgacattccaaggacacaggggataccttacaccttatgatgtgccatgactcaccagacgcggattgtcctccaccttaggccggccactggtcaccagatcacgaatgaggcaagatcagacgacaccttccctattcggaccccatgaaaccatgatactatacccttgataccggagaacacccgtggctggagacgaacgccgtatcacagtcgcgactcaaccgtacatcgttcactaggcatggccaagatccaagcatgtagccaatctatgaacttcatgagacttgctctcttatcggccgtgaacctttcncaataacaatcacgctgacaaccggttgccactcgctctgcatatcatgcgcgtagaacaccatagcaagccctgcagacggtgaggactgccatgag

SEQ ID NO: 32725 - DNA, 669 bp, Zea mays
  Clone ID: MRT4577_12985C.1
ttgggtacctcgaggccggccgggaagtctatactttccgcgcctcttcttctgcgcccctctcctcccaactgcggatagagcagcagaggcagcgacacgatcgcgagtgcacgcacgcaatcacgttgtcgtaagctcaaggtacaacaagcaccactgcctgatcgataggcgggccaggctctcctctccggccggcagctgctgggccgccccgtgcagtcggtcgtctctatgtcctcggggaggaatgcgcccttcgacgacgaggtcatctccagccctccagtcaaggaaggtgacgacaggaagatgaggttcgcggccaagaagtccctctcctacctcgatggaacgctggccggcgactatggcttcgacccggtgcgcctctcggacccggagggcaccggtgggcttcatcgcagcccaagtgagctggactacgagggaggcgatcaacgtggcgatacctcatgatagggcgcggatgtgcgccatcgacgccggacatcttcaagcaagatgagcatcatcccgccgaaaaccgcactgccgtggttcaagacagaagacatcccgtccgcaggcacctacaagtactgtgccgactcctacaggctcgtcatcttcaacatggtgctcatgggctatcatcgagcaccg

SEQ ID NO: 32726 - DNA, 260 bp, Zea mays
  Clone ID: MRT4577_129860C.1
gatccatgtcagccaaagacaagtttcttttacatacttggcttgctgtccatttcaagaattaggtatgtacttatgataatgcagggcaccctctgaattagctgatccaactattctcttgatccattgtggtgactggtctttgtgcagtcacataccagaacaatggaccaaaccccaaaccaaaaactaaaccttgtaattgtcaaaatatgtgaaaagttctttcaagtttaatgctactgaagcagaagttt

SEQ ID NO: 32727 - DNA, 248 bp, Zea mays
  unsure (1)..(248): unsure at all n locations
  Clone ID: MRT4577_129861C.1
ttctcctccccctctttatctaatcctcctnggttaggttggtgggggggggggaaaaaaatncggggggtgtgtggataccgttgtttttggggggggttggtgggccacagtaacgagtgggtgagatgccttcgctgctaggggagatccttacttcaantcatcacctgggggatgctgggggtcccttnnttttnnttattacctttttttcnagaactcatgtttagcttctataacatgaa

SEQ ID NO: 32728 - DNA, 1672 bp, Zea mays
  unsure (1)..(1672): unsure at all n locations
  Clone ID: MRT4577_129862C.1
ctcgaggccggccgggccggggagcccacaacccgccggcccttctcctcctctccggtttccgttttgattcctcccgattctctctcgcgtagtcgcgtaaatttcccagcccgaaaatggccatagccttgaggcactagtaggcacagtagaacccaaccgcggcccgctccagcagccccaccccatcgacgccgtcggcgagggcacccaggtccgcgtcgcaccacgtcagccacacacccaccaggccaccaccgccctcagctccggtgtgcagagacgctggatggcctcgcaccagtagaatccgtccggcactttctgccctaccccaccccactccacccgtccggccgcgggtggatttgaccgatatcggcaggcggccgccggcgtctgcctcgattgatccgcctcgtctcagtcctaggtatggcggcggtggcggagggatcggcgtctgctgcggcgaaggaggtggagtaccaggcgggcgtgcagaagcttgtggacctgctctccaatctcaacccggccgccaaggagttcgtcccttcctcggctccggccgcggctgcgtcgccgcccaagaaagcgttgtcggcggatgcgccggtgttcgattaccgctccaccgcaggcggcaacggggccaccgacgatcccttttacgttgggtttgggaaccagcagcgcaagagagggaatggatacatcaaccaaggaaggaggaggacaaatgatagattgaggcgtgcagacagagaggacagcgttaggcgaactgtttatgtctctgaacttgatcatactgtgacagaggagagacttgctgatatctttgctacctgtgggcaagttgttgattgcagaatttgtggtgatccccactcagttcttaggtttnnnnnnnnnnnnnnnnnnnnnnnnnnnnnnncgtcgacctgcgcttaacctgggaggccaaattttggtttctaccctgttagagttttgccgtcaaagacagctatcttacctgttaatccaaagtttcttcccaggacggatgacgagaaggaaatggtcatgcgaactgtctattgtacaaacatagataagatggttactcagttagatgtaaagaaattctttgaagaactttgcggtgaggtctctcggttgaggcttctaggggataatgtacattccacaaggattgcttttgttgaatttgtccatgctgagggtgccatcatggctctgaattgcagcgggatgattttgggaacactgcctgtcagggtgagcccttccaagactccggtgnnnnnnnnnnnnnnnnnnnnnnnnnnnnnnnnnnnnnnnnnnnnntgaactggattgttcacgggaaggcgtcgccataagctgaaggcttccgcggtccggtgcatcatgatgcgtctgctcacattcttacaaacgttttctttgtacccttttgcaaacctgttgttggaagggaactggttagatcaggcccttctatagccagctttcggtttctcctgtttcactggacgtgatggaaccactgaggatgactatcttggcaatcagccatcaaagtaacttctgttaatgtccttgttgttaagctaattggtgtgtaaacgtcttacatgtgaatcatcacagttagggt

SEQ ID NO: 32729 - DNA, 2300 bp, Zea mays
  Clone ID: MRT4577_129863C.1
tgtttaattcgtctgttttgcatagcatttgctacgccactcatgtcactagtaagctcttgctatgatgctaccccaaaatgggtatgctgcatagtgtgcaggagctatgttcgatacgatcaacttgtgcatgtttggtaatttcttaacagcatatgcatgaaacattcttgtgacactctcgctgcaatgagtagggacaataagttgataagtttgttcaaacaattgagatccccccccctccagtgcttcttgctcttttttttccaatcgtatattgacctgcaagatgattgtgctcgtacaggcatgccttctatttgttccttccataccgagtatccgcttaagatggagatattgattctaacttttgaactccccagtctccaccccggaaatggccagaacctgaggcactagaacccacccgcccgcggctctctccagcagccccccaatccatcgacgccgttggcgagggcgcacaggcgcgcgtcgcaccacatccgccacccacaacacaccaccgtcctcatctccggtgtgcaggcagagacgcgggatggcctcgcgccagtagtatccgcccggcactttctaccccacccatccggccgcgggtgggtttgaccgagatcggcaggcggccgtcggcgtctcgctcgctcgatccgcctcgtctcagtcctacctaggtatggcggcggcggtggcagagggatcggcttcttcggcggcgaaggaggtggagtaccaggcgggcgtgcagaagctggtggacctgctgtccaacctcaacccggccgccaaggagttcgtcccctccgcggccgcgtctccgcccaagaaggcgctgtcggcggatgcgccggtgttcgattaccactccatcggaggcgggaatggggccaccgacgctgcgttttacgttgggtttgggcaccagccgcgcacgagggggaatggatacatcaaccaaggaaggaggaggacaaatgataggttgaggcgtgcagacagagaggacagcgttaggcgaactgtttatgtctctgaacttgatcatactgtgacagaggagagacttgctgatatctttgctacctgtgggcatgttgttgattgcagaatttgtggtgatccccactcagttcttaggtttgcatttattgagttctctgatgaagagggtgcaagaactgcacttaaccttggaggcacaatttttggtttctaccctgttagagttttgccgtcaaagacagctatcttacctgttaatccaaagtttcttcccaggacggatgacgagaaggaaatggtcatgcgaactgtctattgtacaaacatagataagatggttactcagttagatgtaaagaaattctttgaagaactttgcggtgaggtctctcggttgaggcttctaggggataatgtacattccacaaggattgcttttgttgaatttgtccatgctgagggtgccatcatggctctgaattgcagcgggatgattttgggaacactgcctgtcagggtgagcccttccaagactccggtgaagccccgtgtaaatcgagtgggatctaactgactctgcgcaagctgaactggattgttcacgggaaggcgtcgccataagctgaaggcttccgcggtccggtgcatcatgatgcgtctgctcacattcttacaaacgttttctttgtacccttttgcaaacctgttgttggaagggaactggttagatcaggcccttctatagccagctttcggtttctcctgtttcactggacgtgatggaaccactgagaatgactatcttggcaatcagccatcaaagtaacttctgttaaagaaaaaaaaaaaaaactaattggtgtgtggccgccttccacctgcatcttccctctgtcggtcctcctactgttaacgccttagatgtttggctgccggtttggattcagctgcagctgcaaatctgtactgttgctacagcatttgctttcttatgtaaccagccggcagcagcagctgcttctgcacaagcaagaatccaaacatgattgcaacgccgagttccctgtcctcgtctacgaaggaaaaatcccaaatgacaatttatgtggaaattctcaattggctaccaccacttgtctgacattgtagtcgttaaagtctgtaattttgctatgcatttatacgtctttaggggtctgattctattattctaacatcagtatttcacgtttacgattccaaaaaaaaaaaaaaaaaaaaaaaaaggg

SEQ ID NO: 32730 - DNA, 617 bp, Zea mays
  unsure (1)..(617): unsure at all n locations
  Clone ID: MRT4577_129864C.1
gcagaaaaatatcaataagacttaagacataagagcatcattacattagtgcattacaaaagtttcaacgttcaactttcaaccattaaacaaaccaaaagggttgaaaagcgatagtagtaaagtgctagtgcaacactgcaggtctgaagtgctattgcggtgtgcactattgcagatacatattaaacaattagcatgtttgacaaaacacaaaatagtataggtctcgccaacagatgatctatgtctgtatctagcacactaactgcctacaggtgaacatcaggcatgtcattgatatcaccggccacctccatctccacgacttcctcctccacctcaggctgtttcttctttatattctcaaggacctcaagatcagaaacaattgaagaaacctttcttgtacctttttagctgcaagtatccaatctcttgtgcaaactaaagcctctactatctctgggtcaaggggactgcgatatggatccacaacacgaccaccggtactaaacgcagattctgaagcaacagttgatgcttgcattgccaacacatcacgaacaagtttggagagaataggatattcgncttgctggtttttccaccatgct

SEQ ID NO: 32731 - DNA, 573 bp, Zea mays
  Clone ID: MRT4577_129865C.1
taccccatcgccgcgtctcctggcgagaactcccgcggagcgatcggccatggcggcgtccctccgagcgtcctcctcctccctccgctcgcgcctcctctcctcccccgcctcctggtctccctggcgcctgctcctctcctcctccgtccactcggacgccgcccaccagaccgaaaccctcgccttccacgagatccagctctccccggagaagccgcctaccgccaccgccttcgtcctccacggcctcctgggctccggccgcaactggcgcaccttctcccgcaccctcgcctcccggctccgcgaccgctcccccgccgacgagtggaagatggttcttgtggatttgaggaaccatgggagctcagccaggatcaaagggctgagcccgccccatgatatgtcgagtgcggccaaagatcttgctgatttggtgaaggctcggggctggacatggccagatgtcgtcgtgggtcactccatgggtggaaaggttgcactggatttcgcggagagttgctcccgtggcgattacggagaatctgctgctcttcccaaacagctctg

SEQ ID NO: 32732 - DNA, 175 bp, Zea mays
  Clone ID: MRT4577_129866C.1
tttacgcgttcactgtaaggactaatctcggggctccagggtccattgttggtgcacgtaaccattaatccatagggacaaagatagatcctgacctgtagccacagcgatatgccacgacagctgttctcccaacagaatccgtcggattctggtcctaacaatttacacctgc

SEQ ID NO: 32733 - DNA, 832 bp, Zea mays
  Clone ID: MRT4577_129867C.1
actttctccccccatccatctcgagccctccgccacagtaccagcatcacgccaagccaaacccccatcccctatctatcccagggaagtgaaggacaaaccagccgccgcccctcctcttctcctgccgcccgctccgatcgccgcccccctccgtcgccttccctcccgaggattctgtatctataggtttggtcatggcgtcagctgcctatcttgacgacattgatgctgaagttatcgaccctccaaagattgagatgttagatgtcacagaactcgtcggtgatcttatcgagcactcaccgaaaccaaatgtcatagtttctagcaatgtgcgtgagctattggaatgccctgtgtgtttggtcgccatgtatcctccaattcatcagtgctccaatggccataccatttgttctggatgcaagccaagggttcataatcgctgcccaacttgcaggagtgaattgggtaacataagatgccttgctctagagaaggttgctgcctctctagaggttccatgcaagttccagaactttggatgcgtgggaatatatccttattattgcaagctgaaacatgaatcacagtgccaatacagaccctatacttgcccatatgcgggatctgagtgcactgtcaccggtgacattccatatctagtgaatcacttgaaggatgatcataaggttgacatgcacagtggaagcacctttaatcatcgctatgtcaaatcaaatcctcatgaagttgagaacgccacatggatgcttacggttttcagctgctttgggcagtacttctgcctgcacttcgaggcgttcca

SEQ ID NO: 32734 - DNA, 383 bp, Zea mays
  Clone ID: MRT4577_129868C.1
ccgccccccgcaggagcacggagcggtacccgtcgcggctgtccagcgggtcggacggcgtggaccagcagcagcagcacagcttcgaggcgtcgcgcacgcccagccggtggggcgactcgttcggcaacgacagcacgtcgcactcccagaccagcacctcctcatggtgctcgcagcctccggacgagatggaggcggagatgaagcggctgcggctggagctgaagcagaccatggacatgtacagcacggcgtgcaaggaggcgctgagcgcgaagcagaaggcgctggagctgcagcgctggaagatggacgaggagcagcggtcgcaagagacgcggctgacggaggagtcggccatggcgctcatcgagcaggag

SEQ ID NO: 32735 - DNA, 248 bp, Zea mays
  unsure (1)..(248): unsure at all n locations
  Clone ID: MRT4577_129869C.1
cgcgctgcttgctgatctctctacggatcagatgctcctcagatcataatagcctgccagacgtgatgctacgtccacgtcggctggccaccaagtcagcatcgatatcgtntcgcagtccgagcacctgtgctacgtcagctgcagctactgcaacaccgtgctcgcagatgggtgatcgatccaataggatgatggacacgatgactgtcgagtgcggcgactgcaacgatctctcctacctcagt

SEQ ID NO: 32736 - DNA, 475 bp, Zea mays
  Clone ID: MRT4577_12986C.1
aaacccccttttgttcacgatggtttaaaaggttcacaactccccaaaagcttaaaaaagccttttttcgacgggaagtttttagcgacataaaaccccccaagttcctaacatgtttttagtccccggggacccaaaaaaaaaaaaactgggcgggacgggccggggggacccatttccatgggcatttcctcactaagtgggaaagttttttccttttccctagcgggagaggaccccttgggaaacgggggggggggcaaaagcagcgcggaggaggaggagggggggcccatggcctcggggacaacggggttgggggaaacagcaacggggctggcgtccaattgcaaaatgacggccccaaaaacctggggcagaagttttttgaactccgcctcgtccaccgccctgagggcgtgggttttccccattttgaacgccttgttaaccacgggatccacctgaccgacgg

SEQ ID NO: 32737 - DNA, 326 bp, Zea mays
  Clone ID: MRT4577_129870C.1
cgtcaccagatgccatctcccagattgttctgcctgccgaagaaaacataccaatcccactcgaaacctgtggaacttgcaccattggtctagaacaattatgacccacttactcacgatccattccttcggtcatgttactggcctcatatccctcgtcccaccatgatatgtgtgcatgctctgattgtatgcccaacatagtgtgaccaggacgagaacatctgacttgcactaccgcctgttgaggatctcgacaaaatgaactggacccacaggcttggtacgaggcttgccaacaagaaccatgatttcttggcctccga

SEQ ID NO: 32738 - DNA, 840 bp, Zea mays
  unsure (1)..(840): unsure at all n locations
  Clone ID: MRT4577_129871C.1
nacaaatccactggggggggaaaggatggccatgaactactatgaagaccactcgatgtcatcatcatctcatgccgatgacacggatgaaaggaagagcacggtttcagtttcagtctcccccgaggctagcgccgacgaggagtcgttctcattctttgggctgctttgctacgccgacacggtagattggctcctcatggccctgggaacccttgggtctatcatccacggcatggcattcccggtcgggtatctcctccttggaaaggcgctcgatgccttcggaactaacataaatgatccggagggcatggtccatgcgctctacaaggtggtcccctttgtttggtacatggcagcagccactcttccagctggaatggttgagatctcctgctggatatactcaagtgagagacagttagcacgcatgcggctcgcgtttctgagatcaatccttaatcaagaggttggggccttcgacactgacttgactactgcaaccatcatcaccggagtaaccaactacatgagtgtcatacaagatgcaataggagagaagctgggtcatttcgtcgcaagcttctccactttctttgctggcgtcataatcgcgtttatcagctgctggcaagttgcaatgctttccttcctggtcattccacttatcctcatcatcggagcagcatacacgaaaaagttgaatgtcttatctttgtcacgcaatgctattgtttcggaggcagtatcagttgtagagcaggtattgtgacatcagttaacacacatacccctcagccagttacctgaatagatagaaatgttgatacacagatc

SEQ ID NO: 32739 - DNA, 459 bp, Zea mays
  Clone ID: MRT4577_129872C.1
acccaccggggggcaaaaaagttttccaaaatcgaaaagcaaaaagggaaacaaccatccaaaacgacgtttttaaaaacccaggggaaaaggggggcggacaaaaccaaaaaggcttacaacatcagggggggaaaaccacaccggggacaaaaacaacacacaagcctgacaaagaccccataaggaaacttttagaactcaaaaccataataaccttcctcgccctaaaaaaactaaaaaccaacctcctggaagtccttttggagcgctgccaaaacctcacgggcctaaaaaaaatcgcccttctccaaacccttaccgaaaaaccagggcacaaaggcccccttggggaacaaaagggcaaacttgggggcgatgcggaaaaacacccccacaacactgggggaggtggagaaaaagcacacagggcgctgaaccttggccagggcaccacca

SEQ ID NO: 32740 - DNA, 6471 bp, Zea mays
  Clone ID: MRT4577_129873C.1
ccacgcgtccgctcactcatctcccccgcccacttgccccacgcctccgggctgcgacctccatccatccatccatgtataaagccgccaacgcccgcctcctcctcagatccctctcccccaactcagctgcgctagcctccgtcaacccgggccgcgccgcctcctccgcccgcctcgcgctctcgctgccgtgcggcgcgtgggtcggccgaagcgggctcgtccgccgcgccgccgccttctccgggacacggccgcgcttcgcgggcgccagggcgcagatcggggccgccgtgcctgccgtcgagcagttccagcgcaggatggcaacccaagctactgtgcatgccttcaaggatattctgaccagcctccctaagcctggaggtggtgaatatggaaagttctacagccttcctgcactaaatgatccaaggattgataagctgccgtactccgtccgtattcttcttgagtcagctatccgtaactgtgataacttccaagttaccaagaatgatgttgagaaaataattgactgggaaaacacatctccaaagctggccgagataccattcaagccagctcgagttcttcttcaggacttcactggagttccagcagttgttgatcttgcagctatgcgtgatgcgatggccaagttgggcagtgatgcgaacaagattaacccattggtcccggtggatcttgttattgatcactcagtgcaggtggatgtagcaaggtcgcagaatgccgtacaagcaaacatggaactggaatttagtcgcaacaaggaaagatttggtttccttaaatggggctctagtgctttccaaaatatgctagttgttcctcctggttctggtattgtgcaccaggtcaatcttgagtatcttggcagagttgttttcaacacagatggcattctctatcctgacagcgtagttggtactgattcacacaccactatgattgatggtttgggtgttgctggctggggggttggtggtatagaagcggaggctacaatgcttggtcagccaatgagcatggttttgcctggtgttgttggcttcaagttaactgggaagttacggagtggtgtcacggccactgatcttgttcttacagtaacacaaatgctaaggaaacatggtgttgttggcaaatttgttgaattctatggtgaaggtatgggtaagctgtctttagctgacagggccacaattgcgaacatgtcaccagaatatggagctaccatgggcttctttcctgtggaccatgtgacattggattaccttaaactgacaggccgcagtgatgaaactgtgtcaatgattgaagcatacctgcgagccaataaaatgtttgtggactacaatgagcctccaacagagagaatatactcatcttatcttgagctgaaccttgatgaggtggagcctagcatgtctggcccaaagaggcctcatgatcgtgtccctttgaaggaaatgaaatcagattggcatgcttgcctggacaacaaagttgggttcaagggttttgcagtgccaaaggagcagcaggataaggttgtcaaatttgactttcatgggcagccagcagaaatgaagcatggtagtgttgttatagcagcaataactagctgcacaaacacctcaaatcctagtgttatgcttggtgctggtcttgtagctaagaaagcttgcgagttgggtcttgaggttaaaccatgggtgaagacaagccttgcccctggatcaggagttgtcacgaagtacttgcttcagagtggtcttcaagaatacctcaaccagcaaggattccatatcgttggctatggctgtaccacttgcattggaaactctggtgatctcgatgaatctgtatcaactgccattacagaaaatgatgttgttgctgctgctgttttgtcgggtaaccgtaacttcgagggtcgtgtgcaccctttaactcgggctaactatcttgcttcgccacctcttgttgttgcttatgcacttgccggaactgttgatattgattttgagaaagagcccattggatttggaaaggatggcaaggaagtctacttcagggatatatggccctcgacagaagaaattgcgcaggttgtccaatccagtgtgctgcctgacatgttcaagggcacctatgaggctatcacaaaaggcaacccaatgtggaaccagctaactgtcccagaagcatcactctactcatgggattccaaatccacttacattcatgagcccccttactttaaggacatgaccatgtccccacctggcccctctacagtgaaagatgcctactgcttgctgaacttcggggacagcattactacagatcacatttcacctgcaggaagcatacacaaagacagtcctgctgccaagtatttgatggagcgtggtgtggaccggaaggacttcaactcatatggtagccgtcgtggtaatgatgaagtaatggcaaggggaacgtttgcaaacattaggatcgtgaacaagtttttgaacggagaagttggacccaagaccattcatgttcctactggggagaagctttctgtttttgatgcggccatgagatacaaatctgagggccatgctactataatcctcgctggcgctgagtatggaagcggcagttctcgtgattgggctgctaagggtccgatgctcctgggagttaaagctgtaattgccaagagctttgagcgtatccacagaagcaacttggtggggatgggaatcattcctctgtgcttcaaagctggtgaggatgctgattcacttggcctcactggacatgagcggtacagcatcgatctccctaccaacctcagtgagatccgtcccggccaggatgtgactgttactaccgacaatgggaaatctttcacttgcatcgttcgctttgacactgaggtggagctggcgtacttcaaccatggaggcatcctcccttatgtcatccgcaacttggcagctgcgcataactgaggcaagatcacacaccgtttgacccacaatggcagtggcaggctccatgttcccagggctagcgacctggttctcaatgtagtgacatttgtgatggatctaggggtctctttgtcgattcagcccataaataaagtgtgaaataaaagccgcaggtggaggcaggaacctgctgattgagggaacagttttgcctgtgtttggttacatgaaatatctgtttcacagatgtgtagagcatggtgtaaatgcttcctgtgctgttactttcgtttcgacaaagagacccctagatccatcacaaatgtcactacattgagaaccaggtcgctagccctgggaacatggagcctgccactgccattgtgggtcaaacggtgtgtgatcttgcctcagttatgcgcagctgccaagttgcggatgacataagggaggatgcctccatggttgaagtacgccagctccacctcagtgtcaaagcgaacgatgcaagtgaaagatttcccattgtcggtagtaacagtcacatcctggccgggacggatctcactgaggttggtagggagatcgatgctgtaccgctcatgtccagtgaggccaagcgaatcagcatcctcaccagctttgaagcacagaggaatgattcccatccccaccaagttgcttctgtggatacgctcaaagctcttggcaattacagctttaactcccaggagcatcggacccttagcagcccaatcacgagaactgccgcttccatactcagcaccagcgaggattatagtagcatggccctcagatttgtatctcatggccgcatcaaaaacagaaagcttctccccagtaggaacatgaatggtcttgggtccaacttctccgttcaaaaacttgttcacgatcctaatgtttgcaaacgttccccttgccattacttcatcattaccacgacggctaccatatgagttgaagtccttccggtccacaccacgctccatcaaatacttagcagcaggactgtctttgtgtatgcttcctgcaggtgaaatgtgatctgtagtgatgctgtccccgaagttcagcaagcagtaggcatctttcactgtagaggggccaggtggggacatggtcatgtccttaaagtaagggggctcatgaatgtaagtggatttggaatcccatgagtagagtgacgcttctgggacagttagctggttccacattgggttgccttttgtgatagcctcataggtgcccttgaacatgtcaggcagcacactggattggacaacctgcgcaatttcttctgttgagggccatatatccctgaagtagacttccttgccatcctttccaaatccaatgggctctttctcaaaatcaatatcaacagttccggcaagtgcataagcaacaacaagaggtggtgaagcaagatagttagcccgagttaaagggtgcacacgaccctcgaagttacggttacccgacaaaacagcagcagcaacaacatcattttctgtaatggcagttgatacggattcatcgagatcaccagagtttccaatgcaagtggtacagccatagccaacgatatggaatccttgctggttgaggtattcttgaagaccactctgaagcaagtactttgtgacaactcctgatccaggggcaaggcttgtcttcacccatggtttaacctcaagacccaactcgcaagctttcttagctacaagaccagcaccaagcataacactaggatttgaggtgtttgtgcagctagttattgctgctataacaacactaccatgcttgatttctgctggctgcccatgaaagtcaaatttgacaaccttatcctgctgctcctttggcactgcaaaacccttgaacccaactttgttgtccaggcaagcatgccaatctgatttcatttccttcaaagggacacgatcatgaggcctctttgggccagacatgctaggctccacctcatcaaggttcagctcaagataagatgagtatattctctctgttggaggctcattgtagtccacaaacattttattggctcgcaggtatgcttcaatcattgacacagtttcatcactgcggcctgtcagtttaaggtaatccaatgtcacatggtccacaggaaagaagcccatggtagctccatattctggtgacatgttcgcaattgtggccctgtcagctaaagacagcttacccataccttcaccatagaattcaacaaatttgccaacaacaccatgtttccttagcatttgtgttactgtaagaacaagatcagtggccgtgacaccactccgtaacttcccagttaacttgaagccaacaacaccaggcaaaaccatgctcattggctgaccaagcattgtagcctccgcttctataccaccaaccccccagccagcaacacccaaaccatcaatcatagtggtgtgtgaatcagtaccaactacgctgtcaggatagagaatgccatctgtgttgaaaacaactctgccaagatactcaagattgacctggtgcacaataccagaaccaggaggaacaactagcatattttggaaagcactagagccccatttaaggaaaccaaatctttccttgttgcgactaaattccagttccatgtttgcttgtacggcattctgcgaccttgctacatccacctgcactgagtgatcaataacaagatccaccgggaccaatgggttaatcttgttcgcatcactgcccaacttggccatcgcatcacgcatagctgcaagatcaacaactgctggaactccagtgaagtcctgaagaagaactcgagctggcttgaatggtatctcggccagctttggagatgtgttttcccagtcaattattttctcaacatcattcttggtaacttggaagttatcacagttacggatagctgactcaagaagaatacggatggagtacggcagcttatcaatccttggatcatttagtgcaggaaggctgtagaactttccatattcaccacctccaggcttagggaggctggtcagaatatccttgaaggcatgcacagtagcttgggttgccatcctgcgctggaactgctcgacggcaggcacggcggccccgatctgcgccctggcgcccgcgaaacgcggccgtgtcccggagaaggcggcggcgcggcggacgagcccgcttcggccgacccacgcgccgcacggcagcgagagcgcgaggcgggcggaggaggcggcgcggcccgggttgacggaggctaggcgcagctgagttgggggagagggatctgaggaggaggcgggcgttggcggctttatacatggatggatggatggaggtcgcagcccggaggcgtggggcaagtgggcgggggagatgagtgaggctgcggggaggt

SEQ ID NO: 32741 - DNA, 283 bp, Zea mays
  Clone ID: MRT4577_129874C.1
tgttctcagaagtcagaactgtcagcaaggtatcacattcatgaacctgcaatgagtcgataagatggagaccaaggaaaagtctaaaggcctccacgtgagggctggttcggtggatagagaaattgaggagatccatgagcagggatcctcttgctatttaggcttgtttggttattccaattccatgtggattgaagtgtattggaatgtattgggtagattttgacttgctatgaatttaaaccgactcaatactattcaatccacatggattaacgat

SEQ ID NO: 32742 - DNA, 987 bp, Zea mays
  Clone ID: MRT4577_129875C.1
aaaagactttcgagtttgtcaggggccatatgacccttttctgattagtgcttgggaagactatgatgcgaaacgtggatctgaaaatgaccatccaaaggagtttacaagggaacagtgctacattgtctttgttctagctgatggtggcactgatcttgaaagttttgctctagttgagtataatgaggttcacagtttactggttcaggttactgcttccttagcagtagctgaaagtgcttgtgaatttgaacatcgagatctgcactggggtaacattcttttggctcaagaggaaactccagatacaaatcatacaatgagcttcactcttcaagggaagaggatgcatgcaagaacttttggtctgaatgtctctataatcgacttcactctttctcggatcaacacaggaactgccattctttttcttgacctgtctgcggaccctgcactatttcaagggaaaaagggagataaacaggcagaaacatatcgaagaatgaaacaaatcacccaggaacactgggagggcagcttcccgaagacaaacgtggtgtggttaatctaccttgtagatatggtgctacagaagctgaaatcacctgctcatggcaacaaaatcgagcgggagcttcgctcgctcaagaaacgcctggcgtcttacgagtccgctggagattgtctacgcgaccccttcttcgctgatgtgttgctgatcgaggatgaccaggtcccttcaatgcctcctctgtaggcggatatgcgaaccggcagatcgagggtgtttgggttttagggttgtgttatttatgaccactgaaacacctgacgtgcgcgcaagagagcttactgttgcccggccgccttttgtaactactcgttactcgtataactgatcacgttggtgctggctggtggctgggttcgttgtcactgacgatgcaatcgggatttgaaaaaaaaaaaaaaaaaaggccccta

SEQ ID NO: 32743 - DNA, 121 bp, Zea mays
  Clone ID: MRT4577_129876C.1
gccctgctggcggccttcctgctgctgagcctgagctggcggctcgtcgacgctgggcatatcgagtacataggaatgagacccaggtgccgtacacctgtaccgacttcacctggcaggc

SEQ ID NO: 32744 - DNA, 1887 bp, Zea mays
  Clone ID: MRT4577_129877C.1
tttttttttttttttttttttttttgttgttctctcgtgttttttttttttttttttttttagcactggaaatgtatgttgtatgtaccattgtatttgcaaatgtagttgtgcaattctgcaaacaatgtcttgttacaaataatcaagtacaaaagttgtggaaaattataagccctcggcatacactcctccagtgtgtgtatcttttatgtaccaattgcagcaaatttcatagcctcataggcctagccactcatactacagtcgtgcaaaaactgattcagtcacgcccgttgcagaacatccattatccatactgtgtagtccagtaagggctgagactggaattaattgtcccagcagtggtgtattcattggaacgaattcactgaccgtggctcgacaacggtgtaagtaacatctggcaggcagtaagaggcctatattttctgacttcagaggcgtgggttaagaaccatcagcacacctgcatcttcattcttcactatgttgctcacatatacagccaggcaagggatttgcaaagaaagactcttctagctttgggaattcgccaggctccctaaaatatggagcacctattctatctttgtgtaatcttttcacttctgagctgaatatatcccaaggcactcttcctccatcgaattcatctatcaggttcacaaaattcatcctgtctggattaacagtctttctgaagttctcaaaacgacgatgtccttgtacagcttttgccatatttccatcataagtgtaaataaagacatcactctgaagagccacgatgtaatcaagaccagcaagcatattctgatggtttttgaagggtgcaagttcctcttctgttgccagcgtagaatgagaataaatattgggaaaatcgtccttcagagcattcatgcttccattgccaaaagcttcaccagcaaccaagtaaattctggtgcttcgagtgaaacccagtcctttgagtaaaagtgaagtttcccttggcgtcaaaggacagccaccaaggcttcttctctcagtagcattgatttctttctctttccagtgactgacttcataccgcattttacgcagttcctcctcttcttctgatgtcaagttatggctgcaaccagtaaaagctagcatgtccttctcgtaccttagatggagagcaagatatgggcttcggtcctgacgcattcttgaaactagggtattaccaagatcttcaattgtatgagaatacttcaaagatctgtaattaactcggcatcttaatttctgaatgtaactaggaaggccattgttagcaaggcgagaatctgtatgtgtaaagtaaatgactttgtgtttcttcagaagggggaggatttcatctctgtaataatgcaccttcgaccaagataccggagctttagccaaaggttcaatgtcactgtattcagggggaagtgtttcaacaatatcaatgtcttctttcagtgactcaatgaagtgcctccagttgaaaaggtccttaaattcactgtcatctgcccagtaggatgtatgatcgagtgaaggaagaaccagagttgccttcaggatcttagcaacagcaaccatgtcacatatcccaaatctcatttgattcaaacctccatttgcatttatgagaatgtaaccattcgtatgagaatcttgctttttatgagagtttgaaacaatgcattgtctgaaatttgtactgcttggctgagaccagatatcagaggcctacatgaagccgtcttctcttccaccgatgctagattccactgtcatcaaagtcctgtcactctcttttcctcccatgtattacgaagcccggccggcctcgaggtacccatt

SEQ ID NO: 32745 - DNA, 326 bp, Zea mays
  Clone ID: MRT4577_129878C.1
tagctcttgtgggccaactactacaaggaggtgctgtttgtgttcaggagtgtcaggaaccagaacgtcatggacatgaacgccgtgggcaggggatttgaaggcagccttgcaaaggacccccgtgtgggacatgaacgttgtctacttctacagcccaaactgccttggagtggtatacgacagagggctcatcggcgtcaaccactactggggtgaggagatctcgacatatccacgcacctaagacctgccgcaaccagaagggctgttcacaggagaccctaacaggggccagatgaattacgagctccttgaaatggata

SEQ ID NO: 32746 - DNA, 797 bp, Zea mays
  unsure (1)..(797): unsure at all n locations
  Clone ID: MRT4577_129879C.1
ggccgggcttaatgtccgccttgatcctatatttgatgctggacaatggaaggcgtcatttttggaggactatagaacaaaactacaactctcagaaatcaacaggacatccagtccgcacacttaggagtttggaatggaggtaactgcagctataaacctttacaatagcattgaatgcaagcctataatcaccacccattgctgggagattcttagaaatgaggcaaaatggttggatttgtagaggaaggatactcaaggtcatggaagagctggtaaagataaagtagtagatgttccagactccataaatggcgatgacgaaactgatgacactagtcgaggaacctagaggcccatggaaatggacgctgcaaaggctacaaaaagaaacgcttccaatgaaaccttcatccaatctagctcagagtacacgagtttgatgttaaacttgcatctggagtggatttgagcatataaagaagtgcaaggtgttatggctgtgaacgttgaccaacttattacagttcaagagaaatctttcacccaaaaacaggaggttgccaagcaggtggttgaattgaaaaagaaaatgggaggccgaagcagctgagaagcaaatctggaagaagatagaatcatgaatcttgagctaaacaccctaagtggtccgcaaagggcctactatgaggctcaataatgtcgtattttgcaatgtgtttacatactttgtgagcgttattttatgtcttacatactttgntttgaattattgcattgcaaacatttatagc

SEQ ID NO: 32747 - DNA, 190 bp, Zea mays
  Clone ID: MRT4577_12987C.1
cctaattcggctcgatggggaaagccatattgtttctgacattcatgttactcgatgctgaggaaatttttggaaaccggtgctggatataccaaaaatactatcccccgcttacactggtgttacaaaggccaagagaatttacacaaaggcaaccagagttgtacagttctaatagttcatatatgat

SEQ ID NO: 32748 - DNA, 567 bp, Zea mays
  Clone ID: MRT4577_129880C.1
catcctgccgtgcctgagcgcatctgcggagagtgcgacgattaagggaatccagcaggggatgtacatggacaacgagggagacgccaacgtcgtctcgcccggctacaccaatgctgacggcctccgagcccacgatcgtccaaacgttcatcctcgcttacaacgccttctccggcagcgacgccaagaggaacaccagggactcccatgtgccgattctcgaccctcttctaatagtctttggcgtgttcctcgaccacctggccgccatccttatcaccggtaccctaatcaaccccgaacgaaagcttgctcgccgccgtgatttactaccattaccatggctgtcgctcgagcactgcatcttctgtatcgaccacttcatcgaccctgagcatgattgacatctaccaccagacggtcatcgaggcgactactcctcatagagactacttaaaccagacgaagatgcctgctgcttcagacagccgccgtgtcttaaaagcatagagtcaaggttgcgttcatacgatcccctactatgtcacatgcaaccccattcct

SEQ ID NO: 32749 - DNA, 315 bp, Zea mays
  Clone ID: MRT4577_129881C.1
ctggagagcacattgtctgatattgataaagtgctctcggacatggccgcagaggaggctgctgcggctacagaagtcatggccgcagcgcctgaaaaagggaaagaaatttccgaagagacttcggaagataaaggcttcaacttccaaaatctagtcggtcaagaattatccaaggccgagaaggaggagctacaggaatttgctgaatcatgtggctaccagccaagagccctgctttttggcggaatcaataaagaagccttaggatgtattcgagatcgaactaaagcgaagattatcagcactctgtcg

SEQ ID NO: 32750 - DNA, 313 bp, Zea mays
  Clone ID: MRT4577_129882C.1
aaaggattcagcacgccgtccgatgggaagggagcttcaaggcggtccggagatgcgcgtgaagggtccgggctgagacaatgggacaggcgcttgaagcgcgaacgccctaacgtgggtcggcgctgccggaagcagaggcgacaagttgctagctacattcatgatcaaaggagctaacacgtactaccgcacacacatgctatcgcccactgtgtatgaaaccatgggcgatgaccaagtgggtgaacgaactggtcctcttgttctaggtagaatgactatcgagatgcggtcttaagagggggaaaac

SEQ ID NO: 32751 - DNA, 377 bp, Zea mays
  unsure (1)..(377): unsure at all n locations
  Clone ID: MRT4577_129883C.1
natttcatgtatatgttctggtcacataaccctatatgaaattgtacacctatacaaagcccacgactgacgaaccgcatcagaccattgaataggtgtacaatttcatgtatatgttctggtcacataaccctatatgtttctaccctcaaaagtgtcagtaaatattccaccagtaattattttgggtcgtggatttaatggccttttggtttaatgtgtatgggcatgtttggttcatggccacacattgccatgcctaaccttaagtagtagccacaagtgtggcaagccataaactgtggcaaaaacaaggtgtttggttagtgactaaggtttggcaaaataaatgtggctgctgtttggatagttaccac

SEQ ID NO: 32752 - DNA, 1170 bp, Zea mays
  Clone ID: MRT4577_129884C.1
acagcccaagccaacaatcttcagacgcggcggacgcgtgggcggacgactagttccttgttcggtcggaacgcagcgcagcggcggcggcgatagggagagaggagagagtctgcaggatccagcaggccgaggaaggagtcagcggcgggccggagaatatgagcggcaacggcgcgaagaaggtggtcgatgcggcggtgaaggccggcaggacgatcatcgactgggacggcatggccaagttgctcgtcaccgacgaggcgcgcaaggagttcgccgccctccgccgcgctttcgatgacgtcaaccaccagctccagaccaagttctcccaggaaccccagccgattgattgggagtactacagaaaaggaattggatcaaaagtggtggatatgtacaaagaggcttttgaaagtaagtatccttgtacgccaaacctaatttcaattatagaatctaaaaggcgcgttttctgtgaacatcaaggatattctaaagtgtttgttgtactctgttgattatcttttttgcaatgtgaaaagttttctggtctgttgattttcaagctactttctagtttctgtctaaagattcatactcatggatatcccatatatctctgattctcagataccaatgtgtttttggtctgagcatctggtataacaattgccccagtgtttgtaaaactatactgttagatggacaagttattatatgtacccccattagtatttctattgaatacttgtgttgcaatatggtagcattttttttactacaagctatggaaatgtaaggctatgtatcataccttggtctattaagaatacgttactctgtacacatacacctcagtttgttgcgatggatgccctacactagtccttggtatatttgctatagtgtgcctgtttggcagacctacgctctatgattctatagatctgttagccgattctctagtagagtgattccctagcaagcgtgcatctatgtgacgaaaaatgtttcacaaatagtctacgaagtgattcctgaggggtcggagagtgtggatcaggttgggagcggtggggagcagtttttttttttggctcccactatagtacaaaacagagactagattcactcagctcccaccatggagcagttcagtttttt

SEQ ID NO: 32753 - DNA, 309 bp, Zea mays
  Clone ID: MRT4577_129885C.1
gagctcatttgtcggcggccgccctttcgccttcggtggcggcgccaccacgcggatggtctacacctaccgcacagacgcgtgaaggtaccagaggtaggactacaactgggtccgagagcccgtgcacgatgacagccaccttgtctgcgccaacgagaaggacaggttgcgctcgtttgccgaagtcctcacgcggtggtcggagttgatagctcggaaggtggcctacattgatcgactgttgttgaccttcgtgtacatcgacgcggcggtcgaaatggatgcggtgtgctagcgagaagaggc

SEQ ID NO: 32754 - DNA, 447 bp, Zea mays
  unsure (1)..(447): unsure at all n locations
  Clone ID: MRT4577_129886C.1
aggcaaaggccggcggggggtggggccctcccncaaancaggcaaaccagccaaccgggcgcgcggccccgccggcgccggcgcgcccgcgccgccaggcccagaccacagagngccggcccggcccgcccacgcccacggcagagcgcgagacagggcggagccacccggggggggaggaggcgcagcagaccaccaccagcacggagggcggggaggcgcgggagcaggccccggcccgcgacggcgccacgcgcggcacgggccacgagccccgccaaagcggaccagccgccncgcacgacgccgccccgggcgaagggcgnggcaccngccagcgcccncgcggngcgcgagcacgcgcggcgggcccgncccngagcccaacagggaccaggcgcccgcccngcagcggcgcccgcgcaccaggggcaccgnccccaggcc

SEQ ID NO: 32755 - DNA, 342 bp, Zea mays
  Clone ID: MRT4577_129887C.1
tgtatcgtgcgccgacactttagctttcacccaacggcatcaaattatgggaggccgtgtctttcaagaccgaatacgacatctttaatgattacttgctttactacctctggaacccaagcctcattcacacacagatcatcattaccatctgagcctaacaggttgttctgatgggatctggtgatcgctaccataatctactttgcccgtatcatgaggtcgtagacccgttctacctcctgctcagctacgacccgctcgggcttgatacgacctgaaggccttcttcgagctcaaagacaatgagctcaagaactgtctactctccatgatctccat

SEQ ID NO: 32756 - DNA, 653 bp, Zea mays
  Clone ID: MRT4577_129888C.1
ccggccgggaaaaaaaaaaaaaaaaacgactacgaacgccgtcgccaacggccgcgccgcgccagtcatcacattaccgagatcaaggatccaggtcgtgactggaatctacactcagcacctacaacaacaaacactccgacctccaatccaacaagatgtcttacaacaaggccgagaaggacttcggtgagggtcccaagatccacaagatccgaatcaccctcacctctcgcaacgtcaagtccctcgagaaggtctgccaggagctcatcgaccgtgccaagaacaaggagctccgcgtcaagggtcccgtccgtctgcccaccaagcacctcaagatcaccacccgcaagaccccttgcggtgagggttccaagacctgggacacctacgagatgcgcatccacaagcgtctcattgacctccacgcccccaccgaggtcgtcaagcagatcatcatcaacatcgaggccggtgtcgaggttgaggtcaccatcgctgcttaagcgcttgcttttgggcagagtatatggagaagtgtcatgggtctgagtagacaagtggcaatggacagctatagcagctgggaatatgaaaatgaaatgattcaatactcaaaaaaaaaaaaaaaaaaagcgcctaaagcggcc

SEQ ID NO: 32757 - DNA, 303 bp, Zea mays
  Clone ID: MRT4577_129889C.1
gataattttcctattatttttttttttttgcagggctaattactggttatagccagggttttagtaaaaatgaacttaaacatgaacttgggggccctgtgtatggccaaaaaaaattgcataaaaataattataagatccactttgtaattgacccaattatttaaacaaaactacatatataagaatctcctcatttagtctactttttctaactggggtccagcacctttaataccagccggctaagcatttcgatccatagcaccaggcatgtcaagaccagccgcgctctgatacatt

SEQ ID NO: 32758 - DNA, 104 bp, Zea mays
  Clone ID: MRT4577_12988C.1
ctcacagtgccaactgaagcttggcctgtgggcttactagctaggcctttaaagtctacacttgagtccttgcattaatccactcgggttacgccaatggaagc

SEQ ID NO: 32759 - DNA, 561 bp, Zea mays
  Clone ID: MRT4577_129890C.1
gtctaccacactgtagccggaggccggagcaacttgtagatgtagcccaggacgatcctgcaggtagctagcagtgcaaagccctcctagctagcttagctactaccagctccgatcctgtgctgctgccatggagaatccctacacgagcttcttcaacagccatccgcagcaccaccgctactactaccaccccgcgccgccaccgccagcgccggcgccagccgcctaccacccctccctgcctttcttcgctgcgcaccgccagccacctgctccgacggcgcccgccccgccctcgcccccgctccgggaagccctgccgctgctctccctggcccccacgcggcatgaggagcgggagcgccgcgcccggccaccggcaccagcgttggaggattctgaagagaacggccgggacgagggagaagaagagcaggaggaggaggagggccccaccgcgagcagcaagagcaaccacggccagcaccagcgcctgggagtgggacgacagcgagggttcttcgccgacctgaacgccagcgcggggggtgacgatga

SEQ ID NO: 32760 - DNA, 421 bp, Zea mays
  Clone ID: MRT4577_129891C.1
ggggccaaaagggggccgccccttccaacaaaacagggggattcccgggttccccccgggggggggggggcccaaaagcaaaccccaaaaacaccccggggggctgggaaacgggcccttaaaaaccggggggcccccaaacaaaaaaaccgggtagggcgccccaaaaaaaacttttaagggcccaaaccggggaaggacccttttgccgggcccgaaaaaagaaaaaaccccagattcccccccttttttcaaggccgagccaacccaacccgatgtttccccccgggggaaccccgccctgggggggggggggcggtaacccccatggccgggggcccgaagaccccttcctccctttccggggggccccccctttggggcccccccccggggccggggactggccaagcaaaaagac

SEQ ID NO: 32761 - DNA, 663 bp, Zea mays
  Clone ID: MRT4577_129892C.1
cattgggtacctcgaggccggccgggatgtaaacctcactccactccagcactgaacacttgattgattcagtaggtagctagctagctgaatcacaatggatcctaccaagttccgtccgtccagtagccacgacacgacggtgacgacgacgaacgctggcgctcctgtgtggaacgacaacgaggcgctgactgtggggcctcgcggtcccatcctgctggaggactaccacctgatcgagaagggggcgcacttcccgcgggagcgcatccccgaacgcgtggtggacccccgcggggcctccccccagggcttcttccaggggccccccacctgaccgccctgacgtggggccaatttctgggcgcggcccggggggggaccccccggaaccggggcttctccaccggggtccaccaacggggggcccccgagaacattcccgaaccccgcggggtcccccgggaggtctaccccccccaaggcaactgggaactggtggggaacaacttcccccgcttcttcattcgcgaagggatcaagttcccccacgtggtccacgcggtccagccccacccgcggtcgcacgtggaggagtactggcgcgtggtccaattcctggcgcacctccccgagaggctggacaccttcttcttcctc

SEQ ID NO: 32762 - DNA, 640 bp, Zea mays
  Clone ID: MRT4577_129893C.1
aaacagtgaggtcaagataagagaggaaagaactcattgtttacatgatcaggaaatggaatgcctaagctgtccagtttcagggcttctctttcttggcagggaagcatgagatgccatagctctctgctctcttcaaccctctgccaaaggagagttgccctgtaacaggactcagcttatggttcacgattgtagagacagattcaagcttacactgcagcttagtgttgtaccggtggtgcaaggtttgaatgcttcatatttttacgggctttattgcatgtttgttcaagcagccgaaagaaattagttgattttcttttcccatgccttactttgtggtttgctatttcctgaatgtgtctaggcaccggatccttttggttttctgtttttttttattaaaaaaagtttactgcaactttgctaagaagaatttgactgtacggaggaaggatggccaccaccagctcagtcctattgtcatctattttggctatcctctgggtttttgttggtataaaattggtctgctcaatcacgtacatggttcagtttttcagtaatatcatgattcagtgtcaagatttaacacggttacctaatagttgccaatcaatcatcatggtcactaatc

SEQ ID NO: 32763 - DNA, 356 bp, Zea mays
  Clone ID: MRT4577_129894C.1
gccaggtggcttcccacgcgttcgcgcacgcttgcgaggggctatcaatccctgtgggggcaacgactctcccctttacattgcagagcgtaccagaatcgtgtctcagagatcttccactagctcatccatccaagacagaggagggatgtgcgaaactgttttgcgccagaaatcaccctgtacctcaaccagaattgtttgtggcgctcacctgccgctcccggcgattcatccttgtcgtcaactcttccacgctgagcctttggacgcaagactggccaggacagaaagccatgtgccaccttgggccctgtgcacgcgagccaaagacgaggaaaggcacgggaaactct

SEQ ID NO: 32764 - DNA, 288 bp, Zea mays
  Clone ID: MRT4577_129895C.1
tgcagcacccgcacgagcaacatcgttcagcagacgagataccccaagcagcatgcacgagtgatcgtgcatcgatgtgcctgtgcatagcatgtctcaggatggcataaggttcgctggctggcctgtacgatagcttgtgttctcgctgcctgctcattcttaccggaggacgggagacagaccgatcatggtgtcagcgtcaccatggttggtccaaagtccccggattggattggatctcagtatacatgagacatgtatgagaagccgcctactgcctttttt

SEQ ID NO: 32765 - DNA, 389 bp, Zea mays
  Clone ID: MRT4577_129896C.1
atctggtttaatcttacggcctcctacgggagggctgagtaccgggactatcttgcgagtgcgtcgcagttcacaacaaattggtaccggagccactacgcgcgcatcgccaccatggccggcgcgcacgacgatcttgtgacctactccgccaagatggacctcatcctcgagcaacttgccgacatcaatgcccgtttggattcccatgacgctcgtctggccaagctagaccaggcgtgggtcagcccctttgcttctaccgcgggctgcctgggcgcgagcgagggcggcctgggcgcgggcagaggcggccgaatcgaggacgatgggggcaatgggctgcaacccaacacacccaaggaggtggaggcggcgttctacgttga

SEQ ID NO: 32766 - DNA, 565 bp, Zea mays
  unsure (1)..(565): unsure at all n locations
  Clone ID: MRT4577_129897C.1
ccgggtcgacnccacgccgnntccgcaaggggtgctcaaccttaagaattggtggtcattttgtagtctgttgcttggctgaaggggtcganntatccgtgcatcctnntggtggtngnngtatgatnnctacacannttttatcaaggggcaccagggnnagtattcnntgttgnngaaaatcntnnctcgtcggaagagggataatnnactcgagccttcgcannnacttctctttannttgagaagggggcgaaggcataaagagggggtttcttcttttttgcgttctccacctggagtatttgtagtatgccggacccacagtttgtcagccccgatgccttgagtaagcaagaaattggtcccttgcnctacttgctatctnnnctgatgactngcgatnngggtcttgggatgttgtgcccttgattgccactcataaacccattctgacgaagccattgtgacactcaccccaagacttggtgtatttggaaccggcgcccatggggaagatgtttgagtttccaccaagttttgcagcttggcacccgaggcgaat

SEQ ID NO: 32767 - DNA, 339 bp, Zea mays
  Clone ID: MRT4577_129898C.1
tttcttttttggcccacccatttccgtcgtgggtgtgatatcaatgtgatggcgtatcagttttgttgcgcgacccacgggaaagcaatggtgaaaaaaatgttctaggtgttgttgcagtacccagcgtttgtagggactgttactgatttgccttgcatatatatacatggctgggatggccgcggcgatggacgggttgtggcatataattgatctcgttttcttaatgttttcatttgatttggtcaaggcttcaagctctttagcaaagcaacttttacctggaatatatgggaagcacatgccgacactatcacgtcatgtaatccagactct

SEQ ID NO: 32768 - DNA, 265 bp, Zea mays
  Clone ID: MRT4577_129899C.1
attagcatatatgtccattggatttgagtaagagtagtttatctagcgatttgaaacgttggttttgatggtgtgttaaatttgggtgtactttgtttggtagttttagtataggttatgtgtgggtgggtgatttagttggatgagttttgtaaagtttaaactggttgattatatagtggtatagatgagaatgcaaaaataatataaaaaaaaaaaaaataaaaaaaaaagaaaaaaataaatataaaatatatttaaatgg

SEQ ID NO: 32769 - DNA, 3595 bp, Zea mays
  Clone ID: MRT4577_12989C.1
aattgggcacgaggcgcagcaccgcatcactccgcctcgtcccccacttctcgcacttccgcttcagcttccaccgtgcccaagagtcacgaggcggcggcgggtcacgccgacgtactctcaggtgctgcggtgggactgcccctgctgctgccgcgggggcggcggaggggaggatggccgcggcgacggcggcggacatggtgtgggtgagggtgcttgaggatggcgtgttccggttcgacgcgtcggaggcggcgcgcgccgccgcggggcccagcctctcgttcgcggacccgcggcggcgggaggcgccgcatgacggggcggacatgcccgccgttgtcccggtatgcgaggtcgcggcggggggatcccagaaggtcgtgataaagcttcctcctgggacatctttctatggtactggagaagcgagtggcccacttgaacggactgggaaacgagttttcacatggaatacagatgcatggggttttggaccaggaaccacttcgttgtaccagtcacacccttgggttttggctgtcctccctgatggaaaagcattgggtgtccttgctgataccactcggcgttgtgagattgatttgcgacaagaatcaactataaagttctctgccttatctgcctaccctgtcatcacttttgggccatttaatactccagctgatgttatgacatctttgtcgcatgcaattggtactgtgtccatgccgccaaaatggtcacttggctatcatcaatgtcgttggagctatgattcttctgagaaagtactcaaggttgttaggacatttagggagaaagacattccttgtgatgttgtctggatggatattgactatatggatggttttaggtgcttcacgtttgatagtatccgattccctgatactatatcaatggtagatgatctccattccattggttgcaaagcaatctggatgcttgacccagggatcaagaaggaggagggttactttgtttatgatagtggctcaaaaagcgatgtttggattcaaaaggcagatggcagtccattcgttggggaggtgtggcctggtgattgtgttttccctgactatacatctgaaaaaacacgagcttggtgggctagtttggtaaaggacttcatctctattggtgttgatggaatatggaatgatatgaatgaacctgctgttttcaaaactaccacgaagacaatgcctgaaagcaatattcataggggagatgctgatattggtggtgttcaaaatcattcatactatcacaatgtctacggaatgctaatggcaagatctacttataaaggaatggaaatgggcaatgcagctaaacgaccatttgttcttacacgagctggttttattggaagtcagcgttatgctgcaacatggactggtgataatctttcaaattgggagcatctgcacatgagtctaccaatggttcttcagttgggtctcagtggtcaaccattgtcaggtcctgatattggtggttttgctggaaatgctactccaaaactttttggaagatggatgggtgtgggtgcattgtttccattttcacgtggccatacagaaactggaagcattgaccacgaaccatggtcctttggtaaagagtgtgaggaagtctgtcgccttgcgctactaagacggtaccggctactggccacatatctacactcttttttaccactcacatacaaagggtattccagttgctactccagttttctttgctgatacacaagaccctgaactgaggaaagttgagacttcctttctccttggaccactcttagtctgtgcaagcactttacctaataaaggagctcatgaatatgcacataagttaccgaagggcatatggttgtcttttgattttgcggatgcacaccctgatctgccggtgctgtatctacaaggtggatcaattcttcctgtaggtcttcctattaagcatgttggtgaagcaagtttggaggatgacctgtcactaattatcgcattgaatgaaaatggtaaagctgaaggtgttctctttgaagatgcgggagatggatatgcattcacacagggagactatcttttgacatattatattgctgaactccactcatcagtggttactgtcaaaatcttaaaatctgaagggtcatggaagagaccaaaacgaaatctgaaaataaatatattgcttggtggaggtgctatgataagtacagatggtgttgatggtgaagtaatacaccttacaatgccttctgaatctgaagtgtcaagcttagttgcaaccagcgaatttgagcacaagaaacgaatggagatgattcagcctatacctgatatagaggagccatcggggcaggaaggtgctgagctatcaaaaatacctgttgatttgaaaagtggagactggttccttaagattgtaccatggattggaggccgtattatctcgatggcccacattccttctgattcccagtggcttcacagcagaattgagataaatggttatgaagaatacagtggggctgaatataggtctgctggttgcacagaagagtacaaagtcatcaggaggcaccttgaacaatctggagaggaggaatctatttgtatggaaggagacattggtggtggtctggttctccagcgccagatatccattttgaaggacaacccaaagattgttcagatcgactccagcattcaggcaagaagtgtaggagctggttctggtgggttttcaaggttggtctgtttacgagttcatcctacattcaccctgctgcacccaactgaggtagtagttgctttcacggccatcaatggttcaaagcaagagatctccccggaggcaggagaaataacattcgagggagacctcaaacccaacggagaatggatgctagtggacaagtgtgtcgggctgagcttggtgaaccggtttaatcccagggaggttagcaaatgctttgtgcactggggaactggtgatgtgaacatggagctctggtcagaggaaagaccggtgtctaatgagacgccgttgaggatttgccaccagtatgaggtgcagcaaacaacctaaacacctgcccgaagagcagaaataaaaataccaatttggaggatacttcagttgcttgcacttgttttacggtctctgtattgacggtcgcgcaccataacttccatggtattttggagtcgtgtcgttagtcattaccctcttggaggactttgggtctgctgaaaacatggttactcagcaatatctgctactgttcacgactgacattcaaagggttactcagcaatatatggataaaatttgtgttaaagataagttgtgtcgtgtgggttgagttatgtgtgttgtgttgtgctgtaccttcttctatctattaatggaaagatacgtagatctcctgcgtgttcgagaaaaaaaaaaaaaaaaaaaaaaaaaaaaaaaaaaaaaaaaaaaaaaaaaaaaaaaaaaaaaaaaaaaaaaaaaaaaaaaaaaaaaaaaaaaaaaaaaaaaaaaaaaagggggg

SEQ ID NO: 32770 - DNA, 429 bp, Zea mays
  unsure (1)..(429): unsure at all n locations
  Clone ID: MRT4577_1298C.1
gcgttcggnaagnccttgctggntgaacacatgatggactttgccttcccgtacctgttgcagttcattcgtgaatacactagcaaggtggatgatttagtgaaggacaagattgagtcgcagaaggaagaaagagccaaagagagcagctgtgcatacatgttctgctganccacatgggctgtgtgctccttgtctttgggtctgtcttgctggggcgtccgggttttcccttctgtccggcggcctgcctgccgcctggggcgctctctttcgcggcgctttgggcgccgcgtttgtgctggttgcgcccgtgttggccgttgctcttgtctgcgccctgccccccgctcctttcgttttcttccgttcctttctgggcgcgttcgtcggcttgtcccgtcgggttctgtnctgggggctcccttt

SEQ ID NO: 32771 - DNA, 272 bp, Zea mays
  Clone ID: MRT4577_129900C.1
gcattaccatattcacgaccgcccagacatagtcattcaccaggagtaaggaggaacttttatagatatacaagagggaagagaacgtctacataaacaagctggctgagcagtaccaaaggcatgaagagaacgtggcgatattgagaaggaggctaacactgaacatgtggaatatgctactgttgcggaccgaaacctttaggtggtctcatacaaaaatgcgagtggcactggctgagcttgacggggcaacgcgtcttgtattgaac

SEQ ID NO: 32772 - DNA, 739 bp, Zea mays
  unsure (1)..(739): unsure at all n locations
  Clone ID: MRT4577_129901C.1
gacgcctgcaggttccggtccggaattcccgggtcgacccacgcgtccggcgagagttccaggacagttcaagatgttccacccccagcctggacccagagcggcacgagagactccgggagaagatgaggcgcagaatggactctggtgacaagtggttctccctggagttcttcccccctccaggtttgaccggatggcagcagggggccccctcttcgtagatgttacctggcacccagctggagaccctggctcagacaaggagacctcctccatgatgatcgccagcacagcagtaaactactgcggcttggaaaccatcctgcatatgacctgctgccagcagcgcccggaggagatcacaggccatctgcacagagccaagcagctgggcctgaagaacataatggcgctgaggggaaggtgtggcgccagcacccctcctctttgggttcttgctttcctgaaggcttctcctgtccccagacaagtcctttactttccttgggctctgcactaagcacatccagggccagcttgctgcaggaggatcagtgatcaatcgctgtggcaaccctgcagaccctgtaggtgaccactgngaagcagaggaaggaggcttcagctatgccacagacctggtgaagcacatccggaccgagtttgctgactattttgacatctgtgtggcaggtaagtgaggacagagaagggtcaggatgagaggatagccagc

SEQ ID NO: 32773 - DNA, 225 bp, Zea mays
  Clone ID: MRT4577_129902C.1
gaagtgcgtgttatggacatgactctcgaactttataacgtgaatcatgactagccgtcgtgcgagcaacagtagcatcaatagcacctgcttgatcgccgtttacaacaactcaaattgatactatgcatactatcataatgacaataggcaactatcgtcaacatagcattccaaccacgatatctagcatgatgctgaatgaccaagattgctgatcgatga

SEQ ID NO: 32774 - DNA, 877 bp, Zea mays
  unsure (1)..(877): unsure at all n locations
  Clone ID: MRT4577_129903C.1
gggtacctcgaggccggccgggccgggaattcgcaaacaatcgtcctccgccacccaccctccattaaccctagcggcagcagcgctcgtttgatccccgcggcggtccggcgtccgggtaggggagcgaggatgacggagtccctggtgcggaacaagccggggatggccagcatcaaggagatgccggtgctgcaggacgggccgccgccgggcggtttcgcgcccgtgcgctacgcgcgccggattcccacctcgggccccagcgccactgccatcctcctcacggccttcggcgccttcgcgtatggcatgtaccaggtcggtcaggggaacaaggtgcgccggtaagtgcgcgctcagccagctcattcagttgcccgcctattacgctgcgcatctcattttttggcagaggcagcttgctttaaattggtttatgttatagtatgactcgtacgcagatgcacgtatcatgttctgatcaacgtttcctaatcacggaatacaaactactgatagcttcctaatttcaaaggaaccagatccttgtaatttaactgtctgtctggtagacaagagacgggtaatctcagtccaattaatgtttgttcttatggatactatggtgtctgaaaaatgtggtttagtggacaatacatcgttttaatgttacaatgcagcttattggttaggaatatggattgtaattatgccgcaatgcatttctatttgaagagngagagatactgggctgagccaatgaaacaatggcatttcggatcactttagctaaagacagaaaaaacactgatatgagcagagggacttatgaattatgataactccgtttgaagatgtgagagattggaattga

SEQ ID NO: 32775 - DNA, 289 bp, Zea mays
  Clone ID: MRT4577_129904C.1
ctcacacgttcgatcacacttccgtcaactcaaacatacaaagatcactggggaagcgtaagctgcactctacacttcacacaacaacaagaacaacacactacatcacatttctgtctcctccattcctatgtgtttatatataacaatcaagtacagatgtattgaatatgtccaaaaacagtacggtaatacacctaccaatgattgaaaaattaattaacagaccgagatttttaaattcatagaaaaggacccttctttttaaataccatacctatagaaaaca

SEQ ID NO: 32776 - DNA, 417 bp, Zea mays
  unsure (1)..(417): unsure at all n locations
  Clone ID: MRT4577_129905C.1
ccgggcaagctgctgctgaagctgatgttgtgttcaccagcaccgcatctgaaacttcattgttcgcaaaagaacacgcagaggcactcccccctgtccctgtttgtcgacatatctgtccccaggaatgtcagcgcatgtgtgtctgaagttggcgctgcacgagtgtacaatgtcgacgacttgaaagaggtggtggaagcgctcaaggaggaccggctcatgaaagncttggnggcgctgaccttcatctccgattatctgttgcggttcgtggcttggtgggactcgctggtgtccgttccgnccttcnngttgctgtggtccttcgcggtctggttctgggcctcggtgctctccttgtgcctgctttttgtttgtgtggccccccttcccctttttttttttgtttgcctt

SEQ ID NO: 32777 - DNA, 286 bp, Zea mays
  unsure (1)..(286): unsure at all n locations
  Clone ID: MRT4577_129906C.1
gaaancccggcgcgagccacgcatccgttctaccttctccttacaagcctgttttccaccacctcctttaaccctatcggggcgctctttcataccgacattccctatcactatccacattctacgtaaaaaaaccatctttccaccttctcccaccccctccggacccatatatgccaccgtcatttgtcttgctattgcttgacccacatctgcatgcattcggcatttctcgtgcgtacatctctcgtgtaccgtttacctcttttccctcaccccgttcatc

SEQ ID NO: 32778 - DNA, 388 bp, Zea mays
  unsure (1)..(388): unsure at all n locations
  Clone ID: MRT4577_129907C.1
ccactcctacgccctcccacgaccacctatgcctccagcttctaaactgacaaatccacggggacagtcataaaatactttttagcctaactacaaaaanccanatcaactactaacacatactttacaaaatcaacacctaccattccatcatcatcctaaacaatgtacctacctttgtgaccaaaagtcaaaaaaaacatgcaattcaaattcctgctacctacaaattataccattatatcctctttcggcgaacttatatcaatgatttgcaagttaagtcatcaccaccgccacctccacctcaaacatcttccctacacaataaccctaccataaaccagacacattattctcaaccatcatcaacatatcaaaattttcc

SEQ ID NO: 32779 - DNA, 463 bp, Zea mays
  unsure (1)..(463): unsure at all n locations
  Clone ID: MRT4577_129908C.1
agaaaagaatcagagtaaggtaagtaggtaaagatttgccatttctatctaggtttcgtcctacactcaacatttcctctgataccacttctgtcacacccgggattaaaaggacaaagccggggtgcatctcatacantgcgccaaagaagacaacatatataataacagagtgtatagagctaaatgtcacaataatatcagagtacttattacatnagcggaagttttacaaaaataaaagataaatataaaatgaactaaggatcatccttgttgccataaagtcaactgggagacgccacctagatcgaatcgaactcctcgatgtatggctcctcttgaaccacatgttcttctccttatcaagttggaaagtaaggctgtttccgctctccaaagagatgagtagtccgccgctacatttctgataagatccctccaaccagtttgcctgatcttc

SEQ ID NO: 32780 - DNA, 907 bp, Zea mays
  unsure (1)..(907): unsure at all n locations
  Clone ID: MRT4577_129909C.1
cccccccctcgagtttttttttttttttttttttttttttttttttttttttataataacagagtgtatagagctaaatgtcacaataatatcagagtacttattacatagcggaagttttacaaaaataaaagataaatataaaatgaactaaggatcatccttgttgccataaagtcaactgggagacgccacctagatcgaatcgaactcctcgatgtatggctcctcttgaaccacatgttcttctcctgagacatgagattccaggtaccaggataatcttcaggtgacttgtaacctcgcttatcaagttggaaagtaaggctgtttccgctctccaaagagatgagtagtccgccgctacatttctgataagatccctccaaccagtttgcctgatcttcttgatgaggaacttgtggagcttcttgcatgatccacacaaggccctccaccgttgacatgaggatgacgccctggagcagcaacatcgcgaggagcgctaggacgacgacgtgagttccatggtcacgatctccagcaacagcgggcagaaccagcaacgatgggtgatgagggcgtgatgaggcctgcggtgagaggaggaagggagagggagttacagccgcgggagggtggcacgagcggcgacgaacatggacggagtgaagttacgaagaggccgtgactatctggtggcaatgggtccggcaacaactacgacgccatggtgagcaacggatgcggtaaacacgacgacgctatctgccagagaaggtgtcgagcggaggatggttctggatggggacgcagcgccccacgccagaatcatcggcggcggcggcggcacctcatttaaggtcgtgctaggaccctctatcatttttgtggggcccggnccgaa

SEQ ID NO: 32781 - DNA, 685 bp, Zea mays
  Clone ID: MRT4577_12990C.1
atcatataaaaaacccggtgcctgggcgtgctgccgcgtgcaggacgaagctgaagcagacggaggtggactgcgagcacctgaagcgctgctgcgagaagctgacgggggagaaccggcggctgcacaaggagctagccgagctccgcgcgctgaaggcggtgcgccccttgttgcacatgcacctcccggccaccaccctctccatgtgcccctcctgcgagcgcgtcgcctccaccagctccgtggcccccgccgcgccggcgccagcgtcgccctcacctgctgctggcattgcggcgtcggccccggacccggagcagaggccctcgtcgttcgcggctctattctcgtcctccccccgcaaccgcgcgctggccgcccaggcgcaacggcaaccgcgaccgcaggcgccaggcggctcgtgaggccctctctgctttacctccggcggcgcgaatggaggaggatatggctgtaaatacgatcaaccttttcttcttcttccttgtttttttttcatttcatgcggttcttgggttttttggactgccgatggatccgagggtgtagcgcatcgtctggccgtgtcggattggactgtggacggccacagggtgcagaaagactcaaaggtgctgcaatagagttcattcgtttacctgagtagcgtcgatcatgtgcc

SEQ ID NO: 32782 - DNA, 430 bp, Zea mays
  Clone ID: MRT4577_129910C.1
gaccctcgaggctggccgggagaaaacacctatccaatccccatcgggctgggcggcagaagcatgttggtcgtggagggagccgccgccggggactccggctagccgatgttgatccctagggagcgggccgtggggatggctgggtccaccatgaggtctgtcacggcctcgcctggcgggattggaccggtggccggatcaccagcgcgggagctccatgtgaagcgtcctgttcgcgtggacagcctattcggccccctcatctccgcagtgcggtcacgagtcatctgaagattatcctggtacctggaatctcaagtcccaggtcaagagcaggtaccacaggatgaggagcatggaggatgctgcgatgagttcgtgagagagatctaggccgtcgtctctcagtcaactttgggttgctgga

SEQ ID NO: 32783 - DNA, 295 bp, Zea mays
  Clone ID: MRT4577_129911C.1
ggagttctgccaagagaaaaaacgccttattggatggaactgccagacatagcttgagctcataggaatcgtaaaatgccagaagctcatacataattcaaaactcaaaagacacaaatagcccttcccccctgacttggtaggtcctacagatctactcacggatatcacccgggggcacgggatttgagctcttatatagacgatgacagcatctacctacacatcttgaagtctgtttgcacatgcaactcatttatgcacaagatcttcgtctgatccataagccttattt

SEQ ID NO: 32784 - DNA, 517 bp, Zea mays
  Clone ID: MRT4577_129912C.1
ctcctctcgacctcagtctctctctctccctcctctgccctgcaggctgcagatgcagtgcgcgtctggtacaaccgctgctctccctccgtcacccggccttcctgtccgggccaaatctcttgcgtccagcaccgccagaaacctccaccggggatcatctacctagcttctccatgctccgcatggccgcggtgtagctgaaagctaggctagtatcctccttcccgttcccggttcgcgcgcggccgtgtgttccgccggccaagaaacaggcagcagagagcgtgttcccggccggagaggagcatccatgggggagaagcaggctccggacgcgacggccgtggccgcggcgggcgcgggggaccaagacgacggcaccgcgccgccgccgccgccgccgctggacggaatccagtactgcagcgagcacccgtaccggcctgccaacgccggcgccgcggaggcggtcgccggcggcgggatatgcgccttctgcctgcaggagaagctc

SEQ ID NO: 32785 - DNA, 245 bp, Zea mays
  unsure (1)..(245): unsure at all n locations
  Clone ID: MRT4577_129913C.1
ccacgcgcccgnggacgacggggggctagagcaaaacccnggcaaagaggagcggcgacagaaaaaccaattgagtgtcagtgcaagtaagatgtaggggcaaaacagaggagaataccttgccgcgcaaggcgatagatacacaaaaacaaaaaagagcacctacaccgggtgggagccggggaagaattaaagagagggagatcccaaatgaggggcttgaactcgggaacaagaacgacaag

SEQ ID NO: 32786 - DNA, 258 bp, Zea mays
  unsure (1)..(258): unsure at all n locations
  Clone ID: MRT4577_129914C.1
taccggtccggcttcccgggcctaaaatcatgagctgaacttttgtggtcatccgcagttcttgaaccccaccggattaacagttatcggttcacagcaagacgccgttaggctctgcggttacaaaaacaacagttgataagttggtgtctcaatcctgtccgaatgaatagaaaaatgttgtaaaaattacctgtcgtttctacctgtacaagaaatggaaagtgcagtttttaagaaaaaaagagggtgnaaggg

SEQ ID NO: 32787 - DNA, 365 bp, Zea mays
  Clone ID: MRT4577_129915C.1
aaggaaaatgcacccatgggccaaaatgaaaggggcgtttcggggaaaccgctttcttggaaaaaaaaaacgaccgcttggacccaaaactcaaccaaaccgccaaaagggcatggccggacctccctctcctttttttttaaacacacaaccaaaccccagggccacctgcccggggggggtttttttccaaccgtaggccccctcgcacggggaaacatgcaaggatcgacaaaaattcgtcggcagctaaatatgggaaaaacgggccaaccccgggccccccaccaacggggggataaatatggatcgtattaaaggggccccccgcacccgggggggatgtttagggttcatttaaccct

SEQ ID NO: 32788 - DNA, 647 bp, Zea mays
  unsure (1)..(647): unsure at all n locations
  Clone ID: MRT4577_129916C.1
cccagcgtccgcccagcgtccggcctatgtcttcagctacacagaatgccatttgcatattaaaaaagtgggttatgctgtacagacacatgggtgcatgagctatagctttgaagcagggagatgcactgctttctgccgacagcattgtttgagagaacccacagatttgttgcattggtcaccagattcttttgtgccatacaacaggaaaacagctccaatacgtgaaaaggatatgctaggaaactcattaagctcctcaacatatagtcttctcgtcagaaaccattagtttattcaattttatttacaatcttattagcagcttaaatgtcagattagaatttgttcaaaacgtatttgcacatcatttacttggtggtggaaatagtctcttacttttttgttatacaacaaattttcttccctactttaggcaaaatgtaaatgccttctgctggtgtacagattctccaggttcccagtctattggaggaaggttcttcggttgttaagaggaacactctgactctgaaacaaaagcaggagaatgcaaaccgaagtggaggatgctgtcagtaggtcggccagttcttgttgcaagccactcgaggtatcatatatntaagtccttgtaagttgta

SEQ ID NO: 32789 - DNA, 362 bp, Zea mays
  Clone ID: MRT4577_129917C.1
ccccgacttctaccctgtctgctcgcccagccaactctcgggcttctagactgagacggggggggcgtccgacagcgacagcagctctcctcatcgtcctaagcagtccaagtacttgctgaaaaacagactcaacctgcggcggttcgactactacacccttagcacgtactaccagactgccaagcggtacttgcctgactaccccgcgggagacgagcgccacctgctgttcgactacagcaacttttactcgtccaagacgttcttcgaccccatgaagctgacgatgtttctctggggctgggtcaacaagtccgacatcagcgcctacatcgtagccaaagggtgggctgggatcc

SEQ ID NO: 32790 - DNA, 372 bp, Zea mays
  Clone ID: MRT4577_129918C.1
atgaagagtctaatggtgcaggcgtattttagagtgaacaataccaaccaggtcaaaagctcattttaaataatttggatgagaaatataaaaatccgcctattgtgtaccactaacaccgaaactatctaaatctaaactaattttatccttttacatttgctccaccctctggcatttttatcacgatcataaattttgttcaggattgtacaacacgctgggagtaaatccgtcgtgcatttgaagcaatgaatgggtttttcccctcttcaatgtgcttgtttggcaaatcacggatgctccaatctatttactgcctatccaataacatgtaattagcacagatggactggaagccatttgtttcct

SEQ ID NO: 32791 - DNA, 305 bp, Zea mays
  Clone ID: MRT4577_129919C.1
cgcctgcaggtaccggtccggaattaattcccgggtcgacgagctcactagtcggcggccgccctttttttttttttttcttcttccttttactgttttgggttgtacttggtcttctttagacctttttctctcttaatataatgatgcgcagttctcctgcgtattcgagaaactatgggtgcaacttggtttatttgatattttgtcagtcacctactgtgtggactctggtacttgatgccttggtggcagattaaaccaggaaaggggaaccccactcaaagaagcttttttaaagatct

SEQ ID NO: 32792 - DNA, 380 bp, Zea mays
  Clone ID: MRT4577_12991C.1
cctcgaagccggccgcatgagcagtacacagcagcaagggtctttattggcaccaggagctggacgtgacgatggtataccatggtcatctccttcactgatgagtacttctcaaataaatgctcaacgtacgacgtgcctctacttcagctcatgattaacacacgatcatcaactccccgccagctccctagcacgatcaccagatccgacaatgacggataacagatactggcgcctccttctccgttgctgaacatcatcggtcaccttcacctcacgatggacctatcgcacgtctccgtacgtgacctcctcgccaatgatggtgtgtgaacaaaccctgatgctgctccgactcgtgggtgttatcaccctcg

SEQ ID NO: 32793 - DNA, 414 bp, Zea mays
  Clone ID: MRT4577_129920C.1
ctgtttcagagggtttcccattttaacctggcgaacaccctactaagcaaaccaccggagcggaggcccttgggcggacggaaccatgggggacgatgattacaacaaaattgacatgcggtatgaggatgaccccacggaaccggagatagaagaaggagctgaggaaaagcctgacaacaacgaagatgcccctaatgacgtcataagtggtgaggttgaacataatgaacaggaaaagaccaagcatcaacgcaaaacagcaaaccacattaccaagtacgaacgtgcgcgcatactgaggtcacgagccttcgcgataagcatgaaggctccagtaccggctgaacttgaaggagaaacagagcttatggagagtgtaatgaaggagctgacagcgcccatgatactctt

SEQ ID NO: 32794 - DNA, 225 bp, Zea mays
  Clone ID: MRT4577_129921C.1
accagacgccgtcagcgacgaccttggcgccgtcatggttgcggtgccacgagtagtaggcgtgcgtccggttcaccaacaggtactggatgcccaccgacgacgacacaaactgacgatcaccgccgcagagggaacaaattactgatagatcagcgtagcacgttcctgagctagccccgccccctttatgttctccaattcagtaatgcaatgcgtttttat

SEQ ID NO: 32795 - DNA, 254 bp, Zea mays
  Clone ID: MRT4577_129922C.1
attgcaggtgtccacctggtccgccgtgttcttcttccagcctggatgaattagaatttgctgtatcctgggatggcgatggactgcaagaggactaagtggagcatgggaagatatttcttggcgtttctagactgttttgaggattgatcagctgcttgctgctttcaggcatcttgctgcctgaatgcctctgagttcctctgacattggtaagtatagagcaacatggtccttgaaattctggttggcgt

SEQ ID NO: 32796 - DNA, 322 bp, Zea mays
  Clone ID: MRT4577_129923C.1
gtaaactataaaaggatgcttccgaccgcgcggccggtgatttcagacgagtgggtcaatctactccagatcgcacaaaaagccgataaaaaccctgaggataataatccttccgctgactataatgcctataactccaagcgccagatgaagccatacgaccagaagctgctgctcgcatccacttcctcccgcatgaactaccgccagaagaacgtgtagaagaatgccatcaacagcgtggtgacgtacatgatctacatcttgaacgtgctgaagcaggtgcacacctacatccgcatatccatgaaggccatgtcca

SEQ ID NO: 32797 - DNA, 234 bp, Zea mays
  Clone ID: MRT4577_129924C.1
ggctcgacccgtttggacaggtggccccccgctggcggctttgtgccttgaagcttccgatccaaaaaaaacaaggtgagttggaacccgagacatgtctgaccagcatggcccgtaaaaaagtttgccccggccggcttaaaaattccgtgctcgtactttagccgtgcacttgtgcgttcatgaccgtacgtaccggtacgtggaagccgtgccttctctatatttcttggt

SEQ ID NO: 32798 - DNA, 510 bp, Zea mays
  unsure (1)..(510): unsure at all n locations
  Clone ID: MRT4577_129925C.1
gggggggcgggtttcctnccccagaacggctgcgattttgaacgcgtacatccccgggcacgacaccaagggggcctcgcacagtcggggcagtaactcccgcctactgccttctcgacgacactccatgatcactccgagcggggtcctcacaacacccacaaacttgcaaggcactccccaaagcgccgattatacgcctggctagtcccgggcacagagcaactcaggaacctcacttctttctttacgtcaccccagtagttcgtcacgacgttggaaggtaccacaaggaccgtaccgacaggaagtaagtggtaccgtatattagggaagggtcaagattgggaagtgttcagtgttctcgctcgttcgtgagggtactagtactttggtgtcggggattaaaacattagaactgacgctacccaatacgcctacccgcgttccaacgacagtggtccttgcagtccttccgtttcctttttacgagcagcccctaagggtaag

SEQ ID NO: 32799 - DNA, 402 bp, Zea mays
  Clone ID: MRT4577_129926C.1
ctggcaaacccacataaaaaaaagagagagaagaaaaacagagggcaaaaattgaaaacagggggggactgacggagccccggatctaaaaccagaggggggagtagataccccaaggctatacaccaccactcgacccctcgcgccggccccggcgccggggcgaaatcctgcccgcccccgcgaagcgcgggtggggaggacagttttgtcgggggcgtccgccccctctcgggaggcctccggggctgccccggttggggggggggaggacccggaggcggggggggccacaatggaggcggcggttgtgcgggtaaacatctcctgggggaggaaaaccttggaaacggaaaaaacggcgacggggttttggtcaaacacggcccctgggaagggggc

SEQ ID NO: 32800 - DNA, 279 bp, Zea mays
  Clone ID: MRT4577_129927C.1
atcccgaaggctaggcgttgaaacccttaactctattacacctcgaatcagcactaggagggagagtgttagttgactcaggaggcatctgacgtaatgaaacttaacttctagaccctgatggtcaccaactctatgatcaaggctagatcccatacctcaatagattacgttattaggctcactcaaactattgcatgtcagagtacctacacagaataccatcccatgctcatatactatgggtaaattctgatggatgataccacttagcaaagc

SEQ ID NO: 32801 - DNA, 393 bp, Zea mays
  Clone ID: MRT4577_129928C.1
aaaagggacaacaaaattaggggcacaaattcccaaaaaacgggggcatattctattacaagaagaccccaacaaactaaaattataaaaaaaaaaagaaggctggcagctacgggattaaaggtgcctgcctaggctgctaatgaaaatgactacaaaaacaatggaacggaaacactggaaaaaaccaaattctgggctaaaactaaaaactggcctaaaaacttaacactaaaaaaacggggtacatgctaagggtccaacctacggggggccaactttaaactgaaccaaagcacggaaaaaaaagggccaaaaacagggctgccctttgacccatggattccgggcaaacacccaaaaaaaaaatggagcccaaagcctgaataaaac

SEQ ID NO: 32802 - DNA, 2416 bp, Zea mays
  Clone ID: MRT4577_129929C.1
gataccatcgatccgcgccggggtctccgctgcagcttccactgcccacgcggcggcaaatcgcggccggttggctggcgatcgccgcctcctacccctcgccagcggcccgctccagaagcaatggcgctggaccttgccatcgggggctcggcggcccgcagggccgagacccaaaccctagcgcccgtgttgctcatgggcccgccgcctccaccgccgatcccgccgatgacggggttgtacttcgcggggcctccgaccccaggggcgctcctgccgctcccgatccccgtggcgctcccgcacgaggtcatcatgtacatggacgaatgtcggagccgctccctcctcaagttcatttccaacgcggggattgagccttcgctagaggacgagcggaggagggagcgggtagtacgcgagctcggcaagatagtaatggattgggcaaggagggtggcctacgagcagggcaaacagcactggatcacatcagccaccgtgttaaccttcggctcttatgcgttgggggcgtatggacctgaattcgatattgatgtcctctgtattggcccttatattgcatcactgcaacaccatttttttgttgtcctgcgacaaatgctcgaagggaggccagaagtatcagaattgcattcaattgaaggagctaaggttccattgatgcgttttaaattcaatgggattttagttgactttccttatgttcaactcccagtgatcaatgctgcagaggctatgcatgcatttgatccccatgttctagaaaatgtggatgggccaagttggagatgtctatctggagtccgtgctaatagacaaatcattcaattagttcccaatatgaagaaatttcaatatttgttgcggtgcctcaaactatgggcaagaaaaagaggacttcattgccatctacttggcttcttcgctggaattcatttggctatccttgctgcatatgtttgccgcagacatccgaatgctagtataaatactctgttgtctttgttcttcgacatttttgttcactggccttggcctcttccagtgagtttgcttgatccgcctgttccttgtcggggtcctgatgggtgctccctcatgcccataatgttgccatgtattccaccagaattttgctcctctagtacaacagaaagtactttcagcaaaatcaaagaagaactttggcgtggctatgctctaagcaaggataccagaagtactgattttaactggagttggctctttgcaccttttccatatggtgcaagatacaaatgctttctccgcatagttctctctgctccgatgggagaagaattgcgtgactgggttggatgggtgaaatcacgattccgcaaccttcttctcaagctggagagtcttggtgtttactgtgaccctgatccctcagaacaagttgatcataccatcactgatccaaatgttgtattcttctggggtctcatctatagaaggaatattcaaatatgtataagttctctcaaagaagatttcatgaaaagtgtctgcaataacatctatggaaaggaaaaatgtgcccattcagacatcacaatgtccattgttgggcctccccagctgccaaaaagtgtctttgatctctcagtttactctgaaaagctgccacaacatatgatggggcaccaactaatgaagcagaactacaatgcagtcagttaggctcagctgtcatattgcgtgcgagcttcatatgtcaatatcacaacagcaagaagctgctgttgaagtcgttttcaacatcagatttgaatttttttttactgccctttttagatgtaggggcttgttcatgcctcgggaacaaggaatatgggagattttttccttgtgaagctggatgtcgatagctggatctcttcaagcatccagcaaaatgagatggaagcatctcttgaagcattcaagcgacttattcctgttatgaggtgtgtgtgcaggtacatgcatattcatgtacacatcatagcaattggtatacaagtgaggaggaggtacggtatagctgtatgtaaactgtagatgtaatgtttgtactcagcagcagaaatgtgtaaattgcttcctgttagcgctgcttctgggcacagatgctgaggttgatatggaggccatgaatggaagctatatattccaggccagtatgcaaatgcaagtgttttggatcgattcgacccacttttgttttttaggctgtaaaaaaactgtgtcctagaatccaaggattcttatggtaatgagtatgactttgtggaagaaaaacgtttactcatgcgaagcttttgatgtaattgtggtgaatattcaaaaaaaaaaaaaaaaaaaaaaaaaaaaaaaaaaaaaaaaa

SEQ ID NO: 32803 - DNA, 618 bp, Zea mays
  Clone ID: MRT4577_12992C.1
cccctcggaatattcctttttttttttttttttttttttttaggcgattctttcttttacttgtacacaaaacacactgagggatgaccatggaccattgctttcattaccgatatacctgaagaaaaccactactgttacagattgatttacaaaggcttcaccacggcggggccctaatatttactacatgctacaaacaggatgcatgtttttgagcaaagagagccacacacctcacttatctgtttcaatatttactttgggaagagcatgcaatgaagcaattccttgcctcattaagagggttatcatgctgtaaggcagggcaacaactaagacgcaatcatactttatggacaatcatgcaaacaaaaaaactggcctgggccattatgatccaacgatataacacatttaatttttaaacctttacatcccgagctctggagatttagggagaacccataacaagtgccagttatatctacagttggatcgtaacctaacaaaactagagccgtacttaaatgcttaccgataaaatcattgcctattacatgttgctgtgggggaacaggtcgccccccctgtccaactggaacccgtggatcggag

SEQ ID NO: 32804 - DNA, 448 bp, Zea mays
  Clone ID: MRT4577_129930C.1
ttccaggtttcgtccgcttacagagggagggagagagagagagagttagattggagccacacgatgctgagatggaggtacgggagcatatcattatggctctgacgacggagcaccgcgacggacactatcgtacctcttgactgaaatcgcaacccttatcgagacaaagactgtgctcgacaccgtaaagccatgccgttattcatacactatatctagtttgcatctggcatgaggtcctctttaattgaaacacttgatccatgtatccataaatctgggctatcttagctagtatctaatgaaaatgatatgaagaatcctgacatattcacagcccatgattagtacaatcatctatcaaatcttacttctgataccgtcttgcatgcattggctaaagatgatcttaaagacgaaaggatcatacattcattaattactg

SEQ ID NO: 32805 - DNA, 394 bp, Zea mays
  Clone ID: MRT4577_129931C.1
gagctttgaactggaaccgattcaaccgccatgggtcgcatatgctgttattgctatgtctatactcattctacgcaacagagttgccacaactgcggacatggaatctgcgataactgcgagcatgacggtcaagacagtcttcgtgtttcctctgctaggggaaacaatgaattggagactcgactgattgcgtacggcaaggacgacaaaacagccatgcctccaagtgctctgtttctgcaagaggagaaagcctacaccctgccaattccagctggcataacggaggaggataatatactgcagaaaagctatatccatccatttgtttgatcggaagaaacggccgcatttagtatgctgcccatgtgaggagagcctggcctaaact

SEQ ID NO: 32806 - DNA, 1855 bp, Zea mays
  Clone ID: MRT4577_129932C.1
ccgggataatcctctttcgttgctcgccagcctgcatcctgagacactcccaaattcccaatgttccaccgcgccagctcgcgactttgatcccgttccagcctccgttccgttcgggtcctgctggtccattacccttgtaactaaaaccccaaatctgtctcaagtccgagcaatttcaaagcgtgaagctctgctcacgtcgtcgcctccgcgtccgccacccactcaacaacgcggcggcgaatcgcgggcggttcgccgccgaccgccgccgcctttccctcgccagccccccgctcctgaagcaatggtactggaccacgccatcaggggctcggcggcccgcagggctgagacccaaaccctagcgccagtgctgctcatgggcccgccgcctccaccgccgatcccaccgacgacggggatgtacctcccggggcccccaccccccgggacgctcctgccgcacccgatgcacatggcgctcccgcgtgaggtcatcatttacatggacgagtgtcggagccgctccctcctcaagttcatttccgacgcggggattgtgccttcgctagaggacgagcggaggagggagcgggtagtacgcgagctcggcaagatagtaatggattgggcaaagagggtggcctacgagcagggcaaccggcactggatcgcttcagccacggtgttgaccttcggttcctatgccctgggggcgtatggacctgaatctgatattgatgtcctctgtattggtccttgtattgcatcgctgcaacaccatttttttgttgtcctgcgacaaatgctcgaagggaggccagaagtatcagaattgcattcaattgaaggagctaaggttccattgatgcgttttaaattcaatgggattttagttgactttccttatgttcaactcccagtgatcaatgctgcagaggctatgcatgcatttgatccccatgttctagagaatgtggatgggccaagttggagatgtctatctggagtccgtgctaatagacaaatcattcaattagttcccaatatgaagaaatttcaatatctgttgcggtgcctcaaactatgggcaagaaaaagaggacttcattgccatctacttggcttcttcgctggaattcatttggctatccttgctgcatatgtttgccgcagacatccgaatgctagtataaatactctgttgtctttgttcttcgacatttttgttcactggccttggcctcttccagataccaggagtactgattttaactggagttggctctttgcaccttttccatatggtgcaagatacaaatgctttctccgcatagttctctctgctccgatgggagaagaattgcgtgactgggttggatgggtgaaatcacgattccgcaaccttcttctcaaggtcatttcatcttttctttgggcatgcatgcttttcttttccacatttctgggttgtgttgatgttgatgttgatcttgaactctccaatgatgttctgcagctggagagtcttggtgtttactgtgaccctgatccctcagaacaagttgatcataccatcactgatccaaatgttgtattcttctggggtctcatctatagaaggaatattcaaatatgtataagttctctcaaagaagatttcatgaaaagtgtctgcaataacatctatggaaaggaaaaatgtgcccattcagacatcacaatgtccattgttgggcctccccagctgccaaaaagtgtctttgatctctcagtttactctgaaaagctgccacaacatatgatggggcaccaactaatgaagcagaactacaatgcagtcagttag

SEQ ID NO: 32807 - DNA, 376 bp, Zea mays
  Clone ID: MRT4577_129933C.1
gataaccgatcagacgacaacccttagtagtggactacactgagctcatacaggaacagcactagctagctaggcgcacatgacaggagcattactcttttcgacatcaggcgcacctaacaccatggagatttacaggatgatgacgtatatacatactccgctcacgcgtatgatatcagaaccgttaccataaactatctgttaaccaggtaatgtggccgggcatcctgcgtgctacgatcctcattcaccgcactcgctgctggtgatggtaattgcctacctgcatccttgggctgagcacttctccttatggccagtccgattagatcttggcgtcatcaaactgatcaccacccactgggacacagtg

SEQ ID NO: 32808 - DNA, 336 bp, Zea mays
  Clone ID: MRT4577_129934C.1
ccacgcgtccggttagctgacaatggtatctcatttcttactgtgcgagtgagggggaggtacggtatagctgtatgtaaactgtagatgtaatgtttgtactcagcagcagaaatgtgtaaattgcttcctgttagcgctgcttctgggcacagatgctgaggttgatatggaggccatgaatggaagctatatattccaggccagtatgcaaatgcaagtgttttggatcgattcgacccacttttgttttttaggctgtaaaaaaactgtgtcctagaatccaaggattcttatggtaatgagtatgactttgtggaagaaaaacgtttactc

SEQ ID NO: 32809 - DNA, 517 bp, Zea mays
  Clone ID: MRT4577_129935C.1
ttgttcacgcgtccgcggacgcgtgggtgcagaaatttcaatatctgctgcggtgcctcaaactatgggcaagaaaaagaggacttcattgccatctacttggcttcttcgctggaattcatttggctatccttgctgcatatgtttgccgcagacatccgaatgctagtataaatactctgctgtctttgttcttcgacatttttgttcactggccttggcctcttccagcgagtttgcttgatccgcctgttccttgtcggggtcctgatgggtgctctctcatgcccataatgttgccatgtattccaccagaattttgctcctctagtacaacagaaagtactttcagcaaaattaaagaagaactttggcgtggctatgctctaagcaaggataccagaagtactgatattactggagttggctctctgcaccttttgcatatggtgcgtgatacacatgctttctccgcatagttctctctgctccgatgggagaagaattgcgtgactgg

SEQ ID NO: 32810 - DNA, 135 bp, Zea mays
  unsure (1)..(135): unsure at all n locations
  Clone ID: MRT4577_129936C.1
gtggtcgttgagcagtganancaggctcgcgtacgtgagctcgttgtgcgcgtctagcgaatttcctacgaatctttcatgcttaataaaggcgcgagatgcttcaatcgagatccttcagaaaagctggtacgc

SEQ ID NO: 32811 - DNA, 361 bp, Zea mays
  Clone ID: MRT4577_129937C.1
tctttccaagacaaggctaggcactgtgctccatgtgtacagtatggcgatgagcccgactccattgctgctcagaggggacgcattgttgctgacgccggtggcgcttgtgatgggccagctatccagctgcttactgagattgatggcttgaatgccaagaagacagcgtgattcttctgtgcgactaacaaaccgacacatgatccacccatgcttgcatgggcctgtgcgttttgaccagcacatatatattcctctgccctaccatgcttccaggctgcatatcttgaaaggcatgatcaaagagattgctcagtacaaagatgaatgacttgaatgctctacccaaatacacccc

SEQ ID NO: 32812 - DNA, 281 bp, Zea mays
  Clone ID: MRT4577_129938C.1
gttgataggggcggaaaattcccacacgtaagaataacaccagtgggattaaaaacccagggcgagattgagccacacggttgggggcaccacataaggggaaacgggttacaaacaggcagactactgacacagggacaagagcatgtggaacaagaaaggacttcttgaaacagggatttataacgcttgctatttatagaaaaaccgtatcttaataaaagggcaccatttttttgggacactggcctttgactctaacgggggaactttttaagatg

SEQ ID NO: 32813 - DNA, 469 bp, Zea mays
  Clone ID: MRT4577_129939C.1
cccacgcctccgccctagcccgaaggctaggacacgaagggagcacctgaggggacacctggatggagttatatgatccgtcacatcaatgaaacttctcacatgaaatagcacaagttggttgaggaatcactcgacggaataatcatcctcataggcttccatactggcttctcttctgctaggacattggacatgaaagtgtacatgaataaagcactgcatacagcactgactacttatcttaacacctatactcactctgtgactccttgcattctaactgtaattcaaaagagattggtagacatgttctatgacatattgtatgacccaacgcatatacccacctacaagcttgcattcaaccttgcataccaccacaaattccaggacgagatccaggaggtcaatctggaagcctttttgatagcattcactatcactcagactgttaccaaacctgtta

SEQ ID NO: 32814 - DNA, 690 bp, Zea mays
  Clone ID: MRT4577_12993C.1
acctcaacggttgatcaagtattttttctcttttggaattctttgtaactacagacttagaatgaacctctcgaattctttttacgataatacagttgaatccattttgatcacgcacttcgtagtcgatggctctccatgccatgttgtgtttggcgatgacggcgcctagcattaagaagaggacaagcgtgtcgaggccactaccgacccgggcggggagacgctccagagggcaaaggagaacgacgaccacccatagcctagccatagcctcataagcgcccaagaacgggcaccctagccgttttcgcctcctagaggcagcatcaccgacggcgagttgatgtagatgttcgtcctttgttgcagagaggaggttctagatccttctacccaacctttagttagatagctccatccacttgatgagcaggcactggagtagactccttcaaataccacttcttctaggtgttcttccttggttacggtgcgcgcgaaagattggccggggacgattcaagttggtcgggcgacggtggagctgtccacggctccagtctagagcggcgcaaccccgttctagccatggtgtagtggcaactggatgggtatggtcaccacggcacagggaaaataacactcagctctagagcagctcaactatgtggtataggagagggttac

SEQ ID NO: 32815 - DNA, 485 bp, Zea mays
  Clone ID: MRT4577_129940C.1
gagccggcgtccgtcctgcatcctcctgcactggagggggaccctcacttgttgattcctctccctgtaccctttgacgcgtgggggtggtggatagcccccatcatggggggggtgcagatgctctcggtgatctacaccgtccggatgatgatgctgagggcgcattgcttgcgcctgcaccggagggggatcgcccatcctggacacggtcgtgaacctctgccacgacctggacgagcccgtgctatggtccatgctgatagactccaaccgagatcaaaccaccattgggtcgacctagaccgtcggctctgaagaacagtgtcaacaacgcgactgcctgcacatacgtccatatttatgcacgtgggatcggtatgtgaaccatagagcagagcagcggacgttctgatccctgataaaaagacaatggactcgaacgttgcatacggacacgagcgtccgagaggatgactattcta

SEQ ID NO: 32816 - DNA, 256 bp, Zea mays
  Clone ID: MRT4577_129941C.1
agagggtcattcatctggaacagcagcacctggttggaaaattttttaggagtttgtaaacccactaccaataaatgcacataagcttttttttctttgaattcatgacctttagaaaggttaagcaaatgtttaaatacttactcttgatatccaaggcataatattgtttgatgatgcttgacagaggaagaactatattctaatactgactttatatatcataataaatcaacttgtatcaactttctagttt

SEQ ID NO: 32817 - DNA, 510 bp, Zea mays
  Clone ID: MRT4577_129942C.1
cctcgaagccggccgggacaataccccactcaattactagctcagacctcttcctccaggtccaggctccagctagctgcaagctcatccgtctctgtcgatcagcaagaggccggggtcagaggaatggcggcgacgtcgcggctggcgctggccctcctagctaggccgccttggtaggcggcgtggcagctgccggcggcgtcgatggcggccaactacacggacgggcgacgagaaggggaggaacccgcacgcgcactacacagcgggggcgaagaaccacaaagccgtctacaaagcagaatgactcatctccgagcacaaaacacctcagtcgacacgtggcgcacccgcaacatccaggcgacgacaactgcgacaaaaccaaaacgatgagcaggtacagcaagacaaacacctacgacgcgccaaccaacgaccgcgacgaggagtagacgataccgcgagtacatgtagtgaaactaccagatccacaacgacgtgaca

SEQ ID NO: 32818 - DNA, 2175 bp, Zea mays
  Clone ID: MRT4577_129943C.1
cccaataaaaataaagaaaagttggcacagtgcaactccaagacagcccttgctttcagagttcgggatgagtgctttcagccacacattgacgatagaagtggaattaatatgattcacaatgttgcatataattgtggttctgatttcagtcgtttagacttcagtggtttctatgcatttatcctggaacggggtgatgaagtaatagctgcagcatctgtaaggattcatggaactgatttagcagaaatgccattcataggcacaagaggcatgtataggcaccaagggatgtgtcgtcgactactgaatggaattgaatcggccctcggttccctcagtgttcagaaactagtagtatctgctgtgactgaaatggagaatacttggacaactggttttggttttaagcctgttgcaccttccaagaaacaaagaatgaagtcgttaaatctcttgattatgaatgggaccggtctactagagaagaggttgctgccaacacaaacagttgatggacagatcactaccaagacagctaatgctgttggatctgataagatggatgctaaaatgcttggtgaagcaagtggatctgtgacacccattcatgtttctagtgaacccgatgcctctgacaatcatgaaattaatcgccatgagagtcctcatcctttaggaaactctgcaggcttgacattggaccagtctcctgctgcagacgaaaatgaagcgaaaataactacagaaaggacacccccagtatctataggtgatgctaagacagtcaaggtgaatacacttcctggagctacttgtggagttaacttgcagtgcatggttgaagcagagaacattcaacaagagaaatacaaagaaaccaatgggagattgattgctgaaaatactatttcagagcagaagtgtgaagatagatctaattccagtcgttcaaattcatgtgctactccggtgactgtggatcaatgttctcatttatctaatgagattgggaaaggtgacaactgtttatctagtgaactttctgttggagctgctcccataacaggcaaaactgaatctagtttgacatctgttcattgcgctaaccaagaggatgagaaagcttacgcagcccctgtggacactaaaatacctttagtcattatggatgaaaagcctgataagcatgagtttaaaactatggttgtagggtgtagtcaaggctcaatggaacctaaaagtttggaaaatagaactagtattgtaaatggaacctcaatggacgcctatagagataaaagtactaatgaagatcacagtgcttctgcagttgacactggagtatctgtgaagctatatgctcagcaaatggagacgattgaggaaaaaactggctcagttttaccagattctgggcactcttctagttgcaaagatgtgttggtgaccttgactgagtcaaagccacttaaaaatgacatgcttgaaacggatgatgcaattattaaggtaggaatgactggtcagagtttcaatgaagcaggaataacagctcctgcgctcaacatttcagatcctgttggtgaaaatgtggttaagcctactcaaacttgtggggagggtcaacttcgtggagaggatgtcatatacagtaataacgtcatggaagatgacctaacttctagagcatgctgatgtatgatcattgtattttctgctagaaaaggccctgatcattggtataaaggagaggtcgttgggctggcgactcgcatggatgaatttttactgtgtgcgaggcacttctgggagcgcggggaccgtccgcgggaaggcatgacacagttggctcttaagctttcctgacttttggttcttctacattgaggctgttgaccatggagccttttttttttgagtagtagaagtatgcaaattgaaccatggaagttctatacgacccacaatccgggtcaacattttgttgtagatatacatgtctggtagttttctgttgtcctcctggtcgacccgaactccttattaagagctgatacttggtacccatggtatgcatgtgaaattctgctccatgtacagagagtagaaaagaaaatgaaagccgtgctagctgttataagcaaaaaaaaaaaaaaaaaaaaaaaaata

SEQ ID NO: 32819 - DNA, 852 bp, Zea mays
  unsure (1)..(852): unsure at all n locations
  Clone ID: MRT4577_129944C.1
cttgaacttatctaataaactatataccntgtttggaactatgcacagtgtagcacgggtagccattcagttgtttccgtgaaagatggaggttgatagtatatgttactttctccatagtctctttgtactgcattctgcgtggtttaccaagagtttatcttgagttaccactgtttgctaaatatgatactatactattttttggtttgctcagaccagttgaaaactgactgaaaaggtccactttgggtccctgtactgttgcgttgttcctatttagacaatatactaaacaacccgttatttttagcttgcacttagtaccatttctaataagtttgccacctgtcccgagggttgaatacataaaaactggttatacttccaaactagctttactgatgtttaattcattttatatgtgataaaaaacagcaacaacatttaaagtgatggaaaattcggtatgctcctgaagatatttaaaagctacattaaggatttttgttgcaccacacttattatttaattttggagtttgtagtaggaatagaataataggaaatcaacatgttcaaaagttttgaatttataatgtgggtaacgtgtgccaattagaattacttgagttaaacatatgctcatgacttcatgagtatccaaggaaagcttactatgttnntggctagtgttttattaaaagaaaaattctgcaagagggcatttttagacctcatttggactggctttgttgggacggtgtttaaatagtcagtgcaagtatcaaaagtgggcttttgcctttaatggtggtagggagtatgctccacagaagcagttcgatgaact

SEQ ID NO: 32820 - DNA, 848 bp, Zea mays
  Clone ID: MRT4577_129945C.1
aaactctctggacatggaccagaatttcacatgcataccatgggtaccaaagtaccagctttaaataagaagtccgggtcaaccaggaggacaacagaaaactaccagacatgtatatctacaacaaaatgttgacccggattgtgggtcgtatagaacttccatggttcaatttgcttacttctactactaaaaaaaggctccatggtcaacagcctcaatgtagaagaaccaaaagtcaggaaagcttaagagccaactgtgccatgccttcccgcggacggtcgccggctcccagaagtgcctcgcacacagtaaaaatccatccatgccagtcgccagcccaacgatctctcctttataccaatgagtgcccactaccagctattcttgatgtccactaaaatagttccttttctaccagaaaatacaatgatcatacatcagcatgctctagaagttaggtcatcttccatgacgttattactgtatatgacatcctctccacgaagttgaccctccccacaagtttgagtaggcttaaccacattttcaccaacaggatctgaaatgttgagcgcaggagctgttattcctgcttcattgaaactctgaccagtcattcctaccttaataattgcatcatccgtttcaagcatgtcatttttaagtggctttgactcagtcaaggtcaccaacacatctttgcaactagaagagtgttccgaatctggtaaaactgagccagttttttcctcaatcgtctccatttgctgagcatatagcttcacagatactccagtgtcaactgcagaagacactgtgatcttcattagtacttttatctc

SEQ ID NO: 32821 - DNA, 1445 bp, Zea mays
  Clone ID: MRT4577_129946C.1
ccggccaaggccaaagctccggcttccgcgtcgctgtggggcgcggtgtcgccgaggcagttgatgcagagggcgtccaacgcgttcaaggctagcagtaggtcccgcagcaagaagggcaaggaggaggccgcggcatcagcgtcgtccggcggcaagggcggcgctggtgcttccgccagggccaaaggccagacgtcgagagcgcagcaccagcagcagcagccggagacgcccgccgagccgtcgcctgccgtgactcccttggaactggaagcggaggagtctgtcctgttggagtccgacgctgcaggccagaatggacaggacgtcgcgacgtcgcaggaggctgccagcactgacatcacgactgtggcggtgaggtgtcaagaggagcaggtcggcgcagggcagccgaaggaaaaagcggaggcggagatgtcggatttgcaagaggagaggccgcagagcagcgaggtcgtggagacagaaacgggggcccatgagcgcacggacgatggctcaccggccgtcgttggagaagcagcagcaacacctgagggagaagatgagcttgcaaccagcgcggcagaagagaagatcgtcgaggagatccagcgagcagaggcgactgagaactcgaaggcgaacgcgaaccctgaggaaccagaccaagaaaccggcgtgatctccgaagaacccaaggagggaacgagcgtggtctctgaagaaccaaaaccaaaggaggcagctgatcctaccactgcgcagaagcgcgaggaggcgttccgacgagccaaaaacggctgccggatcgagcgcgtcagctccaacgacgccactgacagaagcggctaacttcgacggcaacgacgacatggaggcggcgcctaaacaggtgagcgcttcggagcccgtgacgccggtgacagaaggcatcagcaagggcaaggaagtgatggagacgcagcagcagagcgcgtcggcgccgacgacgccggcgtcgaaacaggcggcgatccccgtggactcggcgtcggcgtcggcgctggcgttcagggggcgcagggtgaggacggccatggagaggcggtcggaggaggagcagcccaagcggaaggaggtggcgcggagcaacgacgtgatcgaggaggccaagagcaagctgatggagaagcggaaaagcaaggtgaaggcgctggtgggggcgttcaagaccgtcatggacagcccccgggcgagctgattcgagttttttttttttggagggaagatcggtcgagtctcgactggcgctggcggtggtgtctgtctggtttgaattttggtagggttctctttggatcgttgctttcttgtttgttggtcggtcgttttgcttcttgtgatcactcgaacaaacggagatgtgcgtctcattcctgatttgatcatttaatttcttg

SEQ ID NO: 32822 - DNA, 200 bp, Zea mays
  Clone ID: MRT4577_129947C.1
attgagaccaactagcaacatagtttttcttttttttgtaccaacaatctcatcggaaaggttatgcctccttatgctggccacgtctctctgcacgtgctgctacggctaccatttccccctaatgcaggcaagctcgtatacgttccgtttttaccgcatccacacgatcaccatgtggatcggcgtcataaaacccg

SEQ ID NO: 32823 - DNA, 128 bp, Zea mays
  Clone ID: MRT4577_129948C.1
aacgcaggggggagcattgctggggggctgctactagatattgcacatactgaatgtgtacatatgataccactccaacacctattttaaacgcatacaaactgacatccgagtctcagtctcaccaa

SEQ ID NO: 32824 - DNA, 263 bp, Zea mays
  Clone ID: MRT4577_129949C.1
agctcggaattcttctcgagaccactccccgcccattctttaacaacccacccaacccatggctacggggagcccattttaaatgcacgccggggcacaccaaagctgccgcctccaggcagacgccgactactccctaatgaccctaaccgaggtgaacaactgcccctaccctgagaggcctgacattcaggccaacttccggccacgacatcctgaagggcggcggctaacacgtcccaaagttcactcacaaaaccttc

SEQ ID NO: 32825 - DNA, 165 bp, Zea mays
  Clone ID: MRT4577_12994C.1
gagtcctctagtcggcggccgcccttggatgtgtggtgttttttttttgtgagaagcaccttctacagattctgcgttgtcgagaacgtttttactgtggatgcgagcgacacactgctgttgctgggggggacatacccgcccgtggcgaagcaggccacagac

SEQ ID NO: 32826 - DNA, 233 bp, Zea mays
  Clone ID: MRT4577_129950C.1
atgaaccatctaacattgaggttagcaaagagaaattccagtgcttgagacgtggctgctggttaaatgatgaggttattaatctgtaccttgaattgttgaaggagcgagaaaaaagagaaccaaacaggtttctgaaatgtcatttctttaatacattcttttataagaagcttgcttgtggaaaaaatggttatgattacaaatctgttaaaagatggacctcccaaagg

SEQ ID NO: 32827 - DNA, 675 bp, Zea mays
  Clone ID: MRT4577_129951C.1
ttgggtacctcgaggccggccggggacacaccccactgctgacttttagattccacatcttcaaatcagcccaacatggtcaagaagcgagcgtccaacggccgtaacaagaagggtcgcggccacgtcaagcccatccgttgctccaactgctcgcgatgcactcccaaggacaaggcgatcaagagattcaccatccgcaacatggttgagtccgccgccatccgtgatatctccgatgcctccgtcttccccgagtacactgtccccaagatgtacctgaagctccagtactgcgtctcatgcgctatccacggcaagattgtccgtgtccgctcgcgcgaaggacgccgcaaccgtgctcctcccccacgtgttaggtacaacaaggatggaaagaagatcaaccccaaccaagctgctgctaagactaccactgcttaagcggggcgcgggtatggaaaggaattgatcacggcgcttggtgtgggtcttatggttctttcggagtgtcatactggaaaatgcatgaatccacggaagatagggcaggccaaatgacgaatcatggttgaggcacgctcggaattgcctgcttgagcaccgagagctagctatgaacttgtaaacgaatatccaagtcgacttactaaaaaaaaaaaaaaaaaagcggcc

SEQ ID NO: 32828 - DNA, 155 bp, Zea mays
  Clone ID: MRT4577_129952C.1
tagccgctccttaccttacccgactccctcccctacgcgggccatcttctagtgtgctggatcaacactctccaccgccccgaccccttcctccaccaccgcaccctcgacttgatccacttgctcgcgccgcacacaaatacccgaccgcccca

SEQ ID NO: 32829 - DNA, 897 bp, Zea mays
  Clone ID: MRT4577_129953C.1
atcgtctccggtctccctcttcaacttccccgaaacgaaagcttacttttttatactaacttctagggtttcaggactaacctccctcccttcgcgccatctcccgcggtgctgcctcctctggcgccgattcgccgctgggagccccaattctataacccctctgttcgatctgggatccgctagattcgttggggcggtgatgagggcgatggcggaggtgatgcaggaggggtgcgtggagaatcggcagccactggcggcttcgagctcgtccgtgtcggatggcagcagctgtggcggcggagagcgggcggggacgtcgccgccggtgtcaagctccgggaattccatctccgttctgagacgaacaagtggaccgataagaagaactaagggtggctggacactgaaagaggatgaaacactgcggaaggcagttgaagctttcaagggtagaaattggaaaaaaatagctgaattttttcaggacagaactgaggttcaatgtttgcatcgttggcagaaggttcttaatccggaacttatcaaaggcccttggactcaagaggaagatgaaaaaatcattgaccttgtgcgcaagtatggaccaacaaaatggtctatcatcgcaaaatcattgcctggccgcataggcaagcaatgccgagagaggtggcataatcacctgaatccagaaataaggaaagatgcttggactcctgaggaggaaagggcccttattgatgctcatcaagtgtttgggaataaatgggcagaaatagcaaaagttcttccgggaaggactgataattccataaagaatcattggaacagttctttggaaaagaagtagaaagctatagtaacagcagtgttctttcagttttcaagctg

SEQ ID NO: 32830 - DNA, 394 bp, Zea mays
  Clone ID: MRT4577_129954C.1
gctgagtgaagatggaaaacactatattgttaacggcgagaagaagtggattaccaacggcatctggtctgattatttcactgtcgcggttcgtaccggtggagagggtatgaatggtattagcgtgctgctcattgaacgagagaatggcggtgtcagcactcgtcgtatggactgccagggtgtctggagcagtggtactacttatatcactttcgaggacacgaaggtgcccggtgagaatttgattggaaaggaaaaccagggattcaaggtcatcatgaccaacttcaatcacgaacgtatcggcattgttatccaatctctacgcttctctcgtgtctgctacgaagaatccgtcaaatacgccaacaagcgcccaactttggcaaga

SEQ ID NO: 32831 - DNA, 375 bp, Zea mays
  Clone ID: MRT4577_129955C.1
ggaaaccaacatggaacattccactttttcaggcaagtcgttacatatctatggggctacaaagaactatgtggtgcaatgcagccgctttaaagtggtggcgcccattgaacaccacacaatttaatatgaatgcccctaatacccactaaacaatccgagaggagagacagagagagagaggtatgaaataaagtttaaaccaaaagaggagaacaacacgaagccccctacacaatttaggactgaatctcccccggtagacctggctatacgtcatatttctttggctgatgccatagcactagagagcgtgacaggtaacccagcaacgatctgttacgagggtttgccctctagccgtattgatgcttc

SEQ ID NO: 32832 - DNA, 469 bp, Zea mays
  unsure (1)..(469): unsure at all n locations
  Clone ID: MRT4577_129956C.1
nncgccacgcgtccggccctcgtcatcgcggtcgccggcatttcccttccttcatcatggggcatccgcaactccttttgtcctcaagcacaccgaccccggcgggttgccaacggctcgtttcctcgtatgcatgggtgtcgcgctctccatcacggcgttcccggtgctggcacgcattctcgccgagctcaagctgctcaccaccgacctcgggcgcatggccatgtcagctgccgccgtgaacgacgtcgttgcgtggatacttctggccctggccatcgctttgtcaggcaccggttcccctcctgtctcgttatgggtgctgctagcgggaactggctttgtcctcgcggcgttcttgttgctccgcccgggcctcacctggatggcacggtgatcctctgaaggcgagccagtgaaggagctctacatatgcacgactctggccatcgtgcttgccgccgga

SEQ ID NO: 32833 - DNA, 819 bp, Zea mays
  Clone ID: MRT4577_129957C.1
gaaacgccccagtccccgctcctgtttcgatctcccgaaccccgatcccgctaccggaggcggaggcgatggcggcggcgccggcggtaaggttcccggtcttcgggctcgtgcggctgctgggcttggccgccgcggcggcgatcctcttctgggccgtccacttccgaggcggcatggcgctctccaccgaagaggagagcaagctccccctcttcaacgttcacccagtgttaatgctgattggtttggtggccttgaatggcgaagtgggctgctgggttttggaccttttggtaccccggtggatcaagaagtggccgtgcatttttgcttccctggcatgtcttctttggtatattcatctatgttcttgctatcgccacaagtgtgactggactcctggagaagtcaatctttatgcagagcgccaaaatgattgagcgcttctccacagaagccatgtttatgaactccctgggaatgctgctggtgttgttgagcagccttgttattcttgcactcgttagtcctggacccagcatgatcgacacatacagaggctcttctgagtgagaggaaatgattacagcctagtttcttaagctacatttttaatcagtagctgagcaatttttgtgtacatgtacccagaattatgcttttcttcttttgacagggagttagtcagtgttgaggataatttcatccctggtagagtggcttcattcaagtcgcagtaaaaaaattggggatgagggtgacaatgaaactacagctgagaatatgactgaaacaaacattccctggttaaccagc

SEQ ID NO: 32834 - DNA, 667 bp, Zea mays
  unsure (1)..(667): unsure at all n locations
  Clone ID: MRT4577_129958C.1
attgggtacctcgaggccggccggggnaacgcacccagtccccgctcctgtttcgatctcccgaatcccgatcccgctaccggaggcggaggcgatggcggcggcgccggcggtaaggttcccggtcttcgggctcgtgcggctgctgggcttggccgccgcggcggcgatcctcttctgggccgtccacttccgaggcggcatggcgctctccaccgaagaggagagcaagctccccctcttcaacgttcacccagtgttaatgctgattggtttggtggccatgaatggcgaagctcttttggcttataaaactgtgccaggaaccaagaaactgaaaaagctagtgcaccttgccgtgcagttccttgccatgtttctgagtctaattggtctgtgggctgtatggaagttccatgatgaaagaaaaatcgatcatttatatacacttcactcgtgtgggctgctgggttttggaccttttggtaccccggtggatcaagaagtggccgtgcatttttgcttccctggcatgccttctttggtatattcatctatgttcttgctatcgccacaagtgtgactggactcctggagaagcaatctttatgcagagcgccaaaatgattgagcgcttctccacagaagccatgtttatgaactccct

SEQ ID NO: 32835 - DNA, 654 bp, Zea mays
  unsure (1)..(654): unsure at all n locations
  Clone ID: MRT4577_129959C.1
cctcgaagccggccgggccngggaacttcatcagcagatcgaagctctagatctagatatctatgagaggtctcaaaatgtctactactcctcactgctgccaggaaccaccttgcagtccatacagggcttatgaggcacctagcaagaaccaacaatgagaggtatctcaagcaacctctgaccacttattctccgcagagcagcgagcgaaggcgaaagcttagatattatacacgatcatgcaagagaaccgaaccaaaacggactatgaatgttgcagcccactccgaaatcccacataaggggaatgcgtgcccactaatgcacttcacccttcgaacgcccgaccacataccgcgctaccaaagtcgaaggtgctggtcaatgaagatggaatacgtgataaagcaactgagatcgacttcgtgccacaagcatgcgcaaaggatactggacggcagcagatcagacattgaatggaatgcactaccatatgtacgaaaaagacgtcagatggtgcaaagaaatgctcatggacgcacataaggatcgtctatatattggtgcagacatactgtgcgaaccgcaactcaaagaacgaggtattaacccggatggcctactgcactacataaaccacatcaacttgct

SEQ ID NO: 32836 - DNA, 218 bp, Zea mays
  Clone ID: MRT4577_12995C.1
cgggcgcgcccggacgacgcaaacccgagcgccagaccgccaggcgcggatcagaaggcgcgcaacgggagagagccggccgttaaacgcgaacggagcaccacccacggcacgacgaggggcgcgagggccaagagaacccgagaaccgaaaggcgaagacggagagagctcaagacgagccggagccggccaccgaacacaagcagagcaagcgaa

SEQ ID NO: 32837 - DNA, 1133 bp, Zea mays
  Clone ID: MRT4577_129960C.1
tcggaaaacgtttttatggtagttcgtgttcatgtccgatctgaaatggcttcagcgacttcgcgtgcttgattgaaacgcacccagtccccgctcctgtttcgatctcccgaatcccgatcccgctaccggaggcggaggcgatggcggcggcgccggcggtaaggttcccggtcttcgggctcgtgcggctgctgggcttggccgccgcggcggcgatcctcttctgggccgtccacttccgaggcggcatggcgctctccaccgaagaggagagcaagctccccctcttcaacgttcacccagtgttaatgctgattggtttggtggccttgaatggcgaagctcttttggcttataaaactgtgccaggaaccaagaaactgaaaaagctagtgcaccttgccgtgcagttccttgccatgtttctgagtctaattggtctgtgggctgtatggaagttccatgatgaaagaaaaatcgatcatttatatacacttcactcgtggttgggccttacttgcttcatcttcttcagcttgcagtgggctgctgggttttggaccttttggtaccccggtggatcaagaagtggccgtgcatttttgcttccctggcatgtcttctttggtatattcatctatgttcttgctatcgccacaagtgtgactggactcctggagaagtcaatctttatgcagagcgccaaaatgattgagcgcttctccacagaagccatgtttatgaactccctgggaatgctgctggtgttgttgagcagccttgttattcttgcactcgttagtcctggacccagcatgatcgacacatacagaggctcttctgagtgagaggaaatgattacagcctagtttcttaagctacatttttaatcagtagctgagcaatttttgtgtacatgtacccagaattatgcttttcttcttttgacatggagttagtcagtgttgaggataatttcatccctgttagagtggcttcattcaagtcgcagtaataaaattgtggatgaggctgacaatgaaattacagctgaaaaaaagactgaagtaacaattcctgggagatcagaagttaaccaattcccgaaaaaaaaaaaaaaaaaagcggcc

SEQ ID NO: 32838 - DNA, 389 bp, Zea mays
  Clone ID: MRT4577_129961C.1
aaacacaagggccccccactgaatttcgggttaacttaacatttgttttattctttggttttggcttttttaacattcaaaggaacatttttttcagcgctccagttcctggggaatacataaatttctttttttacaaaaagggttttccggaaaccttttttacagtttaactaaatgctccttttttaaaactcacttggataggaaaaatttttttttccaattctttaaataaaggcaaaggggaaggcaaagggccctttttcaaaatattgcaggttttttaaaacccttggccttaacttaccatagtgcaaaattaccggtgtaaaattagccctattaaggggtttaataacaggtgggaaccccttcaggttttttaa

SEQ ID NO: 32839 - DNA, 327 bp, Zea mays
  Clone ID: MRT4577_129962C.1
cccacgcgtccgcggacgcgtgggtaggagcttagccatgtgtatagatgtatttatctcttcatttccttcttaaagtttagcaagtcgggctcattatattgattagcgaataagtgctttcgttaccatggaccaataatcttcgaaacggcctgagttagactgcacacacatttatttatcagaaaagtttctagtcacactgcgcagtatcgatgttaaaaaaaaagaaaaaaaaaaaaaagaaaaaataaaaaaaaaaaaaaaaaaaaaagggggaaaacacaaaaggagagaaaacataagtgggggttcgtccaaaag

SEQ ID NO: 32840 - DNA, 427 bp, Zea mays
  Clone ID: MRT4577_129963C.1
gccatgggtccatggcccagcaatttattttctgaatttaccttcaccttgtgcttgtggcctttttgcaggtatgttgcaccggagtacgccatgacaggacacttgcttgtaaaaagtgatgtatatagctatggagttgttctacttgaactactaactgggaggaggcccgttgatatgtcacagccctctgggcaggaaaacctagtgacttgggtaacacttctttcttttaggagtatactatcttcagttcctgtgtgattttacagctaaattggaatattttaacgtgatgactctcagacactctggattgtgtgtgcatacgttgtttttatgtatgtgtgggcagctgacaactggaatttaaatctgaaattgctcgtatatatatatatatatatatatatatatatatata

SEQ ID NO: 32841 - DNA, 799 bp, Zea mays
  unsure (1)..(799): unsure at all n locations
  Clone ID: MRT4577_129964C.1
ccggggnatcctgccccacatcggcgcgtcctccccagcccgcccgagactcggatcccgccgctcccccgtctctcctcaccttccttccccccctccctgctcggtgctcgcacacgccggcgcggcttgcccccacgctatgctcccaccaccactcgctgatcgcctcacgcacacgcaccaacccaccggccgacgaggggcaaccgccgcaacacaaatccacacgcccgccgccgccgtgtaggactcgaccccgacgacgacgagggcacggcggcactcctgacacttgaaccgcgacaaagaaggatacacggacggaagatctgcggcgcgcgggctgctgccagcggatcgtcggcggcggcgggcggcgagagtttgaaggaccagagatgttttgaccgtgcccaaaagtttggctatggaagatgtctagaagaatctgatatgagattcacatcaaacaagctgatgagcaagtctactgtatcttaggatgattctggatgttcaggtctatcgcactacatgctacacaagtcaattttgtaggctgctctgaaatattcatgtgtagatacaactggttgtctaggccaatttcttgcacttggtgcaaaggtgtatgcagctgaagcctgtgaaattgttgtcctggcgaggtgttctagtcgaggtacttttaccacgtccatacgctgaagcagaaggaggacgccagggtgaagctcgtgcagcgtgtgattgcgcaggaggaggaggaggacttgaactgggagggcgatgacga

SEQ ID NO: 32842 - DNA, 412 bp, Zea mays
  Clone ID: MRT4577_129965C.1
ggggcaagaacacgaaagctttattgactggggggacccgggggcaacgcaacgacacgttgggggaggcacgacggccggaggcagaaaacattagccaaaaacaaggacccggaccgggggacgtagctagctagcaagcaaattaaggaaccagggggccccagccccacaccacaccagggaggggcactaaaaaactgggacccgccaaaaaagggacgggaactggactggactggaccatttccagggggggctccatttaatttttgaggagggaatccccaagggcggggaacgtcttggggggggcctccttgaagacccccgggtaaggcacctgggcgttggccttggcaaactccatggcccaattgacgaaggggccgccctcgccctccgccttggg

SEQ ID NO: 32843 - DNA, 434 bp, Zea mays
  Clone ID: MRT4577_129966C.1
ccggccgggaactccggcgaccctacaaagcgagacaggagaaggcgtgccgagaggtggcggcaccgaacgtggagcgctgggcagaaaggcgaaccgagaacactaggcaggcagaggcgactagccgcagccgcgagtcgacagcagcgatcggacgccggcgagaggcagacgcaagctgtcaagagcgtcgtcggagtcgagcggcacaggaaggactgcaacggcgacaatctggcgcaacaagcttcaccgtacctacgacacgcctgccatcgtcgagcctctggaggctgggaccgtcgcgccaagcggaccctacaccacacgccgcagtgaacgcgccgtatacgacgacgacgccaacttggcagccgatcacaaggttatgacgagacctacgcggaaccacggagctgtgcaagcaccat

SEQ ID NO: 32844 - DNA, 415 bp, Zea mays
  unsure (1)..(415): unsure at all n locations
  Clone ID: MRT4577_129967C.1
acccactcgtccgcttggggaaggggtggttntaggagtcatacactgcatggcagtggcaatggtagcaagagcagatgttatcgcagtagtcgcttggctaagttagttgattatctccatagcttgaatgaaaacactgatgagttagatgtccatctcattcttttgtctttagacaaacaaattacaccaagcttgcagcagccacacctttgctgtcggccaacattgtctgtgaagcatctttgtgaatatgttgctcatcagacacctttgctggttgaagaagttgagatattggcaattaaaggaagctgcagtacagtttgtgacaagtcatttgatgagacttcattctctgatgagctaactacgcttggtatagatcctagccaagatgaactggaaactc

SEQ ID NO: 32845 - DNA, 209 bp, Zea mays
  Clone ID: MRT4577_129968C.1
acgaagctcggaattcggctcgaggtctgaagccactggttggacaccccaggagatgcccacagagggggggtgttaagagatttttagggaggtccccccacaccaggaacgtagggctagacactatgttcttaagccaacggaacaggacccaagggctggtataaagccagccgaaatagcaatggaagctggttcgcctaagg

SEQ ID NO: 32846 - DNA, 633 bp, Zea mays
  Clone ID: MRT4577_129969C.1
ctaacatgcaagttagcttggctagcgagagttgctagccaaatttagctagtgagagagttaatttagagagttggatagattagcaagttaaatgactagtctgttggagagttgttatgctattaagtagctaaaatttagctttgcaagctatttagctagtcacttggagatgctcttagttgctatttaaaatatgtaaaactcatactcttgaaattaagaataagggtctccatagatgaggaagttgctcaaaaaactacactcactctgtcctgagatataagaaattcagttttgtatgaagtcaaactataatatattaatatagagaagaggaaaaataggtagagcttcaaattagcttaactatatacattatggaatatattcttacagtagatttctttgatatgatatgtgctaatattcttttttttttgtaaatttgatcaaagttactatgatttgactcgagattgggttccttttatttcaagatgcaggtattattgatttacttcagatttgtgccgatgggttaggatttactactcctattccaaagttatcttggctttttttagtttatagctttgctatgcatttagatatctaagtgcatag

SEQ ID NO: 32847 - DNA, 292 bp, Zea mays
  Clone ID: MRT4577_12996C.1
ggaaaaaaacttttttttttttatttaaaatggtcattaagggaattgtttaaactgaaactgccacccatggggatgcgggacaaatttttacttaattatcgccgttaaaagacttaaatagcttgctagccagcggtttttctaaaacaaattttttttttaaggggggaaaccccccgcaacaacttaagggcatggaattggttttttaaagccaaaaattgcccgaagttgttgtgcttttttggccgcaaaaaaccccggaaactgggcctttttagggtttttt

SEQ ID NO: 32848 - DNA, 1037 bp, Zea mays
  Clone ID: MRT4577_129970C.1
aaagtttctagtctagaaaaggagcgtcagcatcttcaatctactgtcaaagctcttcaagaagaaaagaagctattgaggaacattcccgtgaatgagaaggcaacaactactgtagagaaaccttgggttgataaaagagacgcatcaactgcgacagaagatttagatattggggaaaacagctcttcagaaacgctaaccagcactgttgacacatgggaagatgctggaatatctgttttgcgttccaacattatgtctgatttttcttccttagaagaggtctcatctagcattccagatgatcagcttagaatgattgacaacatcaattctttgatgtcagagttagtagtggagagagaagcgctgctgcgagcactgagaattgagtcatccaactgctccaagctgaaggagttgaataaggacctaacacaaaagctggagattcagacacagaggcttgaactattgacttctcaaaggatggctaacgagaatgccctggcaaaaccaattgacacacgctccatcaatgatgcaacaatgtatgcagatgaaggagatgaggttgttgaacgggtgcttggctggataatgaagctcttcccaggagggccaaagcggcgaaccagcaaacttctgtaatgaaaatagagctcctagtataccagatgtttctttcatttaaggcttgtttaggtgaaaggggttgttctaggagcactaccaagtgtttagttcaaatttgaactaaatgttgaggaatttgttccaaatccccagcatccgaacatgcctttatatatatatatatttttttttctttgcccggttttgctgatagcatggtgagaagctgtatattggagccattcaatgtaaccattatttatttttgacagaagataatgtaatttcctggagtatggtgcgggcggcagcctgttttggcaaggaaaagaatagtcgcaaagaatagacccttttgtatccaaaaaaaaaaaaaaaaaaaaaaaaaaggggcggcc

SEQ ID NO: 32849 - DNA, 2403 bp, Zea mays
  Clone ID: MRT4577_129971C.1
ttgggtacctcgaggccgaatccccgttcaccgcaccccactcttcgcggcgcgttgcaggaacttcccgtattccccacgcgtccgagcgcacagcgtcacggcgctcaggccgtggcttcccacccacagccttcgcacttccctccttcctcgcaaatggccgtcgccgtccccaacgctcccggccgcctcttccttctccaatccaccccgttcccgaaccctagcagctcggcatccgccgctcgagcccaatccttccgcgtaccacccctccgcctctcgctattccgacgcatggctgggcgctcgctgacggtgatcgcaggcgcctccggcggctccgaacgagatctcagcgcctccgcagtctccgtggaggccctggactccgtcgcctccgattctgacttagagacgaaggagcccagtgtgtcgacgatgctgacgagcttcgagaactcgttcgacaagtatggggctctgagcacaccgctgtaccagaccgccacctttaagcagccttcagctacagattatggaacttatgattacactagaagtggtaaccctactcgtgatgttctccagagcctcatggctaagcttgagaaagcagatcaagcattctgcttcaccagcgggatggcggcgttagctgcagtaacacacctccttcaggctggacaagaaatagttgctggtgaggacatatatggtggttctgatcgtctactctcgcaagttgtgccaagaaatggaatagttgtaaaacgagtagatacaacgaaaattagtgatgtggtgtctgcaattggaccctccactagactggtttggctcgaaagtcccacgaaccctcgtcagcaaattactgacattaagacaatctcagagatagcgcattctcatggtgctcttgttttggttgacaacagcatcatgtctccagtgctctcccgtcctatagaactgggagctgatatcgtgatgcactcggctaccaaatttatagcgggacatagtgatcttatggctggaattcttgcagtgaagggtgagagtttggctaaagaggtagggtttctgcaaaatgctgaagggtcgggtctggcaccttttgactgctggctttgcttgaggggaatcaaaaccatggctctgcgggtggagaaacaacaggctaatgcccagaagattgctgaattcctggcgtctcacccgagggtcaagcaagtaaactacgctgggcttcctgaccatcctgggcgagctttacactattcccaggcaaagggagcgggctctgttctcagttttctcaccggctcactggccctctcaaagcacgtcgtggagaccaccaagtacttcagcgtaacagtcagcttcgggagcgtgaagtccctcatcagcctgccgtgcttcatgtcccacgcatcaatccctgcctcggtccgcgaggagcgtggcctaaccgacgacctcgtccggatatcggtcggcatcgaggatgtcgaggacctcatcgccgatctggaccgcgcgctcagaactggcccggtgtagacatcgccgatccttaggtcatgtcaagctatcttttgatgattcattggttgactgcttgcgtgatgataataatgggaatgttgcttggatacgccgctggctgatgagggacttcacgcgcccgaagctgactgttacgctgaagtacttggtggtctccacgacgtgctttgagagggccagtgagccggtgagaaaactgagaacagagcccgctccctttgcctgggaatagtgtaaagctcgcccaggatggtcaggaagcccagcgtagtttacttgcttgaccctcgggtgagacgccaggaattcagcaatcttctgggcattagcctgttgtttctccacccgcagagccatggttttgattcccctcaagcaaagccagcagtcaaaaggtgccagacccgacccttcagcattttgcagaaaccctacctctttagccaaactctcacccttcactgcaagaattccagccataagatcactatgtcccgctataaatttggtagccgagtgcatcacgatatcagctcccagttctataggacgggagagcactggagacatgatgctgttgtcaaccaaaacaagagcaccatgagaatgcgctatctctgagattgtctctcgtgccagtaatttgctgacgagggttcgtgggactttcgagccaaaccagtctagtggagggtccaattgcagacaccacatcactaattttcgttgtatctactcgttttacaactattccatttcttggcacaacttgctggtgaggacatatatggtggttctgatcgtctactctcgcggacgcgtggg

SEQ ID NO: 32850 - DNA, 372 bp, Zea mays
  Clone ID: MRT4577_129972C.1
attcggctcgaggttcaataaaaaaaatgttgaaatactctagaaaccaccaagcattgccattgttgattcattgcaaacaaaaatacaggtgtatgtactcgtaaaacgtagcattgtgtttgtgtatccttatgctgcttacttatgagcaaggcttcagcctgcgcctgcgaatgcgatcagagttatgtacagaattatggtgacagtaacgcttcctcttaaggaattatggttagatccatatttcttttgctcgagattgtaaaacaatatcacaaatgtgattattcagtccttatcattgtttcaaaaaaaaaaaaaaaaagggcggcccccgattaaagagcttggccacccgggatattt

SEQ ID NO: 32851 - DNA, 377 bp, Zea mays
  unsure (1)..(377): unsure at all n locations
  Clone ID: MRT4577_129973C.1
cccacgcgtccgcccacgcgtccggcgagtttgggtgcttacctgttgaataaaaatgtgttgaccatgtcatttgcaccacgggataatcatgaggcacaagtacagtttgcattggagagaggtgtccctgcatatattggtgtcctcggatcaataaagctgccctgactgcctgcctgccttgggacaggctgggatgtgtcatgtgtgagtgtgacttcgtgtaaaagaactattggacgctgtcagtgtcgccgtgagctctgtggacggtagtagtacatgtgtctaatgtacaagtagagtgagattgtatctatatatgtattttttccctnnnnnnnnnnnnnnnnnnnnnnnnnnnnnnnnnnnnn

SEQ ID NO: 32852 - DNA, 434 bp, Zea mays
  Clone ID: MRT4577_129974C.1
atatgcatgctctagcgggcgccaatgtgaggggatattctcagaattccccctctcatgaggtggcggccgaggagaagccatccttttacatttttacttatcatccgagccagggcatactctgagaggaatggggagcctatggagagagcatatcagcacatcaagctggggcggcgatagctgtcagcttggcaagcccaaagcgctgtctgccagatggatgattgcatgggcctactcgcggagagaggcgggaaacgtcttgggcgctggtatcgatcattgagagtcacctctagccgctgcgcataggtcgttcggatgaggggacgctcatcagcttgctcaatgagctggctggctgcgctccatagaatcatgggagagcgcaggatcgagcatctcagcggagggcctgcagaaggccc

SEQ ID NO: 32853 - DNA, 167 bp, Zea mays
  Clone ID: MRT4577_129975C.1
ggaaccatctcaaccctgacgagtaggcactgactttttttataataaaaaaagaactaaggtactgcctacagactatttccaccaattatcgggcacaacacaaaccaatttcggcaataacgtcacacagggagggagcggacccatgggcgcgcacgcgtggg

SEQ ID NO: 32854 - DNA, 105 bp, Zea mays
  Clone ID: MRT4577_129976C.1
cacacgcgttttgcatgagaggggacatgtaacggctgttaaagttaggcatcacaagctcggggagaccaatgaaccaggcatggaccgcatcaatgatgacct

SEQ ID NO: 32855 - DNA, 279 bp, Zea mays
  unsure (1)..(279): unsure at all n locations
  Clone ID: MRT4577_129977C.1
gtccgccccgcgtncggagagcgtgggcggacgcgtgggctgacgcgtggatagacgagtggatatcagtgatgtatccatcgtcacaatagagagactttgtactttgattaactaaaaagctttattgcctttgttgtttaggtgaacaattgtcacataaacatatttagctagctgtattggggcggtgtcctttgttttattttcagataccgactatcgttcctctttaggaagctacctaaatggtcttcggttccgggttctagaccttga

SEQ ID NO: 32856 - DNA, 226 bp, Zea mays
  Clone ID: MRT4577_129978C.1
agcgtccgcactaacaacacagaacgccaggggggaccacaaggcaagcaaaaagctcccatacctacctccttggctctgtacctcatgatgcatgggacgggcgacagattgtccaaaagagactgcgaagactcctaaaggatcccacattccaccgtacctggcatcagcagtgtctgaagctggagaaaacgaccattcatcaaccctacaggcaacagac

SEQ ID NO: 32857 - DNA, 2353 bp, Zea mays
  Clone ID: MRT4577_129979C.1
ttgggtacctcgaggcacgagatcgccttcaccgccacacgctgccacgcgccatatataaccagccgttccctcctctcatgctcccctttccaaatccgtctccgccctcacgcacgcggcccaactagcctaacaaaccctagctagatttagaaaaaaaatttgtccccaatccgaaccgacgaggagctcgccgccgtgagatgtccgagtacgacgagcgctaccagggcaacggcgacatgcccgcagccgaaggcggctatccgcaggccgagtacgccgccgccgccgcgcctgccgccgggggttcgccgcccgcagacagcaagccctccgggttctccgaccacgccgacggccgctcctcccagcaccagcacgagacacaatcacatgacagtggttcctcgaaatctcgagaaagggaccgagaacgcgataagggcaaggatagggagcgtgacagggatcgtggccgagaaaaggggagggaccgagacagggataaggatcgtgaaagaagtgacagagatcgcgatcgccaccacagggaccatcgagagcgcagcgagaaaagggaacaccgtgatcgttctgatgatcgtgaccgtcaccgtgatggtcgtgaccgccaccgtgatgatcgtgattctgagaggagaagagatcgtgacagagatggtcatcgtaggcatcgctcccgctccccttctaagagtcgtgaccgtgaccgcagatctagatctcgttcacgctctcgatcaaagagcaagcgcgtgagtggttttgaccaagcacctccacaacatgcacttcctattgttgctgctggtgctatccctggtcagcttcctggtatcactgctcctattcccggggttggggtgcttccgaacttgtataatttggctgcaggacagttcaacccccttgttattcagccacaagccatgacacaacaggctacccggcatgctcggcgtgtctatgtgggtggacttcctccaacagctaatgagcagaccgttgccatattcttcaatggagttatggctgctattggaggaaacacagctggtccaggtgatgctgttcttaatgtctatataaaccatgacaagaaatttgcttttgtggagatgagatctgtggaggaagcaagcaatgcaatggctttagatggcataatgtttgagggagcaccagtgaaggttagaagaccaacggactataatccttccctagcagctgctcttggcccgagccagccaaatccaaatctcaatcttgctgctgttggcttaacacctggctctgctggaggattagaaggtccagaccggatctttgtaggtggtctaccatattatttcactgaggctcaagtgcgggagttgctcgagtccttcggacctctgcgtggattcgatcttgtgaaggatagagaaactggtaactcgaagggatatgccttctgtgtttaccaggatcttaatgtcaccgacattgcctgtgctgcccttaatggcatcaagatgggggacaagactcttactgttaggagggcaaaccaaggagcttctcagcctaggccagagcaagagagcatcctgctgcaggcacagcagcaggtgcaaatgcagaaactcgtataccaagtcggaggtgccctgccgacaaaagttgtctgcctgacacaggtagtgacagcagatgaactgagagacgatgaggaatacaatgacattgtggaggacatgagggaagaaggacgcaaatatgtcccacataatgccattgcagagtgttttatagtccgaccctatgcaatattggcaatcgggctttaacccacagaagacactattcttttgagtttgattaatcattatatcattagcctcttgcctatatatctctactcactaacacttggacaggtaacttggtgaaagttgtaattccacgacctgaccccagcgatgctccagttgctggtgttggaaaggtgtttttggaatatgcagatgtcgagggctcgaccaaagcaaagacggggatgcatgggcggaaatttggcgggaaccaggtggtggccgtgttctatcccgaggacaagttcgctgctgagcagtatgactgaaagttgtagaacctgttctagagttgcaacacacaatgtgtgtgttttttttaaaatctttgagggtaccgttttctcttgaatttgaatcttatctagttataagtttggtgcaggaccagtcgataagcgataagtttgtgcaggaccattaggctttgtttgggtaattagtattgatcccaatccaaatctatatatgtt

SEQ ID NO: 32858 - DNA, 211 bp, Zea mays
  Clone ID: MRT4577_12997C.1
ccaggaaaaaagcactaaatttcgttggaaaccacgaacccgggcggccaacttttaagggagagggaaaaaaggggtcacatccaatcccacaaaatggcaaccaaaacgacattcatattcatccccgggcatttcggctactcgggcgctcacgggtccttttcgaggacccccttggcgctcacaaagatcccggccaaaaactttc

SEQ ID NO: 32859 - DNA, 1707 bp, Zea mays
  Clone ID: MRT4577_129980C.1
ggtaccgttccggaattcccgggtcgacccacgcgtccgttgtcatcgttcttccactggattgagctgactgctgtagctttaatgtcagctgcctggtgtcaccgctcctattcctggggttggggtgcttccaaacttgtataatttggctgcaggacagccacaagccatgacacaacaggctaccaggcatgctcggcgtgtctatgtgggtggacttcctccaactgctaatgagcagaccgttgccatattcttcaatggagttatggctgctattggaggaaacacagctggtccaggtgatgctgttcttaatgtctacataaaccacgacaagaaatttgcttttgtggagatgagatctgtggaggaagcaagcaatgcaatggtcttagatggcataatgtttgagggagcaccggtcaagattagaagaccaacggactataatccttccctagcagctgctcttggcccgagccagccaaatccaaatctcaatcttgctgctgttggcttaacacctggctctgctggaggattagaaggtccagaccggatctttgtaggtggtctaccatattatttcactgaggctcaagtgcgggagttgctcgagtccttcggacctctgcgtggattcgatcttgtgaaggatagagaaactggtaactcgaagggatatgccttctgtgtttaccaggatcttaatgtcaccgacattgcctgtgctgcccttaatggcatcaagatgggggacaagactcttactgttaggagggcaaaccaaggagcttctcagcctaggccagagcaagagagcatcctgctgcaggcacagcagcaggtgcaaatgcagaaactcgtataccaagtcggaggtgccctgccgacaaaagttgtctgcctgacacaggtagtgacagcagatgaactgagagacgatgaggaatacaatgacattgtggaggacatgagggaagaaggacgcaaatatgtcccacataatgccattgcagagtgttttatagtccgaccctatgcaatattggcaatcgggctttaacccacagaagacactattcttttgagtttgattaatcattatatcattagcctcttgcctatatatctctactcactaacacttggacaggtaacttggtgaaagttgtaattccacgacctgaccccagcgatgctccagttgctggtgttggaaaggtgtttttggaatatgcagatgtcgagggctcgaccaaagcaaagacggggatgcatgggcggaaatttggcgggaaccaggtggtggccgtgttctatcccgaggacaagttcgctgctgagcagtatgactgaaagttgtagaacctgttctagagttgcaacacacaatgtgtgtgttttttttaaaatctttgagggtaccgttttctcttgaatttgaatcttatctagttataagtttggtgcaggaccagtcgataagcgataagtttgtgcaggaccattaggctttgtttgggtaattagtattgatcccaatccaaatctatatatgttaatgccttgttcagttattcttattccatatggattggagtgtatcggaatgagttttgacttgctatagatttaaaaaaaaaaaaaaaaaaaaaaaaaaaaaaaaaaaaaaaaaaaaaaaaaaaaaaaaaaaaactc

SEQ ID NO: 32860 - DNA, 587 bp, Zea mays
  Clone ID: MRT4577_129981C.1
agactcttccccagagacatgtcaacaatctcacctcggttgctgccctgccatgctgctctttgtccttcccctgctcctgctcgccttgcccctctggctcttgcattcaatggagctgggctttggatcatgagcggagcacatgggaggaaactagcgcagtacatatccaaagtctttttctttgttttttttctctcttttcccttttgtttgtgcgttctgggcaattcgcggttcgacgatcagttggttggcaatggttggttgatcgattggcgtcgttctccacatgtgcaggaccgagcttcttgatctggttcggaccgacgcctcgcctaacggtagcggagccggagctggtgcgcgagatcttcctcacgcgagcagaggcgttcgaccgctacgaggcgcatcccgtcgtgcgccagcttgagggcgacggcctcgtcagcctccacggagacaagtgggcgctccaccgccgcgtgctcaccgacgccttctacccggacaacctcaaccggctggtgccccacgtcggcaggtcggtggcggcgctggcggcgaagtggaacgccatg

SEQ ID NO: 32861 - DNA, 208 bp, Zea mays
  unsure (1)..(208): unsure at all n locations
  Clone ID: MRT4577_129982C.1
catacacgtccagatacacatacgnacacgcgtcagaggactctggcgactgtggacaatggctgcagctacaggcatcttgaagtccttcatcaaggaggatattgacgaggagattgaggtcaagacagactgagctgcagcccaaggtcgttgatgcctacgaggcatctcctcctgaggtcaaggctctgttcaagggtaagaa

SEQ ID NO: 32862 - DNA, 557 bp, Zea mays
  unsure (1)..(557): unsure at all n locations
  Clone ID: MRT4577_129983C.1
ttttgcctcacgcgcctttcatagtctatgtgggtggacttcctccaacaggtaatgagcaaaccgttgccatattcttcaatggagttatggctgctattggaggaaacacagctggtccaggtgatgctgttcttaatgtctatataaaccatgacaagaaatttgcttttgtggagatgaactgagagacgatgatgaatacaatgacattgtggaggacatgagggaagaaggacgcaaatatggtaaaccgcacgaggcccatcgagttctcttataccttctttgttttaaaagctcttacattcagctgntatgattatgaatggctaccctcagttactgaattggtttccttttggnggttttgtcttttggtgtgtctttttttgtagtcccacataatgccattgcagagtgttttatagtccgaccctatgcaatattggcaatcgggctttaacccacagaagacactattcttttgaggttgataatcatatatcatagcccttgctattatcttactcactaacattgacaggtacttggga

SEQ ID NO: 32863 - DNA, 496 bp, Zea mays
  Clone ID: MRT4577_129984C.1
attgggacctcgagccggcgggacccaaacccttcctcccaaaaaccggcggcggcgcgagggcttcgctttgcatccatggctctcgtcgccggctcctacgagcgcttcatatggggcttctcactcaaaaccctgacaaccccctccgccaccggcgcctcgctctccgagaccctcaccctcgcgccgctcttctcgtacccggcccacacgggcccggtgcgctgcgtggccgcggcgccgcgggcgaggctggtggcctacgacggtgcacaggagtccatgaacgtcaattacatccaaaagggcgcgtacctgggtggaatctggtagaacgccggctgcatcccctccaaggccctccacaataactcgcatctctaccaccagatcctcgacgacaccaagggacgcggaatcgaggtcgacgatgtcaagctcaaccttcccgccatgatgaatgccaaggagagctctgtttcgggtcacacaa

SEQ ID NO: 32864 - DNA, 2430 bp, Zea mays
  Clone ID: MRT4577_129985C.1
ctcgctcgacggcggggccgggcccctttccaatccgtctccgccctcacgcacgcggcccaactagcctaacaaaccctagctagatttagaaaaaaaatttgtccccaatccgaaccgacgaggagctcgccgccgtgagatgtccgagtacgacgagcgctaccagggcaacggcgacatgcccgcagccgaaggcggctatccgcaggccgagtacgccgccgccgccgcgcctgccgccgggggttcgccgcccgcagacagcaagccctccgggttctccgaccacgccgacggccgctcctcccagcaccagcatgagacacaatcacatgacagtggttcctcgaaatctcgagaaagggaccgagaacgcgataagggcaaggatagggagcgtgacagggatcgtggccgagaaaaggggagggaccgagacagggataaggatcgtgaaagaagtgacagagacagagatcgcgatcgccaccacagggaccatcgagagcgcagcgagaaaagggaacaccgtgatcgttctgatgatcgtgaccgtcaccgtgatggtcgtgaccgccaccgtgatgatcgtgattctgagaggagaagagatcgtgacagagatggtcatcgtaggcatcgctcccgctccccttctaagagtcgtgaccgtgaccgcagatctagatctcgttcacgctctcgatcaaagagcaagcgcgtgagtggttttgaccaagcacctccacaacatgcacttcctattgttgccgctggtgctatccctgaaggcaaccttggcccactttgtcacctgctgccaatggattgagctgactgctgtagctttgatgtacgaggacactatctggtttggtcagcttcctggtatcactgctcctattcccggggttggggtgcttccgaacttgtataatttggctgcaggacagttcaacccccttgttattcagccacaagccatgacacaacaggctacccggcatgctcgccgtgtctatgtgggtggacttcctccaacagctaatgagcagaccgttgccatattctttaatggagttatggctgctattggaggaaacacagctggtccaggtgatgctgttcttaatgtctatataaaccatgacaagaaatttgcttttgtggagatgagatctgtggaggaagcaagcaatgcaatggctttagatggcataatgtttgagggagcaccagtcaaggttagaagaccaacggactataatccttccctagcagctgctcttggcccgagccagccaaatccaaatctcaatcttgctgctgttggcttaacacctggctctgctggaggattagaaggtccagaccggatctttgtaggtggtctaccatattatttcactgaggctcaagtgcgggagttgctcgagtccttcggacctctgcgtggattcgatcttgtgaaggatagagaaactggtaactcgaagggatatgccttctgtgtttaccaggatcttaatgtcactgacattgcctgtgctgcccttaatggcatcaagatgggggacaagactcttactgttaggagggcaaaccaaggagcttctcagcctaggccagagcaagaaagcatcctgctgcaggcacagcagcaggtgcaaatgcagaaactcgtataccaagtcggaggtgccctgccgacaaaagttgtctgcctgacacaggtagtgacagcagatgaactgagagatgatgaggaatacaatgacattgtggaggacatgagggaagaaggacgcaaatatgtcccacataatgccattgcagagtgttttatagtccgaccctatgcaatattggcaatcgggctttaacccacagaagacactattcttttgagtttgattaatcattatatcattagcctcttgcctatatatctactcactaacacttggacaggtaacttggtgaaagttgtaattccacgacctgaccccagcgatgccccagttgctggtgttggaaaggtgtttttggaatatgcagatgtcgagggctcgaccaaagcaaagacggggatgcatgggcggaaatttggcgggaaccaggtggtggccgtgttctatcccgaggacaagttcgctgctgagcagtatgactgaaagttgtagaacctgttctagagttgcaacacacaatgtgtgtgttttttttaaaatctttgagggtaccgttttctcttgaatttgaatcttatctagttataagtttggtgcaggaccagtcgataagcgataagtttgtgcaggaccattaggctttgtttgggtactttagtattgatcccaatccaaatccatatatgttaaggccttgttcggttattcttattccatatggattggagtgtaaaaa

SEQ ID NO: 32865 - DNA, 827 bp, Zea mays
  unsure (1)..(827): unsure at all n locations
  Clone ID: MRT4577_129986C.1
gccggccgggccggactctatgccgctcactctccttctctctgcgcgttgctctttcttccccagccagcgcgttcctgctccagctccggtgccgtggagccctgcgcaccgtggtacttctttccctgctcgttcttccctcaagctcgcctgaccgcgccaccccatggagctcccttcagttctcctcaatcacgccgtgccctggtctaagatcctgcgtcgcgcgcctggctcgccggtgttcgggccgcggcttcctcctccaactccggtcggccaagagctcagctccccctgctcggtgcccatctctttgtccgcccatggagtcgcccggccaagccgtcctggatctcgcgagcgccccttcctttccacccagctcgccgtcggctctggtctccaaatcgccacgactgacctcgccgaacagcgctgccccggctctccgtcgaacgccgtgctcccctcccatgccgccccagcccccaacgccgaccacccctgctcctcccctggtcgccgtctccgaccagccgtctaagattcaccgcgtcggtgccatgtccgtgctcgacgcagggccggccctgagggtatgcagaatatgggatcgctcagggtcccaagatttataaagcccccgtttattcagcttatatccaaatacatatacattacagataaatctatattctcgtgcttttgttacgtctctttgattttctagcaatcatctcttcgaggtcacgcaacagtctgcttgatgatgaatactaaatattgattgacgtgngaaaaaaaaaaaaaaaaagccccta

SEQ ID NO: 32866 - DNA, 626 bp, Zea mays
  Clone ID: MRT4577_129987C.1
gggtttccaactctgaattctcctggtcgttgtgatcggctgatccccattctcagctcgcggcggcggttctttcggcttcggaagcggcggcggagcagagaattccattgggttttattttacaccgacgcaaggacagcaccgatcgatgctccgtgaaactagacaataacagaacctgaaggtaaaatggcaccgagtctccgacacagaaaaaacatggtacaagacaaaaacccatcacaagacacggtacagaaaggtggacatactgctgtacttgagaatgtctcttatgacaaggatgtcgtggagatagaaccggcagatgctatcgattccgctcattacggcggcagtttcgtcaaggacgtttgcgtcgacgaaggaactcggacggcatcagaagaaaacccactggacagaaggtcgtccccaaatttcagtcgccaagtgatcggtgcagacagcgacataggatacgagaagaaaggctgttctagagtgtctgtacacggactgaaaaccagagtagtttcacctgttggcttcgcttctcactgcaatggcaagagtgtggtcttgaagatgggatcgatgttgcagcaggcgaatctagcgag

SEQ ID NO: 32867 - DNA, 751 bp, Zea mays
  Clone ID: MRT4577_129988C.1
aagtgcgggagttgctcgagtccttcggacctctgcgtggattcgatcttcccacgcgtcgggaaactggtaactcgaagggatatgccttctgtgtttaccaggatcttaatgtcactgacattgcctgtgctgcccttaatggcatcaagatgggggacaagactcttactgttaggagggcaaaccaaggagcttctcagcctaggccagagcaagaaagcatcctgctgcaggcacagcagcaggtgcaaatgcagaaactcgtataccaagtcggaggtgccctgccgacaaaagttgtctgcctgacacaggtagtgacagcagatgaactgagagatgatgaggaatacaatgacattgtggaggacatgagggaagaaggacgcaaatatggtaacttggtgaaagttgtaattccacgacctgaccccagcgatgccccagttgctggtgttggaaaggtgtttttggaatatgcagatgtcgagggctcgaccaaagcaaagacggggatgcatgggcggaaatttggcgggaaccaggtggtggccgtgttctatcccgaggacaagttcgctgctgagcagtatgactgaaagttgtagaacctgttctagagttgcaacacacaaatgtgtttttttaaaatctttgagggtaccggtttctcttgaatttgaatcttatccagttataagtttggtgcaggaccagtcgacaaaaaaaaaaaaaaaaaaggccccta

SEQ ID NO: 32868 - DNA, 612 bp, Zea mays
  Clone ID: MRT4577_129989C.1
gggcccccaaaaggggaagggttcccccccccttttccccgggcctaatttttttaaaaaaaaaaaaaggccttggggggcgaggggtacaaaaaaaaaaaaaccccgatccgggggggcccaaaatgggaacaatccccccctttttaataaaaactccgggaaacaaaaaaatgttttttggattttggaaaggcccaaaaagatggaggccgtttttattccccccggtaaaaataacggcccccccctcttttgcaaaaaaaccttttgcggccccctcccgggcaaaaaaacctttggccgccgccccccccacaaaaaaatttcgggccccctcctgggcaaaattttcccccccaaagggggcctttgaaggggccttttttttgaagggggggaaggggttggactcaaaaaatggaacccgggggggcccttccgaaagggggaagggattttcaaaaatggggggggggaacaaaaaaaacaccccctgttccttaagggggggggggggccccctttaaattgggaggttttttttgggggaggaaccttttaattttgggaaaggcaaccccgggggcccccattggtccgccatttaaa

SEQ ID NO: 32869 - DNA, 342 bp, Zea mays
  unsure (1)..(342): unsure at all n locations
  Clone ID: MRT4577_12998C.1
aacattccccccacctanccaatcccgtctcgccctagccgtctccatcccaccacctccccccgtccgcccgtccggccgcgccgcgccgtgcgcgacccaatctaccacgccacttacctcccgtcccgtctcgttctcgtcgcacctcgccccgcccgcagagagaggggggcgcnnccgntcgagncgngcnngncanccaccgccatggcctcggaccaacaggccctcccggacacggtaccgcccacgagcagcggaccagggcaacacgaaccggagcgaaccagacacacaagacccagcccaaaggagaaaccgcggaaagacattctttaa

SEQ ID NO: 32870 - DNA, 241 bp, Zea mays
  Clone ID: MRT4577_129990C.1
tttttttttattttttttttttttttttgttttttttttttgtttttaatttttttttgttttttttggggaatatatttttattttttttttgggaaccgggggtccaacccggggattttggaccggaatttggtgggaaacaaaaatttttgtattgagagttaaatttaaatttggtagaaaaatatggaaaaatgttggtgatttgggggaaaaaggaatttaccttttagatggg

SEQ ID NO: 32871 - DNA, 102 bp, Zea mays
  Clone ID: MRT4577_129991C.1
tcgcgggtccacacaagcctctaaactgattcatactagtctcggctgctatggcggcggagaagaacgccgatgtgcaggtagtcgacttcgtccacgatg

SEQ ID NO: 32872 - DNA, 305 bp, Zea mays
  Clone ID: MRT4577_129992C.1
ggtgcttgttcgtatggaggctggtggcgaggattttgcgttcggattagaactcctaatgcttaccttttaaatagaggtggcatgggtacaataccaagcacttgtacagcaaccacatgtaacttgaaaaagaaggattcttggaatattgctggtgcaaaatatcgattgcttctgggacctaagggacatcacgaacaagaaatggctattcccgcttgggctcatgaccctcatcttctaagccgaaagcactggtgacaccagcatttctgtgcttggcaatgttgaccatccctact

SEQ ID NO: 32873 - DNA, 637 bp, Zea mays
  Clone ID: MRT4577_129993C.1
ggaaatgaagtcttttgctgatgatcacaaatcctcgtacaagttcaaaaaaaacaagaaggtaacttaggtcttagttgtaaaatgtgcatgtgcatgtacgtatgtggatggaaataaatactgctgggtgcatatatacgtatggaagtaccagatacgtatggttttttatggtgataatggtaataaccaacgttgcatatatatgctcgcatgcacgcaagtatacgcataagcagaataattacgcatgcatgcatgcatgcatatgcacaggaatacaggatcgagttgacgctagcttagctactcctccatggagtagcagcactgcttgaacgcctccaggttgtgctcgaacagcggcacgaaggcgtccacgctgccgtcgcccaggtacgacggcacgaggaacagcatcccttccgtggggaagtaggacggcatgaagtaggtcgggctgcccgtgccgaagtccagctcgtagaacgggaaggtgagccagctgtccacctcgaggtccgggcacagcacgtccttgagcacggccgtcgtctgcagcccttccttgtcgacggcgccggagctggcccagtccacgaacgactggaagtaggcgccgtccacgcgcgcg

SEQ ID NO: 32874 - DNA, 161 bp, Zea mays
  Clone ID: MRT4577_129995C.1
tttccgtgtactcatgcgcccacacaggcggggacggggtcatttagacggcccagcacataagaaacaccaaaaaaagaatacaggagggccggtgctcaaagcatgtaaggcacagtacgacgtgaggtaaatatggcacgattatgccacaatatcat

SEQ ID NO: 32875 - DNA, 326 bp, Zea mays
  Clone ID: MRT4577_129996C.1
gggccaggaatttatgtttaatccataagtaagggtcaaatttccgggggttaaggtttacgagcaagatttttttagcctaaaaaaccctttaaggttgcaaaaaaaaaaaaattaaaaaaaaagttgaagactggaacgggacctaaaccttgttttgactaaaaatggttgtaaacttttccattttaaaaggggggggggggggtttaaccacacgggaaattttccctaatgggttaaaaaaaaaaatacacggggtgacttatgggcttaaattttaggccccgtgggggggttcgttttcttttttcacccatttaaac

SEQ ID NO: 32876 - DNA, 871 bp, Zea mays
  Clone ID: MRT4577_129997C.1
tcgaggccggccggggaaaaaaaaaaaaaaaagggccctgcggcgacgaagtgctccgttctccgtccaataatcgacatcccaattccctacctacgaatcccccgctccacaccgtcgccgccggcgaaatgtcggcgatgggatacgaccagggcctgtctacccacggcgcctcctggccgcagcgatccgactacgatccatactcctactcctacgcctactcccaccacatcgtcgctgccgccgcctcctaccaccagccgcccccaccgggaacagagcatgctgctcccacatccgccgcctcgtcatggtcgtctgcagcaggagcatcgaacaacgtcgtagtgggcgggccaggcgcgaaccctctaaccgtttccgcactgtcacagccgaccatcttcgccgcctcgatcgggtggtccgggcacggtgtaggacaccttccgtactacgacccgcagtacccgccggcgcagcatcccacagcggtcgggggtgtaagcagaggtggtgagccttcgcatggtgggggcagaggtctaagccctatgtatcatcctcttacatggaatgcaggaattacatcaccatgtggtagaggacgagggcatggaaacaagagcagtgataggcagttagcccttggagcatccagtggatcatctgcatcagaggctcagcccggaacagtgtgtgcaccagcacatgtggtgcaagctacaaccatcaatttcacacggggtactgtagttccagctgcttggtgtgacctatgcccgagtggggtgtaatagcaaggaaatcctcgagcagcacaaaaatggaaagaggcataaacggactgtgcagagaatgcaaa

SEQ ID NO: 32877 - DNA, 614 bp, Zea mays
  Clone ID: MRT4577_129998C.1
taatgcccccatctataactttggcttgtgggaaacggcagtccaccaaggtgttacagtatattgcattacagtctaatgttgcatcatatatttaatcaatgaaaaggggctgatggtagaaactagaagcaatgaatagtgttcaaatgggggcagctgccagaatgagacctggcatatctgtgtgctcaacttctaggcctttttttggtacttttcttcttcttttttatttctcactgcatttagttccactgcaaactaccagttcttgctttgataagcattaaatggtctggtaaacacctggctgccgtggcaatttcttatagatggaatatatttatatttaagtggatgtaacatgtccattatggccccgtttgttccagttttttttccatattttggctgccataagctgttgtggattgttaaacactcaacttttcagcccgcttttataagaatccttttggtgaaaagcgccaaaaataaatgtgaacacctaatcgatcgagtcgtcgcgatagcaggagtccgtcactcactttctacatcctaaactttatagactccatctttatccgcatataatcccgacgatactc

SEQ ID NO: 32878 - DNA, 420 bp, Zea mays
  Clone ID: MRT4577_129999C.1
gccgcccgacagctgtgcttctacagggctcaaggcacttctccgacggccacattagctcgtgtacagggcttaaggcgcttctccgccagccacgttagcacatagctacaccccattgtacagctgggcatctccttgtatctataaaagagggatgaccagggccttccgaaggcaggttcacgcagaagacgtccaggtagagatacgttcacgttgacacacgttcaggtggacatacgtggacacacacacatagacgtcgacatagtgggaggcagggcagacgagacaagcagagacggacgcacgcagagactctctctcgctagctcttgccctcgctccctcgcgacgcttgtaacccctactacgagcaccccggtgcgagataacataagcctcatttcccctttt

SEQ ID NO: 32879 - DNA, 1206 bp, Zea mays
  Clone ID: MRT4577_12999C.1
aattcggacgcgtgggtgccagccgttgccaggccagccaccaacctcctcctcttccgcatcgcatcgagagcggggctgtaccgtgcgagactctactgctcgatcgccatggccgccgcgctcaggtgcccggcatccgtcagggtctcgggccccgccgccgcggggctcgccaaggtgcgccaggcgtccagagtcgtcgcggtgagcggggcccggcagagccgcggcggcggcgtcgccgtgcgggcgtcgctgttctcgcccaagcccgcggcggccaaggacgcgcggccgaccaaggtgcaggagctgtacgtgtacgagatcaacgagcgggaccgcgagagccccgcgtacctgcgcctcagcgccaagcagacggagaacgcgctgggcgacctcgtccccttcaccaacaaggtgtacaacggcagcctggacaagcggctgggcgtcaccgcgggcatctgcgtgctcatccagcacgtccccgaccgcaacggcgaccgctacgaggccatctacagcttctacttcggagactacggccacatctcggtgcagggcccgtacctgacctacgaggagtcgtacctggcggtcaccggcggctccggcgtcttcgagggcgtctacggccaggtcaagctcaaccagatcgtcttccccttcaagatcttctacaccttctacctccggggcatcccggacctgcccagggacctgctctgcacgcccgtcccgccgtcgcccaccgtcgagcccacccccgccgccagggccgccgagccgcacgcatccctcgacaactacaccaactgaactgatgattgatgaatccattatcatccatctctgctctgtctgtcgcggctgtcagaacttgacgagacaagctcccctgctactcatcagtactcctcactcgtagccgtagtttggctactcttatgtgtgtatggctggtttcttcaattcgtgagtgcgtggtagtaccaataagcaataagacgcagagggatcgatcaagatgtgtgcttcacttggctgcttctgattacaattgatcaatggtaacgtaaacggtaaagctctgtttagtgtttagatgtgtttaaacggagttaaatggttttagcatcattttagcaagattaaaaaaaaaaaaaaaaaaaaaaaaaaaaaaaaaaaaaagccagt

SEQ ID NO: 32880 - DNA, 383 bp, Zea mays
  Clone ID: MRT4577_1299C.1
aaaaaagtatttgttccaaaaaagaaaaaaaaaaaaaaaaaaaaaaaaaaataaaaatagtacataaatacgaaaccacaccttgtgccgacttctttctgctctctttcccactccttgtccgttggcccatccttctcttaggggccgtgtggggggttttttcctgccccctttctggccgtttggcccgtcctttttttagggccctttctcgccttttaccctggcgggcccccactaacttgccgggcgtttcacacctttttctttggcagtatttttccttttccggccttcccctttttgcgttccttcccctttttccccctgtctgacagatggacgcgccccgcttcggcccttttttcacgctttttggg

SEQ ID NO: 32881 - DNA, 459 bp, Zea mays
  Clone ID: MRT4577_129C.1
gccgcaaagaactgctccatgtattgcggtagagtacatgtccacaatatctcagaatcaaatcttatgaaacttacataatctaaaattaatcttctaattaaaacctgatacagttagcatttacatgaaacaccttaacaaaacattaaataaacaaacaaatagtagagtcattccactaataacacttcggtgttaacaatgttgtgcaactccagagtccagaggctaattcactctttcataaacaacacctgcatggttattttcacatgctcctgcacatttctggttaacaagactcccacacatggaggtggtcaagctcgtataaaggtgacaattagctctagattttacactattaaatttaatgattgaatcggattagtatcgagctctattcctattcatttttaaagaaaaattaattgagctctaacttattgggaataa

SEQ ID NO: 32882 - DNA, 149 bp, Zea mays
  Clone ID: MRT4577_12C.1
tcttaatatctcttatgcattaacatttgcagagatgaacatataatgttcacgggcgtttgaagaagatctgaaagattttcctatagatctacagaacgggtcatttgtcatgttacaaactggaatcatgtcttttattaacttta

SEQ ID NO: 32883 - DNA, 1716 bp, Zea mays
  Clone ID: MRT4577_130000C.1
actctcctactactacccacttccaactccttcagagaccctaattaccagctacagccagcatccgatccagcgcccgcctctgctccccatggactccgaccaggagtccgtcgacgactgggtcgtcctcgcctcgtcctccgacgacgacgagcgagtcatcgcgctctcgtccggctcctgctccgactccgagcccgatcacgccgccggatcccccaacctcctccccgcctcccttgaccccgacgacgccgagggcttgtacgcgctgtcggacgccgaggacaccgacgcgtctctgcagccttccccgcggctgcccaacccgctctcgggactcttgcaccacacgctggccggggacgtcgcctactccgccttcgacccggtgcctcccgccgccaagcagctggtcccggacaccaccttcgccgccttctttcccgagcccgtcgccgcgctcgcctccacccgcggcctcgtctgcctccgcggcgcctgctccgccgcctactacgtcgccaacccggccaccttcgccagcgagcgcctcccggcccccgcccgcgaccaccgcgcccacggcgaccccgccgtcgtcatcgccttcgacctcgacctcgaccccgacccctgcgacgccgaccccgagcgcgccgagtctgagggcgaggggttctaccgccactaccacgtcgtcgtcgcgttccccgtcggggaaggcatctacgctttcgagtccttctcgtccagggcctgggcgtgggcaaccggaagcggggtcgccgacgctgaggccgtcctgccaggctccggggtcggcgcgctcggctgcgcgttctggcgcaccaccatgggcctgttcctctgctacgaccccgtctcgcgccgcgcggacctcgtccccgcgcccgccgaggtcatgcagtggccctactgggagcttggcgagatggacggcacgctctgcgtcacttgcatgggcgcccgcgtcgacgccgtcgtcgtcatccgcctcgacatcgtgagcggcgccatcaactggactctggcggggtatttcgagggcggctgcctcaggggacgcaaggacgtcacgctgctccgctcgcagggtaaggcggaggtcgtcatgtgggaccccagctccgagactgtggtggccatggacatcgagggccgcaccacgcgcgtcatcaggttcatccctggcagcggctactatgccgatttcatcccctacgtcagctcgttggccgccgtctctggctccggcagaagggaggctcatgctgagcgttcgacttctgctacaaataatgacttcatggctacggctgttgatgctgaggcatactaactacactggtggtaacaaagctggaatagtttgtttgctacaaatgaataatcaagcttccagggtttgtacagcctaaggggaagcaagaagcagcttttgttttttgccctggtatctagtagcctccatgagcaattcttttgccccgtggctgcttgtacaaatggtaggtttcagactggtgtgtcgaaacagtcagtccagtactttctagtttcagagagtagcttagcttaacacggtgcaaaacttaaacgtccttttgtgcgactgacttttggtttttggaagagcatctgatctctgtctgggatattctgaccatgaactattgcaatggctttctt

SEQ ID NO: 32884 - DNA, 256 bp, Zea mays
  Clone ID: MRT4577_130001C.1
aaggccaaaatcaccgttaatatttccctcaaaaccattcatttttaacatgaccttagggacaaaccatatacgacagccggcctacactaattcggtttataaagccggggctaacaaaagaacatggacagcgcttatagaggggatctcctggtggctgcctggctttcaatatttgaggacggggagtaggggtgtgaatcgaactttcagggggtggttttttctgggacttctggacagtgccaaaatt

SEQ ID NO: 32885 - DNA, 311 bp, Zea mays
  Clone ID: MRT4577_130002C.1
gagcttgaccttcgcaggccccctgccgtaggctgggacctctagagacggcggcgcgccctttttaccgtatgttttttttactagtatagttaacttgactagacggaggctttaattggagcggggaaaaccgcggtgtaccgggtcctaagcgaacgacatctttatatgcactgatgacagaagcatccgccatgaaatacatccttgggttcataatcaactccctaatcattgcccttgccaacggtataaaacctagaatagggaggcccgccgatcgcgatatagaaccccaccgctttcgt

SEQ ID NO: 32886 - DNA, 616 bp, Zea mays
  Clone ID: MRT4577_130003C.1
gcctccgccaccgctagtattaggcgacgccgggtgagaaagcctagcgccgagtccgttccatctccgcggcccttccacgcgcccgatcatgccaccagatgcgtcgtcaccgttgccgccgatcgacacccccgacgacgggcgacggcagcgacgtggaggacaagatcgacccgctgtggggcaggacccgctaggcgcgccggccgaaggggacggtgaggaagcagctcgatctggacgaagttgacgtggaggtggcttcgggggcgggggcgggagcgcaggccaaggggggaagaggaggaacacgaagatggaggaggaggcgccgcccatggagttggtccgggagaagaagctctctgagaaggtaaccagccgctgtctcttgcgttctgggtctggccgttggttagttgaattgctagccggtttttgatgatgtctggtgctctgggagtctgggttcgtgtgttagagaggagggcgcagcttctttcatccatgctgagtcacagaggctgctgcgaggtgtacatatacacacgtaactgcacatggagtagaattagatgcgagattttatctttgtcccatttggtaatgagac

SEQ ID NO: 32887 - DNA, 224 bp, Zea mays
  Clone ID: MRT4577_130004C.1
ctttctttttttttttttttttttttcttttttggggttccggggtttacgtctgggggtgggcaaaatacacccgctgtacattttaaagtacaaactaacattttaccgcggctcaactttgttctaggggggacaagaggaactaaaaaaatcattttctccttaattacataacatgactggaaattcccgtttattggcaaatttaaaatccgcatttt

SEQ ID NO: 32888 - DNA, 270 bp, Zea mays
  Clone ID: MRT4577_130005C.1
tttttttattaagaggttctttcaattcctccatatacaaggcacaggaacgaattcggcatttggatcacaggtggtgaaaaaacacaggaacgattcacgattgtctgccaccaaggtacagcaagtggcctatgaccacaagctttctagtccctaacaccacgcgtaagtggcttctacaaaagtgtcccactctgtccagaggatcgacacagtgcctggttgccatatatttcaggaacgggttatttagggggtctgccaacc

SEQ ID NO: 32889 - DNA, 384 bp, Zea mays
  Clone ID: MRT4577_130006C.1
cggctcgaggcgccggctgaagacaagggcgcgacgcagaggatcaggggagcagagctccggccgagcgcgccatggagagagaccaggggaaggatccgcggccagagaggaagacgctcggcggggagagagaggagtggctggaagacggcgcgaatccgagctgaggcttggtcaggacgcgtcaactggagcttcagggcgcgcggccacggaggcatcctggctggggagaaggccgttgagccggggccgggaggagcgctcagacgagcaacagacacggccggcagaggaaaaatccaagcgcgcgcagggaagactcccctggaggagaagcagaggaggcgcgcgtgaataaaaggaaccaggggcggcgcg

SEQ ID NO: 32890 - DNA, 2670 bp, Zea mays
  Clone ID: MRT4577_130007C.1
aattcggcacgaggctacctttccccagctcttcgtctacagcactgccacattagtagttagttaccagcagtactactcttgtgtagtactagcttttaatttcccccagctagctagctagtttctacttccgtccgcgcgcgctcatctgcgcacgcacgtgtccccgtccgcaatggagtccgaggccggcctgcttgtccgctcctccctgaacggcgagggcctgtgcatgccggcgccgcgcgccgacccgctgaactggggcaaggccgcggagggcctgtccgggagccacctggacgaggtgaagcggatggtggcggagttccgcgagccgctggtgaagatccagggcgccagcctgagcgtcgcgcaggtggccgccgtggccgtgggcgccgggggcggcgaggcccgcgtggagctggacgagtccgctcgcgagcgcgtcagggccagcagcgactgggtcatgggcagcatgatgaacggcaccgacagctacggcgtcaccaccggcttcggcgctacctcccaccgccgcaccaaggaaggcggcgcgctccagagggagctcatcagattcctcaatgccggcgcgttcggcaccggcgccgacggccacgtgctgccggcggaggccacccgcgcggcgatgctcgtgcgcgtcaacaccctcctccagggctactccggcatccgcttcgagatcctcgaggccatcgccaagctgctcaacgccaacgtcacgccgtgcctgccgctccggggcaccatcaccgcgtcgggcgacctcgtcccgctctcctacatcgccggcctcatcacgggccgccagaactccgtggcggtggcgcccgacggcaggaaggtcggcgccgcggaggcgttcgagatcgccggcatcgagcacggcttcttcgagctgcagcccaaggaagggctcgccatggtcaacggcacggccgtgggctcggggctcgcgtcgatggtgctgttcgaggcgaacgtcctcgccgtcctcgccgaggtcatgtccgccgtgttctgcgaggtgatgaacggcaagcccgagtacaccgaccacctgacccacaagctgaagcaccacccggggcagatcgagtctgcggccatcatggagcacatactggagggcagctcctacatggcgcttgccaagaagctgggcgagctggacccgctgatgaagccgaagcaggacaggtacgcgctccgcacgtcgccgcagtggctgggcccccagatcgaggtcatccgtgccgcgaccaagtcgatcgagcgcgagatcaactccgtcaacgacaacccgctcatcgacgtgtcccgtggcaaggcgctccacggcggcaacttccagggcacgcccatcggcgtgtccatggacaacaccaggctcgcctgtcgcggcgatcggcaagctcatgttcgcgcagttctcggagctcgtgaacgacttctacaacaacggcctgccgtccaacctgtccggagggcgcaacccgagcctggactacggcttcaagggcgccgagatcgccatggcctcctactgctccgagctccagttcctggccaaccccgtgaccaaccacgtgcagagccgcggagcagcacaaccaggacgtcaactccctgggcctcgtctcggccaggaagaccgccgaggccgtcgacgtgctgaagctcattgtcgtccacctacatcgtcgcgctgtgccaggccgtcgacctgcgccacctggaggagaacatcaagacctccgtcaagaacacggtgacccaggtggccaagaaggtgctgaccatgaacccctcgggggacctctccagcgcgcgcttcagcgagaaggagctcatctccgccatcgaccgcgaggccgtgttcacgtacgcggaggacgcggccagcgccagcctgccgctgatgcagaagctgcgcgccgtgctggtggaccacgccctcagcagcggcgacgcggagcgcgagccctccgtcttctccaggatcaccaagttcgaggaggagctccgcgcggtgctgccccaggaggtggaggccgcccgcgtcgccgtcgccgagggcaccgcccccgtggccaaccggatcgcggacagccgctcgttcccgctgtaccgcttcgtgcgcgaggagctcggctgcgtgttcctcaccggcgagaagctcaagtcccccggcgaggagtgcaacaaggtgttcctcggcatcagccagggcaagctcgtcgaccccatgctcgagtgcctcaaggagtgggacggcaagccgctgcccatcaacatcaactaaaagacgccaggcgccgccatccatgctgccgcccgcgcatggccggaggaggaggagaggaggaggaggaaaatacatgaaaaaataaaacttgtacacgtgtatgtctccagattgtgccaccgtcgttctcgtcgttgacttttggttgtattggtcgatccatatgtgtgtgcgtgtgtggcgttgttctttcttctttgtgtagctgccctgccaccgcctgcgatgcgcatgccatggcaggtagcgttgtctaagatcctatactgttgtattttggggtgaactacatcttacgtgcacaaaaaaaaaaaaaaaaaaggccccta

SEQ ID NO: 32891 - DNA, 594 bp, Zea mays
  Clone ID: MRT4577_130008C.1
actctcctgctgtccaccggcccgtgcctagctgagtcacacatggatcctacccagcgacctgcgcgacagatgagcaagagaccaatgagacgaagaacgaacgcgccgctcctccgtctaatgactattacgggccgcatgcggggatctcccatccctatactgctgtaggactacccactgctggagattgagcagaacttctcgcgagagcacttcacgaagctggtggctcgcactcgctggaccttgaccttgggctactggctgtgcacccagcacaggacaccattgacgctagccgtgttgatgctcgcgctcgaggaacagacgcacgacatggtgccttatttgagggtggaactcaagattctgaacatgaagaagatgcgaaagccatccaaagacaacggagaagtactacagctaagacgtctcatggggactgacggccgaccacgaacccgacttcttcatacgagaaaaagtgaacctcgagctccagattcaggcccctttaccgaagcctaattgccccctgcgcgaattctggggcatagctgactcctgggtgaaactgctatccggtct

SEQ ID NO: 32892 - DNA, 2699 bp, Zea mays
  Clone ID: MRT4577_130009C.1
gccggccggttcgggaggacgaagagcctacctttccccagctcttcgtctacagcactgccacattagtagttaccagcagtactactctcttgtgtagtagcttttaatttcccccagctagctagctagtttctacttccgtccgcgcgcgctcatctgcgcacgcacgtgtccccgtccgcaatggagtccgaggccggcctgcttgtccgctcctccctgaacggcgagggcctgtgcatgccggcgccgcgcgccgacccgctgaactggggcaaggccgcggagggcctgtccgggagccacctggacgaggtgaagcggatggtggcggagttccgcgagccgctggtgaagatccagggcgcgagcctgagcgtcgcgcaggtggctgccgtggccgtgggcgccgccggcgaggcccgcgtggagctggacgagtccgctcgcgagcgcgtcagggccagcagcgactgggtcatgggcagcatgatgaacggcaccgacagctacggcgtcaccaccggcttcggcgctacctcccaccgccgcaccaaggaaggcggcgcgctccagagggagctcatcagattcctcaatgccggcgcgttcggcacgggcgccgacggccacgtgctgccggcggaggccacccgcgcggcgatgctcgtgcgcgtcaacaccctcctccagggctactccggcatccgcttcgagatcctcgaggccatcgccaagctgctcaacgccaacgtcacgccgtgcctgccgctcaggggcaccatcaccgcgtcgggcgacctcgtcccgctctcctacatcgccggcctcatcacgggccgccagaactccgtggcggtggcccccgatggcaggaaggtgggcgccgcggaggcgttcaagatcgcgggcatcgagcacggcttcttcgagctgcagcccaaggaaggtctcgccatggtcaacggcacggccgtgggctctggccttgcgtccaccgtgctcttcgaggccaacgtgctcgccgtcctggccgaggtcatctccgcggtgttctgcgaggtcatgacgggcaagccggagttcaccgaccacctcacgcacaagctgaagcaccaccccggacagatcgaggccgccgcggtcatggagcacatcttggaaggcagctcctacatgaagctggcgaagaggctcggcgagctcgacccgctgatgaagccgaagcaggacaggtacgcgctccgcacctccccgcagtggctcggcccacagatcgaagtcatccgcttcgccaccaagtccatcgagcgcgagatcaactccgtcaacgacaacccgctcatcgacgtgtcccgtggcaaggcgctccacggcggcaacttccaggggacacccatcggtgtgtccatggacaacactcgtctcgcgctcgccgctatcggcaagctcatgttcgcgcagttctcggagctggtgaacgactactacaacaacggccttccctccaacctgtccggtgggcgtaacccgagcttggactacggtttcaagggtgccgagatcgccatggcctcctactgctccgagctccagttcctgggcaacccggtgaccaaccacgtccagagcgctgagcagcacaaccaggacgtgaactccctgggcctcatctcctccaggaagaccgccgaggccatcgacatcctgaagctgatgtcgtccacgttcctgatcgccctgtgccaggccatcgacctgcggcacctcgaggagaacgtgaaggccgcggtgaagaactgcgtgacgcaggtggccaagaagtccctgagcctgaacgccaggggcgggctccacaacgcgcgcttctgcgagaaggacctgcagacggcgatcgaccgcgaggcggtgttcgcgtacgcggacgacccgtgcagccccaactacgcgctgatgcagaagctccgcgcggtgctggtcgagcacgcgctggccaacggcgacgccgagcgcgacgtggacacgtccatcttcgccaaggtggccgagttcgagcagcaggtccgcgcggcgctgcccaaggaggtggaggccgcgcgcgcggccgtggagaacggcagccctctggtccccaacaggatcaaggagtgccggtcctacccgctgtaccggttcgtgcgcgaggaggtcggcaccgagtacctgaccggcgagaagacgaggtcgcccggcgaggagctgaacaaggtgctcgtggccatcaaccagcgcaagcacatcgacccgctgctcgagtgcctcaaggagtggaacggcgagcccctgccgctctgctgagctgcaccagcagagaaagacaatgtatacagaaggaaaacaaaagtatagcagcacaaaacagagcgtttcaaggtcgttgtgaagtgctttacgatcatactagcaggagaactctatatttaccgttgccctgtaccagtagctaaagttcatgtgaatgttgttgtgttcccgcagctgcgacgccatggcctgcgatgtgcatggtcttggctgctgcagctactgaaacttttgatggttttaacttgtaagctagcgggggataaagtaaattactttgctctacaatatcgcatgagaactgagaagttcatgtcgattacataaaagcaaccggcgcgaatgtgactgag

SEQ ID NO: 32893 - DNA, 1153 bp, Zea mays
  Clone ID: MRT4577_13000C.1
ggtacaatgtaaaaccgtttaattccgtctcaacacgtctaaacagtgaatagagctttatcgtttacgttaccattgatcaattgtaaccagaagcagccaagtcagcttgatcgatccctctgcgtcttattgcttattggtactaccacgcactcacgaattgaagaaactagccatacacacataaaggctagtttgtcaaccacatttttctatgggattttcaatttcccaaggaaaaatgaactaatttcccatggaaaaatgaaaaacccttgggctacgagtgaggagtactgatgagtagcaggggagcttgtctcgtcaagttctgacagccgcgacagacagagcagagatggatgataatggattcatcaatcatcagttggtgtagttgtcgagggaggcgtgcggctcggcggccctggcggcgggggtgggctcgacggtgggcgacggcgggacgggcgtgcagagcaggtcccttggcaggtccgggattccccggaggtagaaggtgtagaagatcttgaaggggaagacgatctggttgagcttgacctggccgtatacgccctcgaagacgccggagccgccggtgaccgccaggtacgactcctcgtaggtgaggtacgggccctgcaccgagatgtggccgtagtcgccgaagtagaagctgtagatggcctcgtagcggtcgccgttgcggtcggggacgtgctggatgagcacgcagatgcccgcggtgacgcccagccgcttgtccaggctgccgttgtacaccttgttggtgaaggggacgaggtcgcccagcgcgttctccgtctgcttggcgctgaggcgcaggtacgcggggctctcgcggtcccgctcgttgatctcgtacacgtacagctcctgcaccttggtcggccgcgcgtccttggccgccgcgggcttgggcgagaacagcgacgcccgcacggcgacgccgccgccgcggctctgccgggccccgctcaccgctacgactctggacgcctggcgcaccttggcgagccccgcggcggcggggcccgagaccctgacggatgccgggcacctgagcgcggcggccatggcgatcgagcagtagagtctcgcacggtacagccccgctctcgatgcg

SEQ ID NO: 32894 - DNA, 2697 bp, Zea mays
  Clone ID: MRT4577_130010C.1
aattcggcacgaggctagctttccccagctcttcttccacagcactctctgtctgtctgtctgtctcgcaattagctgtactaatccgctagtggcactgctgctactctcgtgtactcccagctatctcctctctatactcttgtacgtacgcacgtgtcgcaaccgcaatggagtgcgagaccgggcttgtccgctccctgaacggcgagggcctgtgcatgtcgtcgtcgtcggcggcggcggcgccgcgcgccgacgccctgaactggggcaaggccgcggaggacctgtccgggagccacctggacgaggtgaagcggatggtggtggagttccgcgagccgctggtgaggatccagggcgccagcctgagcatcgggcaggtggcccgccgtggccgcgggcgccggcggcgaggcccgcgtggagctggacgagtccgcccgcggccgcgtcaaggccagcagcgactgggtcatgagcagcatgatgaacggcaccgacagctacggcgtcaccaccggcttcggcgccacgtcgcacaggaggaccaaggagggcggcgcgctccagagggagctcatcagattcctcaatgctggcgcgttcggcaccggcgccgacggccacgtgctgccggcccgaggccacgcgcgcggcgatgctcgtgcgcatcaacaccctcctccagggctactccggcatccgcttcgagatcctcgaggccatcgccaagctgctcaacgccaacgtcacgccgtgcctgccgctccggggcaccatcaccgcgtcgggcgacctcgtcccgctctcctacatcgccggcctcatcacgggccgccagaactccgtcgcggtgggccccgacggcaggaaggtgggcgccgccgaggcgttcaggatcgccggcatcgagcacgggttcttcgagctgcagcccaaggagggcctcgccatggtcaacggcaccgccgtgggctccggcctcgcctccaccgtgctcttcgaggccaacgttctcgccgtcatggccgaggtcatctccgcggtgttctgcgaggtcatgaccggcaagcccgagttcaccgaccacctgacgcacaagctgaagcaccaccccggacagatcgaggccgccgctatcatggagcacgtcctggaaggcagctcgtacatgaagctggccaagaagctcggcgagcttcgacccgctgatgaagccgaagcaggacagatacgcgctccgcacctccccgcagtggctgggcccgcagatcgaagtgatccgcttcgccaccaagtccatcgagcgcgagatcaactccgtcaacgacaacccgctcatcgacgtgtcccgtggcaaggcgctccacggcggcaacttccagggaactcccatcggcgtgtccatggacaacacccgtctcgcgctcgccgccatcggcaagctcatgttcgcgcagttctcggagctggtgaacgactactacaacaacggcctcccgtccaacctgtccggcgggcgcaaccccagcttggactacggcttcaagggcgccgagatcgccatggcctcctactgctcggagctccagttcctgggcaacccggtgaccaaccacgtccagagcgcggagcagcacaaccaggacgtgaactccctgggcctcatctcgtccaggaagaccgccgaggcagtggacatcctgaagctgatgacgtccacgttcctgatcgcgctgtgccaggccatcgacctgcggcacctcgaggagaacgtgaaggccgcggtgaagaactgcgtgacgcaggtggccaagaagtcgctgagcctgaacgcccggggcgggctccacaacgcgcgcttctgcgagaaggacctgcagacggcgatcgaccgcgaggcggtgttcgcgtacgcggacgacccgtgcagccccaactacccgctgatgcagaagctccgcgcggtgctggtcgagcacgcgctggccaacggcgacgccgagcgcgccgcggagacgtccatcttcgccaaggtggccgagttcgagcagcaggtccgcgcggcgctgcccaaggaggtggaggccgcgcgcgcggccgtggagagcggcagccccctggtccccaacaggatcagggagtgccggtcctacccgctgtaccggttcgtgcgcgaggaggtcggcaccgagtacctgaccggcgagaggaccaggtcccccggcgaggagctcaacaaggtgctcgtggccatcaaccagcgcaagcacatcgacccgctgctcgagtgcctcaaggagtggaacggcgcgcccctgccgctctgctgagctcagctgagctgcacgcacctgctccgcacaaagaaggaaaaacaaaagtatagcggctcaagacagcgtttcaagatcgtttatttacaaccagactagcagaagatgctctctatatctaccgtcgccttgtattattagtagctgaagtaagttcatgtgaatgttgtcgtgttcccgcagctgcgacgccatggcgtgcgacgtgcgcgttcttggctgtcgcagctgctgaaacttttgatggtttttaacctgtaagctgggggggatgaagtaaattattttgttctacaaaaaaaaaaaaaaaaaaaaaaaaaaaaaaaaaaaaaactcgaaaagggggcccggtacc

SEQ ID NO: 32895 - DNA, 212 bp, Zea mays
  Clone ID: MRT4577_130011C.1
cctacactgctctgtgttcaatgcccaagagcgccgtttatctacatcaaagccgggcatcccgttggccccttactcatactgcccgctgctcaaatgagaaccaaatccagagcgccgctcggatggccttctctgacgcggtacagacggcgcgtacggaactatggcggtgggatagcctcaacttgctctagtccagccctgtaaac

SEQ ID NO: 32896 - DNA, 345 bp, Zea mays
  Clone ID: MRT4577_130012C.1
cccacgcgtccgcccacgcgtccggccttcatggcctacgaggagaacgtggcgggcgtgttggcgcccaccatggcggccgtgtcgccgtacccgacgatgcacgacgacgtgacgtccgccgcggaggagcatttttttggcgcttattctggtgccgttccacaaacacccgtccgtggaccgagggctggaggtgttccaccccgagattcaggcacttaaccagagcattcaacgcttttcttcctgtgccgtgggcattctcttttaccgcgggctgggcggcgtgcccggcgcccggtgccccgtggtggcgctttttttttgcgggcgccaccaccc

SEQ ID NO: 32897 - DNA, 863 bp, Zea mays
  unsure (1)..(863): unsure at all n locations
  Clone ID: MRT4577_130013C.1
ggtaccctccggttcggccgggacctttttgttgaatacctcaaacatccttttaccagatacaagaataagaaatattactccctattctatccctctacaatgtctcaagtcatctcaatgccaaacttcaccgtgacctctgtccatcagacagaacaagtcccaagagatgttcgcgagcgtatactgcgctccgttcagtacaacgtgtttgcattccctgcttcgcttgttgcagtagacttcctttcggactcgggtactgctgcgatgaccacgaaccaatggtctgctatcatgcaaggcgacgagagttacggccgtaactgtggctattattattttctcgaggctgtgcgagacatctttgaacgcggggagcatcgcttaaatgctttccaagagatgaggccagatctcaaaagcaataccgcctttgaacggtacttggattaccaagaaggaggctttgtcaacggcggcctcgcacaaatgacccgccccaattgtttcctcgttcctcaaggccgatgtgcggaaagcctcttgttccaggctaccgctgatgccttttctcaaccggatagtcagcagcctattgtaattagcaatggcttttttgatacaacttcggccaacgcatcagcggctggctttcgcctcatgacattcgcccaagagggctggatgcactcggagcctattcaggattggcagaacaagataccttcaaaggtaacctggacatttctgctgcaggaagggtcctgtcaaacagagagccgcagnaccgcgtggctcttatctactggacgatcatcaacaatnntgcggcagggcagncctgtgtccatggaaaa

SEQ ID NO: 32898 - DNA, 1321 bp, Zea mays
  Clone ID: MRT4577_130014C.1
cggacgcgtgggcgtggatgtacttggcagtccctgtcgtcttctatgcctccgagagaagtatcagaaaaattcgtgagcaaagctatcgcgtgagcatcataaaggcggcaatctacccgggaaacgtgctctcactttacatgacgaagccaccaggcttcaagtacaaaagcgggatgtacatgtttgtaaaatgcccagacgtttcgcctttcgaatggcaccccttctccatcacttcggctcctggagatgactacttgagcgtgcatatccgtacgttaggtgattggacatcagaactcaggaatctgtttgggaaggcttgtgaagctgaagtaacttcaaagaaggctacactagctagactcgaaacaactgttgtggcacatggtctcgcagaggatactaggtttcctaaagtcttcatagatggcccttacggtgcaccggctcaaaactacaggaaatacgacattcttttgcttattgggctcgggattggtgcgactcctttcatcagcatactcaaggatctcctgaacaacataaagtccaacgaggagatgcatgacgccgagttaggttgcagtttgaagaccaatgggccaggaagagcctacttctactgggttacaagagagcaaggctccttcgagtggttcaaaggtgttatgaacgacgttgccgagagtgatcgcgacgatgtaatcgagatgcacaattacctgaccagcgtgtacgaggaaggcgacgccaggtcagccctgattgccatggtccagtcacttcagcatgctaagaatggcgtggatatcgtctcaggcagcaagattcgaacgcattttgcaaggccaaactggagaaaagtgttctctgatttggccaatgcccacaagaactcacgcatcggcgttttctactgtggatctccaacactgaccaagaccctgagagatctttcgatagagttcagcagtaccacgacgactcggttccatttccacaaagagaatttctaagaagcaacggcacggctcgtgtggcccgccggtgcattcattggtgatcaacgggcacaaggctgtgtgcctatgcaagccagatttgagtccttggttattttggggaacagggagcggggctttaccggaccaagagccatgagctagccttttgcttcgtccgcttgctgggagctagctgcttgttcagatttggtgttggaggaggcgtgcatgcgcaagctgaaccggaaattcagcatgggaagttccatgtaggaaactgataattgtaatgcaatttttttctctct

SEQ ID NO: 32899 - DNA, 165 bp, Zea mays
  Clone ID: MRT4577_130015C.1
ctgctctcactcatccagactgagcgtgcctacgactagctaccgaccatctcatctgcacaagacgcgggacctgctgggagaaactgcgcaaggagaagctcgcgggctatgacaagaagatacggtctaggatgcagctccccagggaggctattaaggaca

SEQ ID NO: 32900 - DNA, 811 bp, Zea mays
  Clone ID: MRT4577_130016C.1
ggaaaggaaaggacccaccgccgctctctccatccatcgccttccccatctcccccagttcccctcgtcgtcgcttcttccaaaccctagcggcctagcctgcctcctacctcgcccgccgacctatctctgccagtcctattccccgcggcagcgcgggatctcctcgctcccgtcgctccctgcacctacggtacaaccgctccatccaaacgagatccagcggatggaacccccggcggcgaaggaggcgccgccacttcagcctgcggcggaggaggacgcgatgctctctgcgacggcggccatggcgaaggaagccgctgtagcgttccagggctgccgctacgccgactgtgccgcagtgctcacgaggctgctggacaagaaagagggcgatctcaaggtgcacttgtaactactctttgtgtctttcctaaagaggagttaggagctcttgcagtttaagtttgtgtgcggaatctattgttggacactaacatagcaaatcaataggttagacacatctgtggttatgtacaattggtctggtttggctgtttgggttccaatcatgtatgtttgagttccaagttccaactgtgtagttcatagttgtttgagttctcatggttgttttgagttccaactgtactgtctgtttgagatgtctgttaggcgaggggttcaagacaggttcaagtttgcttatgaactttgctgtatggattcatcttcgaaaaaaaaaaaaaaaaatttggagtagctaacgtaacgagcccgaatgacaatccaagcatagctcagcagc

SEQ ID NO: 32901 - DNA, 531 bp, Zea mays
  unsure (1)..(531): unsure at all n locations
  Clone ID: MRT4577_130017C.1
caaaccacatttcttctcataccgtgagggttctgggtggccaaaaacaagtctcaccaaccttctgatgtacataaccctatcccatactctcaattttcacaattcaaatgtacaaataatcacacaatcattgatcctaccactactcctacaaagtagatcaactttcttaccagctggtgtgttggatcaattacaaacctgggatcccaccaactactaaaacaactactaaacaaaattcttcaactccaaaaaaaaatcaacaagcataaagaatttccttcactgatggaccaagtgaaacatgctcctactatttctctgtcgctatattttctttacattagacctaattgtcacatctgaaatatttacacactttgctcggatttgcaagttctcttttttttttcttggtgtgtctggaaggatgtatgtacagattgtttgatgaacctataactcgtgtaccaaaaaacctgctgccaatctatatttntcgagcttccagtcttccactggaat

SEQ ID NO: 32902 - DNA, 383 bp, Zea mays
  Clone ID: MRT4577_130018C.1
acccacgacgtcaacgcagaggcacaagatcgaggccggcgtggcaacggcggcggcgctgggcgccggcggctacgcgtaccacgagcaccgcgagcagaaggacgcccactacgatagcaagcaacaagagcaaaaggttgcccacgggcaatggcaagggcaacggtactcctaataatggcactgaaaccactggttatcccatccattcaaatatgcattccaaaccccataaatataccggccctaaccccgttcacgttcgttcctttaagttaataagagcaaacgtcctcacctgtgtgttgctccattacaaatccaaccatttacctattaacgtctgcaaataacgactaagcgcaagcttctgcaacgtg

SEQ ID NO: 32903 - DNA, 280 bp, Zea mays
  Clone ID: MRT4577_130019C.1
gtagaacatgcgcacggcgcacctctatcaagcgacagctatcgacactcatgacttatgggtttacgaaaagcactatatgtgcaatgaacgccagctcgcgctcagaccgaacagcgaagagcagcttggctgcatgtggaacgggtgagcatgcagatactgctacaaagatcatcactagatatctagagacgcacagagagacgacgaagaaaccgcatagcgagatgaatttctaccaactgtacctctgaaaacattgcccattagagcacct

SEQ ID NO: 32904 - DNA, 299 bp, Zea mays
  unsure (1)..(299): unsure at all n locations
  Clone ID: MRT4577_13001C.1
gcgcctttcatggttttacctctcgcaaccaaacaccccaagantacctccagcgcggggccagcacatatttttttgggggactacncacatctcaacatattagacattgaacacttcaattacatgacctactaacgtctcactagtttaaaccggccgcgcctcaatataccattagcactaaaaggatttgtgaatagctcattcttctgccacatcatccatgatttggccacataaactatttttcttcaaatggtcgccagcgatggggcatctctcaataaagtagacgt

SEQ ID NO: 32905 - DNA, 137 bp, Zea mays
  unsure (1)..(137): unsure at all n locations
  Clone ID: MRT4577_130020C.1
tcgagcgcgggcggggaaaagccagagcgcggagcagctagaaccattgaccgacccgcaccgagacaaatctatcgatcgatagctagatccattggggnccttgtggcccccgggggggggncccgggggggggg

SEQ ID NO: 32906 - DNA, 503 bp, Zea mays
  Clone ID: MRT4577_130021C.1
cattgggtacctcgaggccggccgggagtttttatagattcagccggtcgggctatcactagttagctgtgcagacgaagggaggtaaggttgaactgctggcggagggcgaggcacccgttgtcaatctgctctcggcgctgtgctatgcttcggagctgcttggcattatattcctctatcagtacctggcatctcgaccgacataggatctacggcaaggtgcggcgagaccggccttcttcctcagtactccgaggccttggcaatgctgacatgaacgagtggatacctcgagacgaggggcgactgcaccaatgcgagatctgacatccgccatcgaacccccgagatgagatgtctgtacaggacattcaggatcacgctgaaagcgtgtctcgcgtatcggaggatcttatctgagatgctctaaaccaatcgccatatgtgatatccggactccaaggaactggcgcccgcactattttctatcaggttgagcg

SEQ ID NO: 32907 - DNA, 545 bp, Zea mays
  Clone ID: MRT4577_130022C.1
gctcgtgtcgtttctgaagctagctagctagcgagcgacagtcgatggcgagccgcaagtgtctcggaggcgagggaagcgcgccggcaccgcacgtcctcgcggtggacgacagctcggtcgaccgcgccgtcatcgccggcatcctcaggagctcacagttccgcgtgacggccgtggacagcgggaagagggcactggagctgctgggcaccgagcccaacgtgagcatgatcattaccgactactggatgcccgagatgactggatacgagctcctcaagaagatcaaggagtcgtccaggctgaaggagatccccgtggtgatcatgtcctcagagaacgtgccgacaaggatcaacaggtgcctggaggaaggcgccgaggatttcctgctgaagcccgtccgcccgtccgacgtgtcgcgcctgtgcagccgcgtcctgcggtgagcacggcggcaagtagtagcacagcatgctggcgcgcatgctcgtggtagttcttttggggatgcatggtggtagctgtagcagcggcattcc

SEQ ID NO: 32908 - DNA, 328 bp, Zea mays
  Clone ID: MRT4577_130023C.1
gtcactcgtttgatacagctgcagggtgatcatggggcacatggtgaacatactgcttgcttggtgcctgcaaaggatggtacacggatgtattatgcagatgaaatcgacatgaggcaacgtgtgagataccaaagatcagcactgagtaaacaggatctatcacaaggaagacaaatatgctagaaatgagcgtttcttgcaggccttcaacaaggaggtgaaagacacggcgattgaggacaagaagacagagcgggagccaaagggcgaggtggggtacgaaggcaattcccatgaggagaatggtcattacacggatgggaag

SEQ ID NO: 32909 - DNA, 622 bp, Zea mays
  Clone ID: MRT4577_130024C.1
cgccgctccatggacgacttcgccgccgcccggctcgccaccctcgtgcaagacgacgtggagcttgcccgcgaccacctgcacgctgtcgaggtcctgctggttctagacaaggccagcaacggttggagccaggagctccctgcctctcacgctaccaccgctggaggaagagctggagatgcgagcgctggagccggtacgtcgttgccccatgcgtcgttgttttccctataaattgggtaaggaatccccttctaagggttgttcaggtttctcttcctactgcgattcatccgttcttcccctacgattcatctgttcttcctgctgcactctaaatgagcatccatgttgctctcccccgatggtatgtctcctcgccatctcgtcggcatagcccgagtgccggtccacaccctcgcaaatccggccatgacgacggcctgcagatccaatccacatccgaagaccttgatctatccgtgtggagggttgggtttctgccctcatgccttcttctaatcccctcatttatgttcagtgatgatgaatttatgccttagagaatattgttttgtagtttgatttaggtcccttcgtgatttatttcgtttttagt

SEQ ID NO: 32910 - DNA, 430 bp, Zea mays
  Clone ID: MRT4577_130025C.1
ttttttttttttttttttaccctcacgttcactgcatatttgcattgactaatggctgtacaactcaactcataggcttcatgtatacatgggtcagactaccgtcaatgtaaaccgcaagcaatcccaggtgggctctcttggaatcttcactaccgtcatgtaatcattagtgctaacatatagctaagtcaaatttgaaatggcaggaacgttttgcagattcactttggtctttgggctgtccaaagcacgcaggaagttgtcttgtaaaaacacggtatggtttgtgggcagcaagtcttgatgccgcagttatggtttgtggtgcgcagctgcttggtcttgcagtttagttgccctcaggttcattcttaacattgctcggctcatcgacagccattgccctggcacacacatgcctcgtgcc

SEQ ID NO: 32911 - DNA, 849 bp, Zea mays
  Clone ID: MRT4577_130026C.1
tcctcgacaaccgcctcccggacgacgtgtctacggcatccacctgcacgccccaatggcggcagaaagcaaggcgtggctggacgcccagcaggcggggtccgtcctgtacgtgtccttcggcagcatggcgtcgctgagcccggagcagatgggcgagatagccgagggcctctacggcagcggcaagcccttcctgtgggtcgtccgggccacggagaccgccaaggtgcccaggggcttcgccgacagggcccaggccaccagggggctcctggtgtcgtggtgcccgcagctggaggtcctggcgcaccccgccgtcggctgcttcttcacgcactgcggctggaactcgacggtggaggcgctcagcgccggcgtgcccatggtggcgatgcccgactggtcggaccagacgaccaacgccaagtacatacaggacgtgtggcgcgtcggcgtgcgggtgcgcccggacggccggggcgtggtgaggagcgaggaggtggagcggtgcgtgcgggacgtcatggagggggagatgggcgaggagtttagggccagggcttcgcactggagcagcaaggccaggaaggccatgggcgagggcggtagctcggacgtcgccatctccaactttctatcctgttttggacactccgctcacgttaccgctgccaactgattgatcatggccggatgcaccgttttaatgcctcgttcattgcttgtacggtttcacctctctatatatacaaaagatatcctcgtctcctgtacatttaaagaaatgctaattataaaaaaaaaaatctcaagccccagggtataaattgcacccagcaaaaaaat

SEQ ID NO: 32912 - DNA, 503 bp, Zea mays
  unsure (1)..(503): unsure at all n locations
  Clone ID: MRT4577_130027C.1
aaacactatcanacttaaactctttctaatgatgatccttccaaagatctcaccttataataaagaatatgggttaaatcttctaccaactccctacttctaaccaaatggcaaaccacatagaatacctcacctaacttcaaacaaaaacaataaactgataagcctccactttcaaggaaaaacaaaggcctttatagaagtctatttactgcacacatcaaaatttggtaaccagattataacatgttctacaatggtatcctctaatcatttgatcctctttctaacatgcacaacctaacatattatgatagggatgtatatttactacttctaaaagtacgaaaagtcctaattctatcactcatgataaataaccttatatgtcatctcaaactccactatgcataaaaacaaaatcttatccattacaagcagaaaattcaaatacacctaaaagtgatgctttggatcctccaaacaaaaaaagacttcaaaaa

SEQ ID NO: 32913 - DNA, 346 bp, Zea mays
  Clone ID: MRT4577_130028C.1
aacaaacaaacacacagaagcgaaaagaactattcatgaattaacctaggcaaaataacccaagggtgataagtgaaaactgaatcagtatgtctggcaaccaagaagaccacacactgaagctggtaagacagcaagtgcttgcaaaccagtgagcacccttaagatcctcatcaatggaatgctcaccgctgaagacacgatgcttgcataggggaacctaaactgcagacatcatcgagtgcattcacaaagcgctgcatctgaactacgtgccgtcgaccatcatagccctataagacgtcatgaacgtatccccatgccagctatccgtgtaaggcccctg

SEQ ID NO: 32914 - DNA, 348 bp, Zea mays
  Clone ID: MRT4577_130029C.1
acttgtatcttgtgttgtattttttcaagcgtttttgttttaatactacatctttgttcatgttaaaaagatactgtcatactgggggagttgagggaactgtacacattacatgagtggtagaaggattttttgtgtaagaaaacgtgaaagaaggggttggaacctagtgactccagaaacagacaccatatttttccaacaaaatggcacatacacaggggtgctataagacacatgtgacatgggcctaagttgcctgtaacgatggataaacgaaatcaatcatataagagaaggggacaaatatgacaaggtcatatgacacccccccagcaagagaatcga

SEQ ID NO: 32915 - DNA, 310 bp, Zea mays
  Clone ID: MRT4577_13002C.1
gaaccgagcaacaatgggaaggggttgtacatcccacaaaagtacaaaacggggggaaacaaaagcggcagcggggggggggggaacgcttttttaactacaaaattggtggccgggtaagcccagccgtactagacgggacaccattagggccaatttttacacagccccaggacaaaaacacagggtggggctggcctttacagatagaagcgtttactgggcaaactcgagccatttccttaacttggagagggcctttggggacaaggttttgggggacctgatcctttcagccgggacctgctcc

SEQ ID NO: 32916 - DNA, 452 bp, Zea mays
  Clone ID: MRT4577_130030C.1
attcaattcttttttttttgaaataagggataaattttttcatatggttggaacggtaaatcccaatttcctccattaacaggaggactgaatctaataagtggtatgagcaaacgccccctccaaaccaaacccaaccggctcaaatttccctggccagacctctaatgccacccaaaactcaccaaaactaaaaaaaggggaatgaaaaaacaatggtatccacgctacaacaaatttgctgcaaacaacacaacaaaccggacgaaaacactgttaccagtattacccgacgacccccccaattgacagcaaagcaccatcttttagattatacttcaaaagtgctgcggactctgccaaaaaaagtgtgggtggccctctataaaccaaccatccaaaaaagaccccccctccattggcggggcaaaaaaaccacaaacaggccaggc

SEQ ID NO: 32917 - DNA, 601 bp, Zea mays
  Clone ID: MRT4577_130031C.1
cggcgccgtaattcccgggtcgacccactgcgtccgtattccattatgagtatagatacacacaacactcagtagagagcactgaagcgaacagtaccgcagacttctgttctcaaacaaaaccaacaatacataagaaattctaacagaaaaatatcatagttctccatcatagaatctttggattccaaagtcctgccccctcaataatttgaaatagcacagacctagcatttgtgcaatcacaacatattggaaactagaaataactgaacatatgggaatcttgaacttcaacggctggtgtgatctctgaattccagaacttaaaacactgaaactctggaaacagcaccgaccaaaatcacaaatgctaagcactcacacactgggaataaataaatgcattcttttttcttttgagactgggtctcactctgccgcccaggctacagtgcagtggcatgattatgactcactgatgcaggagaattgcatgaacctccaccatggagggagcactgagctgaaatcacaccactgcactgcactccatcctgggtgaccgagcgagactatatctgaatatgattattggagc

SEQ ID NO: 32918 - DNA, 315 bp, Zea mays
  Clone ID: MRT4577_130032C.1
acgaagccctgactccaagctggcacctgcattcctcgcgctcactgtcgcacccgccctatgtactaccgcccacagctgcagctgctgcgcccataggcgctgttcgcaagacaccgtcactcccctaggactaatcatctctgaccaaacgaacttccagtggacttggcatctgacgataatctatctaatgctaatgattcagaatctgcgccctcaagctatgagtatatcccaccttctgtagtcgacaggaatgaaacttctgagatataagatcctgctgaacatccagaagaacgtcaactagca

SEQ ID NO: 32919 - DNA, 213 bp, Zea mays
  Clone ID: MRT4577_130033C.1
cgggcggagaagggctttccattttccattcggggcaccaccccctccgaaatagccaaatgggcccggtattaaagggcccccccacccttttttttaggcattaccccgcccaacagctgcggggggacagctcaagccccttcgcccctggtgcggggggcgagctgggtgtccttgggcataatggggacccttttggcgtgggtggcc

SEQ ID NO: 32920 - DNA, 845 bp, Zea mays
  Clone ID: MRT4577_130034C.1
ttttttttttttttttttctttttttttttttttttttttttttaccaaaaaagacgaggtcatgattcacataaagataatgtagcaaaggattacaattccagcgaactcgcttcacaggtaaagatgtgcaggagcaatcatcctttctttctttacaagatgatgaaagctgagaccaaaagacagtcaagctatactagtcagttcatcttaattagacagcaaaaggagcagaccagggccgaagccagccaaatcttcgatctggtctcgacctcacaattcgctcgctaaaagaagcgccgccctctatatgttaaactaagcaaccgttgccctaggctaggccgcagcagcagccaggaccggctatacaacggcgacagcctgggttatgccggcctccatggcaggtggatgggtcacggtggattcagtggcagctggcggtgacggtggctcgggccagcagaactcgaagggggcttcgaatcccaacggtccggaaggcgccgcgatctcggcggggcggggttccgtgtaggggaactcgatctgggggcggtggtgcaggggcgttgatgccatgagacctttcttgatgtcagcctgcagctcccggatcgggatggcggccaagaagctcttgatgtactccttgcatgcatccttgcccttcaacacaggctcgcactcttcagtgtccgatccgctgccctgctcggttgagcaggtctctgaggaatccttgcggcgtccacggtgatcaggacttggttccttcttttcagcaggtgttttgtggatggtggtggtgtcatcaaacttcaagatgtatgcc

SEQ ID NO: 32921 - DNA, 248 bp, Zea mays
  Clone ID: MRT4577_130035C.1
gttgcccggtcccgcgtgcacttgttctgccgacgggccaatcccagcttgaggcttgagctcgccctgcggaatggccgcgtgtccttgcgggttaagtaggccaaggacacgccaggacgtacgggccgacagcagcaacgtcgctgccacgctggtggagtggtggtacactggtggtggtgggggtagccgctgcctgcccgagggggttgcggccttccccagttacgagcggcacgacggga

SEQ ID NO: 32922 - DNA, 462 bp, Zea mays
  Clone ID: MRT4577_130036C.1
gcagctgtgactgcgatggagtcccattagactccgaactgaaatgcaccgcccgccgatgcgaggagctgcgaatcttcgttcggtgccgcgtggggactcagatcagtacgaggaagatgtgtcggcatgcgaggcgtgtactttactgcgagctcagatgagatgctgacacagaagctatgccggtggacggggtactccggcgaggaggcgcgtgccacaacgatgcgtacggagatgaatatccgtgttacgtgcacgcagaaagagatgagagagaagggcggcaagaatctggggcgaacgcttggcggtgagaagaggtgtaacttccccttaaacggtggagaggttgagcccaaaaagtggccaatcgttggctctgcgccattggggaggatgagaccctgcggttcaaggtactcagaggcgttgccgatcgggggaacatgtatggtg

SEQ ID NO: 32923 - DNA, 620 bp, Zea mays
  unsure (1)..(620): unsure at all n locations
  Clone ID: MRT4577_130037C.1
ccggtgcctaaactctacagatctgtaattgaagatgtaattgaaggagttcggaatctatttgctgaagaaggtatagaggaacaagttttaaaagacttgaagcagctctgggaaaccaaggttttgcagtctaaagcaacagaagacttcttcagaaatagcatccaatcacctctgtttactcttcagttgccgcacagcttgcaccaaacattgcaatcgtcaacagcatcattagttattcctgctggtagaactcttccaagttttaccacagcagaactgggcacttcaaactccagtgcaaactttacttttcctggttatcccattcatgtaccagcaggtgtgacactacagactgtatctggtcacctttataaagtcaatgtaccaattatggtgacagagacttctggaagagcaggtattcttcagcatccaattcagcaagtatttcaacagcttggccagccttcagtaatacaaactagtgttccacaattgaatccatggtctcttcaagcaacatacctgtatcagagaaggattctaattctcaggtggatntgagcattcgggttactgatgatgatattggtgaaataattcaagta

SEQ ID NO: 32924 - DNA, 540 bp, Zea mays
  Clone ID: MRT4577_130038C.1
atggctgcggcggaggcgcggcgccggtcagcggtctgggccctgctgccgctgctgctgcggctgctccacccggtcgcgctcgtgctggccaacaccgaaggtgcgttcgtggccgggcaattctcagggagggcctcggtgtctgtgtttggttatgctactcagagtgatttgaattttaacaatatatttagcattcatgatgctcatctccatttatcacgccaccatattgttcctcagttgattgactggcatgagggtggatacttgactgttgatttaccaatgtctcggggagaagttgtcattgggggtccaaatgtttcgtcattcttgcctaccgctgtccctttgcttcagaatacggtgaaacagaagtccttcattggctcttctcatcttggctcacatgcagtacttgaataccagtttcttcctgagcagccaagtgatgcatatgagaggggaagccagttgcgcttctatgatgctctagcagaagtgttaaactcaaggaaagaagaacaaatgtag

SEQ ID NO: 32925 - DNA, 660 bp, Zea mays
  Clone ID: MRT4577_130039C.1
cgagaacctctccgccgaactcctgcagatctaattaacctccaccagctgcaccaattgccgctggcgatggatggtagcggacgagctctcgattgccgcagcttctggaaggccggcgcgtacgaagcccccatgctccgaccagggagttccaagatgtccttgagacgggagacttcgaccgcgcgcgcgtgcaccccaagttcctccacaccaacgccacctcccacaagtgggctttcggagctatagctgaacttcttgacaatgcagtggatgagataagcaatggtgccacgttcataaaagttgataaaagcatcaatttgaaagacaatagctcaatgctagttttccaagatgatggaggcggcatggatcctgaaggtgtccgtcgatgcatgagtttaggattctcaaccaagaaatctaagaccactattggccagtatggaaatggctttaagacaagcacaatgagacttggtgcagatgcaattgtttttactcgtgctatccgaggaggtaatgttacattgagtataggtttgctctcctacacttttttgagaaagacattgaaggatgacatagttgttccaatgcttgattttaagatccaagatggggacattgtacctcggccgcgaccacgct

SEQ ID NO: 32926 - DNA, 424 bp, Zea mays
  Clone ID: MRT4577_13003C.1
ctaagttcagcttcattgctgcaaacacatgggttgttagcggttctcctcagaccaaaaaatgcaagatatccttcctcagatcatcagccaacttggaccagacaacatggacaacctgaagaagctagcagaacagttccagaaacaggcttctggtgaaggtaatgccgcctcagcaaccatacaagaagaggatgatgacgatgtcccagagcttgttggagagacattcgaaactgctgctgaagagaaagcaccagctgctgctgcttcttcttagagagaaaagagcgagaccacatccaaaaaaaaaccgcactttgatttttacatatctttataatatgtttgttcgctcgatcctttttgtagtttccgaccagaatcttgttttccatctaatgacttaaggtttttatcc

SEQ ID NO: 32927 - DNA, 290 bp, Zea mays
  Clone ID: MRT4577_130040C.1
tatttctttatgtaaaaggagaatgaaatgaagtgttttttaggaggtctataggtggatcctattatcaactgtagaaacattgtaatacaatacaaaaaacgctattattggtaatttgactttggtcaaatccaacagttttagtatgctcaccaaacaaaaacaactcatcaaaccacttttaacacgctgtaaggatgccaaaaggggagtttaagcacaggtgcaaataaccttccaatggatacctaagatccatgcgggctcaggaacggataatatcactt

SEQ ID NO: 32928 - DNA, 366 bp, Zea mays
  Clone ID: MRT4577_130041C.1
agttaaaaaaaaagataattaataggctgccaccatcatcagccaatagcatgatgccaacccagcgctaactagctctacaggttccatgccccttgcttaccacgggggggcagttaaccatccaccacattcaaaatagcaccgtcagctacaatgtctggagggacatacgaaagcaggcgcccgttgaccgacccggccacaaactaactggtcgccgagctgcacatgcagtgaacactgcccacgttgaatgacgactgttaccaaagctctacgcgtaccagcctaacatgctgcaccgagcgcagaccagctattcgcgctacaggtaccaggcacgcattggacacactgtgttat

SEQ ID NO: 32929 - DNA, 257 bp, Zea mays
  Clone ID: MRT4577_130042C.1
gagaagggccccagtatgggcgtgccccaaaagagaacgcacggttttatttatggatggggtcgtcatacgccccgtcacatcactgaaagggattttaaaaaacaataccagcactgggagttatgcaagctgttatctaaacatttatttacaccagcacgatctggtgcatgcatgtctgaccgggtttactagtgaacactactcttgcggacggatccgctccacctgcgatcagattatacttggtaaat

SEQ ID NO: 32930 - DNA, 382 bp, Zea mays
  unsure (1)..(382): unsure at all n locations
  Clone ID: MRT4577_130043C.1
aatcaacaacttaaacattttttattattttcaataaccctttatcggtgcggttaaattaacaactcggccggcatcannnnttctaaaccacacaatacttcaaaacaaacacacataacacnataccaaaaccaactctcggcaaatcaccttataatttcancacactccccttattcttcttcatcancaaacttttctattactcttcaccctcttcaccatcctctccctcatcnaactcaacaccaacctcctcttattccttctcaacctccaccacttcctcacnttcctcaaaaaactcaccttcctccatacccttaccnacttaccaattcacttaagcactctttncntacattaagtctaacttttt

SEQ ID NO: 32931 - DNA, 750 bp, Zea mays
  Clone ID: MRT4577_130044C.1
ccgggaaacactattttggaaataagagtctttaagactagttctgatcgaacaccaaaaactccctcttttcccataatcaaattttcccccataagagagcagtttttgcaataaagtattcttacactaaaacttttgaagaattcacaagtggtagctgatgcagttgctttggccttaatttctccccctttggcattaatcaccaaaaccgaagaactatttggcctgttaacctcattgtgtcacaaaaatttcaaggaaaccaagggtaatgagaagacacaactagtggcttggaacaagatacattgataccggaatgcagtagaagactcgttctttgtcgaagtccacttattccctttcaatccatctttgagactatatcacaatcactcaagcaaatatattagtctcaaagggtcaagttgtagtacatcctctccctaaacatgtgcatcatgtgagatccgaggatgacttctacaacttgagcaccaaaagtaaagacataaatgcttatagaacatgatcaaaaacataaaacacatgtatgctatagatcaccccaagttccacgaatctaagatatttagctcactacataacatgcaaaaccttttctcatctaaaggcttggtgaagatatcggctagctggttctcggtgctaatgtggcaaacatcgatatctcccctttgctgggtggtctctcaaaaagtgatgcaggatgtctatgtgctt

SEQ ID NO: 32932 - DNA, 369 bp, Zea mays
  Clone ID: MRT4577_130045C.1
gacaactgtctcctgacccaccggagcggcggactccctctgcgcgccgcgcacggcctgttccggtgcggtcgcaggccgacggccggcgacggaggcagcaggaagctactataccaaccggcccaagagaattgcgggtccagaggcagtgatggcggggcgctacgattgacgtgctacgattatgggcatccaaggtaatttcctcttgaagacgcacgacttcctgcagccgttggatcagaagccgggagcgccgccggagccgtcgccgctgcccgcttccgccgcggagagcaggcaccagccgcagcagcaggtcgtcgtcgcgaaccagcacgcgctgcccctgcccggcggcgtcgg

SEQ ID NO: 32933 - DNA, 1384 bp, Zea mays
  Clone ID: MRT4577_130046C.1
agcgattgaaaaatctgcctccgacaattcctagcgcgatccagcagctgcctcggatcggatcggattggaccggcgccggaagaggagaggaggcgtggggggttcggggcctgcctcgctgccgcccatgtcccgcatgaaacacctgctacgcaagctccacctcgccgggggccccgccggggccgggggcgcagcgcccgaccaccaccgctcgaggcaccgccgctcggggcatccgacgccgacgccgacgccgggggcggcggcggcggcccccgagccgccgcaaccggcggttactcctgccgcggctgtgtcgatcgcccccgtggtggaggagcctagaggcctcggggcggaggcggccacgacgcggctggaagaggactaccaggtgcgcctcgcgctcgccatctccgcgtcagaccacgcggggctcgtcgacgcggactccgtccagatccgcgcggcagagctcatcagcctcggggccggcgcggggtccggacacgaccggagccccgcggaggccctctccgcgaggtactggaaccacagcgtagtcaactacgacgagcagctccccgatggcttctacgacgtctgtggcgcgcagctgcatcccggattccaggccaaattcccctcgctcgaatacctcagggctgtcccgcttgggcgcgatgccccgttcctggccattttggtggatcgggagcacgaccctgccctaaaacgactggaagatagggctgcacagattgctgcgcagactagggcaggacatggtggtgctgcttcagctgagcttgcgcagaggattgtgggtctcattgttaatgcgatgggcggtctggttgaggatgctgatggtatgaacagggagtggagcatcaagagccgcgagctctctctccagctaaacagtgtcgttcttccacttggctcgcttcgggttgggctgtcgcggcacagatcactgctatttaaggtacttgctgaccgagttaacctaccatgtaagcttctgaaaggaatatgttataccgggacagatgaaggagctgttaacttggtcaaagttgattttgacagcatggaatatattattgatttgatgggagctccaggcaccttaatcccttcagacatttctgggagtcagtttcaggactccaacaatagccaattgagcagtgatgccattgaagagagtgtagcagaattgtgcttagcccttgagcagattaatggtggatatgagaacaaaaatactattggaggatgctcatctggtcacagttctattttagcgctcactagttcacacctgggagatttatctcagacagagcttaaacaaaatgttgtttctgag

SEQ ID NO: 32934 - DNA, 293 bp, Zea mays
  unsure (1)..(293): unsure at all n locations
  Clone ID: MRT4577_130047C.1
caacaccatcatcagactcagcgtttagctgctgcatgttactatattaaggagcgangccgcctgnggggggcagttcaaattaagaagccggnccacgccanctgtaagacataacctaaatataataaaaaactattatacataaaaaaatgacaccaaaaaacaacggccatactctctaaaggaaccaactttacgtacgcagacatatctacatctgacacattctaatacagtgacacaaaatccaattcacataaccgccgtaatacaacagccagaataacaga

SEQ ID NO: 32935 - DNA, 2357 bp, Zea mays
  Clone ID: MRT4577_130048C.1
gcccttcagagctcaggtgtggatctgtcccaaaccagcatctcgctccagatcaacctcgaagcgaagccagggcaaggtcgtcggagccggagagggaggaaggtggagaacctctacctgcgtcacgtgacaactgtctcctgacccacaggagcggcggactccctctgctcgccgcgcgcggcctgttccggttcggtcggcggccgacggccggcggcggaggcagcaggaagctactgtaccaaccggcccaagagaattgcgggtccagaggcagtgatggcggggcgctacgattgacgtgctacgagactggacgctctctcttggattggttgcacatcgcgtgctcggcgatgggctgagaccccggctgtggattctttttgatttgatcgctcccgccgccatcccctgtctagcccattgtctttacgtagtttccgattgaagacggaagattcccagtgcgcattgtgtagccgctcgtgttggacaccggcttccattcagctgagcagctccttcgcgtagatgaggcactagccgcaccatcaggacctcgtcgcgaaccagcacgcgctgcccctgcccggcggcgtcggcaccttcagcatcagccccgcgcccgtgtccgtcgcgctgccggcggccgtcgtcaagtcggagccgccgttcgtgctcaggggccaggatgcagagaccgaccacatggctagcgcagggcaccagcagcagtgggcgctccccttcgccggctccttgcaggtcagtccgccgccgcagcaggcgcctccggatagaaagggccgcggcggcgccggtggcggggtcatggagtctggctccagatccagcggcggggcggggttcgacgacgacgacggcctcaccacgcgccgcgaggtctcctcttcgctccaagatttggcagtaagggtggaccggaagggtgggagctgcagcgatggcggtacggatcaggggccaaacacaccacggtcaaaacactcggccacagagcagcgcagacgcagcaagatcaatgataggtttcagatacttagggagctgttgccacacaatgatcaaaagagagacaaagcaacatttctcttggaggttattgaatatatacgttttttgcaagagaaagcgcaaaaatacgaggcaacattcccagaatggaaccaagaaaatccaacgatgcttccgtggagtaaaggccaaatcccaggagattccccgcctgacccttcacatttcgatgagaaatggatcctcccctggatctaatttcactgggaaacttgatgataatcacaacatagtgacatctgcagctgcatcaggggcacaggatcaggcagaaaccgaccacatggctagcggatgctacagatcagcagaaactacggcgaattttacaaataatgctatgtctcagtcccaacctcaatggactggtccgtcccctgtggatgactctgcagtgaacagtgagacgcttaacaaccagcagttggtgattgatgaaggaacaatcagagtgtccagtaactattcccaagagttgcttaactcgttgactcatgcccttcaaagctcaggtgtagatttgtcccaagccaacatctctgtgcagatcaacatgggaaagcgtgccgccaagagacccgctgctggtgtatccagcaactccaaggaaccagctgatccggcatctagcaacgaattagggcatcagttgacgctgtcgggtgccggtgccgactgcctctctcacgcaacaaagcggcataaacggagcaacagctgatggccgctctccctcacctcgctccccgaccgacggacggacggatgacggattggtgacattcttcttttccctcccagccaacggggaggctcgtggattggctggctggctgtacattgtgtgctgtgcttggtgacaagctgagacctccggcgtattctttgattcgatcacccccgcgcccgccatcccattgtttacgtagagaagaggaaccgtggagcttttcatcgcggattgtgaagccgctcttgtacacaggcttccattcaatgtgagaagcttccccctccttgacacatctccgtgttgtagacctgtagccacctgtaagatatgtgatgatgcccaacaatcaactctgccagaccactggctagtcgagttgttgggttactttatgtacggtgttctgttatgctgggagtgtaattgccccgccgtctcagtgaactgttcgtcagttgtgtgcctgttgtgccaaaaaaaaaaaaaaaaaaaaaactcgagactagttctctcctcgtgc

SEQ ID NO: 32936 - DNA, 2755 bp, Zea mays
  unsure (1)..(2755): unsure at all n locations
  Clone ID: MRT4577_130049C.1
cccagcgtccgcccacgcgtccggtagtatactagaagaggaggaggagagggagaagacgaagcgaagccatagcaaggtcgtcggagccggagagggaggagggtggggaacctcttcctgcgtcacgtgacaactgtctcctgacccaccggagcggcggactccctctgcgcgccgcgcacggcctgttccggtgcggtcgcaggccgacggccggcgacggaggcagcaggaagctactataccaaccggcccaagagaattgcgggtccagaggcagtgatggcggggcgctacgattgacgtgctacgattatgggcatccaagggaacaaggcggcgacgcacgagcacgacttcctctcgctgtacgccgccgccgccgccaaggacgctcctctcctgctacacgactccaaggcgccgcctccttctcaaggtaatttcctcttgaagacgcacgacttcctgcagccgttggatcagaagccgggagcgccgccggagccgtcgccgctgcccgcttccgccgcggagagcaggcaccagccgcagcagcaggtcgtcgtcgcgaaccagcacgcgctgcccctgcccggcggcgtcggcaccttcagcatcagccccgcgcccgtgtccgtcgcgctgccggcggccgtcgtcaagtcggagccgccgttcgtgctctggggccagcctgccgcgacgctccatccgggcgcgcgagggcaccagcagcagtgggcgctccccttcgccggcgccgggcaggtcaggctgccgccgcagcaggcgcctccggatagaaagggccggggcggcgccggtggcggggtcatggagtctggctccagatccagcggcggggcggggttcgacgacgacgacggcctcaccacgcgccgcgaggtctcctcttcgctccaagatttgacagtaagggtggacaggaagggtgggagctgcagcgatggtggtacggatcagcggccaaacacaccgcggtcaaaacactcggccacagagcagcgcagacgcagcaagatcaatgataggtttcagatacttagggagctgttgccacacagtgatcaaaagagagacaaagcaacatttctcttggaggttattgaatatatacggtttttgcaagagaaggtgcaaaaatatgaggcaacatttccagaatggaaccaagaaaatgcaaagatgcttccatgggtaattgcttcattctccaaagctccaatgcttgctagttgctactgctgtcagggaaggaacagtcaattcttgattgtctgtgtctgaatgtagttatacatttttgcagtcaaatatgtattttcgatcattctggaaaaatgcacaggcaagtgtttgttgctaacaatgcatttgccttactgaatcgttaatgatgtatcaataatttccgaccaacaccttatgcattcttgttatccttgtgctgcagagtaaaggccaaatctcaggagattccccgcctgacccttcacatttcatgagaaatggatcttcccctggatctaatttcactgggaaacttgatgataatcacaacatagtgacatctgcagctgcatcaggggcacaggatcaggcagaaaccgaccacatggctagcggatgctacagatcagcagaaactacggcgaattttacaaataatgctatgtctcagtcccaacctcaatggaccggtccgtcccctgtggatgactgtgcagtgaacagtgagacgcttaacaaccagcagttggtgattgatgaaggaacaatcagagtgtccagtaactattcccaagagttgcttaactcgttgactcatgcccttcaaagctcaggtgtagatttgtcccaagccaacatctctgtgcagatcaacatgggaaagcgtgccgtcaagagacccgctgctggtgtatccaccaactccaaggaaccagctgatccggcatctagcaacgaattagggcatcagctgacgctgtctggtggcggtgccggtgccgacggcctctctcacgcaacaaagcggcataaacggggtagcagctgatgtccgctgtccctcacctcgctccccaacggacggatgacggattggtgacattcttcttttccctcccagccaacggggaggctgtacattgtgtgctgtgcttggtgacaagctgagacctccggcgtattctttgattcgatcacccccctcgctcgccatcccattgtttacgtagagaagaggaaccgtggagctttccatcgcggattgtgaagccgctcttgtacacaggcttccattcaatgtgagaagcttcccccctccttgacagatctccgtgttgtagacctgtagccacctgtaagatatgtgatgatgtccaacaaacaactctgccagaccactggctagtcgagttgttgggttacttatgtacggtgttctgttttgctgggagtgtagttgccccgccgtctcagtgaactgatcgtcagttgtgtgaaaaaaaaaaaaaaaaaaaaaaaaaaaaaaaaaaaaaaaaaaaaaaaaaaaaaaaaaaaaaaaaaaaaaaaaaaaaaaaaaaaaaaaaaaaaaaaaaaaaaaaaaanaaaaaaaaaaaaaaaaaaaaaaaaaaaaagggggggcggcttttaagggaacccaagtttacttccccggggcttgcaaaagaaaaagctttttttttaggggccccctaaaata

SEQ ID NO: 32937 - DNA, 320 bp, Zea mays
  Clone ID: MRT4577_13004C.1
gtgtggtatgaccaataatatatgcatgatcataataaagttttggttttaatgaaagggaaaaagaaaaaaaaaaaaaaaaaaaaaaaaaaaaaaaaaaaaaaaaaaaaaaaaaaaaaaaaaaaaggacaaaaaaaaagaaggactcaaaagaaaaaaacaacatattaaagagcaaaagactgcaataactgaacagaaaagtgaaaaaaacggaacctgtgaaaaaataggaagacctggaaaaaacgttagtgcatcaaactgagcacattgaagataaatcacgttttagaaagctggatgtgaacatattagac

SEQ ID NO: 32938 - DNA, 111 bp, Zea mays
  Clone ID: MRT4577_130050C.1
tcgttcacgcgtacgcttatgcggtatgacctaactatttgccaaaccctttgctttgtgctggacaggaaactatgatgcctactatgataattcacaggtctatcgatg

SEQ ID NO: 32939 - DNA, 873 bp, Zea mays
  unsure (1)..(873): unsure at all n locations
  Clone ID: MRT4577_130051C.1
gccggccgttccgggatttctttccttttcttttaacagagcctaatcatgattagacactctttagctttccatcaattccctatgaaaaaaatcttgtcacgaacttttgcaacagcaactgcacaaaaagtgacattgattcctggcgatggcgttggccacgagctagccgagtctgtcaaggctatcttcaaggcatccaatgcgcccgtcgagtgggaacagttcaacctgtctggccatgactcgagcaacgacgatttgatgaaggaaaccttggcatcgctgcgccgcaacaaggtgggcttgaagggtatcttatatacacccgtctcaagattaggtcatgcttcttttaatgtatccatgcgcaaagatttggacatttatgcctctatctcattggtcaaaaacataccaggtgtcacatctcgttttaataacgtcgatttagcgatcgtgcgtgaaaatactgagggagagtatagcggattagagcatcagtctcatccaggcgtggtagaatcattgaaaattgtgacacgacgtaagacggaacgtattgctcggtttgcttttgattttgcgctaaagaaccatcgcaaaaaagtgacttgtgtacacaaggctaatatcatgaaattgggtgatggactattcttgaggacagtcaaggacatttatgaaaaggaatattctcaaacagacatcctattgaatgacatgattgttgacaatgcatctatgcagcttgtctctcgtcctcagcaatttgatgtggttgtattacctaatctctatggtaacattctttccaatgttggtgctggccctgatggtggaccagnacttattcctgggtctagtatc

SEQ ID NO: 32940 - DNA, 457 bp, Zea mays
  Clone ID: MRT4577_130052C.1
ggccgcttttttttttttttttttttttttttttttttttttttttttttttttttttttttttgtttttttttttaaaaaaggttttggggggtttttttttgaaaacccataaccaccctctcaataaaagttttcaacccaggaccttacctaatgacaacctatgcatccttattaggctaagggggggagaacaaaaatacacaactgttttttactactactacccttctattggacccaagtgaaaaattgcaaaccaaaaactttcaccctcgaaatcacaaaaaaaaggccttggaggcatttgcttgccataaacactaatttgaaccatctctatgacctcactcatcgcctgttgatcttgcgccttcattgggacgcaccaaaggccaaggatacatagttttttttttaacccccgcatataaacaccttactgatcccgccc

SEQ ID NO: 32941 - DNA, 556 bp, Zea mays
  unsure (1)..(556): unsure at all n locations
  Clone ID: MRT4577_130053C.1
ataaaaaaaaaaaaaaaaaaaaaaaaaaaaaaaatattaaaaaaaaaaaaaaaaaaaaaataaaaaaataataacactaaaacactaataaggaaataatactataaaatattaaaaatatttggcccttgcgtgcatccttcttttagtgggcatttttggccttttttattaaccttttattgccctttggtccttcttttttaaaccccaattaaaccctttaacccccccggtttcccacctctttgggcctttttttaaataaccccttttttcggaaggccctcttagtttcccaaactttacgcccttttgtcctcctttccattttttcccttttgcttgttttggggaggccccccccccttttggcccttttaaccgcggtggtggccgtttttggccgggtgcccccccctctncgcttcttccctgttgccggcggctggtggtttttccttttcttctcttttcccgttttgtcgccttttcccccggggtttttaacttccttttcctttttttttttccccctttggggttttttcccccc

SEQ ID NO: 32942 - DNA, 453 bp, Zea mays
  Clone ID: MRT4577_130054C.1
gccctttggttttcgaggaaaccgaaaggggatcttgtctttcctgcgccgttcccactccccagcgcgctaggggttgcagggatcgccccgctcgtgtaaagattacattacattcatataggagtctatggctaatcttgctcgtttcccctgtcccagctgctcctgcacccccccgtctcgatccgtttcatcaaccggaccgagatcacttttccctcccgacttttttgtagctgccctgcctgcctgcctgctcctccactactcacgccttcccccgtatggttggtgaaaaaaatggattgccactgcctcacttcacgcaattccgcaccggtggttgcaccaaaagcgtcgctagctttttcacgcatgccccttccttcttttccaacacaaatatctcttacagagattttttttttggccgtgtactagtgtagtata

SEQ ID NO: 32943 - DNA, 507 bp, Zea mays
  Clone ID: MRT4577_130055C.1
tgtgatggatatctgcagatcgtccttagcaggggtaacaacgcagagtacgcggggtgtcaaaaaaaaaaaaaaaaaaaaaaaaaaaaaaaaaaaaaaaaaaagtactcatgagaagaaacaacagaaaaaagggagaaaaaaaaaaaaaaaaaaaaaaaaaaaaaaaaaaaaaaaggcctctggggtggggcccccggttgagggggggattccagccccctgggggccgtgattgggggtcccaggcccggccccaagccgggcggaaaaaggaaaaaatgcaggttccccgggggaaaaggattgaggccaaaaattccacacaaaaaacgagccggacccaaaatgtgataagccgggggggcccaatgggggggttaactcacattaaagggggtgggctaatggccccttttcaaaggggaaaacccgcggggcccgctgctataatgaattgccccacccccggggaggggggcctgggctatagggccctttttcgtt

SEQ ID NO: 32944 - DNA, 224 bp, Zea mays
  Clone ID: MRT4577_130056C.1
cggacgcgtgggaaaatactcaccagctttcttggcagccatctgatagcttctccaatatagcgcgcgcggcccaactaggggatccatcaaatatccacgcctatcatgcgccggcgccgtctccaccacgtggaggaccaactcgtgggtgagctactcgaacgacatccacaacctctgcaccaggcatagcggctccttcgtccccatcttgacctacc

SEQ ID NO: 32945 - DNA, 531 bp, Zea mays
  Clone ID: MRT4577_130057C.1
tcgagcggccgcccgggcaggtacttgtaaaaaaaaaaaaaaaaaaaaaaaaaaaaaaaaaaaaaaaaaaaaaaaaaaaaaaaaaaaaaataaaaaaaaaaaaacacctaagaaaaaattataaaaaaaaaaaaaaaaactccctggccccgtgaacccccctttgggggaatttttggaaatttctataacattggggggcgctttaccttgcctttagggggcccatttccccctttggggggccgttttaaaattcattggccgcgtttttaaaacctttcgctttgaaaaaccttgggtttccccaattaaacccctttggagcacattccctttttgccgggtgggttaattggaaaagggccccccccgtttgcctttcctaaaagtgggcaagctttattggtaaagggcccccccctttatcggtcctttaacgccggggggggggggggtttcccccaaggggctccttttattttgccaggcccctagtccccccccttttggtttttttcctttcttttt

SEQ ID NO: 32946 - DNA, 3613 bp, Zea mays
  Clone ID: MRT4577_130058C.1
ggacttgcattcacagttgcacgccggccgccgccaaccccgcccccacgtcgcgcgcgctgtctccctctcgcctctctcgtggagacgactgggcgacagccgacagccgctgtcgcccaacgcaagctgcccaggtcttcttcgggctcttcgccggcgacgagcacagccaggtttaggtcgagcaggggccgatgggggaagaggcggagagcacctgcaagcgcaaggcgccggactcgagcgtggaagagcagccgagcctcgcgccggcgccggcgcagtcgcaggcggacccggcggccaagcgcccgaacatctcccgctcttgcgtccacgaggtagccgtcccgaatgggtacgagtcggttaaggacgaggcggtgcacgggacgcttgccagcccggccttcaatggggagatggccaagcagtacccgttcaagcttgaccccttccagagcgtctccatcgcttgcctggagcggaacgagtccgtgcttgtctccgcgcacacttccgcggggaagaccgtcgttgcggagtacgccattgccatggcgttcagggacaagcagagggtcatctacacctccccgctcaaggccctgagcaaccagaagtacagggagctcagtcaggagttcacagatgtcgggctgatgactggcgacgtcacgctccatccgaacgccacatgcctggtcatgacgacagagatcctcagggcgatgctctacaggggctccgaggtgatcaaggaggttgcctgggttatattcgatgagatacattacatgaaggatcgtgagagaggggtcgtgtgggaggagagcatcattttcttgccccctgccatcaagatggttttcctttcggctaccatgtcgaatgcgaccgaatttgctgaatggatatgcagcctgcacaagcagccctgtcatgttgtgtatacggacttcaggcccacaccattgcagcactatatgtttccaataggtggttctggtctttaccttgtagtagatgaaaatggccagtttagagaagataactttgcgaagctacaagactcctttgctaagccaaataatcaactggatggaaggaaaggtggtggacctaaagcgagtggccgaattgcaaaaggtggaagcgcttctgggaattctgacatatacagaattgttaagatgattatggagcgcaagtttcaaccagtcataattttcagctttagtagaagagaatgtgagcatcatgccatgtctatgtcaaaacttgacttcagcactgaagaagaaaaggaatgcattgagcaggttttctgtaatgccattggttgtttagtggaggaagacagaagtttacctgctatagagttgatgttgccactccttaaacgaggtattgcagtacaccattctggactacttccaataattaaggagctagtggaattgctctttcaagaaggtcttgtgaaagctctctttgctaccgagacatttgccatgggtcttaatatgcctgcgaaaacggttgttttcacgtctgtcaaaaaatgggatggcgatagtaaccgctatattggttctggagaatatatacagatgagtggaagagctggccgccgtggcaaggatgaacgtggtatctgtgttataatgatagatgagaagatggaaatgagtgttatcaaggacatggtgttaggcaaaccagcacctctagtcagtactttccgtctgagctactacactattctgaacttaatgagccgtgtggagggccaatttaccgctgagcatgtgattaggcattcattccatgaatttcagtatgagaaggcattgccagaaatagctcaaaagattacacggttggagaatgaagctaccttgcttgattcttctggcgagactgatcttgctgaatatcacaaattggggcttgatatatctgaactggagaagaaaatcatgtctgagatgattagaccagagagggctttgttgtatttggttcctggaaggctggttagagtgagggatggttcaacagactggggatggggtgtggttgtaaatgtagtgaagaaacctccagcatctgggactctccctcctgcattaagtgcatcgcgcagcaacaactatacagtcgacaccttgcttcactgctcctctaattccagcgagaatggatcacgttcaaagccatgccctcctcgcccaggggaaaagggtgaaatgcatgtggtgcctgtaccattgcctttagtatctggtctaagcagtgttagaatcaacattcctcctgatctacgaccacctgaagcaagacagaatatactttctgcagtgcaagaactaggaaagcgctacccccaaggtcttccgaaactacatccaatcaatgacatgggtattcaagaacctgaactagttgacttggtacataaacttgaagaccttgagcagaaacaatgctctcaccgacttcataagtccggtcaaagtgaacaggaactatcatggtaccaaaaaaaagcagatctgaatactgaaattcagcaactcaagtcaaagatgcgggattcacagctacaaaaatttagagatgaacttaggaaccggtcccgtgttctgaagatgctggggcatattgatgctgacggtgttctccagttgaaaggacgtgctgcctgtctaatagacacaggggatgaactgcttatcactgaacttatgttcaatggtacatttaatgatcttgaccatcatcaagttgcttcccttgctagctgctttgtaccttgtgataaatcaagtgagcagatacgcctaagaaatgaactttctaggccgatgatgcagcttcaggaggctgcaagaaaaatagctgaggtacaacgagaatgcaaactggaagtaaatgtggaggaatatgttgaatcaacctgcagaccctaccttatggatgtcatatactgttggtcaaggggagccacctttgcggaggtgatggaaatgaccgacatatttgaaggaagtgtcataagacttgctagaaggctggatgaatttctgaatcagttgagagctgctgctgaagccgtaggggaggttaaccttgagaagaagttcaaaaatgcaagtgagagtttgcgtcggggtatcatgttctccaactcactgtatctgtaattagcactttagcagcaatagtaccatatgttagccgacaaatgctagcggcgggttttgacctgaagcaaaatatgcgttgtctgtaggagagggcattgccagatagcctctgtaaccttgtactctagttcctagactaaattaatttgttatcatgtatacatcagggtaggcgtgatgctgtcttaagaaatccaagtgataccaatttaagggcctgttattgaatagtgaggggttctagctccctcaatcctctctggtactcttgcttccaaagttcaaatcctaaaggtctaatatcactgttggttatgctctaaaaaaaaaaatatttaaagggcgaaagataaagagtattaatagattaggaacgcgtggaatgggatgttatagat

SEQ ID NO: 32947 - DNA, 339 bp, Zea mays
  Clone ID: MRT4577_130059C.1
ttttggtggacaacatacaataaactgtgcaattgaatactgtcaccacaaccacatatcatctaataaattgacacagcatcaaaagaccgtatcaggggcctcaccatgtcttagcacacttattcatgcaataaggggatgttgcaacatgaacactaaacactgataagtcaaaattacagtatccgaccgataggcatactatcgctcgacaataatgtactcccggattaaaagactacaccgccttatggaaccatcctaaattaaccactcctagaatgctggcccgatgatgctggttcttgctaactaaagcgtctcattcttcgactg

SEQ ID NO: 32948 - DNA, 593 bp, Zea mays
  Clone ID: MRT4577_13005C.1
ccggccgagcatcagacatgcaccatctgacaatcaccataaacagaagctctcaatctcactgcacaccgaagaaaaagagatcactcgcggcgccagcatgaagtggagtaccccgtgtcacaagatctctgcggaagacgcccacatgaccattgaccaggaagccggcaagctggtggtcatcgatttcactgccgcctggagatggtgattgccaatgtattgtctgagagtccgacaagggcccatgtacgcttgtccgggtctgctacgagtgcaattatgtgtctttccaccgaaggcgtgtgatctgtggaggagtcgctatctctcacgcttactaccgcggggagtgcacccactaggagagggactggtacgggtgcgcctagatcgtgaatctcggaagcgccgagatagatctcttctatgagtgcaacaagtatggttttagaaagagatgaccgagaaaatgcacctctgtgtgggtcactttcggtgcgtggactactctatggcactgaatactgcgaggagtacgcttgaaaaacagctttgtattctcgctatgagcttataattgatactcc

SEQ ID NO: 32949 - DNA, 409 bp, Zea mays
  unsure (1)..(409): unsure at all n locations
  Clone ID: MRT4577_130060C.1
aaagcgangacaccgcaggcgctcgcacgcaagcgcgcaatacggttctaggtcgacaccttgcttcactgctcctctaattccagcgagaatggatcacgttcaaagccatgccctcctcgcccaggggaaaagggtgaaatgcatgtggtgcctgtaccattgcctttagtatctggtctaagcagtgttagaatcaacattcctcctgatctacgaccacctgaagcaagacagaatatactttctgcagtgcaagaactaggaaagcgctacccccaaggacatgggtattcaagaacctgaactagttgacttggtacataaacttgaagaccttgagcagaaacaatgctctcaccgacttcataagtccggtcaaagtgaacaggaactatcattgtaccaa

SEQ ID NO: 32950 - DNA, 230 bp, Zea mays
  unsure (1)..(230): unsure at all n locations
  Clone ID: MRT4577_130061C.1
gccccttntttatatcggcacagcagacgaaaaaggcgagggggattctaatcgtatctacagcgtatatccgactggcgacactcacaacgcgaattattgacacaaaaacacgagtagctcacaaacatagaacggctgcttgagatcctaccaattagtgtcacaacccccggaaggactggcatataacatcggcgccttatacatgggtatcccggttgaagaaa

SEQ ID NO: 32951 - DNA, 1701 bp, Zea mays
  Clone ID: MRT4577_130062C.1
atggtcgcggaccgtccgtcaggtaggcacggacagtccggccctttagcgcggatagtccggaccctgacagaaagttgcactttctttctctatgattgtggcgttatcaacaattcacctatggttatttctcacatctattgtagtggtctgggtggtcttcggaagaagcttgccggtcgtttcaaatcaaagagtcctcgtgcagacgatgcagactacaatccaaccacagactcagaggcccaatcttcagctgggggtagtgtctctatggacacagaagatgttccacatgctcatcctgactatctgattgacatcacaggatggacttatccaaagaggaggttctctatggtagaatattgctccaggaggactatcaatcaatatgctctgccctcagacaccaatattcaattctttcacactcagctccaatttgatgtattttggggcacactgatggataccaactttcacaagcatcaagtgatagattggacttttatgccgggacaatcagttatggaggacctgattccaaaatttgaggcatgtggtctctatcactttatgggtcagagaactgattttagtgagatggctgtaaagcaattcctagccactgctgagattgatattgatgaggaatccatcacatggatgactggtttcaagaggtattctgcaacatttgctgaatttgctactgcaaatagttttgattataatacaatttcagctaggattgatttgtacactgaagataactttgaagaatttgtgcaattctatgagccagcaaggctgggaattcctagaaggtttggtgagacagcaggactgaggcatcatcttgctgtgattaacaaaattgccagagtcacaattcttcccaagagtggagacaagagtaaaattagagacaagttctggaacattatccaccatgtcatgaatggtgaggtaatgaatgttgtgctattcatgatgagacaattaaataacctcaaaatggacaaaaaccagaacttagcctatgctccttacattatggctctcattaaagccaagaccatatttgaggggcactgtgagaaagttcacacaccttttaggcccttcaagaatgagactgggttcctcaccagacctcttactcccttcccagatgatgaggaagacgctggttatgatgcaggagaagctcctgaagctgatgcagagcagatgcctcctccaccacctcctcctcggcctcagcagtactggcagcctggtccaggctattttgacccttactttcagaacatacagcaagggcttcagacccacatggatggccgcttccagggaatgatgacccatatggaccagcgcatggatgccatccaatctcgctttgatgataacttggatgcgctaaactctgagctttctgaatttcgtagtcacatccaagaccatgtcactgatcccatcatgaccaaactaaacaacatgcagcagagtttccaggacaacatgggggctctgtctagtcagtttgacaatctctctaccaatgaaagcatgcaagagataagtcagaggcagcagcagctccagcaggactttgggcatttctcctctctctttgacaccttcagcactcactattatagcatgtatcctccacctagtggtcagtga

SEQ ID NO: 32952 - DNA, 534 bp, Zea mays
  Clone ID: MRT4577_130063C.1
aattcggcacgaggtgaatttgtgtggaaagatcgttatcatggcatgtcagaacgatgcggacgtgtgggtgaggattctgaaaatgataccatttatcattcagagctattcacattaacgaagaagatggcaagaggaacacctacaaagatatcttttaatgtaccaatatttgaacctcatccgccacagtactatatacatgccatctcagactcatggctacatgctgaaacactcttcactgtttcttttcataatttgacattgccacagacacaaataacacacacagaactcttggacttgaagcctcttccactgagtgctcttggcaacaaaacgtatgaggatctgtacagattttcccatttcaacccgatacaaactcaggcttttcatgttctttatcacactgataacaatgtactcttgggagctccaactgggagtggcaaaacaatttcggcagaacttgcaatgctccatcttttcagtacacaaccagacatgaaggtagtttacattgct

SEQ ID NO: 32953 - DNA, 343 bp, Zea mays
  Clone ID: MRT4577_130064C.1
agggtgttttttaaattttcccaccctagtagaaatccccatatctgtggtggtgttgtttattggattcgatgctcctagtgagtcgactccatctgattggtggagtcggggcaccagccaccatgtgcgcggcatcttgcctggagccacgctgcccggccgcgtgcgtgccaggcgtgcccgaccccggccgccaccatccgcccccgctccgcccgcatcgcctactgcggcctcttcgcgcccccctcttcccatcctgggcgctccgcgaggcccccgcccccccttctccagacgaccccctgcattaacaacattcacaagacccccgcaccgc

SEQ ID NO: 32954 - DNA, 594 bp, Zea mays
  Clone ID: MRT4577_130065C.1
tcgtgcggccgcccgggcaggtcaagcttttttttttttttttttttttttttttttattttttgtgaaattttctctaacctcttttactaccaatctatgaaaaacggccatacgacaacgcacataccatgccggggaatgaccagaaatacaaccgtggggagaaaaagagggagagaggaaagagcccaaaagaaaaaaaccaaaaaccctgaacccgaaccccgcggagggcaacccccccagggccacatctcccaggcagccgcacgggggcggccgctgggggccccatccacagggcccagagtggcctaacaagagagcggcccccatttaacggcccttggtttaaaaaaaccagagcgggacaacacctgaagcgacccaaaggaaacgcccctctcccgatgaggccttaaacaaaagaggcccgcaccaaaaggccctccccagaggggcttacacaacagggggaacgcccaatcactgttggaccccccctgtctcaggggatggagggcgcccccacaaggggggccccacaaagggcaccccccaaaggccagccccctaagggccggtcccttc

SEQ ID NO: 32955 - DNA, 369 bp, Zea mays
  Clone ID: MRT4577_130066C.1
ccctaccgtatgtaccctcccgcccaacaatgccgggggatatttagagagcctggcgggttcattacgcccccaccccagggacgcttacaccccggttttgtattctagggccccccccagaaaaaaaaagggtcggcttctaaaaaaaagaagcccgagctttagcggaacgggctttccataccttcaaagcaccccgagggggatcaacggaaattcacaccgaccgttttcagtgcagatggaaaaccggtggttgacaaaccattttgttgacccagcccttgttatgggcttaaggaggtggcccaccatacgcaaagggagtataaagcctaacaagtgttgctccggaaccaaacttat

SEQ ID NO: 32956 - DNA, 260 bp, Zea mays
  Clone ID: MRT4577_130067C.1
tctcgagccgattcggctcgaggtgccaattgctattggtgctaccggattggcccctggtttaagattccgaaatgatgttccaaccggcgggcttgccaacgttgctgcaacactgacgaatcttcatggattcgagctcccagcgactatgagacaactctcgtagaagtggttgataactaggaaccaatagatgaatttttataatttgaaaaacaaacagggaaagctgtagattgcagcccccaaaataattg

SEQ ID NO: 32957 - DNA, 603 bp, Zea mays
  Clone ID: MRT4577_130068C.1
cggggggggtttttttttttttttttttttttttttttttttttttttttttttttttttttttttttttttaaaaaaaagagggggccaacaacgggggcacccgccccgaattcacggggtagggttcgccaaccccgagaccaaatagaagggggggggggggaggtcccaacagattctaacagggtccccgggcgcccaaaaaaataaattaactggcccaaacccttcctttttcccccttcatataagggggaaacagcccaaatccccaaggggggcgggcccctacaagctttggggggcagggccagaacctccctcatcgggggcgtggggggcgttaaaccttctaaaccggggggggtcaggggggaaattcgggggcttggctataatgggggcggacccccccattatgggcccgagcattcctgggcggcctgggggggcccctttgggtccaaccgggggggggggccctggctttctcagcatttgcttgggtttttggggggggggcgggaccaatggcccccgggggcaccgccccggggcctggcttttttttggggggggggggggttttcccccccaggg

SEQ ID NO: 32958 - DNA, 330 bp, Zea mays
  Clone ID: MRT4577_130069C.1
agccccaggctccaaggccgaagagtacggcgcggcccccctcgcgtgtgaccgagatggcgctgccgaataggggaccgttgataccccagcttaagctcgtatcgacggcgatggtggaactggtaaaactacatttgtgaagaggcatctcactggagagtttgagaagaaatatgaaccaaccattggtgtggaagttcatccggtggattgcaccactaactggggtaagatcatgggtgtagctggtggataccggagggcaagagacggtgggtggtgctcacgtgtggatgctgtatgcatggccagggggcgatcatggtg

SEQ ID NO: 32959 - DNA, 2174 bp, Zea mays
  Clone ID: MRT4577_13006C.1
gcacgaggtctcgagttttttttttttttttttttttttgacgaggcaaacatcagtgcttataggcaaacagagtgtgcttttattaagttggcaataacccatacaagccatacacgtacgatggccgtgcataataataatgatacgaaaacacaacttgcatcaagcaaggcacacttgacaatagcaaatactacttatgttcttatataagtaagcaatgactagtaacttgtcgatgcttcaagctccccaatatgtggaggcacacaatatagggcacaagcatttacaggtcccttagaacccgtgaatcttgatgttctctttcttcgcaatcccagcctgaactaggaaagtagcaacattcttgcgctgatcaccttggagctgaatgacctggcctagctctgggtcctgaactacagtaccattgcagcagaattccttcttcagatccttgaggatcttgttatagctgaactctttcttcagaccctggactgtagtcagactctttctgccgttgcgctgctggatgcgcacatgcacataatccttcgttccaggaccagcaccagagtcctcagcatttgcctcagcaaacggatcaaaggcagatggaagctggacgtcgagatcagacatgaaacttggttgttgaggttttgttggcaccgagctgatcaagcttttgatttgttgttcttatgcagaagctctcgctttcctggaggaggcgtggagcgcacgcggttggaggcgaaggcggatgaaaaacgagaggggctgacgggctgtcttctgtctggcttgcgcccctccgacgggttcgcgcacctaattatatgcaccacacgcctataaagccaaccaacccggcggaggggtgcaagccagacagaagacaacccgtcagcccctctcgtttttcatccgccttcgcctccaaccgcgtgcgctccacgcctcctccaggaaagcgagagcttctgcataagaacaacaaatcaaaagcgtgatcagctcggtgccaacaaaacctcaacaaccaagtttcatgtctgatctcgacgtccagcttccatctgcctttgatccgtttgctgaggcaaatgctgaggactctggtgctggtcctggaacgaaggattatgtgcatgtgcgcatccagcagcgcaacggcagaaagagtctgactacagtccagggtctgaagaaggagttcagctataacaagatcctcaaggatctgaagaaggaattctgctgcaatggtactgtagttcaggacccagagctaggccaggtcattcagctccaaggtgaccagcgcaagaatgttgctactttcctagttcaggctgggattgcgaagaaagagaacatcaagattcacgggttctaagggacctgtaaatgcttgtgccctatattgtgtgcctcaacatattggggagcttgaagcatcgacaagttactagtcattgcttacttatataagaacataagtagtatttgctattgtcaagtgtgccttgcttgatgcaagttgtgttttcgtatcattattattatgcacggccatcgtacgtgtatggcttgtatgggttattgccaacttaataaaagcacactctgtttgcctaaaaaaaaaaaaaaaaaaataagtagtatttgctattgtcaagtgtgccttgcttgatgcaagttgtgttttcgtatcattattattatgcacggccatcgtacgtgtatggcttgtatgggttattgccaacttaataaaagcacactctgtttgcctaaaaaaaaaaaaaaaaaataagtagtatttgctattgtcaagtgtgccttgcttgatgcaagttgggttttcgtatcattattattatgcacggccatcgtacgtgtatggcttgtatgggttattgccaacttaataaaagcacactctgtttgcctaaaaaaaaaaaaaaaaataagtagtatttgctattgtcaagtgtgccttgcttgatgcaagttgtgttttcgtctcattattattatgcacggccatcgtacgtgtatggcttgtatgggttattgccaacttaataaaagcacactctgtttgcctataagcactgatgtttgcctcgtcaaaaaaaaaaaaaaaaaaaaaaaaa

SEQ ID NO: 32960 - DNA, 383 bp, Zea mays
  Clone ID: MRT4577_130070C.1
tcagacctgccgcccttttttttttttttttttttttgatttaacccaggcatagagcgattttccttaaaagcccacgaagttaccgacattttgggttttttcccggtgcagcctcacacaacgaaaagccaatttcaaggttgggaccaggaaaaggtttttgatactccttgagggggggaatccggaatacccctcaattcggggatgacacaagaaacaacatttgtacacaaggcccataaaagggggcaagccccaaaagggccgcgaagcttgtgtttttacaaaggctccgcccccttggggaggattgcaaaagtgtgccgtcaatttagaggtggtgaaacccaagcggtctatgaagataccagtggttt

SEQ ID NO: 32961 - DNA, 356 bp, Zea mays
  Clone ID: MRT4577_130071C.1
aaaaaaaaaaaaaaaaaaaaaaaaaaaaaaaaaaaaaaaaaaaaaaaaaaaaaaaaaaaaaaaaaaaaaaaaaaaaaaaaaaaaaaaaaaaaaaaaaaaaaaaaaaaaaaaaaaaaaaaaaaaaaagcgtggcacctaggctgaaaaaaagataaagggaaattttggaaatttccaaacaatgggagaacggatgaagatagcttttaaagggccaaatttgccttaatggggaacacattaaaattaaagggactctatttaaaaaagtactaaaaggaaaaacaacttattttcaaaaataaaggcgatgatataaaaggccttatattccacggatgaaaatagaaaaagac

SEQ ID NO: 32962 - DNA, 311 bp, Zea mays
  Clone ID: MRT4577_130072C.1
ataaacacaggggaaactccggtgacatttctatataaaaacacactggtgcatgcgtcttatgtatttggtgatgggagcaaaaggagaagaatacccatggaactgccaagttctatctttcctttttattctaacagaccataagagtcacggcgctaccactatctaccactctggagagctagcttggatcaatgaacagaacgataccatattctatacacggttgattgcatggggggccactctaacaccactcatgatattcgggcgccaggaggaagctgatggccaacacgcaaataatg

SEQ ID NO: 32963 - DNA, 388 bp, Zea mays
  unsure (1)..(388): unsure at all n locations
  Clone ID: MRT4577_130073C.1
ccgggacgacccacgccgacccacgcagaccggagagagtaacgttcttaggcggcagaagcgcacgaccagccgcaaggaggaaagcagaagatcaacccggcgagacaccgaccancgccaaagatcgcaccacgaacaggtgcaacgaaacaagaaccagaagaaaccctgacgccaaaggcgaacaacaccgaagccgccagagtcgcagaggcaaccacccggaagcgaggcggcgccggcaaacaggagcgagtaaaagggacgcagggccctgccatccggcgagcgaggaaccatgcccagagcccaagagctggagcaactgaactccccaaggcgggaatggatggcagaccgcaagcgcacacacggtgcgcctacc

SEQ ID NO: 32964 - DNA, 319 bp, Zea mays
  Clone ID: MRT4577_130074C.1
gcggggaaatggaaaggaataatatatagggaaaaaggatgtttggaaaaaaaaaaaaaaaaaaaaaaaaaaaaaaaaaaaaaaaaaaaaaaaaaaaaaaaaattaaaaaaaaaaaaaaaaaaaaaaaaaaaaactaaaaaaaaaaaaaaaaaaaaaaaaaaaaaaatccctttctttttcggccccccggccatgaccccggtttattccacagttccccccataagtacccccacgggccatgaaccccccttttggccgaccctattgcctacaccaaccccttgcgcaaagcctctcccaacacccgtttgccca

SEQ ID NO: 32965 - DNA, 188 bp, Zea mays
  Clone ID: MRT4577_130075C.1
ggcctgccagaaggtagcttacataaatatacgatctgggctgtcccgatttggagaggcgcaagggttaatcttacaccgtggtgtgacttatagcgctcgcctctgtcgccgacgttgcagggaaggtcttcttccaggagaagttcgaagatggctaaattccgcgaatgttcaatccatggggt

SEQ ID NO: 32966 - DNA, 603 bp, Zea mays
  unsure (1)..(603): unsure at all n locations
  Clone ID: MRT4577_130076C.1
gggggnntttnaagaaagagaaagagnnggggggagcccatggggaatgatnnattccttgnnnagngagttgaggatggnnaacttttaactgtaccactgagagatgaatttnttgaaaatgcncgncttattcgttttgaaacctattgcaaaattatcaaaggattgacatgggggtactcgnggggaaaattgaatctgaactatgaggaggccgagagatggattgtgaacctaatccgnacctcaaagcttgatgccaagattgattctgagtcaggaactgtaatcatggagcctactcagcccaacgtgcatgagcagntgataaaccacaccaaaggcttatcaggacgaacatacaagttagtgaatcagctcttggaacacacacaggcgcaagcaactcgttagtcaaaattttgctggggaagcctttccttgattaaactcaccttcggttgactggaattattttcttttttcttgctctgagtttacctttttacttttgaaaaagattaattatggaggtggttcttattgnaaaagttgggatcccaggatgggaaaatttcncaacccaaacaggaattttct

SEQ ID NO: 32967 - DNA, 239 bp, Zea mays
  unsure (1)..(239): unsure at all n locations
  Clone ID: MRT4577_130077C.1
cgcccgggggggggggggcaaccaaacaagggggagagacaaaccaacgagaagtatgcccacacaacacaccatcagagggatcgacaccaaaactagcgcaaatacggggcaacacgaaacaaaccccggctccaatcgggaggttgccaggggaaccaaaaanaanaaaacaaaacacactcctaaaacccctnaaattccttacccttaccttcatncttaccacctttccctat

SEQ ID NO: 32968 - DNA, 283 bp, Zea mays
  Clone ID: MRT4577_130078C.1
gtactacacaggcagagacctccgacctggcgtcttgatggggggtagttgggttctcgcctttgcctgcgcctgcttgtggtaagaaataacagccacacggtacccactcgcggtggctgcggcgacgactaatacaacatgaccatgagctactacgcaaaggtgccgggacgccggcagacggtgtgcgtgaccagcaccggcggatacctagggtcgtggatcgccaagctactgctagagcggaggtacggcgtccgcggaaccgcgcgcaaacctg

SEQ ID NO: 32969 - DNA, 1175 bp, Zea mays
  Clone ID: MRT4577_130079C.1
gggtacctcgaggccggccgggtttctccctccgcgcgcggtccgcgccgcggaccgcggaccgcggtcaccactcaccagaagcgctgcagcgccaccccagtcccccaccggccaccgaccacttgccgattgccgttgccgcgtcggcgttgctggatcctcaagcagacagcccagtccgcccggacccgggaacccgcccacgcgcttattaataacggccacctcgttcccccgcccgccccgaaggccgagggaagcgtacgcgcctagcgaccagcacagattcgttccacgcctacctcctgccctcgcccgtgctctcagatctcgcgcgcgccccgcaaagggtaactttgagccatgggcacagttgtggatgctccagcagttgtggctgaagaggtcactgagaacatgttgggtggtaagaaagttacagctgtatttgttctaggtggtcctggaagtggaaaaggcacacagtgtgccaacattgtggaacactttggattcacccatcttagtgctggagatcttttgcgtgcagagattaaatctggctctgagaatggaaccatgattgaaaacatgataaaggagggaaaggggaagggttgataataaacttgaaagttttaaaaagaggttcaaaaaaaattgttgactcaacttttgcctgtcattgagcattacaactcaaaggacaaggttaaaaagattgatgctgcaaaaccaatccccccggtgtttgaagacgtcaaagccatttttgccccatattctttaaaggctgaatagagcaatttaagggacatgataaaggtgatacatggtgtttaggccccacataaacatatctgtgattatgatggaccctttaatatagaacaaaagttttggctcatttgagctaccagggtaccagtaggcaattcgatttgttaccagcaacaagtgatttgattcccagtggtcctgctagagtaacttttttaccactgccccctgctaaccccccctttgatattgtgttgtaccaatgtgcaatttactctatggactgatggaacattgtgccatcccatccaccagatttattgtggcgttatggaaagcatagacccgcaaaaaaaaaaaaaaaaaaaaaaaaaaaaaacaccccaacaccc

SEQ ID NO: 32970 - DNA, 329 bp, Zea mays
  Clone ID: MRT4577_13007C.1
ggtgtgtccttgatggcaaatgttccaccccgaagagccccactgctgctgtattgatgcgcataccccagaccgttttttctaagcctggtgctgctggttctatgtttcagcatccgcacatggcgaaacagaaaataaaaactctttctagactcctagcagacaaaacccttgcccttgatgtacatggtggggcctcaacttctgcctgttgggtctcacggtgctcaaacagaggacgaaaatctcgcagtggaggccgcatatctgccccatccacacccccttggtttgtacggcgagcgtgattccttaaaggatggcta

SEQ ID NO: 32971 - DNA, 252 bp, Zea mays
  Clone ID: MRT4577_130080C.1
atcagatggtaccaacatccatgcgacagagtgcaaatacgtagtagccctgtactgtgatctgcaaaccagcaataagcgtgagccatcgctcaatcagactgcacttacctggccgactaacctgcttacgtctacgaaagatacttcttttgggtagccaagacatgctacaaaggcaagtttgtaggtggctgccctatacaggctcatggtgatggagaccagcggaaccaacatgtgaaatagcaa

SEQ ID NO: 32972 - DNA, 623 bp, Zea mays
  Clone ID: MRT4577_130081C.1
tgaggttgtcagaggaatagccggggatcttgttgaggaggtaaaacttattgataatttcaccaacaagaaaggcatgacaagtcattgctacagaatagcatataggtcaatggaacgttcgctcacagacgaggagattaacaatcttcagttgaatgtcagggaagctgtgaaagataaattgaaagtagagttgagatagcagcagctaattatgctgtcatagcatggactaaattttgcctgtctttatgtaaatcaattaaaaaggattttttatctatcgagaaaatgcgccatttgttcctggcattgatcacgttctcttctgtttagggaagagaaaaggtccctgttccatttgggaatcatatcttgtaattcataaggctttgtttggttgcacagggatcaaaggagattgaggaggattaaatccctctctattcaattttgactaggtagagatttaatcccctctaacctccttttaatccccttgtaaccgaacaagccctaagatgatgagctgtacacttctcactattttggaggacatgtggtttgggaattcatgtttggcctttcaattcaattttggccgttgtaaaaacaaaccc

SEQ ID NO: 32973 - DNA, 3568 bp, Zea mays
  Clone ID: MRT4577_130082C.1
cgtgcataaagcggttccccaacctcgcggggtgcgatccgcgatgctggcgcgggggcaaggggggtctcggtttgaattagttgctttcgcagttcacgcctcccatctgaagggtgcgccaggtgctcttgctgtgtgatctttgtcgccttgtgacgctcgggaccgggttattggcgggagtttgtcagaataatacataaagaactggtgccacgagatcgggggacttcaggatcagggaaaccttgagccatgggcacagttgtggatgccgctccagcagttgtggctgaggtcactgagaacatgttgggtggcaagaaagttacagttatattcgccctcgacactaggggaagcgggaacgatccacaatgtggtagaagtcgtggcggaggttgagttcgccgtccatgaggcgagagatgatcgcaaggaagtaatagttatcgctcttcttgtcggaccgtgtattggacacaggatacaggggggaaacatagttcactcggaggtgactataaagcttttgcaggaggcaatgataaaaagtgaaaatgacaaattcctgatcgatggatttccaaggaatgaggagaatcgtgcagcctttgagaatgttaccaaaatttctcctgcatttgtgctattctttgactgttctgaagaagatatggagaaacgactcctggggcgcaatcagggaagggttgatgataacattgaaactatcaaaaaaaggttcaaaacctttgttgactcaactctgcctgtcattgagcattacaactcaaaggacaaggttaaaaagattgatgctgcaaaaccaatccccgaggtgtttgaagacgtcaaagccatttttgccccatattctctaaaggctgaatagagcaatctaagggacatgataaaggtgatacatggtgtctaggcaccacataaacatatctgtgattatgatggaccctttaatatagaacaaaagttttggctcatttgagctaccagcgtaccagtaggcaattcgatttgttaccagcaacaagtgatctgattcccagtggtcctgctagagtaacattttttaccactgtctgttgtctatgtatcctttgatattgtgttgtaccaatgtgcaatttactctatggactgatggaacattgtgccatcccatccaccagatttattgtggcgttatggaaagcatagaaccgctgccatattctttaatttgtacgctgaaatctaaacgttggaaccaaagtaacattttaccactgttgtttatgtatatcctttgatgttgtgttgtaccaatgtggaatttactttagggttagtttggacagggaaatggaggagatgcatgcgacagagatgcccttgttaatttgtataacaagtggaatactgccccatttaatcccttcattttccttttttccaagtcaggtaatatggaagcttatgccctcttaagattctagggttagtcaatagaattcatggaatgggttgcacttgaattgcttggtggtgactggcaaatcaatcttttagctggttgacttctaatgctgcaaacgtaagacgatcggtagaagctgatctgtccttacattacatcctaattgatataatttgcctggtgtcccaattatgtaacattgtatttctcggtagacaaaagtggttgcttacttgctttgccccatttttctgaaataatccctctcttttttgcatttgatatgtgcaagtttggaattttgttgtacaaagatgcaataccaattgtaatcaaactgcagggtaactttgagccatgggcacagttgtggatgctccagcagttgtggctgaagaggtcactgagaacatgttgggtggtaagaaaattacagctgtatttgttctaggtggtcctggaagtggaaaggcacacagtgtgccaacatcgtggagcactttggattcacccatcttagtgctggagatcttctgcgtgcagagattaaatctggctctgagaacggaaccatgattgagaacatgataaaggagggaaagattgttccatcggaggtgactataaagcttttgcaggaggcaatgataaaaagtgaaaatgacaaattcctgatcgatggatttccaaggaatgaggagaatcgtgcagcctttgagaatgttaccaaaatttctcctgcatttgtgctattctttgactgttctgaagaagatatggagaaacgactcctggggcgcaatcaggtttccttcatctttttgtgttttttagtcacaaaattcttgtttccaatatttcttactgtctatgcagggaagggttgatgataacattgaaactatcaaaaaaaggttcaaaacctttgttgactcaactctgcctgtcattgagcattacaactcaaaggacaaggttaaaaagattgatgctgcaaaaccaatccccgaggtgtttgaagacgtcaaagccatttttgccccatattctctaaaggctgaatagagcaatctaagggacatgataaaggtgatacatggtgtctaggcaccacataaacatatctgtgattatgatggaccctttaatatagaacaaaagttttggctcatttgagctaccagcgtaccagtaggcaattcgatttgttaccagcaacaagtgatctgattcccagtggtcctgctagagtaacattttttaccactgtctgttgtctatgtatcctttgatattgtgttgtaccaatgtgcaatttactctatggactgatggaacattgtgccatcccatccaccagatttattgtggcgttatggaaagcatagaaccgctgccatattctttaatttgtacgctgaaatatactcgttggcaccgaacttttggttgatgacttcgtgatataataaccctaccggcagtaaatatctacgctcaaaaaaaaaaaaaaaaaaaaaaaaaaaatggaggagacccctggggcagagatccccctgttaatttgaataacaagtgggttcctgccccaaatattccctttattttcctgttcccccaaccagcctttatggagcctccagcccttgtgcccccccccccgattcattggggccttatggaaaatcgcgaactgctgccgtatccgtctcatcatgctatggtggctgctcaacgcgcgcaagtggttcaaaggccccgtcaggaacatcgacgaccacaacaacggcaaggtatgaacacttacgcacgtcaagccaaggcctcaatggactgacgccattctgtgctgtttgactccgggacttgggcgctgctgacaccgtctccctccctctcaccctctgtatgttttcgatgctgcatcagcagcacctgtggcctgtgggtgacaactgacttacatggagaacagaggaaaaattgagcaaacacaaaaggaaaaaaatgaatgaccagtatttaagttattttagatggaaacatgtgaaatatttaagtttttgcaacagaaaagttcacccacat

SEQ ID NO: 32974 - DNA, 507 bp, Zea mays
  Clone ID: MRT4577_130083C.1
ccgggcgcgcacgtcggtcgtccctagcagacctcgttcgggcggaggcggcgccgaagcgggctcgcgcggctcgagacgaccgggcacaagcagcaggacacggcgtgtggtatctttttttttgggctcccgtgcccgcgccgacctcggggagctgctctttctgcagcggaagccgccggcccccaccacgcccaagcggtcggccgcccaccacgtcccatgcaaggtgcggctgcccacttcgccgcttctaccgtcctcggactctccttggaggtagcgccccacgcagcatatcctggccatcagtgcgttgtccgcgtctttgtcgcgtgaaatcctccctacagcggtcaccggcgacccggtcgggacggcgaggccgccgcgctgggctcgccgtccacgccgtgggcgcaccaccagctccgcctccccgtcgtccccgccatcgccgtcagcgaccgctccctcatgttcactcatgtgctctacaacctg

SEQ ID NO: 32975 - DNA, 237 bp, Zea mays
  Clone ID: MRT4577_130084C.1
gggaaaagcaggaacttttttttgggttttaattaacttcggaaggttacaattgggggggactttttggggggtaatcaattttcaaaacggggggctcacaggggaaaccaagcttaattgggcaaaacatttggggggatagggttatcccacattttccaaaggggcaaacatatagggtggccctacatatttgtttaaaaaaaaatgctggtttaaaacccacccttcccg

SEQ ID NO: 32976 - DNA, 200 bp, Zea mays
  Clone ID: MRT4577_130085C.1
ttttttttctctgccaactttcacagttgggcgggttttttttaaaatttataaaatataaaagcggcgcactcgtgcaaggttagggtccgtgtcaagatctggaagtggacttttatgtacggtctactggaagataggagacaataacttttaggggctgcagcgcgcaaaaaaaaaagattttcgctgtcatttat

SEQ ID NO: 32977 - DNA, 249 bp, Zea mays
  Clone ID: MRT4577_130086C.1
ttaggccgtttaccctggcgttttttactttaagggcggggactgccgttacgcgcttctttttcctcgtttgccggaaccatgcccgtccgcttttactacaaccagtaaaacgccactgccttgatagccccaaatgttaaaaagggtaaaaacaattggggaattatcaagcaaaaaagcggtcccgccttaaataacaataggtctgaacgggccaatatagttggggtttttcactataatagc

SEQ ID NO: 32978 - DNA, 376 bp, Zea mays
  Clone ID: MRT4577_130087C.1
aaaaaaaaaaaataaaaaaaaaaaaattttaaaaaaaaaaaaaaaaacaatataaaaagagaaggtatactaaaaaaaaaaaaaaaaaaaaaaaaaaaaaaataaaaaataacaaaaaaaaaagtgcactccccttaaataaccaaagtttactacccctaaaatccaacctttacccatttttatagcctccccaaaattaaatttattgcccgctttttaaaaacctcatcaattgaaaaacccttggctttcccaaacttatcccctttcaaaaaaatcacccttttcccaacctgcataatctcaaaaaaccccccccccattagcctttccaacaatttgcccacttcaattcccaacatggcacccccct

SEQ ID NO: 32979 - DNA, 337 bp, Zea mays
  Clone ID: MRT4577_130088C.1
gtgcggatgaatagctcctataaaacaagcacagtcaatctggcactcccggaaccatccgcgttcgagaggactacataaactcccaccggaactggatcatatgcgcacggataagcgagggatcccacagaaacaggcttgtggactgcaatgacctggtcgataccaacagagacatccatgcgatgagagcccgaatccactgagacagcgacacctgtatcatccatggctactgcactggaatggcaaattctgcagatatacatcacactggcggccaggcgagcacgcatatatacggcccaattaaccctataggagagagatatta

SEQ ID NO: 32980 - DNA, 273 bp, Zea mays
  unsure (1)..(273): unsure at all n locations
  Clone ID: MRT4577_130089C.1
cgggtcgagaagaaatgcggcggctgaagcttgggcttgtgtgaagcaggttgctaaggaggaacccttcgataggggagaagctgcttcggttgttgtgcctgacagagggccgagaaagcagcgaaggcgcagtgatgcgggaggaaagcaggctggctgngagtgtgggcgagaggtgtgcatgactggagaatgcagtgggggcacgagtggtcagcgtgcaggaggatggtgtgcgtggagaggcatgctggtgctgcaggctcgtgg

SEQ ID NO: 32981 - DNA, 392 bp, Zea mays
  unsure (1)..(392): unsure at all n locations
  Clone ID: MRT4577_13008C.1
ggttacaataatttttcacatagctgatggaacttctgtttgtgtgaagccaacagatgggccctcctgctaattagaaaccaatttttttagactttttcagcctcctctactgctcatgttgctggcttgtaataggtgggctaggggttatctagagatgacaaggccctcaagttggctttccagcactggatcgaagcgatgagtacaaacgggcagtggggattggtgggttttactgcccattcttgctcttttcatggtacaattatcctgtttttttcctacagtgatgttttattttgtggcaccatctttcgaccataaacaaatacactcactttgatgaatgttgatatactttcagcattcaatngtagatagaattc

SEQ ID NO: 32982 - DNA, 168 bp, Zea mays
  Clone ID: MRT4577_130090C.1
gaccacgcgtccgttcattgttggtcccagtccaccaatccattttctttctcctcacattctcatacccgcggggtggtgtgtcttttataagggaacgtaaatgcaatcaaccttccgatggtttgcaaaaaagctacttgcaaaacccaacccttcccaacttaa

SEQ ID NO: 32983 - DNA, 775 bp, Zea mays
  Clone ID: MRT4577_130091C.1
gactaggtctcattggcaggccgcagcaggtgcagcagagagtggcgactcctctggctgctgctggcgtgctcgtgggtggcagccgcgtcaccccagcaaacagcacggactgatccagccgaagcggcggcactgagcacgatcctggggcgatgggggctgaaggcgtcgccggggtggaacatcagcggcgagctctgcagcggcgtcgccgtcgacgacaccgacgtcgacaacagccccaccatcaacccgggcatcaagtgcgactgctcctacagcaacatcaccgtttgccacatcaccaaactgagagtgtatggcttgaatgttgtcggccagataccagccgagctggagaacctcacctatctcagtaacctgaacctgacgcggaattatttgacaggtcccgtgccttcgttcatagggaaatttcccatgcagtacttatctctggctatcaatctgctatctggaacacttccaaaggaacttgggaaccttaccgatcttcgggcactgaaaagtacaggtggttcaagaggagccatatacgaggatttcgatttgatctaggtggcgtctcccagttgacttgcgctaaggatgatccttagttcgtgttatatttatcatttatttttgtaagacttctgctatgtaataagtactctgattatattgtgacatttatctctatacactctgtaacaccccaggtgttactcagggtgtccaccccagggttaccccctttttccccattatc

SEQ ID NO: 32984 - DNA, 348 bp, Zea mays
  Clone ID: MRT4577_130092C.1
tcgggacggagtcggagcacaagcgacatcgctccccgggggccgtcggccggcgacttccgcagtagaaccaactccacccacccatccacttggccagcagcttcttgcctgcatcaattgccatggcggcggtggaagcgaagaggagcccacactttgttctctttcccttcctggctcacggccacgtccctgccttcctccgcctggcgggtcggcggcggagagcctggaagggttcctgcgatgcgctgaaccctgagatgccccgctttgagatggttgctcgaggaatctgcaactaagtacgcgcgcgggaaatctgtgttcagaatccctcatcta

SEQ ID NO: 32985 - DNA, 646 bp, Zea mays
  Clone ID: MRT4577_130093C.1
cgtttctacgtacactatatgtctgccaccagcgcactagcggtcgctggaacgaggtatattcggagcgtttcttgactctgagtccaaactgccttcacccctgatctggaccgcaggcagcgtctccttccgacagtagttcttgctttgcctgggactcttccacctgcttggtgatcttcactaggatccgttgacctcggacgatatctctggacgactatatgtcggggaatgtgcttggcgccatagtctcactccatcggcaatctattgcaggagagggacaatgccaacatcgcagttgctggtctgcatatatagaaagaatttcgattcaaaatgacccctgtgtggagggactacattgtgtctatgtcacttatcgacgccaccacacgttactacattctccgggacattatcaaactcgattggacgaccacctatgcttattctctcttcaattctgcacttcttcagcggtctcatcatgctatggcctccctagatgatatgtcctgctgctgccacgcttcctaaatggatttgacattgcattgtatgtcaagattgtgcctttgcacatgtcagaaatactcccgttctcacatgataggattgctgaatactactaccacaa

SEQ ID NO: 32986 - DNA, 422 bp, Zea mays
  Clone ID: MRT4577_130094C.1
gtacgtcaacctagcaattagctcatcgacttcatattggagaactcgacaccgggaaggtggggatcgttgcccttgctctcctggcgctcgctgcgagcgccgcctccagtacaagctaagggtgtggctagatatacaccaacgtttcatctaacgccttagtaaataatatcgattacaaattgtctgccgtagaaacatactgccagattcatgctaattatctattaaattaactcacttaatgccgtgccagcaattcagatcctgatccgacacaagcgtcagcataccgttcctcggccaaaacgtaaagttgctgaagcaccactgcattccgacggcaacaccctactgatcgccacagtgccaaacgctgcagcagcactgctgacaccagatcacgcaggtggagccgc

SEQ ID NO: 32987 - DNA, 842 bp, Zea mays
  unsure (1)..(842): unsure at all n locations
  Clone ID: MRT4577_130095C.1
ccctccgtctccctccccacccacgcggacaaatttgtttcttccctgcgtacaacccaacccagcagaagcagccgcgccgcctacctctccctcgccgtcccccgccgccgatctggccggatcgcgccccggatcggccgccgcgcgcgcgcaggttaagggcaaccagacagggctgtttcttggctagacatcatctgaaccatctccaagtgccaaagatggatcatactcaacccagggatgggcatggcaatgaacctgtgcctttaggtcagatgctttttgagcattcgggtagtgatgcgccccttagacttggtcctccaggctttgggagtatggcaagtagatcgaatgacgttccatcttcaagtcatgctacacagtttccaggtcatagagttttgaacgtagggacctcacatgtttcctttgttccctatcgcactgcaatatccagcagccatgtaccatatgatgctcagccgaaacctgccctaagttcccatgtggacaacagaatggttgcaatgaagcgaaagagcctccttccttcagtggagggaatggacgctgttgactattatgtcggcagctcctccaacagtcacttctctgattttgtgcagccaaatcctagtgcacttaccgagcccttgcatccgcaaatgcctttaaacattggtccaagcaactggattgaccaacgcttagttaatcaagaaggatctcagaggaatgtcagagcgcgccatgatagtgctaatatttcattgggacctaggccaacttcaacttacacacccaagtacaatcatcagctgccgntccattca

SEQ ID NO: 32988 - DNA, 279 bp, Zea mays
  Clone ID: MRT4577_130096C.1
ccaaaaaatgtcctttcttatttcggggaagccccaaacatcagacaaaaaactttttttttgaactttacctcataagaaatctaaaagggggcccccccaatgatgggttgttggtaaaatgctgctgggtttgccaaaccaagttggttgaccacaggtagccccagttgctgcacctgttgtgccctgatggtttgtcccaatgactgcaccaaaaatagggctggtgattgttgaaacaacaagggccataaaggtatgttgcttgctgcgatt

SEQ ID NO: 32989 - DNA, 322 bp, Zea mays
  Clone ID: MRT4577_130097C.1
cagaaacacaccaagcgaagcgcactagcaacaacctatcagcaatggctaccaagagattatccataattgcgcttaatgcactttttgcgagcgcaacaaatgcgtccattatgaccacaatgctcacttgctcctagttccattattacacagttccattcaccagatacttaaatgacctaagaacactcaactgtgcaagccgataggctacaacaagcgagtgaagcgatcgtcttacaacaaccaattgcctaattgcaacaacaatccttggcgcatctaacaatacaaaccatcgcaacgcaacagcaacaac

SEQ ID NO: 32990 - DNA, 483 bp, Zea mays
  Clone ID: MRT4577_130098C.1
atgaattattatatcacgggatgtagatatgttcttatgccatggaaattcaacgaatgttacacccttttcgtaatagatcatgttaaaaagcacgtgacttttatcgactttacaccgactgaagattggtataagcacatgccatacaagaggttcgcgaaagcgattatcatggtctcaaagaaatataagattgcctacagcaagaaatgttctggatgggcagaggatatttttaagtgggaacatacaattcagactggtattccaattgacttaagagggcttaataccagctacctcgttctaaaagctatgaccatgtgggggaatgacagacaaatggaatttattagggatgcaaagatacttcgaagtaactctgtgattgatctgttaagttatgaggacaatttgtgtcgatataccatcccttcaaacatacaacagcgacttattgatatcactaaaaaggactag

SEQ ID NO: 32991 - DNA, 370 bp, Zea mays
  Clone ID: MRT4577_130099C.1
gagggaaaacccctggggctcatacctggccctttggcagggtttaaatgtttacaacccaaataaagaatttttttttaaaaaacattggaaaaagggttttgggccatatccccccccctcttccttgggggggggaaccacccaaaaggggtatttttttttttttttttttccaaacagggatattttgcactcaaaaatggtgtttggacaaccggatgcccaaccatcccttttgtccaaataccttatacattgggcccaagtgggggggggcacccccttgggtttttatttccttttggttcccctgagccatttatttttttttattgggtggggtgggggggggaaactattttttttt

SEQ ID NO: 32992 - DNA, 402 bp, Zea mays
  Clone ID: MRT4577_13009C.1
ccacccccggccactctgagaacttcgagactcctggagttgaagtcaccactggtcctcttggccagggtatcgcgaatgccgtcgggttggcgcttgctgagaagcacctggctgctcgtttcaacaagcccgacagtgaaatcgttgaccactacacgtactgtattgtgggagatgggtgcaacatggagggtatcttgactgaagcttgctctttggctgggcattggggtcttggcaagctaattgttttctacgacgacaaccacatctccattgacggagacacggggattgcttttacagaggatgtgagtggccgctttgaggctcttgggtggcacaccctctgggttaagaatggcaacgatggttatgacgagatccgtaaagccattc

SEQ ID NO: 32993 - DNA, 833 bp, Zea mays
  Clone ID: MRT4577_1300C.1
acgctgcgcccccatccgcactccgcatctcccattccatcggcgcccctccatcgccgccccacgagccgcagcagcgcgtcgccctcctcgaggctccacgggcccctgatcctgtcgagctccgcctcggctcccatctcatgtccagtccggtacctcgacggacaaagaagacaaaaacacaacgcgcgccagctgcatcccatggcggccactgcagtcatggctggactggtgggtcctccctctctccgcgtcgccactactactactacaaaacagtgcgctccatgccccatcccccgtcctctgcaccaaatccaggcatggccttgcgcgtttccctcccctcatggcggcatcgacagcgcaatccctcgcgctcctcacgtctgcctcggcattgctcggcgtcgggctcgtggcggcatcggcgatgcgatcccttgcgttcctcgcatctgcctcgacatcgttcggcgtcgggcagcgggcgcaaggtaatttgtctatctcttcctcttcgtcttcggcggggtcggcgtcgctcgtttgactccactgccatcggagagcaagcaaccgcccccggcccctccttgctgatacacgcgtctcctctccaatttgtccctcacgtcccttcccttctctgctatgtggagctcgctcgctcgctgcatatgagttcgttcctcggaccgacctacatatgatgcatccatccatccatggacagatggtcttctcttctttaatttctgtagctcactcttccttgaatattgtagctaattgtttcccaaaaaattgtaaaaaaaaggccccta

SEQ ID NO: 32994 - DNA, 722 bp, Zea mays
  unsure (1)..(722): unsure at all n locations
  Clone ID: MRT4577_130100C.1
nataatagcaaccttcctcgtaataccaaccttagctacctccctctacccttctatcgagagtagctatccatcatgaaacaaagattagctttctttttatttcttgagtgtggatacttgaattccgacttatatgttgatatagtatcaatattgatatagaacgatcaaaaataggtggttgataattgtgcaactatactcttttagtgtggacgtactaccaccaacacccactcaaccttttatttgttactaattcattagctgtactaagtcttgcttgagggaatagggttaagccgtcctcacgaggtataatagcattatctcttcaacgtcgcttgatgatcattttctctttaaagagagtctaactccctcttgtccagatacggaatccattccttggtattactcttcctttcaaggatctcactttgtaggctatacatttaataaaatgcatatttcttttacgttttatagtatcaattcttttccttacaatcactctatccttttttcaccttttattttatgtattcaacctaggataccaatcccttccctttatgaatccgagctcgccctccggggggatgaaggaaaactgcattatttgttatcgtccaaccacctcagctttggaatacctaataacatacctncctagttcttcgctatcgctatcagtcttaaagccaacctgatatggc

SEQ ID NO: 32995 - DNA, 1062 bp, Zea mays
  Clone ID: MRT4577_130101C.1
agctaaaaacgacttcagtccagccatccaacaagaagatcagtctacacataaaaccagagatgtctgggtccaggagctcttcgtctcacaacgttaccattgattccgagtggagcaaaaaggagaacaagctgttcgaggaggccctagcctgctacggcgcgggcacacccgaccgctggcacaaggtggcccgtgccatgggtggcatcaagacagccgacgaggttcgccgccatcacgagatccttaatgaggatgtcacgctcatcgaatccggcagagttccattccccaactacaacacgcagggagcttggaactaaggagtgaaggatgatgtgaagaaccaccagacaggaactactgctacgcatgaaatagatatcttagccattgaagtaaatgtgctgatatattgtgttaagaagtttatgattgctcaggtaataaataagaggaggcaacgttaacactgattgcaattatagcaaaaaggagaacaagctgttcgaggaggccctagcccgctatcgcgagggcacacctgaccgctggctcaaggtgtcccgtgccatgggtggcatcaagacagctgatgaagtccgccgtcattatgagacccttaatgaggatgtcacactcattgtatctggcggaattccattccccaactacaacacacagggagcttggaactgaggagtgaaggatgtgaagaaccaccatacatgaactagatatcttagctattgaaggaaatgtgctgatatgttattgtattaagaagtttatgattgcttgagtaagaaataaaagaagctagagaatatacataattgtgttatgtgtaaatagctatagactgagcaaatcatcagttatgctatagaaaccagggaaccctctgtctgcccatagctaatgtgtgctgtgcaattatggtcccctatgaatgaatgcttgtacagtaaagagtgatgtaaaactcttgtactagtttgctgattaaaaagttgtgcttggtgaaaaaaaaaaaaaaaaaaaaaaaaaaaaaaa

SEQ ID NO: 32996 - DNA, 795 bp, Zea mays
  unsure (1)..(795): unsure at all n locations
  Clone ID: MRT4577_130102C.1
tcgaggcnncggccgggatgtaacnnttctattctgaaaaagagtatggttactagaccaaatattatatatttttacaaccatgtgtcacatattactccattactcatgttttgtttaaacaaataactatgcatacctgctcaccacacataaaattaatcactcctcttatcaacggtcatccatcattattgctacaatacgcatggtcatcagatttcctatgtaattaccatactttaacctctatgtacatgtaaatatgtgcttccaataggtgctcaagtacatacgatcgataccatgttgttatgcataagtacatttacacacacatactctatactgattgacatctattgatccccctactattctcttgaacctacacacaatttttaaatgtatcttatattaagatatccttagcgtttgcgttcttcatcaacgtacaaactacaaatctaatttcattcttacttcattttcacatgtttacattctaatttgaatcgacgacaggtcatttgtacatcttgcaacctgtacatactccagatacgctttgtccgataagcacaaatattacctttatagtatgcatcttcaggtttttccactcacgcctcanattttattccagcctttgtatctcatttcaataagtagctgtgctcagctgcttaccacacatcaaaaaagtaactcctatctatatacctcccagattttacccactttgcaaatgtttgcttacacgcataatattttactcacttataatgaaactaa

SEQ ID NO: 32997 - DNA, 264 bp, Zea mays
  Clone ID: MRT4577_130103C.1
tcgtcgcatccaactctacctgcctctctctgtggtcttttttaaaatccagggccgcatccaacactgccacgacatccaaaaattccaacccccaccaatttatcatagcctactccgcccatctaaacactcctccaagatcgagctaactcagaggttaaatattgccaaaactgtaattttcaaggagctaacatccttattacccattcataagctacatcaggactccatctcccataaggaacacctcatcaatac

SEQ ID NO: 32998 - DNA, 237 bp, Zea mays
  Clone ID: MRT4577_130104C.1
cccacgcgtccgcggacgctgggcttgggcccagccagtcccttggacagcaccttctaccgctcactgctggaggacgatgacatgggggacctggtggctgctgaggagtatctggtaccccagcagggcttcttctgtccagaccctgccccgggcgctgggggcatggtccaccacaggcaccgcagctcatctaccaggagtggcggtggggacctgacactagggctggag

SEQ ID NO: 32999 - DNA, 435 bp, Zea mays
  unsure (1)..(435): unsure at all n locations
  Clone ID: MRT4577_130105C.1
tggctctggaactttgggctgatttatgtgcttgtggatgtgcgggtggccgtcccgtcgaacggtcgacttgacttggccaattctctgttagtaggcgtgcttggaatgttctttctggtgctagtcgtctgtaatgtgtctctgttactgggtcgtcggattgtcgtggtgatgtgaattgcgatgaggttgtttcgttgtattttgttgatgttagaggtctgtggtgtttctctgttgtaattgggtcgttgtattgtcgtggtgaggtgaattgggatgaggttgtttcattggttttcgtggtcgtggtggtgttgttgtcttgtggggataggcgtattcgtcttagcgtttggagtcggagtcttgatgggcagctttggatgtatatgacttggngttttgtgtttgcggcttatccgaatgata

SEQ ID NO: 33000 - DNA, 220 bp, Zea mays
  Clone ID: MRT4577_130106C.1
cccactcgtccaacaaggcttcctatcccctacttccccaccctgataccaaagggcgcgaaggaggcattcacaaataagcattctacaacttctagctaccacataacatacggcccgtctcctcatgtggaaagatccacgggccttacattattggtacaggccatacacgatggtaactcaatgtcaggaaagtcactgggtgcaacagtccatt

SEQ ID NO: 33001 - DNA, 1136 bp, Zea mays
  Clone ID: MRT4577_130107C.1
attgggaccctcgaggccggccggcctcggggccggtggataatggaccgctgtggagagcccagcgcccagccggcttgcgcttggcctcgcctcctcttctcgtcgagcggataacagaaccgatgtgcaagctccggccggagcgtcaggataagaaccgcgcggcggcaggcagctcctcctgcgactgcgagcgcccgtccaatggcgtccctctccccttccctccacctcccttgcaattcaagaactggcttccttggaaagacacgtgggattcgtccttgtgttttccctgctggaagagttggatttgtcagaacagtagtggaatgcaaggaatctagaattggaaagcagcccatcgaagttccatcaaatgttactctcacattagaagagcagtttgtcaaagctaagggtccgctgggggagttatctctgagctttccaggtgacttgaagatcgtgaaagaagaatccggtaacctgagagtttataagactgcagagaccaagagggcgaaccagatgcacggacttttcagaacattgacagacaacatcatcgtcggtgtgtcaaaaggattcgacaagaagcttcagttagtaggcgtcgggtaccgtgcggcggtggagggcaacgatctcgtgatgaacctgggattctcccaccctgttcggatggccattcccgaaggcctggcggtcaaggtggaagagaacacaaggatcatcgtgagcggctacgacaagagcgcgatcggtcagttcgctgctaccataaagaagtggaggccacctgagccatacaaggggaagggtatcagatacatggatgaagttgtcagaaggaaggaaggaaaagctgggaagaagaaatagaaagtgatttgttttttttttgccctttccatgcttcatttcattttccccactgtaacggtcctcgtctgctatgaccgaacccgagaaaaaatattgttctgtgctgatcatggcatatatatgtacaccttgagcaaaaaaaaaaaaaaaaaaaagcggagccgtttgacccccgtttggttggtgaagacgcaaaactgctcgatgagcgctaccgctaaaaaaaaaaaaaaaaaaaaaacaaa

SEQ ID NO: 33002 - DNA, 864 bp, Zea mays
  unsure (1)..(864): unsure at all n locations
  Clone ID: MRT4577_130108C.1
cncggccggggaaacccgggagatcacttttgtcaaaaaaaaaaaaaaaaaaaaaaaaaaatagaatagaagtgcaagctccggcagcgtcaggataagaaaccgcgcggcggcaggcagctcctcctgcgactgcgagcacccgtccaatggcgtccctctccccttccctccacctcccttgcaattcgagaactggcttccttggaaagacacgtgggactcggcctcgtcttttccctgctggaagagttggatttgtcagaacagtagtggaatgcaaggaatctagaattggaaagcagcccatcgaagtcccatcgaatgttactctcacattagaagagcagtttgtcaaagctaagggtccactaggggagttatctctgagcttcccaggtgacttgaagattgtgaaagaagaatccggtaacctgagagtttataagactgcagagaccaagcgggcgaaccagatgcacggacttttcagaacattgacagacaacatcatcgtcggtgtgtcaaaaggattcgacaagaagcttcagctagtaggtgtcgggtatcgtgcggcggtggagggcaacgatctcgtgatgaacctgggattctcccaccctgttcggatggccattcccgaaggcctagcggtcaaggtggaggagaacacaaggatcatcgtgagcggctatgacaagagcgcgatcggtcagttcgctgctaccataaagaagtggaggccacctgagccatacaagggaaagggtatcagatacattggataagtgaaagctgaaagtgtccgaaggaaagaangnanagccgggagaagaatannaaaagggtttttttttttttttg

SEQ ID NO: 33003 - DNA, 1188 bp, Zea mays
  unsure (1)..(1188): unsure at all n locations
  Clone ID: MRT4577_130109C.1
gtgcgngcgctcgaggccggccgggcccgggaattgacatttgagcgaattctaagttttggaaagatataaatccaattttctccatgtggataatagaatagaaccgctgtgtgcaagctccgggaccgtcaggataagaaaaccgcgcggcggcaagcagctcctcctgcgactgcgagcgcccgtccatggcgtccctctccccttccctccatctcccttgcaattcaagaactggcttccttggaaagacacgtgggactcgtccttgtgttttccctgctggaagagttggatttgtcagaacagtagtggaatgcaaggaatctagaattggaaagcagcccatcgaagttccatcaaatgttactctcacattagaagagcagtttgtcaaagctaagggtccgctgggggagttatctctgagctttccaggtgacttgaagatcgtgaaagaagaatccggtaacctgagagtttataagactgcagagaccaagagggcgaaccagatgcacggacttttcaggttggttagagaaatcaggctatggatttttttatcctgtccttccatgtcttcttctaaataccctggtgcaaatatccaacgcagaacattgacagacaacatcatcngtcggtgtgtcaaaaggattcgacaagaagcttcagttagtaggtgtcgggtaccgtgcggcggtggagggcaacgatctcgtgatgaacctgngattctcccaccctgttcggatggccattcccgaaggcctggcggtcaaggtggaaagagacacaaggatcatcgtgagcggctacgacaagagcgcgatcggccagtttgctgctaccataaagaagtggaggcctcctgagccatacaagggaaagggtatcagatatatggatgaagttgtccgaaggaaggaaggaaaagccgggaagaagaaatagaaagggtttttttgccctctccttacttaatttaaattttcccactgtaatgtcttcgtctgctaaggctgaacctaagaaatatattgttctgtgctgaacgtggcatatagttgtaaaaaaaaaaaaaaaaaaaaaaaaaaaaaaaaaaaaaaaaaaaaaaaaaaaaaaaaaaaaaaaaaaaaaaaaaaaaaaaaaaaaaaaaaaaaaagggggggccgttttagg

SEQ ID NO: 33004 - DNA, 343 bp, Zea mays
  Clone ID: MRT4577_13010C.1
ctagggataaactgcacctgaaatacaggtatgtcattacgcatacagacataaacatatggccatacctcacaaactccagagaactacatctacttagctgacaaatataccttttatggaaatcttacatgaagagagcgcgcttactgattcttgtaaaccagggaattctgcacaccactcacacacttgtttgaaggcaatctccactcttgcttcgaatttcttgccaaatctatgggccagcacactatccaacacattgcccagagaacctgaaatgtcataatccacttgcagctcttcacagtgcagttaactcaatgtcacaaacgtgccc

SEQ ID NO: 33005 - DNA, 969 bp, Zea mays
  Clone ID: MRT4577_130110C.1
ccggccggggcgcttggcctcgcctcctcttctcgtcgagcggatgtgcaagctccggccggagcgtcaggataagaaccgcgcggcggcaggcagctcctcctgcgactgcgagcgcccgtccaatggcgtccctctccccttccctccacctcccttgcaattcaagaactggcttccttggaaagacacatgggattcgtccttgtgttttccctgctggaagagttggatttgtcagaacagtagtggaatgcaaggaatctagaattggaaagcagcccatcgaagttccatcaaatgttactctcacattagaagagcagtttgtcaaagctaagggtccgctgggggagttatctctgagctttccaggtgacttgaagatcgtgaaagaagaatccggtaacctgagagtttataagactgcagagaccaagagggcgaaccagatgcacggacttttcagaacattggcagacaacatcatcgtcggtgtgtcaaaaggattcgacaagaagcttcagttagtaggtgtcgggtacccgtgcggcggtggagggcaacgatctcgtgatgaacctgggattctcccaccctgctcggatggccattcccgaaggcctggcggtcaaggtggaagagaacacaaggatcatcgtgagcggctacgacaagagcgcgatcggtcagttcgctgctaccataaagaagtggaggccacctgagccatacaaggggaagggtatcagatacatggatgaagttgtcagaaggaaggaaggaaaagctgggaagaagaaatagaagtgtttgttttttgtttgtcctttccatgcttcatttcattttcccgctgtaacggtcctcgtctgctatgaccgaacccgagaaaaaaagtattgttctgtggctgtgctgatcatgccatatttatgtgcaccttgagaaaaaaaaaaaaaaaaagcg

SEQ ID NO: 33006 - DNA, 735 bp, Zea mays
  Clone ID: MRT4577_130111C.1
ccggccggaaacggatagaacaggcgtggagcgcgcgaccccgtacgtctccaccgctgcaggaactccccccctccccggcggcccgcgcgcccaccaaccatggcagtcgcagccgccgcccaccacctgcccgttgtgccgcaccgccttgtcccggtccggcacaccagtagcagcccgccgccgcatccggcctcccgctgctccgccgcggggaagccgcccgtccagctccacgcggcgcaagcgagggcgtctgggttcgccgcgcgcgtcgcgttcaacccttccgggaactacgacctgtccctctccatgggcgaagacggtgatctactttctttcctattcccctcccactgatagcagcaagcatgcatgatcctctgcgaatgtgctagtactgactactgaacaaagcgatgccatgccaccaggcgaaaaaaaatttaactaatcaggcgcctggaatgaactgagaacagaactagataatgtgttcatatttccgtgcactgcaaagataggcagtcagatatttggcgctgaaaacttatttgtcattggtgtgtcaccgacacatagtgctcacctgtggcgaagggcaattagcaatggatcacgctaatttccctgacgtacaaccttgtgcctgactagcttaccatgtatttcatccgtgtaggattaacttccatgggcgccagggggacatgtggtttcagccatgct

SEQ ID NO: 33007 - DNA, 187 bp, Zea mays
  Clone ID: MRT4577_130112C.1
gcacttgcctattcaatagaattcacctttaatcacacatgctgcatggtccttttacgggaaaattatctattcaagctttatccataccactgttggcatatttaatgcatccactttgactactctaatatatcatactcccatcttactatttacttccaaatataactcctattgttaatcc

SEQ ID NO: 33008 - DNA, 1119 bp, Zea mays
  Clone ID: MRT4577_130113C.1
tgcctgtcgaggtgggcaatagaatagaaccgctgtgtgcaagctccggagcgtcaggataagaaaacagcgcggcggcaggcagctcctcctgcgactgcgagcgcccgtccatggcgtccatctccccttccctccaccacccttgcaattcgagaactggcttccttggaaagacacacgggactcgtcctcgtcttttctctgctggaagagttggatttgtcagaacactagtggagtgcaaggaatctagaattggaaagcagcccattgaagtcccaccgaatgttactctcacattagaagagcagtttgtcaaagctaagggcccactaggggaattatctctcagcttcccaggtgacgtgaagattgtgaaagaagaatccggtaacctgagagtttataagactgcagagaccaagcgggcgaaccagatgcacggtcttttcagaacattgacagacaacatcatcgttggtgtgtcgaaaggattcgataagaagcttcagttagtaggcgtcgggtaccgtgcggcggtggagggcaacgatctcgtgatgaacctgggattctcccaccctgttcggatggccattcccgaaggcctggcggtcaaggtggaagagaacacaaggatcatcgtgagcggctacgacaagagcgcgatcggccagttcgctgctaccgtaaagaagtggaggccacctgagccatacaaggggaagggtatcagatacatggatgaagttgtcagaaggaaggaaggaaaagctgggaagaagaaatagaagtgtttgttttttgtttgccctttccatgcttcatttcattttccccgctgtaacggtcctcgtctgctatgaccgaacccgagaaaaaatcagatacatggatgaagttgtcagaaggaaggaaggaaaagctgggaagaagaaatagaagtgtttgttttttgtttgccctttccatgcttcatttcattttccccgctgtaacggtcctcgtctgctatgaccgaacccgagaaaaaatattgttctgtgctgatcatgccatatttatgtgcaccttgagcaaaaaaaaaaaaaaaaaaaacccctaaaaaaagcggcc

SEQ ID NO: 33009 - DNA, 243 bp, Zea mays
  Clone ID: MRT4577_130114C.1
cctgtcttttttggcttcattgacgacagtgctgcctactgttccacattggccctaagcgcacacaagataccacctaccctcatccatgatacgtggctctactagtgagaaatcatcacgtgtcatccatgaggcgtgattatggtggggatcgacatctgaagtgcggaactcagagttttgggtgctgttgaagggactgtacgttgatggagggggacacgatctttttgtgcagca

SEQ ID NO: 33010 - DNA, 116 bp, Zea mays
  Clone ID: MRT4577_130115C.1
ctggagtgcttggcgtcccgcggcttcctggtgtcgtttggcgagtcgtcaatccgaccatacaccatggtgcacaagcgcggcgctgttggaagatctatcgacatcaacagata

SEQ ID NO: 33011 - DNA, 299 bp, Zea mays
  Clone ID: MRT4577_130116C.1
cagaaacacacgaagcgaagcgcactatctacgacctaacaacatgggctacacaagatattacacctactagcgcttattgcgctagctgcgagcgcatcaaatgcgcacattattccacaatgctcactagctcctagagcgatacattccacgattatctgccaccagttactatcaatgagcatttaaacacgctagctgcgcaaggcaacacgcaacatcaagcgcatgcagagagcgtgttacaactaccaatagccgaatggcaacaacaatccttgccacatctaacaata

SEQ ID NO: 33012 - DNA, 329 bp, Zea mays
  Clone ID: MRT4577_130117C.1
ggaaccgaaaaaggaaaacattccaatgctaagtttaaaataacttcgaaaaatcaacgatcaaaatcggcccttggggattacccgctcccaaaatgaagtaaaacctcccattttaacttgtttttgctcccatataagatttagaaaaatgccccccttaataatgtaaaagcaacttaatctagttcattctttgggctgcttccttggcaaggagcttttccttggccctggtcttggcttgggacttcaaacccatgattccaccaccccacttttttctgtattcatcgcacttggcattgaagttggccttaatagcttta

SEQ ID NO: 33013 - DNA, 592 bp, Zea mays
  Clone ID: MRT4577_130118C.1
gggtgtccgcgcccccggcgtcggtttgtcgactcgactggcattgctgaacgaggcaaatgcgccttcatctcctcaacgccgcacacatgtttggtttcgtcactgatttggagtaagcgtgattgtgttatgtaaagtggattcagatccaatgcgcgcaacattccatgccactgccctcaggaatccaattgtaaggttcgtcatactaattttacgaagcccgttaatcgcgttaccagcaatccaaaagctccccaaccccacccttcttcttcctccgccatcgttgcctccgttcaaagatttcagaaacccacacccacctaaacccatgcagtcccttgcgaaatctcggtcgctcgagtctgtcctttccctcgccgtccacctccagtccatggcgtacgtgaatgtgacgatgcggtggaagaaggactcatcgtttgatgccatccctgagatctcccacgcgcgcgacatccgcccgctcgtctccctcgcacacatcctgtccccatcgcccacccctgtatctgcggtctccaagctcggccccttgctcgagatcccagaccgccgggtcacc

SEQ ID NO: 33014 - DNA, 247 bp, Zea mays
  unsure (1)..(247): unsure at all n locations
  Clone ID: MRT4577_130119C.1
ccgggacggaanaccccgacccacccacccgttcctatatcgctagcgagcaccctttcttttttttactctcttctaccctcattatttcgggcgtttttttttttttttttttttccacaaaaaaaacccttatttccctgttttattcctaaacattttttccaatcctatggctttcccccttcattattgtttccaacacaaatccttttatttataatgcttttccaacatatgtcttttt

SEQ ID NO: 33015 - DNA, 822 bp, Zea mays
  Clone ID: MRT4577_13011C.1
caatggccaattctattattgcttcttcaaccattcttgagtcttgacaaagacatcagagcaattacatcgatgtttctagatacttttatgaataactaatataatatagatccttatttttttaaataatggaaccaaaatttccgactttcacctcatagcgaggatagggccaaacttattacagaactaacagctcatcagctcatcggtctgcacaagtgggagggacaaacctctaaactggataactagaaaaacaaagggatagataatttggttacaatgcaattctatttgtaaacccccatctatgatgagcagaaatctccattgccactgtctctaattgtcgacaagcggtctttatttggtcatcttcctcttcacttttctgtagcttggttcaaaacctaagccttttctgtagcttggtccaaaacctaagccattatgttcccccgaagatcaccttggtcaagtaaaatctgcaaatgacgttccccatcagttcatgatgctcctatccatatgcagcagcactttccatcagtaacgagcagcagcgtcgtcctcttctctccacccctacctgcgctgcgtacgtacatctcagatgcagaccagatctggcaaagggcaaggcgagtccacggtctttgccaaatttgggtcatcacatggtgccccccacgctccatttttgagcaaacaggagcttgctagcaccggcgcgcgcaaccacccggaccgccatggccgcaggaggaggaccgagcaagaagtcaagaactggagagcgagcggacgcgtggagaa

SEQ ID NO: 33016 - DNA, 2205 bp, Zea mays
  Clone ID: MRT4577_130120C.1
ggaccctcgaggccggccgggccgggtccctctgctctgctctcctcactagtctgctctccccaaaccccacagaaccctaccgtccccgccgcgccgccatggccgccgccggccggccgtggcgcgtgataccgcgtcctctactggagaccgtacttcacaactatgcgctccacccgcgcgtgccacagccgctccttttccacgggccacgcggcgtcggcaagtccacgctactcctccaccgtctcctcccgcggtggtccgaccagccccacgccgtcgcattcatcaacttcctccacccctcgccgagttctcccgccgcagccccgtggtcccttctccccgccgacccagcgtctccccactcgctgcacgacctccgccttcgcctcgagtccgcgcttgagggcctcgcccgcgccgccgtcctctgcggtgctgtgggctctaaggacgtgctcgccgcgctctcccgcaaccacggcgtcagtaccgcgctctcccgcctcttgatccccccggccacacgctcctcggccacctctgtgccagcccgccgctcttcgtcgacctccgttccggcgctctggtcgagggccgtgctcgccgcggtgcacagggacgacaccgcgttctgcattggcgagggggaggcgactagctgctccatggaggagaaggcatacatgcaggaggcaatggcagccttgcgagtggctaaggaggtgcttgggatgcaggaggggtggaggaaggaggcaattagggagatgaacagaactgggcgattctcgcgctcattggccaattcggctactgactggccgtgcctgttgctggatgttctgtcacgtgcggcagaggaggaattcttccagccaaagctgatcctgaacaatgtggatgtgttgaggaaggcaatttgtgaggatgagacgatggtgcctgcagcgatgtaccatgatagcttcatttggagggtgattgcacttggcgccaatgaaaagtgcttgccagttattatgtcgacttcagatgggtactattcttctcaagcattcgttgattttggttttccgaacatatttatttctcgtgagacatttggttggacgccacaagaagctaagctgcatatggtttctgaattcttcagtgaacaggagtggaaagttgtcgatgaggttcttgggccaaacccacggcagttatctgagatatatatgctgaagcaaaaggcgaatagcccagaagttcttcatgacagaaatattgaggaaattattgatacatacctggcacacttgcaagtctctgtcgttaatccagccatggagaaggcattaaaaatgctgcaggagtttgcctcagatgtccgtgagggtaaagtaccaaagatcagatcgtcctttggtgcaccctggagacatccacctcgtgatgacaatcctgacttgtcctataaatgggcgaagattcagctaatggattttatccaatcttttgtaaacactgagtttggggtgaactacctagcagatgacagcttggaaatattggatgatcctgctgctgttgccatgatggaggttggtttactgtatcaacaaagagaaccatcctttatgcgaccaatcactcgagggattcagcgttgtcttgccagatggcttgctgaacagagattacaattgaacattcaagaaacactagcattcttttggcaacgtttgatacggggtcgaagctaccgccacttgatgaaagaagttggctacaaataaagaggtgatttccatggactaacattttgacatgatatctgcataagaatgtttcaagggtacaataattttctggccactcattttctcatctgtttaatacagccagcgtggtctggaagtttggaatcaaatcaatctcagatagaggtggatgaccagttttacatgttctgttgctgacgaaaagaatcaatcattttcttaattaataagcgaggaatgcaaatgtttattgtttggactagagtgaagttgcatcagaagttgatgctgaagcctgaaggcactcgaaaaatgttgcagatgcatttctacctgtatggcaatatttagggagtcgaatatctgctgtatgtcaatgagaaaatgggttttcacgtaatgcaaaaaataaaaaataaaaataaaa

SEQ ID NO: 33017 - DNA, 598 bp, Zea mays
  Clone ID: MRT4577_130121C.1
attcaggaataaaggggacctcccttaaccttttaattcagcaaacaaaccccaccttgaatttgaccaaacacttacagacgcgacaggccttgaaaacccgggttgcccaaaccacccctacgggggagttcacatcaagttaaaaaaacagcaccccacaaacttttttattatccatggatggataggatagatcacacctaagcggcatcgggccccattcttttttatcgacaaaagtcagtccgacgggttaaaaacactacctaaataacctccattgcctggggagcaaggttattttcccataataataccaagaataatttatccggaactgggaggcgcagcagccagccgtaacaacatggggcgcctccctcggttaaagcaccagcccaaaactctggttgctttgctattcacgaggcccatgcaaagtacggccaaatggccccccggggggcggcccatttcccgcacccgaaaaagtagcccccctgcatgggtcccggtttgggcacaaccctccaccggttcagcaccccggaaaaacaaaacagggctctgtccttccctcccggggggggggggg

SEQ ID NO: 33018 - DNA, 1710 bp, Zea mays
  Clone ID: MRT4577_130122C.1
cattgggtacctcgaggccggccgggcctgttcctcctgtcatcttctcctcctcagaaacccaccaaccccgtccagccgccggctgtctcggccgccgccgccgccgccgccgccgccgccctatcccggtccttcaggtgaaccaggttggccatggccttcaacaagatcaaggtcgccaaccccatcgtcgagatggacggcgatgagatgaccagggtgttctggaaatctatcaaggacaagcttatattccctttcgtagacctcgacatcaaatattttgacctcgggcttccacaccgtgatgctaccgacgacaaagtcacagtggaggctgcggaggccacactcaagtacaatgtggctatcaagtgtgccaccattacaccagatgaagcaagggtaaaggagtttggcttgaaggctatgtggaagagcccaaatggcacaattaggaatattctgaatggcactgtgttcagagaaccaatcatctgcaaaaacatcccacggcttgttccagggtggacaaagcccatttgcattgggaggcatgcattcggcgatcagtaccgggcaactgatgcagttatcaaggggccggggaagcttaaattagtttttgagggaaaagaagagcaagttgagctggaggtgttcaacttcactggtgccggaggagttgccttatcaatgtacaacactgacgagtccatccatgcctttgctgacgcttctatggccactgcttatgaaaagaaatggccattgtatcttagcaccaaaaacactattttgaagaaatatgatggcaggttcaaggacattttccaggaggtgtatgaagctggttggaaaaccaaatttgaagctgccggcatatggtatgagcaccgccttatcgatgacatggtagcatacgcacttaagagtgaaggagggtatgtctgggcttgcaagaattatgatggagatgtgcagagcgatttcttagctcaaggttttggctcattgggtttgatgacttcggtactggtgtgccctgatggaaagacgatcgaagctgaagctgcccatggtactgttacccgtcattaccgtgttcaccagaaaggaggtgaaaccagtacgaacagtattgcctcaatctttgcgtggacaagaggacttgcacacagggcaaagcttgatgacaatgctagactacttgacttcacccagaagcttgaggctgcctgcgttggagccgtcgagtctgggaagatgaccaaggaccttgcccttctcgttcacggatcttcaaatatcacgaggagccattacctgaacacggaggagttcattgacgctgttgctgacgagctcagatcaaggctggcggccaactcgaacctttgaaatccttgccgaagttgtggtgctttcctgcgcgacgctttcgaaccgtttttattatgtcgccattttctttccctgtgccaccaccctgatgaatgaagaaggcctgagctaggcgaacatctgcaggctgcagcagtatgccaaatcattatcattaccgttaccattaccaattggagattgccgtagatttccgcgattatgggaactcatttacctgattatctgatacgtttgaaataaaaggtcgcccattagaatgatttctggttgtctaaaaaaaaaaaaaaaaaaaaaaaaaaa

SEQ ID NO: 33019 - DNA, 954 bp, Zea mays
  Clone ID: MRT4577_130123C.1
gcctgttctgtgacctgcaggcccattttgggcttacagagccttacagggaactttcactcgtgcaaattgctatgcagttagaactggcatttaaaaaaacgtacatcctagaagtggaagaattagttctcattgtttcagtagccttccatgttctgaaggttgtcactgggaaataaggaatgatgttcatcactggtcttcctaatatgtccaaacttgaatggtctttttgggaggcagtcgggtaccaccacaggctactcctattccgcgggaaacaaaaacaaggctgtgatctgggaggagaacactctgtatgactacctgcttaaccctaagaagtacattcctggaaccaagatggtcttccctgggctgaagaagccgcaggaacgtgctgatctcattgcgtacctgaaggaagcaactgcgtagtataatgacacgcctttgccatgaagagaaaattcgttttgcagtttaagacacgcctttgttatgaagagaaaattcgttttgcagtttaataataaacatttttagacaatttgggtcactctggttggacagggtacacaatccacgtctcagtatttttgttcttatggtctcggtattgaatgcctaggtgagttttttttagctgtgcacaaaaaaacagttaaactcgatggtatctcaactgctggagaaatgctagtgccctatttttggctgtggaattggaaatctggaatgcatccattttgaaagacttggttgttgggatatgattctgctcgatgtgatggatatcctggatgaatgaaagtacagtgtttagaggagtccgcttagcagaccggcagaagtgcaaatgccattagacattggtgccgtagtttggccacatctgacccttcatattttgtcacgtgtggcggcgtgtgataaagttatgtgtgatga

SEQ ID NO: 33020 - DNA, 487 bp, Zea mays
  Clone ID: MRT4577_130124C.1
tttttttttgattttgttttaatttttttatatgtgtttatttattataaatggggtgttataatttatttaaggaacggtttacttttatttgtctttttgacagcaaaaagaaaaaagcgggatgcgttttttatttttggtccaagaaaggggttatacaaaagagggcaaccggaaaaaaaaaaaattgcaaaaaaagaaaaaaagtgtataggattggaatttttttcaaaaaaaaaaattgtttttattaaagggagaacctcggcctgaaaaaacaccttaaaagaatttataggagaatatccgggcagaaataattattttatagaagaaaaatttttaacaaaaggattattacactttttaaaagacaaagcctgtaaaaaaatggaaagaaaagtccttgtatgaggaaagagcgattacttaaaaaaaacgggggatatttaaaagaaaaaatttttttgtgttgtgccgacat

SEQ ID NO: 33021 - DNA, 744 bp, Zea mays
  Clone ID: MRT4577_130125C.1
acggtgtcgcggccccacggaagaaccgcccggcccagagcagactcaccctgcatccatctatctcccctaaaaccctaaaaacacgagaagccctactctgcctcccctcccccgaattgccgcctctcctctcctctcctccaccggagagagaagccaaggaggatgccgcggatcacttcggtggagagccccggctgcccgccgctccgcgccatcaccaccgacatcctcggcctcatcaaagtcgtcgaggcccgcgctagaccggcgggcgtcgccaaggtcgtcgagacgtggggcgaacccgacgcctccagggccatcctcgtcgcttcactcgccgaccgagccgtcgaccccgttttggctgtggcaaggaagaacggtgtggttgagttgctgaatccattgaatggtgatgctctggctgttgtcaagtcctctaggacagaccaaactgtcggagctgtggaaaatgatcccctagtcgccctgcacctcttcagaaaacatgcaccggacttaaccacgttaggtacatttcttgcttgtacggagaagggcaaagcaagtgtgagatctgttgcaaaagaaaacacggtatctgactcggatgttgggccatcaagcacttgggaagtgtgtaacaagggtacattggcagtttcatctgtggaggttggtgaaaacttatgcaatggttggagggaatggtatgaaagtgaacttgtgggatat

SEQ ID NO: 33022 - DNA, 901 bp, Zea mays
  unsure (1)..(901): unsure at all n locations
  Clone ID: MRT4577_130126C.1
cctcgaggccggccgggatcctctgtcctcgaggccggccggcacgcgcggcgcccactactccccagtccccactctgctgagcgcccgcggccggcgccctcacgcccacgcggctgggcttggcgcccgcgcccgtggccgccacttccaagctcacagcttggctcgagcaaagaggtgagtgatacgccctgcgcgagtgcgtggtaggcagcacgatgacgctgcactgctccctgcccgcgacctgttcgacgttgtggctgcgagcagcggggcggcctgatccccgctttccgaggtcccgtgcgcgcctcgtaggcctagctctttctggcccgcgccaccggaggctcgtgcacaccggctgcgcgcgggcggggacgagcgactctaaggccgtggagctggtgctgggcggccgtgcgcgcggcgacgatggcgacactgactccgagtccagcgatgacgaggacgcgcaggatcgcatgacggacgaggagcggaggacgctgcgccggaagatacgggagatgatggaccgcgtcccggaaacggcggagctgacggacccggaggagcggagggtcaagatgcgggagctgctgaccaagtacgagctggtggtagaggaggaggacccggactggcccgaggacgccgaggatgggatgggcttcagcctcggccagttcttcgacaagatcaccatcaaggccgagaagaaggacgacaccgaggaggatgacgcctcggggtatcagagcgacaaggagattgtttgggaggatgacaattacatcaggccggtgagggatgttaggacacaggactgggatncgtccgtgttcaccgatttcnngccgatggttgtncttctgcataacagatataagag

SEQ ID NO: 33023 - DNA, 591 bp, Zea mays
  Clone ID: MRT4577_130127C.1
ccggccgggagcagcagcttcacagacatccacactaacgaacgaactcttgctccgatcacgagctagctgatgtcgactatggcggctgtgctgaacagcaagaacactccgacaggcagtgccgaccgtgctgctgccgctccacctgctggcttcgtccgcttcgcagtcgatcacctgcggacagggggggtcatcaatggcgacgtgaatcccggacgcgacaggaagcgccagcgcgctccccgcgtcgagctgcaaaggcgactagagcctcaacagcgcgaggcggaccagcgcgaaccgacaggcggggtgacgatgcctcgagagacaccccaacagcggcaagagagtcaacatgggcaccgcctgcaccatcaccaggaagcgcggcggctcagaccaataccacatcggcatgtcaacacgactgcaaccagatcagctaagtaacgacaaccaagctaataagactacccaactgacacgtgaatgcccgcgcgatgtactatagatattgcctgaggatacctaatgaacagcgggtgaactaccaagaacaccacgcatgatctatctacatat

SEQ ID NO: 33024 - DNA, 375 bp, Zea mays
  Clone ID: MRT4577_130128C.1
ttgaaccacaccccggcaaagggcgggagagggtatatttgagaggctcctctgtcgaatcgcgcgtgggcgaagaagacaccgcgttcgcacgacgtgaccgcaacgtccaaggagatgtaccgcctgaaatgcggggtattaggaggaaggcaacgagcagccgctgtaactgctgcagacacactactgaacaaaaggtcatctgcgaggccacaagcaagctgaccctcgtacaggtacggcaatcacccatgtcacggcaacggaccccctacaaaaaacctgtaaaagatcgatgacagacccgacagctgagcaagacctggagctgctggcataaaaagtgatgcttgatggatacacatgatgcga

SEQ ID NO: 33025 - DNA, 136 bp, Zea mays
  Clone ID: MRT4577_130129C.1
gggaaaaagggacgacatcaaatatttcaaaataaaccggacaacaaagggcacaatctggacagaggtacaatactgcgactgtaaacacaaggtgactagcgaggaacacggaggcacaatttgttaaacctga

SEQ ID NO: 33026 - DNA, 254 bp, Zea mays
  Clone ID: MRT4577_13012C.1
aattctccgaatcgacgcacgcagtccagcccacgcgtccagccgacccatgatcgctatcggcatcccttcattattttttcacttttgtatattggtatcttgccaatagtttaatgaattcttttcttatcattaaccattatataatgtatttacacccaaattcaactcattactcaataaagtatcttatcatccaataataactataccacacattgaatataatcatgtcactgctgctacaattc

SEQ ID NO: 33027 - DNA, 1367 bp, Zea mays
  Clone ID: MRT4577_130130C.1
tttcttctttccctgccgggccccggcggcctctcctctcctcgcttgtccccaccaggtgccatggacgccggcgacgacgaaccccccgttctcctcgaccgcgccgcccgcgcctcccgaggcaagaggataaccaagctgctcgaggacgaggtcgagcaggacgaggctttctggaaccaagaagccctcaaggatgaggagaacgatgacaactacgtggaagagccggatgctggtgacgaattcgacagtgattttggtgaagatgaatctgaaactgatgatgagccggagaaggaagtacgcgagagattacctatcaagaaacggctaatgtttcctggcaagacgctgaggaagaccagcgtcaagaagaagaaggcgaccccaaaaccagaagatggcacaaaagccgacaagtctgctgataagccgagttcatccacacaagcagatattcctgatgaactggaggctgagaaggccatccggaaatcaaccagaacgtcggtcatcgtgaggcaagctgaaagagaagcgatacgtgctgaaaaagaagcaacggccaagccgattaagagaaaaaaggagggagaagaaaagcggatgacacaagaggagatgcttttggaagcagctgaaacagagatcatgaacatgagaaatctagaacgtgtcctggcaagagaggaggaagtgaagaaaaaagctgttgttcataaggacacttatgagggtcctacagttcgttttttctcaagagatggggaatcacgtctggaattcataaatggagcatcgtttgggtctgaactttgtacaacatcatctccttatccggagaaacctgtttgtgtggtgacaggacttccagccaaataccgtgatccgaagacagggctgccttatgcaactatggaagcatttaaaataatccgggagagtttcctgaaagaggaggctgatagaaagcgtccgaacatgtcgaatatgggagagcttttcgaatcaataactggtggacacttgatgcctaagaagagaagggttgagataaggtctccgaacatgttaggaggctctaggcatggcgggcgtacctggcgaatacctgcttttgatatggtggacgaggactaacgagacagatcccgtggctcccaatatgtccaatatgagagatctttctaaatcaatagccggtgaagaggaagaggaagatggataggatgttgtatttagtgttagatcttgtgcttgtagttatcttaatgtatttttgtcggttgataaattcatggttattaaagtggtaaaacgttaaaatgttatgaaacaactttttaatatttaaccaaccc

SEQ ID NO: 33028 - DNA, 696 bp, Zea mays
  Clone ID: MRT4577_130131C.1
gcacgaggttcctcctgtaaagaatctaagcaaaccagaatcactgacggatcgacagcaagaaaaccacgacgccctgattaaaagtatggtagaagacaggagatttgacgacaaaaaatctgctgcagcatgcattgtctacaaatcactcctacattggcattcatttgaagcggagaagactaacatatttgatcgaatcatccaaataattaggtcgtcagttgagggagcagaaagttctggagagcttgcctattggttgtcgacaacatcaactctcctctacttgttacaaaacactctcaaagctagcagttcattaagtaaaggaacaaatcgcagccggaccacaacaggcagtctgttcagtagaatggtgcagagtgcccggacatcatcaggcttaggcatagctagtggatacagtggaatggtgggaaggcctgacactgatgcatcgatggtagaggcaaaatatccagcacttcggttcaagcaacacttgacagcatatgtcgagaagatatacgggataatcagagataacctgaagaaggaaataagtccgttcttgacaatgtgcatacaggctccaagagctaaccgtgtgaggccatcacggggatcactaaagagcatacactctaatgcactagctaggcaagcatcaagtctgcattggcagaacat

SEQ ID NO: 33029 - DNA, 1837 bp, Zea mays
  Clone ID: MRT4577_130132C.1
ctttccctgccgggccccggcggcctctcctctcctcgcttgtccccaccaggcgccatggacgctggcgacgacgaaccccccgttctcctcgaccgcgccgcccgcgcctcccgaggcaagaggataaccaagctgctcgaggacgaggtcgagcaggacgaggctttctggaaccaagaagccctcaaggattttcgcgagttcctcctaccatgaggagaacgatgacaactacgtggaagagccggatgctggtgacgaattcgacagtgattttggtgaagatgaatctgaaactgatgatgagccggagaaggaagtacgcgagagattacctatcaagaaacggctaatgtttcctggcaagacgctgaggaagaccaacgtcaagaagaagaaggcgaccccaaaaccagaagatggcacaaaagccgacaagtctgctgataagccgagttcatccacacaagcagatcttcctgatgaactggaggctgagaaggccatccggaaatcaaccagaacgtcggtcatcgtgaggcaagctgaaagagaagcgatacgtgctgaaaaagaagcaacggccaagccgattaagagaaaaaaggagggagaagaaaagcggatgacacaagaggagatgcttttggaagcagctgaaacagagatcatgaacatgagaaatctagaacgtgtcctggcaagagaggaggaagtgaagaaaaaagctgttgttcataaggacacttatgagggtcctacaattcgttttttctcaagagatggggaatcacgtctggaattcataaatggagcatcatttgggtctgaactttgtacaacatcatctccttatccggagaaacctgtttgtgtggtgacaggacttccagccaagtatggttttctgacccctgtttatgatatcccttcctgttccttgcattcacacacgagtttcaacccctcccccctgttttgttgttcatatatgtttcattttaatacaagtaatagattagatagacacgaatccttcaatgtttagtagctgcattatctttgactgtggtttttatatgttctggatcactcagatcgtaccactaccagtgtgtgtatggtctggaaaccccgagacatcttgtggctttaattcttagatattttaccacgaaccatggaaacaagttcaagtgtgcctacctgacggttgctctttgtttagaaatctgaaatgctatggcagaaataaacctgaggcaggactacatatgcctacataaccaatttaattagtataataaataagcagtttacactagactcttgagggacgtttatgcttatgtgaggcttgcttcctgtagataccgtgatccgaagacagggctgccttatgcaactatggaagcatttaaaataatccgggagagtttcctgaaagaggaggctgatagaaagcgtccgaacatgtcgaatatgggagagcttttcgaatcaataactggtggacacttgatgcctaagaagagaagggttgagataaggtctccgaacatgttaggaggctctaggcatggcgggcgtacctggcgaatacctgcttttgatatggtggacgaggactaacgagacagatcccgtggctcccaatatgtcgaatatgagagatctttctaaatcaatagccggtgaagaggaagatggataggatgttgtatttagtgttagatcttgtgcttgtagttatcttaatgtatttttgtcagttgataaattcatggttattaaagtggtaaaacgttaaaatgttatgaaacaactttttaat

SEQ ID NO: 33030 - DNA, 159 bp, Zea mays
  Clone ID: MRT4577_130133C.1
gtgctgcgcaagaagggccctacggccgcccaggccagatccaagcaggctatctaagcggcacagagacgaggagaagatgtggagacttccaagaaatgggctgctggccagaacaaacagcatgctattaccaggaacacggccacgctgaaccgg

SEQ ID NO: 33031 - DNA, 425 bp, Zea mays
  Clone ID: MRT4577_130134C.1
tgcaggagtgggtgctggacaagatctgattgtcctgaagattgatgacacaagcggcgtgtgtggcacatctcaggcgtggtctataagcctgtcggtgctaacaacgttaattgagcaggcactgaatgacgctgccttcgactagtaagggcctggacgaatatctgatcaactcgtacatcatcttcatgcatgttcaactgcttaagtgcgagttcgactccaaggtcacctctcacatgcgaaaaggagtactgacccaactacctggcactgatgctcaagaacgtctactgtgacagctacattggagccatggacgtcataggacaaaggctaattcacgtacgatactgtgaagcacttctggtgctccatctgcacgtaggacagtgactaaccgcttaagggacccgtcaccg

SEQ ID NO: 33032 - DNA, 557 bp, Zea mays
  unsure (1)..(557): unsure at all n locations
  Clone ID: MRT4577_130135C.1
gggtacctcgaggccggccgggatctttactctctctttcccctaattccgaccatggaagccacggcctccgcaatgagcttcgcccttccctcaacaaaagcccaagcccaagcccaactcctgacccggcccaccaatccattcatatntccctcccgcaggccagcccaccgccccgcggcgcgcctcctcaccatccgcgacgcaattccccgcataaagaaagaggaaatgcgtggatgactagtgcgatcagctgggtcgaagaactcgttacctcgctcgacgtcatgaactagaagggcttcgcggaggagcaggtccaggagattctagagatgctgccagaaataacgatactgatcggggagaagaacgagatcgattacgaggacgaggtaagggaggcctgcgagacgctgaacaccggcctgaacggcatgatcgcgggggtgtaggtccaccacgaggagatccctttcggcgtgaagctgtacgagaacttggacaatgagaagatcctcgaggacgacgactttggggatggcgatatc

SEQ ID NO: 33033 - DNA, 680 bp, Zea mays
  unsure (1)..(680): unsure at all n locations
  Clone ID: MRT4577_130136C.1
acctctctcgtcctcctccgactctccgaccacccgcaggccgcagcagcaacagcccaacaggcaaagctttgcttagctcctcaactgctcaaggcatcaggccgtccttcctagcctagccagtaagccagaggacacaacagccacacccaggcctatatatacacgcgcgccatggcctccgccttcttcttcgacgccgagccggactgcgagcccagcctgctgcccacgctggacgcctgcgcgctctgcgccaggccgctgggacgcgactgcgacatcttcatgtacagaggggacacgcccttctgcagcgaggagtgccgcgacgagcagatgcagctcgacgccatccgcgccaggcagcgggccgccaggtccgccgcacggaggcagcagcagcactcctccagaacggagtccaggcaccaggagtccatggaggtatctgtggcgacctgaacggagtcctggtgactagtagaagacatcctcttgtgtagttgtgtgtcgacaagatttctgcacatgaagaaacgccnatggggagcccggcaggacacagggacttcgatttcctccgntcgctgttgtcctggctgagcaccgccgatgggacgatgataccatctatcggngcgacggnacccggncagggggcgaagggaccactc

SEQ ID NO: 33034 - DNA, 239 bp, Zea mays
  unsure (1)..(239): unsure at all n locations
  Clone ID: MRT4577_130137C.1
ccggggcgacccacgcgnccggaccctgccncagccgngtattgatacttgctacganccaaagcncnggcngcacgcagcgagggggaagaactacccgaccgagagcgccgaccacacccaggctgnggagaaggccaggcgcaagctccgagccctcagcgccgagaagagcggcgccccgctcatgcaccgcctcgcgtggcactccgcggggacgggcgacgggacgaccagga

SEQ ID NO: 33035 - DNA, 867 bp, Zea mays
  Clone ID: MRT4577_130138C.1
ggttgggggacgacgcccacttgcaaacttggcttgtggtagagcagagatcgtgttgaaatctcacatgggaaacaaattcccagatcatgcaccggctttacaaagaacaaacaggtgtacaatcaacgctaaaacacactcttcatacgcacgggcaaggatcagagcgagtggtcccttcgcccctggccgggtgtcgtcgcgccgatagatggtagcatcggcccacccatcggcggtgctcaggcaggacaacagcgacggagaaatcgaagtcctgtgtcccgccggctccatcgacgtttcttcatgtgcagaaatcttgttgacacacaactgcacaagaggatgtcttgtactagtcatcaggactccgttcaggtcgccacagataccttcatggactcctggtgcctggactccgttctggaggagtgctgctgctgcctccgtgcggcggacctggcggcctgctgcctggcgcggatggcgtcgagctgcatctgctcgtcgcggcactcctcgctgcagaagggcgtgtcccctctgtacatgaagatgtcgcagtcgcgtcccagcggcttggcgcagagcgcgcaggcgtccagcgtgggcagcaggctgggctcgcagtccggctcggcgtcgaagaagaaggcggaggccattgcgcgcgcgtataggcctgggtgtggctgttgttcctcctggcttactggctaggctaggaaggacggcctgatgccttgagcagtggaggagcaggagctaagcaaagctttgcctgttgggctgttgctgctgcggcctgcgggtggtcggagagtcggaggaggacgaggtgagtcccggccggcctcgagg

SEQ ID NO: 33036 - DNA, 283 bp, Zea mays
  unsure (1)..(283): unsure at all n locations
  Clone ID: MRT4577_130139C.1
gggggggggggggggngggggggggggggncataccatcacgaagaaacaacanctttttgcgccgcggcaatacccgggcgagacgaaggaaagagcggcggtccttgctgccctcccagctggcagcatctggtgtagtgtggggaccaccagcacaatcagaggcacagggtagacgcgccagaggatgggacggatgccctcagagtcatagaacgccgtgggaaagaggggagcacacagccgcctacaggaaagtagcagataaggagtaaaaggaa

SEQ ID NO: 33037 - DNA, 215 bp, Zea mays
  unsure (1)..(215): unsure at all n locations
  Clone ID: MRT4577_13013C.1
tcgcgacgctggggttctagatccgngcttctttcgcgactagaaccacctatctgggaatcgntgcatctttcttggaatcgtcctggtgtacggtgaaccgaacaaccctgaaaaagatcatgtctacaaaaaaattgattatactcggagtttgaatatccatgatagcagcaaatctattaagggtgtacctcttcctagaatttcgtctg

SEQ ID NO: 33038 - DNA, 578 bp, Zea mays
  Clone ID: MRT4577_130140C.1
cctcgaggccggccgggccgggacctcgttctcctccgactctccgaccacccccagcagcaacagcccaacaggcaaagctttgcttagctcctccaccgctcaaggcttcaggccgtccttcctatcctacccagttaagccaggaggaacaacagccacacccaggcctatacacgcgcgccatggcctccgccttcttcttcttcgacgccgagccggactgcgagcccagcctgctgcccacgctggacgcctgcgcgctctgcgccaagccgctgggacgcgactgcgacatcttcatgtacagaggggacacgcccttctgcagcgaggagtgccgcgacgagcagatgcagctcgacgccatccgcgccaggcaggccgccaggtccgccggacggaggcagcagcaccagcagcagcgctcctccagaacggagtccaggcaccaggagtccatgaaggtatccgtggcgacctgaacggagtcctggtgactagtagaagacatcctcttggtgcggttgtgtgtcaacaagatttctgcacatgaagaaacgtccgatggagccggc

SEQ ID NO: 33039 - DNA, 272 bp, Zea mays
  Clone ID: MRT4577_130141C.1
gataaatttagtctggcagtgcctacaaattaagtctgaggtgaactacttttgaacagttgagttagaaagtatttggtagccaccagggaaaagagatcttatttcaagaaaataattagtgacactcagtaaagtagaaggtggattagaaggaacaaagggaagcagagatgggatagagactggttgcaacttaactaaatttggaagctaggattaagcccttgattaacctttaaaaatgcctataagatagcataagatgtaca

SEQ ID NO: 33040 - DNA, 3751 bp, Zea mays
  unsure (1)..(3751): unsure at all n locations
  Clone ID: MRT4577_130142C.1
ggagacccatgaaatgaaatataccatttttacaaaaatgtctatttataccacttagagcatctccaagagactagctaaatagcttggcaagctaaattttagctacttaatagcataatagctcttcaacagagtagtcatttaacttgctaagctatctggctctctaaattaactctctcactagccaaatttggctagcaactctcgctagctaagctaaattgcattttagagtctgttggaatgagatgttatatatagaatttaatatttatggagagacaaataaaaagttaaataaagagtaaaaaataaagagtctattggagatgctcttgttgtaagaatatattggagacaagtggaagggaacccacacacaggaaaacgtatgtgccatagatcttgagttcttgacgacgcccacttgcaaacttggcttgtggagttgtggtagagcagagatcgttttgaaacctcacatgggaaacaaattcccagatcatgcaccggctttacaaagaacaaacaggtgtacaatcaacgctaaaacacactcttcataccctgcacgggccaaggatcaaagcgagtggtcccttcgcccccggccgggtgccgttgcgccgatagacggtagcatcgtcccatcggcggtgctcaggcaggacaacagcgacggagaaatcgacgtcctgtgtcccgccggctccatcgacgtttcttcatgtgcagaaatcttgttgacacacaactgcacaagaggatgtcttgtactagtcatcgtcaggactccgttcaggtcgccacggataccttcatggactcctggtgcctggactccgttctggaggagtgctgctgctggtgctgctgcctccgtgcggcggacctggcggcctgctgcctggcgcggatggcgtcgagctgcatctgctcgtcgcggcactcctcgctgcagaagggcgtgtcccctctgtacatgaagatgtcgcagtcgcgtcccagcggcctggcgcagagcgcgcaggcgtccagcgtgggcagcaggctgggctcgcagtccggctcggcgtcgaagaagaagaaggcggaggccatggcgcgcgtgtatatataggcctgggtgtggctgttgtgtcctctggcttactggctaggctaggaaggacggcctgatgccttgagcagttgaggagctaagcaaagctttgcctgttgggctgttgctgctgcggcctgcgggtggtcggagagtcggaggagctcgtgnnnnnnnnnnnnnnnnnnnnnnnnnnnnnnnnnnnnnnnnnnnnnnnnnnnnnnnnnnngacaagaaaattggacacccgtcgaatttattctaaggcacagcttcctgacgaattgaattaagttcacagacgcctcggtgggatttattctcaggcacaacatcccgaggaactgattcaagttcacggacgcctcggtctaatttggcacaactccgtgtggagtttattcaagttcacagaggtctccttgagagcacacacaaaaaaaattcgatcactcaacccaacaaacatagcaactcacaacccgagtcttcctttttccatttctcggcttatctggatttccttcgtcatataattaatcccgtggccaaaattgtgctgcgagcctgggattttatccaacgaaagcgaaatcttcatgcggctgatggtgactctgcccacttattcactacctctttcaatttgtcgaatcctgttcggtttgtgaagcttccaaaagattcgccttcctggcgtgtgccattccaataggtaaagagaggttccaaaaccttctcgatgtcatcaagcttcaccttgtccataaatgattctgctagcgtactctggtttggtgttccacccagccagatctggtaactttttgggccatcaccaacaaaaccaagctctgccatatatggtctagcgcatccattagggcatccagttatcctcacaaccacagactccgaatccttgataccaaccttattgaagactgctctaattcgtttaagaatgggtaagatcccccgttcagcttctgtttgtgccaaagggcacagtggcaaggcagggcatgccatggcagttaaattcagggggtcgacatccttcggttccagcaggccagcttgtgcaagagctgtagttatgggttctctccacgcttgatcaatcccacataaaataagattttggtttggggtaatactaacatccaaattatacttctcaattatctctcgtagagttttctttgcttgcccaccaacacgaccattatcaacatgcactccatagaataatttcccatcaccctgttcttgccagccaaggtagctgttaaactgccactctggcaatggtcggaaactttcaaacttcttcccgtaatatttttcaacttcagcccgaaacctatctattccccaacggtcaatcaaatacttcatcctactatacttgcggtcatcccttcttccattttccctctgtgtgacgacgatggcctttatagcatataatatatcttcttttggaacataacccaatggatcagccagccgagggaatgtagtttccactcggtgtgtccttcccatgccaccaccaacatagatgttaaagccaataggttctcctgcatcatctgaaacaacaacaacaccgatgtcattggtcagaatatcaacagagttatcaccagccgcggtaaccgcaaccttgaacttccttggtagatactgggtgccatagattggttccggagagtcagggaagttcgttccatgcgagttgtcattgcgggcttttgtcacctcaggaggctcttcagctgacattatcttctcgccatccacccacaggtcataataagccccggactgtggtgtaagaagtgctgcaatgttctctgctgtttgttgagcaaaaaggatatcttttttgacataaggcgctgcaggagcaagtacattcctgttgagatcgccacaatgacccaatggatgtgttagtcctgatgcaggagcctgttgttcctggttcgttcctgcgagcaagagcaatcggccttatgcccatgattgaccagggtgaaaaggatgacaagataatagcagtctgtgctgatgatcctgaatatcgtcactacaacgacatcagtgagctgtctcctcatcgcctgcaagagatcaagcggttctttgaagattataagaagaatgagaataaagaggttgctgtcgatgcattcttgcctgcgaccacagctcgagaggccattcagtactccatggatctgtatgcgcagtatattttgcaaagcttgaggcagtagattggaagcaactatttatctgggcgtcttggaatgagtgtgattttaataagtcaaaacacttgatattgtgtgcaaatcttggggttgagaacaatgtcactagctgtgatttacttctgtgacttgcattttttttcttgttaaattatgaataagcgaagtccatacgtctactgtgtggcttcttgctgggttcatcgtctacccatgttcctcaagcttgggaacatggggcttttccccatttccgtgtcttccatgcgaagtaaaatttatttgtatacaatcgtattaatcaaaaaaaaaaaaaaaaaaaaaactcgagactagttctctctctctctcctcgtgc

SEQ ID NO: 33041 - DNA, 205 bp, Zea mays
  Clone ID: MRT4577_130143C.1
cgcgggtcctaactgtagagaggacctaccctagagcgctcagaagggccgcaggtacacgccacgtcctcagcctgttgaaagatcttcaccaaaagtgatccaaggaaatggatgaatatgctggctgcatgcattacctacaccaacgaattcgatttctgccgtaaggagcagtaaagcgcagaggaagcctgccccattt

SEQ ID NO: 33042 - DNA, 454 bp, Zea mays
  Clone ID: MRT4577_130144C.1
ggcaaggccttcaaggaatatccactggcccagggcaaacccccaaggtgaagttttgaataaaaaccgaaaatcgcctttgaaacgggttcctggggttttttttacagaggggggatgattgccaaacccccttttttgtggggggcaaaaaaaaaattgggtggtttaaaaaaaaactggactggccaaggtacatacacttgaaataattttggcgaagcattttaaaaattagctcaaacaaatataccctcatttccccccatggttattgggacttagggtctttggttgaactttaacaagaaatggggtatacctcacgagccttttcttttgttaggaaaaaattattttttggttggggggaaaattcaaacaccccgtttttattaaaaagatctggaacggacaggggtcttttaatttctgggttggggggccccaaaaa

SEQ ID NO: 33043 - DNA, 253 bp, Zea mays
  Clone ID: MRT4577_130145C.1
acaccccaagtgccagcgcaaaagatagcgcttgcaaaaaaaaaaaaaacccggaccatcggtgggtggggaacacaatcatgaaccaccaagcctaaatccgcaagggaccgtctgtatcagagaagcaaaaccccatactgtgcttttatagtggacccaggaacacgagaccccaaagaaaaacatgggctcccccacctaaaggcgaaaaatcaactattatggcgagggcgctctccctggagaaaaa

SEQ ID NO: 33044 - DNA, 206 bp, Zea mays
  Clone ID: MRT4577_130146C.1
gggccaaacccggggccccagggcctataaaactggtaaaaaccccgggtccttaaagggccaagggggacagggaaacctttccgggggggtttttttacagggcccaggcttacgggggttctttaaaaacccggtttggagcccccccagcccggaaccaccgggccaggaccaccataaaaaaacccagtttaccggcccgg

SEQ ID NO: 33045 - DNA, 222 bp, Zea mays
  Clone ID: MRT4577_130147C.1
attaaccggtccgaccttatttgggttgggctagaacaactactaatattaataaatcatgatatcaattgtttcactcggccccatgaaatttgctcatacaaactacctcgatcattacaagggtcttcaaccaattattcactagttgctacctttaaaccactttataatactttaacccaattacaaattacatagacctacttgatatttctaccg

SEQ ID NO: 33046 - DNA, 144 bp, Zea mays
  Clone ID: MRT4577_130148C.1
cggacacaaagccggactcttactcagcaccgcccacagacgatacatacacaaaggggggagtctctgaccccgaggcctgctctctcaacgagcccacagctcctgagcccacatactgctacattctaggagccccaaaag

SEQ ID NO: 33047 - DNA, 296 bp, Zea mays
  Clone ID: MRT4577_130149C.1
gggggcccaaaaggggctgatgtacccaacctttttgaccccgtttttggataacctccccccggttttttataaaaggggccccgagaaggcttttttcccctttaaaggccctcaaatcccccgggcggaaaaaattccttttccccaaaaccccaaagggttttttaaagccccccccaggggccaaagaatggggcccccccccaggggcagaattctgggggggtccccccctaaaaagcggggggccccccaaccccccaaaaaaaacctttttttttcccccccccggg

SEQ ID NO: 33048 - DNA, 404 bp, Zea mays
  unsure (1)..(404): unsure at all n locations
  Clone ID: MRT4577_13014C.1
nncgcaagcagcgcagcgcgcgtcggcatggctcgcctgttctcggcgttaagccgccgcaggccgagcgacacgcgacaagggcgtacgatcaacaactcgggccatacgcacactgagcgacctcgctccacacgcaccatgcttgatacactgttcgcgagggtcctacttaagccacgccatttgctcgcgtcccgcttcatcgaaccgaggcggaaccgtgttctctggattaatcacactacgactctctatgagcactgtggacacgatcaaccatgtagtgcgcggtctccttctgcgatgagtgggagagagaggatggcaacatcaatcctttgttaatggcgatctccttaatcaagagagctaccgctcgcacttgcaggtctgtaatatat

SEQ ID NO: 33049 - DNA, 198 bp, Zea mays
  Clone ID: MRT4577_130150C.1
ggccaccttggtatgtcatcatttaggtcataggataggagagcataagagggtacggttctgatattgggggcctggactcacctgtacaaatgagttggaaacaaccagccagcatgtttttttatctatttgattggatggacataagcgctcaccttggaagaaactacccagattttaccgaatgattttgct

SEQ ID NO: 33050 - DNA, 2031 bp, Zea mays
  Clone ID: MRT4577_130151C.1
atggcgcttcccctcccgcctcttggcctccctcctccaccccttcgcctccctcctctggccggcgcttcagccccttcatcccacagcctcacgccggttcttattccaaggccggcggccactacccttccctccccggcgtcggccgcttcccctatcccctcccgctccccaggttccttgcccggtggacgttcgaaagctcagcggtggagagaggaaggcggttcgtcttctgctgttgcgcaggatcacagtgaggtccagcgctccttcaaggatgtgctgttggccgtgaagcctcctgcccctggtggtgctggcggtgttgatgctgatgatgcctgggtgagagttgaaggtcgccaggctcgacgtcgtgcttctaaccgttcgaagcccctccccaggcctgtccctgtcgatttgcgcgggaagtgcttcaattgtttctcgccttcccatcgtgcagctttctgccggcggcctgggcaccgagcgatcgtgtgcccctgccggcggacggccttgccccctccgcggcgtgctctggtgtggcgcccggtctccaggaagcccccttcgacagattctcctgccggtgacatggagggatgctcgttggccggcatggctggcccttctggaggcttgaagaaacgcactcgtcgtggtcagaggaggaagactggtcccgagggtgggcatcctgttctggtggcgcctccacccacgcctgtgagccccgctcgacatgtaaggatcatcgagcgctccagggaggttgatcgggccgaggctgaccttcgtcgggcgctgatcgtcacagttcttggccacatgagttctgatagcgccgctattgttctggatgcgctcgcctcaaggttttcttttgaagctgatgcgctccatcttcggcgtgctgcgtcgaactcttttctggtcttcttcccctcagaggatcatgctactcgtgtcttcaatggtgggcagtcgcttttcattcctcctgtcaggttgcacctcaagcgttggtctcgtcaggccttggcctctggtggaagcgccctgcctctgctgctggatatcgagctgagggggattcctgcccacctctgggagcttggtactactgaagttcttttgaatgggttttgtctgattcaggaactacacccagaatcagtggagggcattgatatgtccgttctcaagctaagggcgtggagttttaatccggattgtttgcctgctgttttggatcttcatgttcaagagcctcttgttgagggggaggatggtgccattttccctcgctctttggtatatcatattacagtgaaggttacccgctccggtgtttggccggaggggagcttgcctccgcctccgccatcacctccaggtgatgtcgacgaagaccatgatcaagatcatcagaggcggcggctgcttcagcatggcccctcggcttcctcgtttcggacctcggtacactcgcggctgggcccgcgtgccccttcgtcttcggtggctggtggaccagttgatgccgcaattctcccgtctgcttcgggtgaagagttgacggcgcctgtgtcttccagtccgcttgtttcctcggttcagatgttgggggcaccagttgaggccgctactctcccgatcacctcggtcgtagagttggcggcgcctgggccacccccaccttgcttggacgcttctcccgctgcaggctctcggttatcttctgcgggctcaagagctgttgatgttgagttgggttttcagggtgattgcagtttagaggcattgagttctatcatcgatctgcctatggggccagctatgcctttggcatgcaggttgaatgccaagccaccttgtttcaaagtatattctagaaggaagaaggctattgtggttgaggagctgatgctgtctaccccattgcaagaattcaaagatggtcttacaaagccgactgatgagttgttgccccctcctgctctgattgtcaagtga

SEQ ID NO: 33051 - DNA, 231 bp, Zea mays
  Clone ID: MRT4577_130152C.1
caacaagtcgtccaacgtccaggcttttctgttttctttctctcacgcaagtcgcaaagcgtctccaatgatggcttccatgagaactgaagcggagaagaaccctggaagcgtgttgttcggcattctcgctcaagggctgcatgggatgtggtacgtggtcgcagtggccgcgaggcaggggctcggcactgacgacgactctgggttgctgtgcgagcagtagcatga

SEQ ID NO: 33052 - DNA, 465 bp, Zea mays
  Clone ID: MRT4577_130153C.1
ccgggtcgacccaagccttccgtgaaggtcctccggggttcggttccttggttaaccggatcaagatggcggcgtcggatgttgagtcccgctgcttcgtcggcgggctcgcctgggccacggacgaccacttccttcacaacgccttcagcacctacggcgaagtcctcgagtccaagatcattctcgatcgggagaaccataagttccgccggttccggttcgtcaaccttttcaacgaagaagccattccgaaccgccttcaaggccttgaccgcaaaggagctgaacggccgcaccataaccgtcaacgaggcccaatcccgcggcggccgtgaaggcggcggcggtgggtacggtggtggccgtggaggcggcggctacggcggtggcgggcgccgtgatggcggcggcggctacagcggtggcggcggctacggtggcggcggcggctacggtggtggt

SEQ ID NO: 33053 - DNA, 314 bp, Zea mays
  Clone ID: MRT4577_130154C.1
gaaactaacagtctatcgaattttgacttcaagctgagtcatgcacaactttaataggggtgaactcactcgatcttatttttattgattatggaataaataaaatgtatacaatactaatgcagcatacatatctactaccaaactgtatcaatccaccattgcactcaaatcaagttgccctaaaatgcctaactataactgtaaaatatcacatatagtttctaataatatttgaaccaccagcaaataattgacctctaaacactgactgacactatgattaaaacattgcattcaataactcaccttcc

SEQ ID NO: 33054 - DNA, 299 bp, Zea mays
  Clone ID: MRT4577_130155C.1
cccaataaaaatgggaaatttatggaaactgggggccccccaaaattaaattgtaatttagtacccacaaagttcctaatttttggtaaaaccacccgagctttttgtttgacatcccaaactttgaaaaaccccttttggattcaaaaaaaaaaaaattttgggccttaacttgaaatgaggaaaatcctaaccccgggggggtttaaaaaataaaccctttggaaaaaaaacccggaaatgcaagggatgtttaaaccaaggccagccacagggatccttttgcaattgggggaaaa

SEQ ID NO: 33055 - DNA, 501 bp, Zea mays
  unsure (1)..(501): unsure at all n locations
  Clone ID: MRT4577_130156C.1
cggccatcccccccagctaagcccacgcgggncgccccccgcacaccagaggcgagcgggcagcaaacccgccgggccgcccgggcgaaccgaacccacgggcggccacagagccatacaaacaccgcccggctagggggagcaacaccagaggcaggaccaccaacgccggcgcccccaccaggaacaacaacggtggccacaccgaagggacagcgaggggcaagcccccacgagaggacaaagaaaagaaaagcgcgcgcagagcgacagagaacgcagcccagaaacgagggagcaggcacggagagccagcgccaaggggtactttgagggcacccatgatgacgctcaccttacatgagcagcagatctccgcgctccagggggccagacaccagccatagaacggcgctctacagctgggcatgagcgcggaagccccgagaccaagagggagccacgagggtaagcaggcaagcaggacaccagagaggggaa

SEQ ID NO: 33056 - DNA, 297 bp, Zea mays
  Clone ID: MRT4577_130157C.1
gtgcggcgctcaggcggcggttccgacctagatcgtctcaagtcatggaggtatttgcttttgcgcacctatcaagagcgatcatcactatttggaccatgaatacttccctgtacatatgaacctactggtacactatttatggatctgtacatattgacttaacacctacaagcacactattgctaagtgttgatgtatggtggttgaacactacttactatgtattgtactctaaatgcactctgtaactggtatcaactattaaggaaaaacaatgttatctacttatatttc

SEQ ID NO: 33057 - DNA, 252 bp, Zea mays
  unsure (1)..(252): unsure at all n locations
  Clone ID: MRT4577_130158C.1
ccgggctatcggcagcttgtgagtagctccggtacggaggggatcatggaggaggggcggcaactggaagcggcggcgttcggttttccggcgccggtgcagccgggggccacgcgcgtggggtggatcggcatcggcgtcatgggcggcgccatggccaagcgcctcctcgcggtagggtacgcggtcaccgcgtacgctcgcgcgccgtccagggcggagagcctcnncgcggcgggcgcgagcctcgcg

SEQ ID NO: 33058 - DNA, 3302 bp, Zea mays
  Clone ID: MRT4577_130159C.1
ggaacctcgggcctggcggacaaaaccatccatcgtctctgcccgccatcccatttcccaatcgcctccaaccccccacaccccgcccgccgcaaacccctccatttccgccgcatttccctcgctgtcccagctcaccggtcggtcgggtgctggggctcgcggctcctctcttcctggggcctggaagggacggggaaggatgcaggccgcgaccaggagcgtctcttgcatcggcgcgcagccgtccgtcctcatccggtgcggcggtggtgcgctgtccgcttcgcccggcggcctcggaggagggggatgcagggtccgggtcgtcgccgtgctgcggtgctgcgcacaggagaagcgtccgcctcgggtgcggaaatccaaggaggagagaagggagatggtggagtccttcatcaacagctatcgagcttcaaacgaaggaaaattcccatcggttaaccttacacataaggaagttggagggtcatattatatagttcgtgaaatcgtgagggatatcatccaagagaatagagtccttggtcctggtggcttagatgctatggtgctgaattttgaagattttgctgattcttcagggtcatccatgaagcatgaactgggtcaagacaatatcgagatattagatacgtctggtagtgaagtcagtaagagttatgtgcctgaaatatccagcactgatggatcttttctattgcaaggtaatgccatcagcaatcatagactgctgggttcatctaatatcttagaggttggtgttctgaatagtgtggtccaaaatggaagtgtggcagatgcaatattcatggaaacaaaccttgcgaaacaagatgaagttccatctagagggtccattgagtttgacttgaatacttctgaagagcaagctcgcttatttgctcaggtctctgattcagatgaagaagtaacactaaacaatcaggcggatgcacaggacgggacgaccaatagtggcactgatagagttattcttcccttagaatctttcgctgtttatgaaaacaatgcttcacttctaagagatcatgaggcacattgcctgatgataatcatgatggatcaactgatagggccgtggatgacgcaagtctttccttgaggcgaccaatggtgttcaagcaaagcaagcttctttacatgagcatgatgcatcaactggaaatgtatcgattgaaaatgctcagagcttagatggtcagtttagtactactgtgtctactgatcctaataaatggtgctaaattggaggctgaagttgcaaccaagacagttgaagcgtctaaagtacacaggctgcaagatgggtttgagcaaccattggctgatgctagctgtgatgggcaagaaaactctgacagccctgtttctcatccagcattagatacaaaggggctgttgcacacagaagatcagcagagtgtggtacaggtagatgaaagtgaattcaagaactcaacatctgggatcacaaaggaagatttcaagcatgagcaaggaattagcactgcaacagtgatcagcaggagaactttgaaagctcagcagaagaaagatgacaatctattctggcttgtgcttagggcatttgttgttgctatatcgaaaatctgggcaaaatgaacagtgcagaaaggcagcgtatgtggaactgaagatcgagtgaatccttcctagtggaaaacgagaaaccggtccatgaagttccatttctcccatgtgaatatagatgcgctacttttgtgccgcagtttaagtaatcttttttggagacagctggtctggtttgtagtcgcttcccactgtaggtgaaagaccatgttgggccgtgttcaacatttcacccatatagtcactccaaaacattgttttgcactttaaattgtactgatcgtagagtggattttgaatatgggtacggtaagctgacggaaatagcttaaagtttagttatcctagtctggtgttcatgtgttagatgtttggtacaatggatgtcatgtgtcttttggtaaaaggaggatggatctcttttaatgctctatgaaatttgcagatttgttttattttgtttacggttgcacctgcagcatgcatggcccaaggacaggcatccagatcgtatcggtgccaagcatagctagacagaattggtattgggcgaatgtagttgtactctgtaatgttagttagggtgatgagcatccccaataaggcttcccaactgcgattttgatgactatcatattctttgtggagatttacattgtatcattgtagcatacgaaactgtgcgacatacatgtaccgtatgcatgttatcagattcttagatgaccacacattggcacacccgtctctcgtctcgtgttctttcactgtgtgctctacaattgtacaaacaaacgattgtgtcaaggattaattaatgggtagcactgtacaatttgaaatcgcgggtcgacacaagtgcctccacaccgagtaaacaggttgcaagatgagtttgagcaaccattagttgatgctagctatgatgggcaagaaaactctgatagcccagtttctcatccagcattagatacaaaggggctgttgcacacagaagatcagcacaatgtggtacaggtagatgaaagtaattcggaaggactcaacatctgggatcacaaaggaagaggtccatgcagccgatttcaggcatgaacaaggaattaacaccacaatggcgatcagcaggagaactttaaaagctcagcagaagaaagatgacaacctattctggcttgtccttagggcatttgttgttgctatatcgaaaatttgggcaaaatgaacagtgcagaaaggcaccttacgtggaactgaagatcgagtgtgatacctttcctactggaaaacgagaaaccggtccatgaagttccatttatcccatgcgaatatagatatgctctgcagtttaggttattttttggagacagttggtctactttgtagtcgcttcccactgtagatgtaacattcagtcatcttgttctggtgtcatctgtgaaatatctgctacaatggatgtcatgtgtcttttggtaaaaggaggaggatctctttcacagcgtgtttggtttgaggaatgatatagtctatcatcttttcacttttcattttctggtttatagaatagaataagttaatgcatcactattttattttttataggctaataattagtaataatataaggaatgggttattttact

SEQ ID NO: 33059 - DNA, 246 bp, Zea mays
  Clone ID: MRT4577_13015C.1
tctctctcttcctgcattagttgcagagcctctgcctactagttcgcatctgtgcacatggcccatatgcaagctgttcaaggtgttgtcgtagcttgcattgcaatgcaggttgcaacttagcaactcaacagcttgagaaaagtgcaccggatccatcttgtatatccgctcagaactgaaatctcgcaacctgagactgagatatgctagtggaagagaacaattaaaaaaaaaaaaaaaaaa

SEQ ID NO: 33060 - DNA, 320 bp, Zea mays
  Clone ID: MRT4577_130160C.1
aaaaaaaaaaagatgatcactccactcaaagctttcaagaaagggataaagtaatgtatgggccgatctctcacacgcagcttgttacataactcgctgcaaggttgggaaaagcctgacaacggggggggccgttttgtagatgcaaagttacctttcgctggttctgaaacttattcttttcttttggtgcccccaaaaaattaaactgcccggcgttttaaaacatagcaactggaaaaaccctcggttttccaaatttatacgcttgacataaaatccccttttccccagttggataaataacaaaaaggcccccc

SEQ ID NO: 33061 - DNA, 792 bp, Zea mays
  unsure (1)..(792): unsure at all n locations
  Clone ID: MRT4577_130161C.1
aaaaaaagaagaaaaaaaaaaaagagggnnnnnagagagggtttnccgattgggtacctcgtagccggccgggagttcctttccaaaacgcagattttcgcctctcacttctcccgccgctgctcgtcctcctcgccggtggtagccatggatcgaggcgctaccgccccaccgtgcctaccaatccggctcatactgatgaccctgaccgccctcgagactgtcaccgtccacgccactgtcgaatgcatcaccctcaccgaagagaccttcacagacgacaccaaggaaaaagacactgagagcttcgagatataccgcatcccctggaggagacctgcaaaaaccttgcaacactataggaggacctcgcagaaaggttacggaacgtgcaaaagaacctcatactggttttttgaccgccgcgcccgcaaaccaggatgctcaactggagacatacactcccccccaaccttcaaagaggttcatgctggtgatgaaccagcaaaaaaaaaggacccacggacgaggaatccctcaaaaacttcctgtagaatgcacccgcaagagcaggtgaggcaacgattgccactgcttgaagctagaaagatccggcaatcgtgtgtcgagtgcatcagacaacgaaccatgctatgcaacgtcgataatctatcctggaatatacgaagacaccgtgcgtgaaagaaatgaccttatgcagatccaatcataccatgcctcttccataagtcactccgaatcaacttgtacaaagctgtacgccattcccat

SEQ ID NO: 33062 - DNA, 541 bp, Zea mays
  Clone ID: MRT4577_130162C.1
cgcgcaaactctatctaaggaggggggagactagcccggaacctgcggcagaatgggtgcgcgctagggattctgtacctaaccggctgagcgacttgtggagacaggtacactactacttgagaacgcgcgttcagagcttaccctggtaggatgggatgggttacatcattcagtcgccgtagtgcatgggatgagcgctctagcgtagaagcagtggcttactaccacggggacttatacttcagcgcatgctcctattcaaatttcaaatccttcgactgtgcagcagggcccagcctgatctagatctctccgacggcccgcacgaaccagacctggacaaagtcaactgtgaggaaggcaacgccttaacaactggtcaccaagggtgcaagcaagggggttccagccaccggcgttgtgaagaagctgtacagattactaccttgtatcggcgctatgcgccagatccgcaggtcccacaagagcaggtagtggctcattcggtatgtgcccttacagaagctgcagattgaga

SEQ ID NO: 33063 - DNA, 1578 bp, Zea mays
  Clone ID: MRT4577_130163C.1
gcctctcctctcgtttgcctgcgccgccgcgatcgccaatcggcatggctcttcccaaaccccgcccgccaacgccgacggcgtcagcggccacgggcacctcctcgtcgcgaatagactcgccatcgctaaaggccgcgctcgcaatggctctcatccactacaaccgcctccctggcaaagccaacgccaccgcgggcacatcacccccgtctctcctccactggaagcgcaaggccaaggaccggaagcgcgaaatcctccgcctccgcgaggagctcaaggtcctccaagatggggtgcgcggggaggagatggagcccccggttgcgtcgtgccggtgccacttcttcgacgggtgccgggaccttcgaccgcagcagggtggcggtggtggggagcactgggttgacgaggtgctgaggaggaggtttctcagactggtgcggtggaaggagaagcgacggcgagtggatcgatctcttccaagttctagtttgatcgatttcaacagtgaggatgagatgcagcagctcagcatgtcgactgatttcctggtggagctatcagacggcatttttgccaaaagtgaagctggccactcatttgctacattttctcaccaagcagtagatttcattttggctacactgaagaacattctttcatcggaaagggaaaaagacttagttggggagataatcgatagtttagtgactcgtttgatgaaaaggatgtgcactgttcctgaaaagcttgtcacatcagattcaggatcaactggctgctcagatgcccagttctcagtgcagcacttattccgtaagttgggaaatgatgaattcattggtcagcgggtaatccttgtagtttctcaaaagatatccaacgtatctgaaagattgttcttggctgatccgtttgctgatgctttccctgatatgcatgacaatatattcatcatgattcagttacttgagttcctcatatctgattacatgaaagtttggctatgctgtgagcatattaacaaaagactttttgaagaatgtaccagatctattctcaaggcacgcaatgatttgcaaatcctggaaaacatgaatgggctctatgtggtgtacattgagcgtgtggtcggaaggttggcaagggatgtggctcctgctgcacatcaggggaagctggacctagaagttttctccaaactgctgtgctgagagtgccttgcatatgacattccaagcctgacccggcctgttatatgcttaggttgattcaaaaccacgacaccattggtccacttagactatgcatagttacatttctgtttgaaagacaaactttagaatttggtagtggatctacttgtatggcctgttgtttcatgtcaccattgatagttgattagtttcattttgctgacttaacccctatacactgtgagttgctgtaaaaaaaaaaaaaaaaaaactcgagactagttctctctcctaataatagtaacttctgcgagcctgcggccgaaaaacgttacacaatatgtagtgtaaatgacatatttatacttagttatat

SEQ ID NO: 33064 - DNA, 339 bp, Zea mays
  Clone ID: MRT4577_130164C.1
atatatttttcttcttttttctttttttgggtggtttttttttttttttgggtggttttttttttttttgggcccaactaatataatcccctttaatattgggccaaaaagaaaatgaaatccgggtccaaaagaaacatttgggggccgtatactcaaaccttaaagggttaaaaaaccgggtttttttttccgtttcccaagggggggggcccttttaccgcccaaggaaccccccccaaaatataaggttggcttgtgggaggccaaacccccttgttgtttatcccccccggggaaatcgcccggattaacctggccgcccccccttttccaatt

SEQ ID NO: 33065 - DNA, 384 bp, Zea mays
  Clone ID: MRT4577_130165C.1
ggggccaaaatattgcagtacaaattccaatcaaaacaaatcataaccatgagattcaaacttggaataatttttgtgctaaaaatacattggaaaaaggataaaaaaagaagaaaaaaatatcttctctgatttatcccttgccgcagtttttttttccttccttttcttcaccaccacgtacggctggaaggcttaagcttatctcctcgtcagatttttttttgcagccgtgcccaaccaagcttcttcctcctctcactgccgcgcgcaggcgtggagattttttcgttcgtcgctcatctcctgcaaatatccagccgccctccttctctatttatctccctagccgctccttccagcgcctcatctccttcgatctca

SEQ ID NO: 33066 - DNA, 557 bp, Zea mays
  Clone ID: MRT4577_130166C.1
agccgcagcaacaaacacgaccccagtagagagaacgcagagagagagggccacgggtgtagcgggttctggtggcgctgcggcttcaagcaaggtgccgggcaaggtcgttggggagtacgcgcgaagcattgccgcatgacaacctggaagcgagggtctcggcttaattgtaccacggtggggatttcacagcgcacgccaggcggacgaaccgtggacgggcgcggttggcatctcactggaccggccttcatcgccaaatcgagccgagcgttgagaattctgatgagcaagctacagaggatccagggcctcagctggtagaatctgttgagcaggagctcattgaaggagaagaacatgtggtcgaagaggagccgcctaacactgaggccttcgacttgatctaggtggcgtctcccagtcagctttgtggcgccagtgaataatatttagttcgctttattttatcatttatttctgtaagacatctgctatataataagtacatttatgatatttatgacatttatcgggtaaaaaaaaaaaaaaaa

SEQ ID NO: 33067 - DNA, 348 bp, Zea mays
  Clone ID: MRT4577_130167C.1
gccggccggttcgggcaggttgcgctccaagtacaagatcacctaccagttctaccgcgtcttccccaacggcgaggtgcagtacctccaccccaaggacggcgtctacccggagaaggtcaaccccggcagggagggcgtcggccagaacttccgcagcatcggcaagaacgtcaaccccatcgacgtcaagttcaccggcaaggccaccttcgactaatcacacttcttctattaattacagtatattgtaatttggctgctggtacggtggtggcatgatttgagatgtgcatgatgatccttgtgtaattttattagcaaaaaaaaaaaaaaaaaaggccccta

SEQ ID NO: 33068 - DNA, 607 bp, Zea mays
  unsure (1)..(607): unsure at all n locations
  Clone ID: MRT4577_130168C.1
gttccccnccatttttaacatttttttttttttttcgtacacacaatgtttatatatgcacaagacatcagtaagctccatcacatgaacatgaaattagaaagaaaaaagaaactacgtgttccagcctccagtagcacgagatgtccaatccattaaacgcgcaaaaaaaaatgaagtctgtttgagtcagtggacaagcccttgcatcgtactgtatagagttcagcttactgtcaatcccaaatcacgaaagctccattctaatttccagcaatagcagtcaatgtcaaataatcgtcatcagaagcgccacgattcccagacgcgcagcggcctttatcctgccggcggctgaaccttctggcgcgtcagccgcctcgtcgctactcttcttatgcgccggcgcgtcagctgccggaccgcccgccgtacgggcatctgacgcggggccatcagccgttgggccgtccgccgccggcccaggggcatcggcaggcgcgtctgcgctggcgtcgtcggacggtgccggagcaggggcctcctcatctttggncggaggagctcccttctttccctttgttgcgggcccgggtgcgggcgccgt

SEQ ID NO: 33069 - DNA, 863 bp, Zea mays
  Clone ID: MRT4577_130169C.1
ccgccgatcatccagtgctctctcctcttgcgattcgctcgctcgatcctagcttcccttccaagaagcgcagcgcccatggccatgtccacgcaagcctccgccgccacgcgccacctgctggccgccgcctgggcgccggcggcgaagccgcggcagctgagctcgcagctcgcgctgccgtcgtcgtcctcccgcgggccggccccgctccgcgcgtccaccgaggaggcggtggaggcgcccaaggggttcgtggccccgcagctggaccccagcacgccgtccccgatcttcggcggcgccgccatcatgcgggagggccccaacctcttgaagctggcgcgcaaggagcagtgcctggcgctcggcaccaggttgcgctccaagtacaagatcacctaccagttctaccgcgtcttccccaacggcgaggtgcagtacctccaccccaaggacggcgtctacccggagaaggtcaaccccggcagggagggcgtcggccagaacttccgcagcatcggcaagaacgtcaaccccatcgacgtcaagttcaccggcaaggccaccttcgactaatcacacttcacgtacgccgcacgccccagccgggatccaaattaaagaacttcttcttctattaattacagtatattgtaatttggctgctggtacggtggtggcatgatttgagatgtgcatgatgatccttgtgtaattttattaccaagtctcttcttatatttacatgttcatttgcttgcttcttgcaaaaaaaaaaaaaaaaaaaaaaaaaaaaaaaaaaaaaaaaaaaaaaaaaaaaaaaaaaaaaaaaaaggaaaaaaaaaaaaaaaaaagcggcc

SEQ ID NO: 33070 - DNA, 932 bp, Zea mays
  Clone ID: MRT4577_13016C.1
cgggtcgacccctgcgtccgcccacgcgtccgggcaaatgatagagtcagacaagttgaaaggcacattcggcctccctcgaagtccatgccatctcgaccagtctcctctaatggaattcgcgatgatcatgcaaagagaaagcaagtggtaaaaagaagatttgatgacgacgacgatgaggacgaccccttggcaatgatcagaaatatgttcgggtatgatcctagtagatatgcagggagagatgaggatgtcagtgacatggaagcagattttgctactatagaaatggaagagaaaagaagtgcgaggatagctaggcaggaggacgaagagcaacttcgcttgattgaggaagaagagagacgcgagcaggagaggaagaggcgaaagatggcacgaggccgatagtccaacacgcgtcatatttgggtgttataattgcacagacctgattgcctgaagacgaggcccatggtcgatcatacgggcgcgttgcagacaacaggaaaacttgccacgtggattatatggcggcaaatcaaggaaaacggcaggtgggcaacgctgggcacctgtaacaagcagaatgttaggcgcagtggtttagttgacgaagctgacatagacccatatataagctctcatcagattgtttggatcacacaaggctcccaacgttgcagcgcttcatcagattattctaaattctagccacatgctgattctttctgttaagcctatataaggatgcctaatccaagtagctcctttgttcatttttgtttgggtgtagtgttgtactccctccattttttttatctgacggttgttagtttaaatttgaactgtccggcgccaaataaaaaaatagaggtagcaacaaacaatgtgtttgatttttttggtacaattttgaccttcgtcag

SEQ ID NO: 33071 - DNA, 1437 bp, Zea mays
  Clone ID: MRT4577_130170C.1
cctcgaggccggccgggccgggacacccgctccggccggctcttagctgcatgcccgcgccgccctcctctccatcatccagtgctctctctcctcttgcgattcgctcgctcgatcctagcttctcttccaagaagcgcagcgcccatggccatggccacgcaagcctccgccgccacgcgccacctgctggccgccgcctgggcgccggcggcgaagccgcggcagctgagctcgcagctcgcgctgccgtcgtcgtcctcccgcgggccggccccgctccgcgcgtccaccgaggaggcggtggaggcgcctaaggggttcgtggccccgcagctggaccccagcacgccgtccccgatcttcggcggcagcacgggcgggctgctccgcaaggcgcaggtggaggagttctacgtcatcacgtggacgtcccccaaggagcaggtgttcgagatgcccaccggcggcgccgccatcatgcgggagggccccaacctcttgaagctggcgcgcaaggagcagtgcctggcgctcggcaccaggttgcgctccaagtacaagatcacctaccagttctaccgcgtcttccccaacggcgaggtgcagtacctccaccccaaggacggcgtctacccggagaaggtcaaccccggcagggagggcgtcggccagaacttccgcagcatcggcaagaacgtcaaccccatcgacgtcaagttcaccggcaaggccaccttcgactaatcacacttcacgtacgccgcacgccccagccgggatccaaattaaagaacttcttcttctattaattacagtatattgtaatttggctgctggtacggtggtggcatgatttgagatgtgcatgatgatccttgtgtaaaaaaaaaaaaaaaaaaaaaaaaaaaaaaaaaaaaaaaaaaaaaaaaaaaaaaaaaaaaaaaaaaaaaaaaaaaaaaaaaaaaaaaaaaaaaaaaaaaaaaaaaaaaaaaaaaaaaaaattggcgcaaaccccgggggggggaaaattggggcctaaatttaaacccaagtttgcgtttggaaaaattttttttcaaaaaaaaaaaaaggggaaaacttccccccaaaaaaaaaactttattaaagggcccaagttttgggggggccccttgcggaaaaaaaaaccccttaataacctttggggggtttaaaaaaaggctcccccgggttttgtgaaaaaaaatttaaaaaaattgggttgaaaaaaatttgacccatttgcccctaaaattttttcaccccaaaaaaaaaaaaaaattggaacccttggccaatgggttaaagaaaaagttaatgttggaaaagtttttttcggaattaaaaattgtgggttaaaaaaagagccggaaccgaaaatttcttaaaaagggggcttttctaatggaaaaattt

SEQ ID NO: 33072 - DNA, 550 bp, Zea mays
  unsure (1)..(550): unsure at all n locations
  Clone ID: MRT4577_130171C.1
acagccctgggttgggtttttaaaaaattttttttttttttttttttttttttttttttttttttttttttttaaaaaaaaaagtaaacaatgtaaaaaaaaaacggaaagttcaagctcccgttttcctggtttaaaaagttaaaaaaaaaaagggagggggggggactttaaaccaaaacccaaaagccttaaaaaaaaggcgaaaatgtaaaaaaaaaaaaatttgatttaaaaaaaaacgcgcatttgcaaaaaaaaataaaactgaaaaaacctggcaaaaaaggttaactttttctccaaaagggtagccgcctccttttgcttttcctcctaaaaagaaaacttttcgncggggaagtcgtagaagttttcggaatggaagtaaatttaaaaatcgaagtcccccttggggaaaaaatgggtaaaaattttaaagtgggccctcccgcaatccgggttaaaaaactcaaacccgaataccgggtttttgggcttaaaaacaagcaagaaaaacagcctgtcctcctgtgtaaaatagggaagt

SEQ ID NO: 33073 - DNA, 403 bp, Zea mays
  unsure (1)..(403): unsure at all n locations
  Clone ID: MRT4577_130172C.1
cgttgctgtcggtgagttgtgggtagancaaattagagctggaaattgttgcaaagggacaatgtcaagaagaggttataacatattggcagataagtattacattagtactggtcttaagcatgacaagactcagctcaagaacagaagagaccaactaaagggtctctatggcttctggttgcaattgaataagcgatctgggttggggaaaaatcccgatggcactgttgatgcacctgactggtggtggaagcaaaacgcaaagactctagaatggaagaagctaaaatatggttcaccaggctacatagatgagctagaggaaatgttccaggatattgttgtagatgggtccagctcctacattccagggcaagaatttgacgaaccgacagcaacg

SEQ ID NO: 33074 - DNA, 338 bp, Zea mays
  Clone ID: MRT4577_130173C.1
cggacgcgtggggaaaggttcttctattacttgaactttgctaattgaagctgcagggggaacgtcgatagatcagcattgcgaggcacaacaacaaggttgcttaacaatgccaagaggccacagaaagaagccctcaattcctgaggtatgaagctgcgtatatccttaggtgaataaaacctgacgtctgttcgaagctgtacctaaagaaaaaaatgcataccaacccagaggtatgattctgtacctaaagaaaaaaatgcataccaagcctaatgtctgttgttcaccttacgtgaatcaaactcaatgtattatgtttaatgggtcttaac

SEQ ID NO: 33075 - DNA, 1751 bp, Zea mays
  unsure (1)..(1751): unsure at all n locations
  Clone ID: MRT4577_130174C.1
ccggccgggcacatcgctcgatccccagaggcacagacgagacgacagagatgaaggacggaacgtcgtcggggggaggggcgttcgctgcgggcagcgatccaaggcagccgtcgacggtgaatccatacgcgcctgncgaagctgtcgccccaggacctacccatcgactatgcatgcttcctctctcgtcccttcggtccgggccgggactcctcacacagctttccggcctcaggaaaataaaggttttccggcctcgcgggagtgcaccgaccgccgtgccgccggcaccgtccctccccctcctcgtctggctcgcccgcagtttcctgttctgagtcctgcacgccctgcagatcgccgaccaccgctcgaggggacgcgggacgccctccatgattctgcgctccgcgccgcgtcgcctccacctactccgcccgcaccacctccggctcctctccgccgccgcgctcgcttccgcggtcccggtcccggccccggcccagtccccaattgagtgggccgaggctccgcttgcctccgtgcgccctgccaccgccgacgcatcgctcttccacgtctccctcgacctctccgcgcaccgggggctcctcgcctcccacaccgccgccggccagttcctccgcttccgcctccccgcctcttcctaccacatcttcctcgccatcgcatcccctcctcccccacctgcgctcgagaccctagccctagccgggccaccttcctgcttcgaattcctcgtcaagcgcctcccgggaaccccctccgcgcgcctctgcgacctccgccccggcgaccttgtccatgttggcgccagcgtcgtcggccgcggatttgatgtcgccaggatatctgatgcccgcgacgttctcgtcttcgccaccggatccgggatcagccctatacggtcacttattgagtcaggttttgctgaaaacaaaaaaactgatgtaagactcttttatggggttagaaatcttcagaggatggcatatcaggaaaggtttgaggattgggaatccagaggagttaaaattgtacctgtcctctccagaccagatagtcaatggacaggggagagaggttatgtccagaatgtgttctcaaggatgaagagtactgtaaaccctccatcagtgggagtaattttgtgtgggcataaacagatgagtgaggagatcacaagagttcttgttgccgatggtttgtcaaaagatagaatcttaactaacttctgatcgccagaaggacattgttccatcctttgtagaggttgtacctttttttttttgtaccgcagtcaagcagctactctttacaaccgcacaatggcacaagtgcaaatcgcaacaggcacaatggcgcaagttcaaatcgcaacaggaagacagttgcgtgattacaaataagttcattctcttctccatgtgaccacattggcttattgctgaatgcctgatgtagttctcctttcttagaaaaagaatgcctgatgtgaatctcacatgcactggctctagttgagatgtgttctatagcatctgatacattgatcccctgtaaggcgctgatgtacttcagagaaggccctttttggagaagtaagaaggggatatagatgtattcgcgaacagccaaacaatccaacttattttatgtattcgtgatcgtttatttatggctgaaaacagactatgttctcaaaacaaaaaaaaaaaaaaaaaaaa

SEQ ID NO: 33076 - DNA, 318 bp, Zea mays
  Clone ID: MRT4577_130175C.1
gggggggccgggacttagtacaggagtaatcgaacacaaaatatcaccccggggaattttaaacacttggtacaaaaaatcttaaatttaaacttggttaaagacaaaattttagggcccgacgaaaacacatagccaagacaactttataaggtcacggtaaaagcaaccccagggccaaactcgcctaaaaaaagaactgggaaacaaactacttggggggaggaaccttctggccagcctaattttccttgagggggctttaaaggttcacaccaacatcctttttggaggcgccgggaacctccaagagcttcc

SEQ ID NO: 33077 - DNA, 682 bp, Zea mays
  unsure (1)..(682): unsure at all n locations
  Clone ID: MRT4577_130176C.1
ttgggtacctcgaggccnggccgggccggggattcccgcctaactggcactataaacatgtctactgagacactagcgctgacctcccagctgtactgagatatctacgatatacctatgcatagatgttctccggcgccgggctcgcgccgctcatggatatgctccactgggggcccgcggcgctgctcctcctcatctgcacctgtgcgaccaccgggctgctgctgaagccgccgcccaaagccgagggccacacgccacacgagctgttccctaccgtatccgcctccatcgtcgctcgcgacagtacactgacatcgccctcgtccgccggccttcctcgtcaacgtcgcggcgcacataaccacagactatgcgtgtatgcccataccccgacccagacatactatcatccgtactgcctgactgaatatgcatatgttcgttcacgccgcactacatctacacccaccactatgacaacgagctactctctgctcactaacccgtgctgctggctcacgcacatggcgtgtataggaaaccaggtctgggatgataacattccgagaaagctcgcatagatcacaagctatgctacccaacctgaagatctacagtgccctacggcaactgagcgcattgttttaaaacctatatacatagtcatttcctttct

SEQ ID NO: 33078 - DNA, 361 bp, Zea mays
  Clone ID: MRT4577_130177C.1
tgggcggcttactcgtcgttttttttaatgggcttggaggtgccgctattatatgcatcgttgagaaagcacctgggagggacatgcattaggaggacaagaagaccgggtgtgtacttagagcaaaaacatttagcatagttttttgccagatggatctgaatacaagatacacttcctgccatatccgatgcgaatcgactgcgtggtcagccgatgaatacatacgtatagactcgctcagggcctgagcagaacgccacgtcaccccggcgcatgcttacctgcatgcctgaatgcatggttcattgattagaaggggcttcccttcaggaatgacggaggttgcagcacctttaga

SEQ ID NO: 33079 - DNA, 334 bp, Zea mays
  Clone ID: MRT4577_130178C.1
ggaacggggaaaacctttttggaaaaacttttaacgcctttttgggctttccaccaaacgggtttagttttttaacagctcacagcctacaggagttttttccaaagtttacagcccaaaacaactttttttacagccacagcccaaccaaaggggccctaattgcaatttgactcccctgggccaaacaaaaacgagctggttttctttggggtttcaccaccaatgggccacacaaactggaacggcctccaattaacaaagatttactggccccccggttgggggggggggtaaacaaactgatcggggccctgtttaaacagggaaaact

SEQ ID NO: 33080 - DNA, 541 bp, Zea mays
  Clone ID: MRT4577_130179C.1
ctcaggcggcgggcggattccaacgagggacaaccgaaagcagtctaaactccacaacaacctccacctcccgaatctcgctcatacacctccctcgccggggccggaacctgatgaacaagatgcacagcccccgaactgctacttacgtctatctcaacctcctcgacctgctctaccaccacttggccatcacgacaacaacaactccgatgttgacatccacaacagcgtcgacatgaacaacatcaatcttccactcctacttcatgccgtcggccttgtaccagtttgtggatacgaaaagataaaatcattgctcggtacgtcgctgcaggcccagaagatgatagcattcaacatcactgagagacagaaagggactgatctgcagtctaccgaaacggctaagtgcttcattgactgtgatgaagcctagtgtctcacatattactggattggtctccatgcttgactaggactacactgaggcctctctgacacacaccctcaatgccaactctgcatttacatgcttcga

SEQ ID NO: 33081 - DNA, 151 bp, Zea mays
  Clone ID: MRT4577_13017C.1
ctcacgagtggggatacgcgtccgctcgtctcgcagtcctactcgcaatgtcgcatacagccgtcctgcatcctcttccggtctcgtccgtacctctcgccgcttgatgcgtcctgccggcgaataccgacctgcgtcaatcgtcatgact

SEQ ID NO: 33082 - DNA, 351 bp, Zea mays
  Clone ID: MRT4577_130180C.1
gggaacggggaaaacatttttggaagaacttttaacgcctttttggggtttccaccaaaagggtttagttttttaacagctaacagcctacagaagttttttccacagtttacagcccaaaaaaacttttttaacaggcacagcccaaccaaaggggccctaattggaatttgactcccctgggccaaacaaaaacgagcgggtttactttggggattcaccaccaatgggccacacaaactggaacggcccccaattaaaaaagatttactggccccccggctgggggggggggtaaacaaactgagcggggccctgctcaaacagggaaaactgaagcccacgggcccc

SEQ ID NO: 33083 - DNA, 354 bp, Zea mays
  Clone ID: MRT4577_130181C.1
attcgcacctgaatatcactttgtgatgttcttcaaccgcctgatgcttcatttctagttgtattctgctctacagagtcgaggaagggttttcttctggctgtaaccattgtgtacgtatactcctagatacacagtagatatgaagtcggtactgagaaaggtataactgaaatggtttaattatatgcagattcaagagaccgggtgcctaaaataagattactttaagttcaggtctttctggaccagtatagagatccacggtctcgctttttcttttgagcttggataaaggtacctaaattgggggaagatttaacacgccagagagtctttgatcaaaaaggaaac

SEQ ID NO: 33084 - DNA, 280 bp, Zea mays
  Clone ID: MRT4577_130182C.1
ttgttgtggctgtcagggatcaactctccagtgagctgcgagcctacaaggctgtgggcagtgccagcctcaacctcgacctcccccaggcccccaccggccacccggccttctttccggaaggaccggtggcacggaacgcggttacaactcccttcgtccgcgtcgggaccgccttcaaggtaccagcctaccaaagcaggcttgtcgtcgtcggcggagaacgaccccacggtgacggtgaccgaccgcggaggcagggacaagcacaaggacggcg

SEQ ID NO: 33085 - DNA, 207 bp, Zea mays
  unsure (1)..(207): unsure at all n locations
  Clone ID: MRT4577_130183C.1
gcggtgatgttataaatgngatgcttttgtgaaacacaatattaggcgtaaaaaaaaaaaaggggaacaattggaaaaataatgggtaggggcgggccggtctttataaaagatacaactttactaacccctgcatgccactatttcattttttattggggaacctaaattaaaatcactggccgtagatttacaactgtcacaatg

SEQ ID NO: 33086 - DNA, 267 bp, Zea mays
  Clone ID: MRT4577_130184C.1
acgctagaaacagtggtgcgcggagaggagaggcctcgggatgtctctggcagatgagctcttagctgatctcgaagaggcagcagaagaggaggaaggaggaagctatggggaggaagaagaggagccagcgatcgaggatgtgcaggaggagacacagctggatctttccggggattcagtcaagaccatcgccaagctatgggatagtaagatgtttgctgagattatgatgaagattgaggagtatatcagcaagcaagccaa

SEQ ID NO: 33087 - DNA, 304 bp, Zea mays
  Clone ID: MRT4577_130185C.1
gatgaccttctgccggctgctgaaccggtgtggcgaggcggcgcggacctgcccctgggcgccaggtgtttcggggtgcgggtctcgccgaccggggagaaggtcacgcacactggccaggtttatgatgataaagactacaggagaattcggtttgtaggtcgttcgaaagaggtgaatgaaaactttgccattgatttgatagcagagcagcccgtgagcgaggtggagactcgggtgatagcgtgcgatggcggcgggggagctcttggccacccaaaagtgtatataaacttggacaaag

SEQ ID NO: 33088 - DNA, 850 bp, Zea mays
  Clone ID: MRT4577_130186C.1
aaactctctctccctgcgcctctggctcgagccgtctacgatttcctctcttcgccttcctcccccgccggcccctccaaaccctaggcgccgccggccaggaagcccatttaccagccatgtttggacgcatgccaaggaagaccagcaacaacaccaagtactacgaggtgcttggtgtatccaagacagcaaccccggatgagttgaagaaagcttaccggaaagctgctataaaaaaccatcctgataagggcggagaccctgagaagtttaaagaattggcacaagcttatgatgttctcaatgaccctgaaaagagggagatttatgaccaatatggagaagatgcaatcaaagaagggatgggaggcagcggcggcgctgatatgcatagcccctttgacatattcgaacagctatttgggggtggcggcggcggctttggaggtggtagctcgagaggacgcagacaaaagcgtggtgaagatgtggtgcataccatgaaggtttcgttagaagacttgtacaatggtgctaccaagaagctatctttatcacggaatgttctttgtggaaaatgcaagggaaagggatccaagagcggggcaacggctacttgcagtggttgtcgtggtgcaggaatgaggatgataacaagacagattggacctggcatgatccaacagatgaatactgtttgccctgaatgcagaggatcaggcgagatgataaatgacaaggatagatgcccaagctgcagagggaacaaagtatcccaggagaagaaagtcttggaggtccatgtggaagaagggaatgcaacatggccaaaagattgtattccagg

SEQ ID NO: 33089 - DNA, 303 bp, Zea mays
  Clone ID: MRT4577_130187C.1
ttttggtctcattaaagaggaactcctgtttcccttgatcaacatatgctgggcatagcagatacagcatgtttgaactcggtgatggtctacccacatccagctgaacatatgtatggcgtactgctgaaaccatgctaccagacccggattgaggaaaaatgacatcccacgtgccaccaacaagagagttccctgtggtggcattgattggccaccacagactgcttcttactgcacggatgccaatgacaacccgcatataacacgaggacttatgcttaatggcacgcttgttgtgcc

SEQ ID NO: 33090 - DNA, 362 bp, Zea mays
  Clone ID: MRT4577_130188C.1
gtggagactacctacggccatggcgaggtatattgcttctggcgctcgcctaccggctctactggaggccttacgcgacgcatccgtcgcggcgacccccgccccggtttctctcctcagctgtgtccggcaccctggatcacctgaagtcgccacctttcgcgcgtcctgctgcccggaaccctgcctactatccatggtatcgatcctgaggacggcataagaggaccctgttcatccatacacacttgaccacgcacccgctttcactcatgttctatcccggatagccagctatggagattggtagctctgatttccctaatgctcggactgcagggacatctgcttcggctaagtct

SEQ ID NO: 33091 - DNA, 736 bp, Zea mays
  Clone ID: MRT4577_130189C.1
gggtacctcgaggccggccgggccgggcctatatgtttacttgtattggatctgcactcatatgtctctgtttacttgatgtgtgatgaactagagctgttcatgtattcctagatgtttatttgtcttggaaacctatgtttacttgtattcctagttgtttacttgccctcatatgccctggcattattctgatttgattcctatatgtttacttgtattggatctgcactcatatgtctctgtttacttgatgtgtgatgaactggagctgttcatgtattcctagatgtttattatgtttctaaggattggctattagaaaagagagtcattgggcttagactaattgaaacagctcacactggtgagaacattgctgagggagttatgtctgtgcttgatgattatggtgttgttaataaagttttctctatcaccttggacaatgcctcttccaattctaaggctatggagaagcttagtccatcactgtctggttatgtaggtactttattcttgcatcaacgttgtgcctgtcatattatcaatttgattgtgaagtgtggcttgaaaaggctacagccttaccttgattcatttagaactgccattgtcttcttgaatgcttctaatcagcgcattgctgcatttaagagctactgtgttgctatgaatgtacgccctcgtaagtttggcattgacatggctgtaagatggaattctacatacctta

SEQ ID NO: 33092 - DNA, 775 bp, Zea mays
  Clone ID: MRT4577_13018C.1
gtggcgccggcgcttgggcccgtgtcgacctccgggaagctctctctgacgacgtcttggtggatgccgccgccgtggcggccgactccggcgggggccaccgacctcacctcctccgagctgtagtccacctcctggtagtaagccactgatgccgacgcttggtgtgtctgtgcgcagcgcccgtgtgacgtcgaaccccgtaggcctagacaccaacaatccacacaagcagttgaacgcactgcgcacaggcactagaacaaacaccaagcatcaccattcaccaatggcctacttccaggaggtggactactgctcggaggaggtgaggtcggtggccccggccggcggcttcggccgctacggcggcggcgtccagcagcacgtcgtcaaggagaaattcgaggaggtcgacacggtgtcacgcgccggcggccaccaccacggccacggtcaccacggccacggcgtcgtggtgcgcgagaccagggtcgaggaggacttcaacacctgcaccggcgagttccacgagcgcaaggagagcttcctcgccagggctaactgagccgccggccgcacgaccgtaccatgcgcgcccccgttcgtgccttatgtatgtatgtgcgtataagattgtgcagggtcatcgtacttggctggcgtgcacgcactcagcttctgtaagaattacgacaataagctcgtgacctgaataaagcttctccgtaccacctacattaccatgcttcggacgcgtgggcggacgcgtggt

SEQ ID NO: 33093 - DNA, 583 bp, Zea mays
  Clone ID: MRT4577_130190C.1
gtggtgtgggtgtgtgtgtaagagaaaccaggcacaatacacagtcaagatacacaaccatctccaatacaaggggcgagatgtccgacaatacacaggcacaatacacagccagaccttagtttcagaaagataaccagccacaatacagacacgtggcaagatagggggagtttcatccataccagacataaagacagatacattggtccagactacatgtggagcattacatacaaaataacttcatccattccaaacactggctcacaactacatgttacgatcaattatttcttcgaacctgtagtttatgacacggtagtgctcttcaaatgagacattagctttaatctcttcccactttaggtcgtcaaaaaccatttcccatagttctggatcttctgtactgtagccctcgctaagttcatcatcatctaaaggatgttcatcatctaaggaagggctgtcatcaatctcccaactcggattctttgtttccaaatcttgttcacagacaattgaagtttcctctagcttcttgcacacatgatccaaatgcccacaaacctttcttatcttg

SEQ ID NO: 33094 - DNA, 329 bp, Zea mays
  unsure (1)..(329): unsure at all n locations
  Clone ID: MRT4577_130191C.1
gattcgcgcgtgcgtgagcgcggggttggngtcnagcgnccgcgcgtgcggctctcgctccagcggcgtcagagcgccgccgctcgcgtctgcgaccgcggcgagagtgcgcttgaagagcttcgtgganatcgagcgcgtgaccctggtgaactacgacagagactatgacgccgtcntcgtcatcgtcgatgtgctcgaccaaaacagggcacttgtggacgcgcctgagatggtcaggggccagagtaacttcaaacggctctcacttactgagcatcaaattgagatcaaacgcgttcccaanagatcaaccctgatcaaggcta

SEQ ID NO: 33095 - DNA, 358 bp, Zea mays
  Clone ID: MRT4577_130192C.1
aaaacacaggacactgaactttattatttctgattggccacatacatcatcgaacacccttaattattgaccttcaactattatgcaacctaaatgacgaccccacaaatgatgggaacgtggcaaaacgtcgcctcgcttcgtcaaactgagcctgtcctggggcagcaattgttgtatttaccatagggtcggggggctagcaggaaactctttgcacaaaggcatcaactgatgctgaggcaaaactgaaacacggctctttgaaagtagctggtgggggagggtactatttgctggtgcatacactgagtggggccgacttccgtcaattcgttcaccggctgaattttgtggt

SEQ ID NO: 33096 - DNA, 237 bp, Zea mays
  Clone ID: MRT4577_130193C.1
gagacggagatagtattgtcatcccgtcttccctcacccagtcaccctgactggacggcgggcggctgatgcgcttgtcatcccctggtccctttccttttcgggccccttgggaaaatttttggccgccgtttggccgatcgttaaaggctgaataaccggcgggtggttcggattaccatcgccgactggaacgccttctacgttaacttggaccgggccttcattcaccccaac

SEQ ID NO: 33097 - DNA, 817 bp, Zea mays
  unsure (1)..(817): unsure at all n locations
  Clone ID: MRT4577_130194C.1
ggggatgagctcaagagatacccttatcctttccggccagcgccggccacaggccacagctgctccaaccgccaccatggccgccaccgccaccgccacgtccctaggcctcgctctccaccgccgagaccacgaccctagctcccaccgccgccccgtcccctcctcgtgcctgacctctacctccgcctaccgcatccgcagggccaagtgctgccgcaggggtgtgcctccaccgtccgccgccgccgccgccggcggtggtctggaaggaaatgatattagcaccatattgaagcattcacttaacaacgaaacgatgccttcatcaagcacaaaagctacttcctccatggctgaccatgtttctcttagcagcctccaccaccaccctagcagccagtcttcctgttttgctacctcaaaaccaaaccatgacagtacccataaatacaaccactccccaaaaattcctaggcggtctctcgccttactccctgcctcctctcttctcttctctgcgtcctcctcctttgccatagacaatgcaaacgctccatcctcctccacaattgacaccaccatcaccgaccgcatattcatggactttagcatctgcccaagcttctttagcaatgaccgcacgttaggagctgaacttgcttcatgccctgattccgagcccctcggacgtgtagtctttggtctctatggtcggctactcccgatcactactgccaacttcaaaactacctgcactacttctgcatatcgaggcacacttgtccacnaggtgcttcaaggtcagttctttgct

SEQ ID NO: 33098 - DNA, 716 bp, Zea mays
  unsure (1)..(716): unsure at all n locations
  Clone ID: MRT4577_130195C.1
gggcgaattgggatacaacaagccgccggccgggaccctcatcgcagatcgcaacacacggaaccagaaagcaaacgcaaacaagaagcaaaccagcaatggcccgcgcctgcgtcttcctcgtcgtgctcctcctagccgccgtcgccatggcgccgttcgcgggcgcggcgcgcatcgacgtcgtcgagggcaggtccatggcgtccgcggacgcaccggaggccgccgccgacgctcccgctcctgctcctggccccgactcctcctcgaccccgtcgccggcaccctccagcagcagctcttccgactagccgcccggcagagatatctacggcgtccgatcagtctttggcgccacctatgacctatcggatcctgcaaagctatgtatgattctatggtataatgtgtggttgcggcaaacgcgcggaaataatgtgcttgcgtgattgtttttctctctctttttttgtttaataatgtaaaacaggcatacggcgatgttttaacatgtaaactgagatgttgttactctttctcaaagcgagtatgtagccccagtttccatcatggcactcttctcgttctgaagctttgggatagtctcgccgctctcagctgactggtgtcgtattcttgaaaccttttatccgtgacaaagactcaaaaaaaaaatatctgggaccaaaaaaaanaaaaaaaaatttgcggcc

SEQ ID NO: 33099 - DNA, 187 bp, Zea mays
  Clone ID: MRT4577_130196C.1
ttgctaggtgctacccaagaacagggaagtgaaacaccggccgccggccgcgcttttccattctccagtactcgcgggagtgaaaggaacaccaggccagcgccatgggtcacgtcgaacgaccgccgccgccggtgctgtccccgctcgtccgtggcacggccttcgcctggcgccgtttccccgg

SEQ ID NO: 33100 - DNA, 1587 bp, Zea mays
  unsure (1)..(1587): unsure at all n locations
  Clone ID: MRT4577_130197C.1
tctggaaccgggnaggtactgggtaggctgctccgactggaccactgctatcctcagtgctctctctctcctcctgtgattctcctcttcagctcttctcgcccattccagctccgactgcgccggtgggggaccgcgcaccccagcggcgccaggcgtccacgggatggtggttcttgtggctactgccgctcggtggcccgggggaagcacggccgcccgggcgcgcccgccggctgcgaggggcagggcccccatccgcttcgccgccgagcccgagcacaaggcggccacggtcaggtttgaaaaatatagattgttatcatggatgaaaccaataaggcatgacgtcagggcccaaatgtccaatgtaaatgttggtgccggaagttatggaggagatgaagcaaatggccatggagaacatttggatacctctgctaccggagaccccaacaaattagcaaaacaactttcaggatctcgttacctgcaacccgttggtgtcatgctatttctgtgtgccctggcaactagttttttcgttttctttaaaggacaatcatctgcagttgtagctatgctggctaaatcaggtttcaccgcggcatttacactgatttttgtatctgagattggagataagacgtttttcattgctgcactactcgcgatgcagtatcaaagagcactggttttacttgggtcaatggctgctctctccctgatgactattgtgagtgttataattggacggattttccagtctgtgccagcacagttccaaacaacgctacccataggagagtattctgcagttgctctgctggcattctttggtttcaagtcaataaaagatgcattagcacttcctgataatgccaacgggaaccttcaagggaattcagaaagtggagaactggctgaggccgaggagcttgtcaaggaaaaggtctctaaaaatctcaccagtcctcttgaagtcctttggaagtccttcagtcttgttttctttgctgagtggggagatcgctctatgcttgctacaattgctttgggtgctgctcagtctcctttgggcgttgctagtggagccattgctggacacttgattgcaacagcctttgctattcttgggggagcattcctggccaactacttgtccgagaagctggttggcttgttaggaggagtattatttttgctctttgctgctgcaacgctttttggtgtattctaatctatctgaagaatttgctgttaggtgaaagacttcgcagttccagtttggtctttagattttgaagatgaggggcaaacctaagtaggcttggcacatgctgtatgtagatagacgttatccttatcagagatgatttcgatgtgcccaaaattctaccagacagactggaaactgcatcacatggacagcttacagaagttaccattcaaataatttgattagatttgtttaataagaaggtactgttttgtgctccaaaattctacccgaccggccggaaaacgcatcacatggacagcttaccgaacgttaccttccaatcaattgatttgattagatttgtt

SEQ ID NO: 33101 - DNA, 538 bp, Zea mays
  Clone ID: MRT4577_130198C.1
cctcgaggccggccgggagcgagtcaatcaacaaatcgtcacacttctggacttgtaaaggagatgtcaattatgaaccagacaaaatctagctcggcaactgtttactgcatgcctcctgaggctgttacggctactccacatgaacctccaacctacatatgaacccttggctgcacacgtctgcagatgctgacaagagaaacgtcgaattctgatatggaatgaacgcaaactttactcaaaattgctatgagaataccagctaatactgctaatacattatcagacagatgcgcgagatttcataaagaacagagtgccaacaaatccaaatgacccgtcatgcgctgctcagtcattccagcatccattttggccatacacactgtaacaatatgcaatgagatggtctccttggctgctaacgcatattcattgtacatagagctgatttaacttacatgttctaaaatgcatgatattatctagaatgatccctgtggtcctcatttcggagagagaaccctccctctga

SEQ ID NO: 33102 - DNA, 588 bp, Zea mays
  Clone ID: MRT4577_130199C.1
ggtgtttttaaaattttttttttttttttttttgtttttttttttttttttttttttttttttttttttttttttttaaaacccaaaaccattgccttatttccctggacccccccttccccaaagggtacccttttcccacccccatatgtcccaaggaatcctttttaacccccccaaaaaccccccttttccccccaaaaaaaaaatctcccccaatttaaaaaggcctttgccccccccaaccctttaggacccacccccaccctcccccaaataccctttacccccccaccccccttaatcaattccccccccccccaattcaaccccccggcttttcccccccccccccccctaaggtaaaaccgcaggtccctcccccccccccccttatctaaaacccatcccccccccccccgaatcctttttgattccaaacccccattgaatcccctataggagccccctttccccaccccctgagcctcaacccccccaaagcccccccaataccaggggccaaaggccttcccctcaccccccacccattcaaggaaaccaattccctacttaaaaaatggaacc

SEQ ID NO: 33103 - DNA, 236 bp, Zea mays
  Clone ID: MRT4577_13019C.1
ggagaagcaccaccgcgactggaccctttggttctgctgcggatccctcgccaactgcgggcggacgcttgccgccgtcagcgagcttcatcatgctcggcatctacctggcgctgtgcccctccaagccgcccttctacctgcaggactgtgcagctgcgctccatagacctaagggacgcaggactctccatggacctacacgagaccatcgattcacaccttcttaacgagcg

SEQ ID NO: 33104 - DNA, 255 bp, Zea mays
  Clone ID: MRT4577_1301C.1
aattattaagttttcatgttattgtgctcctttatcaaaataatgtattgattttttatgcgtaaacattataacatccaaattccaccaatggacataagcataagccctgctacatgttcagctatgagcggaaactaagctcagagaaccagttctaaaagataaactaaggacaacgtcgaacatactaaacaaccttagaaacgggtctacaggggacaacacctgaacacggggcgcctaaagggccaa

SEQ ID NO: 33105 - DNA, 361 bp, Zea mays
  Clone ID: MRT4577_130200C.1
tcggtgcgccgctgacacttccgttccggggcgacttccgcccgctcgccccgagcgccggaggatgatgtgcgttttggacggttcttgtccggtccgtgcgtgaatggaggggaggacgtgtcggaaggtaatcagcttctcgtcggcgggacaggggggcgaggaggctgcgaggcgagagacgccggatgagacacggaagcggctggaggagctggatgcgctgctggaggggctggtcgaggcgtcgagcccatggtgcggccttcaacgccaccttgtcctccggatccgtacttggaccgaggcaccgagccaccgagccatgataacgggacggggatcatcagccgatgag

SEQ ID NO: 33106 - DNA, 363 bp, Zea mays
  Clone ID: MRT4577_130201C.1
gtaatacgctcccacgccagatgcgcaaaggatatattgaatctagctgctcgagatggatgatcatgcctcggaaatgccatcggaaacattagacacgttgtcacaactctcagaaggtcacctttgcagttggaggcatttgacaaatgtgctaaagactgcggcctagaccctaaaaagaccctgcccttggatgcggctactagacggaactctacatatatcatgaccagagatgccgcttactataagaatgctgttgacacgggggctaaaaaagatatggacaaatatggacacatcaatcctccaagcactgatgggtcgaatgcaccaactatgagggagctgcctgaaaaa

SEQ ID NO: 33107 - DNA, 205 bp, Zea mays
  Clone ID: MRT4577_130202C.1
tttgtttcctgctctggccaaattccagacaagaagaacgagaacaaggaggtggccgtcaacgacttcctgcccgccgccgctgcccgcgaagcatccagtactccatgtaaagtcgccctgctcatttatctcgtggatgacttgaaaaaaaacgaggtttggattctgggactctgcattcgtacgtgttgacatggatctt

SEQ ID NO: 33108 - DNA, 429 bp, Zea mays
  Clone ID: MRT4577_130203C.1
cctcgagccggccgggagactctttcgttcagctcactccaatccgaattctaatcacacccactcgcttccaagaactacagtcatacaacatgagcgaggatacgcatcccagaacccccgaaatcccgcatcagaaacgggtaggtagggaaccgagatctgtccgtccgtgtcatgggagtcaacggtgtaccggatatcatcaacggtgtcagtgctggatgaaggacctcgacctcacagccatcgcaagcgtgtgctctgcgaagctgcgagctatctctgccgtatgccgtaagaaggcgccgcactcgtggaacgtgctcctgacgtgtcatccacgccaggatgctctagcaagagctcacgctcgacgtcctcggtggcgtcgccctcttccacatggtacgtgcaatgcatgccctt

SEQ ID NO: 33109 - DNA, 2594 bp, Zea mays
  Clone ID: MRT4577_130204C.1
gtgtcaggatcgctatcatcaagaccaataaaagaaaagtgctcgcaatgttttttttacatattactcccgcgcgatcatggtgacaagcaaattgcaaaaaagaacgatccttcgtgcgcctctagctgggggccctgcagcttaataaacacttcttaagggacaaaaaaacatgcaaacgagcaaacaactataaaatctcagggaaggaaggggaaccaattagaaaagtatcatcagatcaaccacaacctcagagtttactgttcccacagaaacagaagcaattcaacttctaccacgataacacgaccacaggtggaagcacttagtcgacctcctcgatcttggggccagcggcgctgccgccggcggccggtgcgtcctcgtccatgccggcagcagcacccatgtccgcgccagcgccctggtacatcttggcgatgatggggttgcagatgccctccagctccttcatcttgtcctcgaactcgtccacctccgcgagctggttgctgtccagccagctgatggcaccgtccacggcgttctcgatgcgcttcttgtcatccgcacctagcttggaggcgatcttgtcgtccttgatggtgttgcgcatgttgtacgcgtagttctccagcgagttcttggcgtccaccttcttcttatgctcctcgtcctccgccttgtacttctccgcctccttcaccatcttctcgatctcctccttgctcagccgccccttgtcgttggtgatggtgatcttgtttttctgtcctgtagtcttgtcctccgctgatacgttcagaatgccgttggcgtcgatgtcgaagcacacggtgatctggggcacgccgcgaggcgccggcgggatgccggacagctcgaacttgccaaggaggttgttgtccttggtcctggcgcgctctccctcgtacacctggatcagcacccccggctggttgtcggagtaggtggagaacacctgctccttcttcgttggtatggtggtgttgcgagggatcagcacggtcatcacgccgccggcagtctccaggcccagggacagcggggtgacgtccagaaggagcaggtcctgcaccttctcgttgccctcgccgctcaggatggcggcctggacagcagcaccgtacgccacggcctcgtcagggttgatgctcttgcagagctccttgccgttgaagaagtcctggagcagctgctgcaccttggggatgcgcgtggagccgcccacgagcaccacgtcgtgcacggtgctcttgtccatcttggcatcgcggaggcatttctccacgggctccatgcacttgcggaagaggtccatgttcagctcctcgaaccgggcgcgggtgatggtggtgtagaagtcgatgccctcgtacagcgagtcgatctcgatggtggtctgcgcggtggacgacagcgtgcgcttggcccgctcgcaggccgtccgcagacgccgcagcgcgcgcgggatgccgctgatgtccttcttgtgcttgcgcttgaactcctggacgaagtggttgaccatgcggttgtcgaagtcctccccacccagatgggtatcaccggcggtggccttcacctcgaagatgccctcctcgatggtcaagagcgacacatcgaaggtgccaccaccgaggtcgaagatgagcacgttcttctcgccgctgctggtggcctttttgtcgagcccgtaggcaatggccgcggcggtgggctcgttgatgatacgcatcacgttgagcccggagatgacgccggcatccttggtggcctgcctctgcgagtcgttgaaataggcaggcacggtgaccacggcattcttgatggtggagccgaggtaggcctcagcgatctccttcatcttggtcagcaccatagaggagatctcctcggcagagaactgcttatcctcacccttgtagctaaccacgatcatcggcttgtcgccagggcccgccacgaccttgaatggccatagcttcatatcactctgaacggaagggtccgagaacctcctaccaatcaaccgctttgcgtcaaatacggtgttggtggggttcatggcgacctggttcttggcggcatcgccgatgagccgctcggtgtcggtgaaggcgacgtaggacggcgtggtgcggttcccctggtcgttggcgatgatctcgacgcggtcgtgctgccacacgccgacacacgagtacgtcgttcccaggtcgatcccgatcgccggcccctccccctttgccatctcttcctccctctaggaacaaaaaacactgctacttccttcgaagttcgaaccctcacaggtcgtgctgctggttgctgagaaattggttcgtggatttttttttttttctcaggcgagagacgagggacactggaggagccgaggaggttttattgaggagatggcgcgtccagaagattcgggcacggggcgaccttggccgttagattggggttctggaaggctctggaggagtggagggtgttggttgaaccgaatgagaaagaggaaaccgtgtttcgacgggccgcccggcaggccggagggtacc

SEQ ID NO: 33110 - DNA, 235 bp, Zea mays
  Clone ID: MRT4577_130205C.1
gctttcctcgggcagaatttaacaggtggtgggctttctttcagattcttcagcgggcggtgagtggtgggtgggtgaatggcttcgaggagagaggccgcgaccgtggcggcgggtcgaaccggcgggaagaggcggccgatggggcggcggcagctgtcgtggcggtattggagaatcctgatgatgctgcagcggacgacgtcgacggcagcggcaacggaactagggtggt

SEQ ID NO: 33111 - DNA, 228 bp, Zea mays
  Clone ID: MRT4577_130206C.1
cttaaagacttcacgcataataatcctataaatctgcttacaaaacataccaagacccatcttgataccaatgctaacatccagtgcaccaaatcaacagtccttcaatgccacatagcacactcacctgacgttcattgaacccttacataacacacttatcacttccttcaccctaacgaagctaacactgactaactacaactaaatgcactccaccatttacac

SEQ ID NO: 33112 - DNA, 2407 bp, Zea mays
  Clone ID: MRT4577_130207C.1
agggtcaagttttttcaaagatgcgtaaccataccgcaacaaacagaatgactggtgtaggtaacacattgaaaagacattacgagacatacttgttggaatatgagttggcgcatgatgacgtggatggcgaatgctgcttactttgtcacagtagcgcacccggagattgggtgaactgcggtttatgtggtgaatgggctcactttggttgcgacagacgacaaggactaggcactttcaaggattacgctaagacagatggtttggaatacatctgcccccactgtagcttagcaaactacaagaagaagccaccaccaccaaaagcagctaacggtttttcaaatacagcatatgttccacgacttttcagcttgctcatgcatccttccgtctatattgtgtaagaaacagtcatgtgcaaagtgttaagcttggtccgcgtctccttggggatgctccaaaaataaatataagtccacctgagacagaaatggtcgatgaagaaggttcatctgaagtgaccccggctttaaaattatatgatgaagaaatcaacatgaaattactcttatgtggagtgccatgcaccttgattcgtgggagcaaactgcagaatcgaatcagtgcttctccaccacctcttgaagctgcatctctaccacgtgggatggttactatgcgctgtgatatcagtacttgcagctcttcccatgtgtcactcctcgtttctggtagcgcacaaacttgtttcgatgaccagcttctagagagccacataaagaatgaaattattgagaaaagccagttagtccgggctctctcaaatagtgaggacaagttaccatcaagtgagcctttaacttccatgtctacggcttgtggggcttctacctttgaagtttggatgtcccttcctaagtgggcagcacaggttctgaagcatctagcgccagatatatcatacaggagtttggttgcacttggtattggttgtataaatggtactcctgttgcttcatttgagaggcgagatgcagaccgtcttcttttcttttgcacaagccagtgcaaagatttggctaatgaaaacggtccatattttcatctgccaagatggtcagcctcccttaccaaggacagaacaaagtttgggttcagaatcaaaacaaaatctgttgggtgcaaatggagttttggaagacaagaagcatatgatggaagggccttcctcattttcagccgtcaaggctaaattaaagcctgcaactatgaggccaattcctcactctcaaaagcaacaaatgcatccttttatgtgtttacctgaaacttcctttcatgaaactagtattgtgaagccaagcttgacagttgcgccaactgtgaagcacaattcagtttcttatgccccaaccacgcacagaaaatcaacatcagggccatctcatactccttcagtcattcagttgaatcctctgcctatgaagaaacatggatgtgataggttgtctatacaagtatgctctgaggaggacttcttgaaggatgtcatgcagtttttaatccagaggggccacaatcgacttgtacctcacggaggactagctgaatttcctgatgcagtccttaacgccaaagcgccttgacctttataacctgtacaaagaggtggtgtctagaggtggattttatgtgggtaacggcataaactggaagggtcaagtcttctcaaagatgcgtaaccatactgcaacaaacagaatgactggtgtaggtaacacattaaaaaggcattacgagacatacttgttggaatatgagttagcacatgatgatgtggatggcgaatgctgcttgctttgtcacagtagcgcacctggagattgggtgaactgcggtttattgtggcgaatgggctcactttggttgcgacagacgacaagggctaggcactttcaaggattacgctaagacagacggtttggaatacatctgccccccctgtagcttagcaaactacaagaagaagccaccaccaccaaaagcagctaacgtttcccttgtctggatcaatcaaacatttgatgcaacagcacggaagtgtgaggtcctgaagctgttggcgcaataatatgggaagaattcattagagtagataataggctgatggaaagatgggcaaggccttccaggtatgtagtagtattcgaatgtatcatctcgttaatttagtggttattatgaggcttatataacatgtaacaactgataacacagacaagctcctacagtagttggttagatgctggtgtaagcttcttgtttatattaatctcaattgtgtttttagtttcccttgtctggatcaaaaactgggacgttataaaattataaaaacttg

SEQ ID NO: 33113 - DNA, 377 bp, Zea mays
  Clone ID: MRT4577_130208C.1
tttcggaaagtgtatggcataatactggagagtaatttcgttgagtcgggcgctcaaacaaattctacacttgagtcataaaaagtttggaaagagctgtatcctgaggagcccttctaattgttgttcacaagaacctttgacactgccgtggatgtcaacccttcatgtgcataggaggacattacctatgatctggtcttggctgttaatagacaatcctctttctattatcatgtttgaacaccaacaatgcatgatccacggtttctccaagaagctctatctcgatacaaggtgtttttttacctgatcaagattaatcatttaaaatgatttcatcgctttctttgaccaacctattatgtggatctttt

SEQ ID NO: 33114 - DNA, 284 bp, Zea mays
  Clone ID: MRT4577_130209C.1
ttttcaggcacactatcgaaatgccaagtgcgggtggcaatggaaacatagagttcgaggaagaagaacatcatgatccacaattgggaacatgaggagagacgagaaaggcagatgaaggcttcaaggatgcgagctgcccacattccagtaaacagtactgacagggtttcaggaggacatcaccagatactaggagctataggtcacggagacctgtgctataccacgcgctgatccatacctgaaggtcttaaacgataccaatacagtgatgtggtaca

SEQ ID NO: 33115 - DNA, 309 bp, Zea mays
  Clone ID: MRT4577_13020C.1
ggggaagttaaacctcagataaaactaaaactaaacggcttaacagttttgccatgaggtacataggggttccacatctggatcccggataatgaacataaattatacagacatacaggcacaggcaacacagcaacgtctttgagccgagacataccttaccagcaaaccaaatgccattggtggttctgggaggtaagaaggattttgccatcacagggggttattatagcaatccttgaataatcattaatcggaggaaacaccagtgatgaaccggtgcacgcttgatggtccatccaatatttg

SEQ ID NO: 33116 - DNA, 600 bp, Zea mays
  unsure (1)..(600): unsure at all n locations
  Clone ID: MRT4577_130210C.1
gcatgccacccgccgtacccgtaagnccttggnnatccctctagaagnncggcccgcccccttttttttnnttttttttnntttttttnntttttttttttttttnttttttttttttttttttttttttttttttttttttttttttttttttttttaaaggaaaacagaggggcaaacattttttcgggccccggcccacgatcatacacaagcccaggcatacacacacgtatacataccaaagattacggacccccccttattcgggcataacacgagcgcatacatacgtacccccccacaaaacggggggcgctcgatatcactttaacacacccacccgtagcaaacggggggggaccaccatacgggaggatcaatcagccgaaaaaggggggctttttttccccgccggccccctcgggggccttgggggccttttttttctcggggggcccggggaaggggaaacccccggagcccacggccgcccccgccgaaacctcctccttaatcttgggggggggcgcgggctccgggtccttctttgcctcgggcttctcnaaaagggcaaaggcccccgcggcaatggccccc

SEQ ID NO: 33117 - DNA, 478 bp, Zea mays
  Clone ID: MRT4577_130211C.1
ctctgttgggccaccagctttgaccgccgcctcccttcccctccggtgctgctcctccccaccccactcccccttacgcagcgggggcaggggcgcggcctaggtccttaccccacatcggcgagcggctggcggcaccgccggaggcaaaggcaaaatgttcgggcgcgcgccgggaaaagagcgacaacaccaagtactacgagatcctaggggtgcccaagtcggcgtcccaggacgatctcaactaggcctaccgtaaggctgctatcaagaaccaccccgacaagtgcggagaccccgatatgttcaatgggcttgccacaggcctctgaggttttgagtgatccacataaacgctagatacattatcattatggtgataatgcccttaatgaacgaatgtgctgtgcaggatcccatgtatgatccatttcgaatcttatgcttatttttatgaccctattttggagtaggt

SEQ ID NO: 33118 - DNA, 641 bp, Zea mays
  Clone ID: MRT4577_130212C.1
aggccggccaggaaagtctatgcaattaaaggtaaactcggccaaacgccgacctaaacgaccacaattcgcctctccgattcggcacgaaaccgccgacgatcccctcaacacgtgatgatgtccaagcccgggtcgtcggccgccgagcgctcagccaggacgacaaacagacccctctctgcctgctcctgggggaggcccaccacgaagaacgaccacgaggccctggtcagggaccagtgatcgtcctcgacgtcgagggaactcgcacccaattcgtccaccaggcatgaacgagcgcacttaccaacgcgcgacacggcgctcaccaaggcgacaatgactctgcgtggcgcgaggcgcacacgacacgatcctgcgtgcaaacaggctgcacaacatgctgagaaaacgatacaagagaggtccatgtccctgtttccctatgaacttctctagatccttcgcgcccatgtgcaggtcgcggaacactttggaaaattcgacaatctgatgaaactgaagacatgtaccgaggaagataagatgatagatgacgtccataatacgctggaatgtgtctttgtgataaactcagcatcaaccgaggtagcatgatgagtacagcagccagcgaa

SEQ ID NO: 33119 - DNA, 830 bp, Zea mays
  unsure (1)..(830): unsure at all n locations
  Clone ID: MRT4577_130213C.1
cattgggtacctcgaggccggccgagaatttcaagacatctcaccatggtcaaccccaatacgactgggaacccgctgagcgcaggctcgctcgcgctgttcatggcgacagccctaccccgaggcgaggacgcgaagctaaagaatggcaccgaagctgtcgccctagcagtgcatgcaggcatgttggcagtgggcttcagacttgacgggataggtgaagacgagaagactgaatcatatgcagacgccgaaaacccgaatcctttacctaagacatggaacgcatccagtttatatacattccgctacaagcacgcacagtccgccatggattaccacatcaacgttcacaagctgggcggcaaggcggccgtgtctgcgatagctattggagatgacaagccgaagaacttcgacgtcactaccaaagagtacctctccgagtctatgctacctctgagcattccagaagacgtttcgaccgaagacgctgccaaaaagctgatggacctcttcatctcgtctgggcgcttgaacgacctcggatcactccttaagatcagtgtgatccaaaagctagcaccaagcctgcaaaagtctggttatgaggaggatagtggcgcatccagaacacaagagggcgcaaccagnggcgacaattctgcgccccgccctgcgcatccatcanacccccggcagcctgaagaccctgagccagcgcgcccataccccctttcacgatcctctgggcgtaccgcgtcagccagggagacctctaccagagcccatacctgnattcgaggacgagtacgaggtcaatcgtcccc

SEQ ID NO: 33120 - DNA, 669 bp, Zea mays
  unsure (1)..(669): unsure at all n locations
  Clone ID: MRT4577_130214C.1
tacagccactccagtgtctgccgacactgcttgctacacgggacgtgcaacggtatcgtcttctggcatcagagcgatcgccttatattgctactcactcacaatgtacatggacaggctttcctacagtgctgcccaacgcatgataatccccgcccgtctgtttccattggtcctcgagagtctggtccgaagacgtctactgcgacgctggcatagagagctaccgggcgttgctacctaccaggatgccaggtacccacaactaagttcccagacgaccaattcttccttgaagtatacttgatcgcttgatcagctcgagggtctatgtgccataggtatgacaactcgtatgtgccccgtggcactncgagaccctgagtactactgctctggtattgatgcccaggacacagcttgcacttcatctacaatatgttctgtggcactttccaaggtgactgcgctgttcttatcattgactcgccactgatggttttgacgctggtatctccaatgatgggcagacccgtgagcatgatctccttgctttcacacttgttgtgaagcacatgatttgctgctgcaacaagatggatgctactacacccaagtattcaaaggcccgttatgatgagattgtgaaggaagtctcttcctacctga

SEQ ID NO: 33121 - DNA, 301 bp, Zea mays
  Clone ID: MRT4577_130215C.1
cacggacaccgagattacataaatgacgcaccgtatcacaatgctctggattactacacagagtccgcactaataggaccagtagctcaaaccctttacatcatacagcatcaaagttcagcaaaaccgcaaactgttacctacgtgagaaccaacccaccacattacgagaagtccaggacgtgaggcacgcgtagcactaactactcgtaactgcacccacaaccctagcacactccggagacatctcacctcaacccgctttttttttacctagaccatagcattgcacacataatgc

SEQ ID NO: 33122 - DNA, 182 bp, Zea mays
  Clone ID: MRT4577_130216C.1
atcccatcccatcccattacaatacaactcatcttgtcttacgtcgattcgattctgtcagcccaacccaagggcagggatcgctaagaagagtagcctcgccaccctaggcgaatctgatctgaaagaaaataatgttttcctccgacctgaacttaacgctccactatgcgatgcccata

SEQ ID NO: 33123 - DNA, 642 bp, Zea mays
  Clone ID: MRT4577_130217C.1
atccctgcttttacctcaccccggcccgggaagcggccctcgtctcagtggtgtggaaggaatccacgcaggaacacgacgacgagtgggcattagcgacagcgcaaggcggcgcgacggcggggctggggctgctgcatacacgagcggcggtggcagctgcaacacggatccggcccaccctcatccgcacaccgttccgtcgttccgtgtggttccttcgcctccagcctccagtctccattccgcgcggcccctcacctccggctaaatccaactgcgataggacatggtggcctccagttcgcctccggtggctatcttctcgccgttttttttgtgcaggaatgcttcaatgtttgtgtgtctggctgtgggtcatcaggtgtgaagtttagtccggtgaacaatataattatacatatgccatgtgtgaagcttagttggtcaaagtaatttagatggtccttgaggtcagtttgcttgttagtgttgcactattagatgaaaatataatcaatttgtactcttttgatttttaataggcatctgtgtttctaaacattataactgtcatgtcttggcactaaatttcagttgtaaacttggaggtcaataacaagttgtatctgtttgaatgcg

SEQ ID NO: 33124 - DNA, 848 bp, Zea mays
  Clone ID: MRT4577_130218C.1
ccctcgtgtcttcctcctctgcgcgcagctcgcttcctctctgtttgccatgcgcccagccgcccttcctcttcctctcgacgccctgcttctctcccgcctcgcggccgtggagcttccctgctggcgcgcccccgctccctatttgccccatctcgcggcgtcccatctcccacgctcagccgcacctctgcttctctgctcggcgccctgtctctctctctctctctccctcgcggcttcccttctcccgagtttcccctgccatggcacgcctgctccctagctcgccgctcgcctagcccagccacccctcctctcttctccctcgcggtacctctctgttggcggacgttttcccagccgtggatctccttgtgtgccgcgctcgtgcgtgtcccagcttttccctttcctggcgctcgtgccctgctactgcatcggctctagctcgttcctatggagccggtcgccccttcctgctcgcctaagccaagctcccatggcgccgttcttccctgagctccctcacgtcgcgcccctggctcggatctcttccctgcgctcaccgtggcttcctgctgcagctcgccccagctcggatccgctgcgagctcatcggaccgcgtccctggatcgccccagcttccatggctgctcgcgaattccctctgttggccgcgtagacctcctagccgcgggcggctctggcccaggctgctgtcgcgccctcccctgcaagctgccacgtcctggtggctggtgttcacttacgtcgtctcgaccttcaccaggtgcgcgtgccgggcatcggccttgccatggcgcttcgcttcccccagcagcgc

SEQ ID NO: 33125 - DNA, 189 bp, Zea mays
  Clone ID: MRT4577_130219C.1
cccacgcgtccgattatatgcagggctggcaatacccggtgtgctgtccacgaaatggaaagagtactagtactagtagtagatcattgagattcccttttgtcattaattaattatttaattgaaggaatggtgacaacgccaatgggccaattagcaaagcgtacgatatcatttggtgaggtcgac

SEQ ID NO: 33126 - DNA, 362 bp, Zea mays
  Clone ID: MRT4577_13021C.1
atgactcagtcgcaaatttagtcaggtttctcgggatgtttttttatttctgagaaggaaacgcatttttgtatatcaggctatagttgtacaagagtggaagtgaaatttgaaacgagagatgaggaattgaggattaagctgctggagatagccttggtgaaggcaaaaccatcctaggagctgtccatcatgctatcactcttgtacaactatagcctgatatacaaaagaaatgactcagtcgcaaatttagtcaggtttctcgggatgtttttttatttctgagaaggaaacgcatttttgtaatagtatgttgtaatatttgccagtattactaaattgctgctgtgcattttaac

SEQ ID NO: 33127 - DNA, 322 bp, Zea mays
  Clone ID: MRT4577_130220C.1
gcgagtcatatatgatttagctgattagacagtgcagcactgtatgttgggatgggtacttgtttgttttgttgtgtcaatgaaaggaggctaggtgtgatctgtgctgctggttgtgtcatctcatctcctggtagttgaagggctgccatctgcagaagaaggaaaaaaatgaaaaagaaagaaagagcagtctgctagctcctgtggtagtgagcggtctcgctcagcgggatggaatggaaatgtaaaggaaatgtaaaccagatttaattctaaaccagaagcagagtgagcacaaaaagagagaagaggctgctgg

SEQ ID NO: 33128 - DNA, 669 bp, Zea mays
  Clone ID: MRT4577_130221C.1
gccggccgggtcgggacctctctcgaaactttccccaatcccatctcctgcccccctctcccaaccctatccacgccgccgccagccctgctcgggtggtgcgcatacatgaaccatccgtcctcgtcttcgtcctccgcccagccgccgccagccccggcggcggcggacgaggccacctccctcgcgtgcgggtttccgattccaccccaacgacgatgagctcgactcctactaactcaagtgctaggacctcggacgtccgttcaaggataatggagcggcgatggggacctttactagatcgagccctgggacctgaacggccggtcccgcctccgctccagagaatcccagtggcacttgttcatgcgtctcaacggtagagacaacaaccgatgcccagcaccaagcgatgcacacaacctaggataactcaaagatcaccgtgaacgacaggcagaagcacaatgggcccacctattgtcggtatgagaaagacaatcgcatacaaggcctcaccttgccacatagacgtaagcttgaactagaacatgcacgaagaccgcatcgagggtgacgacatcgcaggaatacggaaggactgaattgttgtgtgctgctagattaagacagttggaccaagtactcagaatggagcacagtaag

SEQ ID NO: 33129 - DNA, 838 bp, Zea mays
  unsure (1)..(838): unsure at all n locations
  Clone ID: MRT4577_130222C.1
gccggccgggaaaatccctcgccgcctcgcttcaccccacctatggtcgccgctgctcgcatcgccctgcggcccccacctctctctccctttctcctcgcaacgccgcccccgtttgtccaccaagtcaccacgcgcctgggagatggatcaaggggcgcgcagcagtccggtcaagacacgctcaacgaaagcttcaagatagcacgggagatggaagccccaccatcggctaggaatcgttgcatcacgtcatccgattcctctcccttccgttcctttgctttcgtggtggatgagaagaaagcggcgaagggcgcatcggaaaagagagcctggaggaggaggcacaccatccttcctcttgcacacggagtcctcaagctttctcctcaccttgctggaattccgggtgccatacatcatctctgtcggcaggcatgttgcccttctgcctcgctcgcagttcttccaagggctgcccgtctgtgtggtctggtttggtttggtgatgctaataccccttttgttagttcgtcacctcccaacctgctacacgaagggataaaatttcattcccaagctgctaaatggggcataagtggtttcatctcagaataaaaaacgagtgctgctggagtattatgatgcctttctaggcacatggtcttattctacgggctacctggctatgggatttgactaaaacacancatttaccttgcttgtggtgagctctttgggtgggaaacgtttgatgaagccatgtttccatgtttagagatcacatcacagtcggaccgggaactctggaagagatacctaagggctagcagga

SEQ ID NO: 33130 - DNA, 278 bp, Zea mays
  Clone ID: MRT4577_130223C.1
cctttctattttggttgggttacctaaaactgtgcattgcttaccaatttgctaactagaaaaacacaatagccccctccttacagatgtctacaataacatgctcataatattcacctacccaattcccctgaacttcctaagattgctcatttacacattcatcctattacataccattaccttctctaacaccaatctctaacttgccaacttattcctttgctcacgctacctcatatgtcagactccagctccctattttcctcattagcatt

SEQ ID NO: 33131 - DNA, 429 bp, Zea mays
  Clone ID: MRT4577_130224C.1
aaaaaaaaagggggcttttaaacaaaaaacagggggaaaaaaaccccttccaaggcaacattactacccttcccccggggaggctaaaaaacaaacgggggacccctttaaaggccggggatctaccatcgaccaagaaaccttaacaaaaatgggagcgcccccaaaggggagaacaaattcgggccccccgttccatttaggagaaacttcaacgccgggaaaaaccccagcagggggggggggaaaaattttaagttggcccatcaaaaaaaccgaaacaacggggcgcataaatggaatcaaaccatgacatttatccccccctactggggtaaaaaaaagaaaaatcctccttttgttttggggggggggggcaaccattgccccaaaaaatccccccggggaaacttaaggggaaaaaggggc

SEQ ID NO: 33132 - DNA, 445 bp, Zea mays
  Clone ID: MRT4577_130225C.1
ggacaagagtcttctagagttcaccaatcctggttcccttctccctcagtccctcaccctccgcctccccagccaaatgccaccgggccaacaaaatctagcggctccacgctccccgtttcctccgtggcttccatggcgaactcaggcctagggcttggacttgcgccaccgggcgccgagccctcttcactccacgcccagtgcttggccaaacggcgcgtcgtgcccgcctcctctcactccagcgccgcaggcatggcgtcgtagtatgtgtggcgcctccagttggcgtgtgacctccttgggaccttctccgcactggtgtcgatgctgaactcaacctgacaggccagaccttagaccaagtcctggcgatacagatcgttcggtgaggcatgaagaccccaagccaacagccttcggagctagcattggcggtagc

SEQ ID NO: 33133 - DNA, 388 bp, Zea mays
  Clone ID: MRT4577_130226C.1
cccacgcgttcgcttctacttcatcagcagccgcccttctagatcaaaggggactagctactccttcatacgacataatatctctattatagcaccaactaaaaacaaactactggccgttttacaacaacgtgactactaaaaaaaccctgtcaccaaacaaattaatcttgtagcacatcatccttttttcagctgctgtcataacaaagaagacgccaccaatgatcgttcttaacaacagctgagcatgcttaatgaataatacgacccgcgctgcagcgcatcattaaccgcgggtgttgtggttactaccagcagaatcaccactatagtcagcagcgtactagcgcccgcttcttctgctttccttcccttctttgtcacc

SEQ ID NO: 33134 - DNA, 240 bp, Zea mays
  unsure (1)..(240): unsure at all n locations
  Clone ID: MRT4577_130227C.1
attccctttttacccactctgttttactccaccaccgccataccancgcgccgagctattaaaaagaggtcggcgggcnaaagagtantctcagacgagaagaggtgaatatgagttccggcggcggcaggggcaagcccaaggggtccaaggctgtgtctcggtcgaccaaagctgggctgcagttccccgtcggccgtatcgcgcgctacctcaaggccggcaagtactccgagcgcg

SEQ ID NO: 33135 - DNA, 176 bp, Zea mays
  Clone ID: MRT4577_130228C.1
gcgtgcactacaccaagctagcagcgtgcctgtacctatagctgtatccgatccatgcgaggtcgggggtcatgttgtcgagcacgggggcgagcgcggacatgggacggatgcgcacgctcccggtgccagcgctggggccggtggagagctggtgcatcgaggcccggtaccac

SEQ ID NO: 33136 - DNA, 747 bp, Zea mays
  unsure (1)..(747): unsure at all n locations
  Clone ID: MRT4577_130229C.1
ccggccgggagcttatctcgctgctcccagtacacttgcttcacccatgcattcaccgtcatccatggatccacgcagcatctctccagccgctcggactccaccacgcccggtcgtgcgctcgccctgcttcctgttcccacgctcgtccttggttccatggccggtgctccctcaagcttagtttccatggccgttcgtcctggccgcggttccctggcatccgcgcgcgcccatctctctgctgccgccctcccatggacgcgcgcagctccccatctcccacgcgcgcctctgcttccctgttctctgttcccggtgccggatttcctgcgggctccctctcccacggccgtctccttcccctagcaattggctgccgctgcatcacgcccagaaagcgctcgaccgccgttcccagcgtcggcttctccagtctgccctggctcaacgcttggactccatggcgttctcgcctccatgctagctccagccgagtcttttttcccatcgagctcgccctcaactctacagcgccgtctagcccgtcgtttttctcgtccagtgctcgcgcggttttacccgaaccgcgctgccgtctcctagttgccgtgctgccagcactcacccagctttccttggtgaccgcgcctctatactcntactcctaccgnatgtcgcctccatcattcaggcgaatatcaaatcaaattgagatatgggtgagctggatcacctattttacta

SEQ ID NO: 33137 - DNA, 216 bp, Zea mays
  Clone ID: MRT4577_13022C.1
gggggcatgtgtaggcaggggcggatgcggatctacatctacagttctacacccgggccacccgagccgtggcccagagcgtgatccatgtaagtccatataattctatttaatctagtctgaatttgctaggataaaagagaagatgaagaaatttagtaggtttggcccggggcataacattctagatccgcccctgtgtgtaggtcagagagt

SEQ ID NO: 33138 - DNA, 186 bp, Zea mays
  Clone ID: MRT4577_130230C.1
ttgccggtttcttcgtcccgattcctccgccgacgcccacgctgcggacaaatcagtcgccgtcgccctctcgggatcgctggctcccctgcctctgtgcacactcctcaccattcccctctccattcgacgcacacgcggccggcgtggctccgtcgtgctcggagtcggctacgaggccgtcat

SEQ ID NO: 33139 - DNA, 1066 bp, Zea mays
  Clone ID: MRT4577_130231C.1
tcgaagtgggccgggccgggccggccgggagctgattctttcgtggagcatcagtttacttggccgtgcagcttatctcgctgctcccagtacacttgcttcacccatgcattcaccgtcatccatggatccacgcagcatctctccagccgctcggactccaccacgcccggtcgtgcgctcgccctgcttcctgttcccacgctcgtccttggttccatggccggtgctccctcaagcttagtttccatggccgttcgtcctggccgcggttccctggcatccgcgcgcgcccatctctctgctgccgccctcccatggacgcgcgcagctccccatctcccacgcgcgcccctgcttccctgttctctgttcccggtgccggatttcctgcgggctccctctcccacggccgtctccttcccctagcaattggctgccgctgcatcacgcccagaaagcgctcgaccgccgttcccagcgtcggcttctccagtctgccctggctcaacgcttggacaccgggtccactgtgctcgtccgtgccccggactccatggcgttctcgcctccatgctagctccagccgagtcttttttcccatcgagctcgccctcaactctacagcgccgtctagcccgtcgtttttctcgtccagtgctcgcgcggttttacccgaaccgcgctgccgtctcctagttgccgtgctgccagcactcacccagcttccttgttggccgcgcctctatactctactcctaccggatgtcgcctcctcagcatcattcaggcgaatatcaaatcaaattgagatatggtgagctgattcactatttttactattagttttatattagttttatgatcgtgaaataagacgcttgatatgtgtataaagtttaagttagaaatacatgtaacatcctaaatgtcgattttatgttacgtcgggagatctatcctaatctcggatgctcagtgaaaatttctatttctcgctaaaaaaaaaaaaaaaaaagcggcctatgtctctgattatctagattattcattcacatttcaccgg

SEQ ID NO: 33140 - DNA, 457 bp, Zea mays
  unsure (1)..(457): unsure at all n locations
  Clone ID: MRT4577_130232C.1
ttnttttttttttttttttttttggttatgaaccaggccattttccacgtgagggggcaccaaattcaaatacatcccagtacaatgtcgttccctactcaggaaaaagaaaccgtgtttagcctcaccacaacatgatcaacacatgcctgttttgcaggagggccatatcaaatagggatttttgttgaccggctgccacccaaaacagtaaggaatttactcttggacaccccatcagagccgagccgactccacagctggcgcctaaaatactgcaagtccctaagctgcacaaaattattgctgcctttctgattataccaagaagacggggaaaaaagcttaaaagtcccgaacaaaaggaaaactctgcctcacgttaattttaaaaaaacagttccaataactcaatatggataaaaaaactaaaaaacattccactgtacttccatta

SEQ ID NO: 33141 - DNA, 512 bp, Zea mays
  Clone ID: MRT4577_130233C.1
tttcgggacctgctacttgagcaaacaacggcatagctcgtcctcgccgttgccaacttgggagaatcctgatcgtgactgactgcaagatgaagctgctcgtcggaggccagaggaggcagaggggattcggcaaggccctcaaggagcagagggccaggctctacatcatccagcgctgcgtcgtcatgctcctgcgatggcacgactgatccaatccacatactgccatgggggagcttcgtccgagatacaaaccagtggattcacagggcgagctccatcgtccttgcctggtgcttgcttcatcgggcgccggagttttgagaggtgtcgcgctgctgccacaatggttgccgcttgccggctgctgtacatagagatagagggccatggccaatatagtgtagtacaaatagaggtaggtgttcgtcagtgtctactgtgtcattgtgtatggaatgccaaatcagtgaacaagacaaaaaaaagaaaaagcggcccctatggcc

SEQ ID NO: 33142 - DNA, 437 bp, Zea mays
  Clone ID: MRT4577_130234C.1
ggccaaacagaagcaatttctaaagccaaaacgggatacaccccaggggatccttaaaacccgaaacaccccagttttcaacaggcaatttttttttccactagttttaatagggaaagaggccccatacggggttctccgtttggggggacccccttcaccctccaaaggaattaatcttctctttcccaaggcccctgggggggggggccccttccctttttttttttttaacccgaaaacccccgggcccccccaaagccggattgggaggattcgggaagggccctggcatttggaacaattttaaggatttctccccacgttgggcctaaaaaaaaagggccccggttacccccccggaaaaacaggcctggggcagcccccgggaggccccggggggggttcttaaaaaaccaggggggggtttttattcc

SEQ ID NO: 33143 - DNA, 549 bp, Zea mays
  Clone ID: MRT4577_130235C.1
gggttgtttttttttttaaaatattttttttttttttttttttttttttttttttttttttttttttttcgagaaaaatcccaaccaatatattgattatttctaggaaacccccctcggtttgggggccccattatcaaatccatttgggggtgtaggggaaaaaatggcccccccaaccatgggttgctgccccaacaagacaggattcatcaaagagaaccggttgtatggcaccaattgttgctgctgtaggaaggcggcccccaaggggttacccccccccaagggattaagtaactgttgtccctgttgtaggtccccaacaaaattccaccaaatcagttggttaaatggaaccaccttttgcaagtaggcaacagggtttgccccacctagttgagtcaaagctggtacaatctgttgcaacaattgttgttgcaggtatttaggtgcattgcccccaacgagcgggctaaaaaaaagcagttgttgttgttgtacctaggcggcagggttcaccctggctagttaactgagcgttggcaa

SEQ ID NO: 33144 - DNA, 554 bp, Zea mays
  Clone ID: MRT4577_130236C.1
cacacaccgggatttaatgtaaattgtacccacccggagtcgtactgaagttcaatcccatagatagactaccacatatgcaaaaaactccaaaaaagaaaagaggagccacaaacactccaaaaaaagagggaggttactaaaaaatcaaaagttggaaaaaaaacaagtgaaaaacatccttttatggaaaacaacaaataaattgcttacttgggatcaacaaaaatacaataccatcttggaatacaaaagttccctatccttgtgggaatctgtaaaatcggaaaaccatgggctactacttcgaatcttaaaccttccctgtacgcaatttttatgtcatggtcaccactttccaatcccgtgggcacatcaaccttatccaagtcctggtgtaggtcataattattaaaaaccggtccctaatcgtcgatacccaaatctcccacaataaatacatccacaccatgttccgaaaaaaaagaacagcgaatgattggcgcttttgtgaaaaagggttcgaaaggggcatatgcctgggatgcttgcaa

SEQ ID NO: 33145 - DNA, 281 bp, Zea mays
  Clone ID: MRT4577_130237C.1
gtagacacatctgttcgagaaagccattaatacactggagtctcggataaacaaacaaagtagttccagagactgagtgaagcagattagcactagatgagatttctgcaataagacatgaagaatgcgtgtcaaatcagggctccactgcgtccatacattatccgtgtatgattggcttttattctcgtgttcagtccatagatctgtgacaggaaacctaggtggcatctactctaggcaatgtatcgtcagctcagttgtgtagaacaacttcatga

SEQ ID NO: 33146 - DNA, 336 bp, Zea mays
  Clone ID: MRT4577_130238C.1
gtgttttttttttttttttttttttttttttttctctcatttttatcttttagttactagtaaagtaaaatattataattgtgttccaaccggagaaaaacaattatacaacgttgaaaaacacacaaatatttaaacttaaatatatcataacttccatctgcaaagaattctcgacgtaaaagagacaaaacgtcttataaataagggccagtttggaaactctatttttaagcgatttatatttttatcaagaaaaataaactaatttactccatgaaaatggggttctcaaactagcgctaataggatgtttatgatatgggaaggtttcca

SEQ ID NO: 33147 - DNA, 979 bp, Zea mays
  Clone ID: MRT4577_130239C.1
ctcgaggccggccgggaaaaccccttccggcctcaggcagcccgcagcccgcagcccgcagccggtcagtccttccttctcctgttcgcgtccacgatcctgccgccgccgctcgcacctccacgatcctgcccagcgccgtgcgcctccacccccgccccgtccgccgccttagctactgcttactacgttgcattttttcccctgttttgtggactgtggtaattgactgtgtatcgagcaggcataccctgttaaaaatcctggttccactactagtcaggccatggctgcagcagaggcatgggtgcggcaggagaaagttaggaagtttgaggagttcgtggaccaacggttgaaacccgacctcgccaatgccatcgcacagcgtaacaaggtgtttgagcagcagaagaccttcttggatttgaagaggaacattgaaaatttggagaggaatggtgttaccagcatgcggtccatggtcaatcttggctcagaggtgtacatgcaagcagaagtaccagatacaaggcatatttttgtggatatcggtctaggttttcatgtggaatttacttggcaagaagctttacagttcatatctgtaagagaggcaaggttgactaggcaaatagacgaatacacacatctcatcgcaagcataaaagcacagatcaagttggtatgtgaaggtatccgcgaagtgctgcagctgcctgcggagaaagagttatcgcccaggaatacgtggtagaatttggttctcaatggagcagggggtggtgttctgtaaacgtggttccgtttcaactcttgcagttgaaattattgtggtgccgacagtattttagagcagagaatgaggttccccttcgtataacaatctcttcgacgacaccacgtacaactcatactgatttctatgttttcattatgttttcatactgagttgcagtatccaatgatttcacgatcg

SEQ ID NO: 33148 - DNA, 343 bp, Zea mays
  unsure (1)..(343): unsure at all n locations
  Clone ID: MRT4577_13023C.1
caagtacaaggccagcgagaacgccattgtatggaagatccaagcgcatggcaggcatgaaggaatcacagatcagcgcagagattgagctcctgcccaccaatgataagaagaaatgggctcggccccccatttccatgaactttnaggtgccatttgcgccttctggcctcaaggtgcgctacttgaaggtatttgagccgaagctgaactacagcgaccacgatgtnatcaaatgggtgcgtacattggccgaatggcattacnaaacccgctgctagctgccccgtgcggctggcccacatctgcccacctttccacagtccagcacnacagtgacgtc

SEQ ID NO: 33149 - DNA, 504 bp, Zea mays
  Clone ID: MRT4577_130240C.1
ccggccgggacagccttataagccaccatcgatcttcaacactcgctacggagcataggcacatgaatacacatatcggccgaatgcacgatcacatcaggccctcatcctcgtccggcagatccctcggtggtggcgcgaacgtgccgtggatcgctggctccggggaggccaccgcggccatgcccaagacggctcgccaacgccaagccacgcggcggctaccggaatcccggggcacggccccgacagcgaggtgtagccggtgcactgtacggcgagccaccaattctgaaggcacgggctgagttcccagcgcgagtacatctgcgacaccgtgtctgtgtacatggaccagaagacgttcgtcatgaactgctagccggaggagatccactcccgctgggcgcatggtgagcacgctcggttgcgacataaccgagctgctcgacacaaacgacactgaggtccgggatgtcgcgagggacagggtgggctcccaga

SEQ ID NO: 33150 - DNA, 432 bp, Zea mays
  Clone ID: MRT4577_130241C.1
aaaaaaacatatcatggggggaccaattaatatatgggtacaggagatgcaatcgggtcaaccaacatgcagggagacacacgtacgtacatgagcacaaagactggccccaaacatgcagagagagatagcaaactgaaaaactctggttttttttttttaaaacacaccaaaaaatacctatgtttgggaaccagctcggccttgtttattattggtcaaccccccccacaagctagatagataaaaatcatatccatgggcggcgatcgatgggaacaaaagttgcaggggtcgcacttgcagttgccaccgaaattgcagccggggggggcctcgccggactccgccgggggcttaaagaactcgggcgcggccttttttttcggggccaccccgaggaccaagggggcctgcgcgggggggctcgtt

SEQ ID NO: 33151 - DNA, 168 bp, Zea mays
  Clone ID: MRT4577_130242C.1
ctttgcctgatcatgacagactactatgaaaactatttatctgataactatgaaaacctgatcatgtatatgtatgttatatgacatcagaaatacttatgttgattcgaaccttgacatcgaatgcctctatgatcaaagcatgtgtactattacacatgcatcacc

SEQ ID NO: 33152 - DNA, 573 bp, Zea mays
  Clone ID: MRT4577_130244C.1
tttttttttttttttttttttttttttttttttttttttttttttttttttttttttttttttttgggaccaataaaaaaggggtacaggaaatgcaatcggatcaaccaacatgcagggaaacacacgtacgtacatgaacacaaaaacgggcgccaaacatgcagtttttattttgcaaactgaaaaactttgtttttttttttttcacacacaccaaaaaatacctatgtatgggagccagctgggcctcgtttattattggtcaaccccccccccaagctaaaaaaaaaaaaatcatatccatgggcggcgaacgaagggaacaaaagttgcagggggcgcacttgcagttgccaccgaaattggagccggggggggcctcgccggactcccccggggccttaaaaaactggggggcggcctttttttccggggccaccccaaggacaaagggggcctgcgcgggggggctcgtctcctccaaggaagggtactttttgccgcacttgcagtttgagccgcacccccaatttgatccgcagttgcaagacatcctcaaccttggggggc

SEQ ID NO: 33153 - DNA, 300 bp, Zea mays
  Clone ID: MRT4577_130245C.1
gggaccaaatctcccttttttgataaacagaattggcaaactccaaaaacatacaaactggataaccggttttttaaaaagaaaagaaaacttcctttttactgtcagctacaacaatgaaactggctaaagcttttttttggccattggttactattgggggaagcataaatcctcatttgggggatatctttttctcctaaaaggaactaatggttgacgatttcaggcttttttaccaaattgggcaaggcaaggagatttttcaaaaggcgcttgggggaaccacccgcttttttt

SEQ ID NO: 33154 - DNA, 264 bp, Zea mays
  Clone ID: MRT4577_130246C.1
ctcttatccacccgcgcgcccaccgccgcgcgcagcaccgcggccgaccgacaccggggaacaccccagcgcccgaaatgccgctccaaccctagcctctcgtcatgcctgtcgatctcgggcggacatgggcaaactgatgccgctcgacggtcgccacggcgcgggaggacgccagctcactgggacttaccggcctgcactctcgattggagctctccgagggccagccagttcttttgccacgtcgggcggcggggggac

SEQ ID NO: 33155 - DNA, 356 bp, Zea mays
  Clone ID: MRT4577_130247C.1
ccggccggggactaaaaaaaccagcagctagctagcgatggctggagcctgggcactgctcatcgtcctcgcggctgtcgtcgcggtactggacgcacggccgccgtctgcacgccgcggagtcgtggtggtggcggagatctagatgaagactccccaccccgacctgtgcgacacgacggaggggacccacgcacaatacgcctaaggtgctggacgcggcgacggtgctacaaatgcacgcggacgcgtttaagaagctcgtgaaggcggagcggactgcttcgtcaaggaggtggtatcgacgggcgctacgaccgagtgagtgtagggtgctgaacctctgcaagacctac

SEQ ID NO: 33156 - DNA, 395 bp, Zea mays
  Clone ID: MRT4577_130248C.1
gggcaaaatgagccccgggggggggggacttattaaaaactcaaatggggggggggccccctccagatttcacaatcagaaaaccgaatttttcacggggccccggttgggggataaaatttggggcaaggaaaacattttttaattatgaccagagctccaaaaaaacctttacgaggacccggaaatttacatggaacgggggcgttttaaattttggtgggaaactggaggccatcctttttgagccccccaagggtaacgaccggggggtgggttttccccaccttggcaaaggccttgtttttgtccggggaccccccctccaagaaggggcccaaaaacttgccggccttgatccaatacgagcccaacttgggcttggtggagggggg

SEQ ID NO: 33157 - DNA, 297 bp, Zea mays
  Clone ID: MRT4577_130249C.1
tacaagccccggcggtgaggcatggggcaggggcatttggacgagttccttgcagtcaaccggcgagctgaggtgatagattggcttggtgggttgctgccggagttcgacttgccgttggattcttcagacgaggagctgcgggagtacctcattgatggcacgggactatgctacattgcagagaaactcatgcccggcattcaggaggaaatgtggggtggtaatgcattggatcagaggtcgtatgtgaagaaacttctcttttttgttgcagaaatgggtatgccaggtttt

SEQ ID NO: 33158 - DNA, 265 bp, Zea mays
  Clone ID: MRT4577_13024C.1
aaaaaacagaaggcctcaaaaaggaattctggcaagtctagtttgaggtccttgattctaacgaggttgtatggaaaggaaggccagaaagagaagatgcttccggttgcaccaaagctactccgcactatttcgatacactatctggaaagcaatgaatacgttcttgacagctaatccacttcgagcggcgatggttcttcaaacagtactaagccgccgatgcaaaatgctggcgatatgatgaatctgcaccatgctacat

SEQ ID NO: 33159 - DNA, 589 bp, Zea mays
  unsure (1)..(589): unsure at all n locations
  Clone ID: MRT4577_130250C.1
cggtaccggaactctcccgggttttctccatctttttttagatcctttacaancaatgctctaaatgcgggggtgcttatactaataccaccatactcaaacatagctgcgcctggacaaaatttgggatcgggcaaaaacatagctcttaacgaaaagtattactctacggtgaaagacactgggtagccagtaacctcacccaacttcacaaaagagcatacttatgaacaccctgaatggttcacccatggcgctgtgtgacattagaggcactttcacattactggccaacatctttcttaagcaaggaaaaacaaggaagttgacgctcatgttgatgttctggtggatctgtttctcctgcatcgtcaagttgtcaacgggaacacccatgcaaagaaccttcttgagctgtaactcaacagatgccttattctcagataccttggactctagggattcctgaggaataaccattgtgctgaacttgccttacttgttgagaccattaacaagagacgggaatctgattgatgatagcctctgatgccaagaaagcatggtacttattgacaagcctcttaac

SEQ ID NO: 33160 - DNA, 350 bp, Zea mays
  Clone ID: MRT4577_130251C.1
tgacatctgatgcatggacggcgctggcacagtgggggtatcatgttcgaagagcattcaagtgaacaaggtgatcatatgaagatgggaagaaagctccgaactcacaaatgcagcactggctagcgagcttccaaggatggctggtctgcttagagttcaactatgggtggtatgtggatgaagaaaatacactcacgacggagaagaagaaaccgtggtgcaataagaaaggttgaacggaaatactgaagaaggccatctctggaacggtaaattataagcacatgctgaagatcctaccgcagatggctctgatgcacaggcctctcaagcagacgaggaataca

SEQ ID NO: 33161 - DNA, 231 bp, Zea mays
  Clone ID: MRT4577_130252C.1
tggtcacctacgtgacagccatgtgggtcatgccccaccccttgcgcattgtgccgagcgagcggctccaggtgcgacccgccgtgaacgggccgctctactacctcacctgcctcatgaacggtctggggagcgactgtatcatcggctggcacatgctggcggtgctcaagatggacacccacgccatccgcggcttctactatgggcatgttcatcgggggcgcacta

SEQ ID NO: 33162 - DNA, 574 bp, Zea mays
  Clone ID: MRT4577_130253C.1
cgggtcgccctatcttccgtttcaaattctagtacacccgaggagggatatcataattatagcaagaggacattatccaaactttaataggatatatgaagatcttcgaggtttccgatgctggaagacgtggtaggaaggatgttaccaactgtcaaaccgtttttgattgcactacaccaattaaacagggaggggcggggagaacaccagtatgttcagctgttggttaccgatctgtagcactacaacccactctatgagttcatcagttcctggggaagaatataaatgggttgaatcagtgtttacattgcccatgacatgaccatctaagtgcgtgaccgatatgcggtcgtggacgcgttgtggacggagtctactatagagtttacgactaagatggcgactgcattgactacacgttaggttctgacgaatttgtataagtctgaatagcatgatgagcgtctgcacataattaccgttgaaatagaactacggctatattatgaaacctaacggatctatcgacaccagtctggagcgaaattcgctgcaaaatttgccgcaa

SEQ ID NO: 33163 - DNA, 264 bp, Zea mays
  Clone ID: MRT4577_130254C.1
ttttaaggatgggtttatctattaatacttttcagagggaaagctacaaatcaacccttcttgggcattatcaattggataatatccctgtagatgtattttattgctgggcacatgctttttgaggtggcacaaaccttggccggtaccacaaagttgggttaagggattgttagctaacccattggtttactgggggaagggccctttgattgtgtggttaattttattttctgcaccccaccttttttggggtaatttttt

SEQ ID NO: 33164 - DNA, 263 bp, Zea mays
  unsure (1)..(263): unsure at all n locations
  Clone ID: MRT4577_130255C.1
agaagaagacttacaccaagcccaagaagatcaagcacaagcacaanaatgtggagctcggcgtgctccaggtggaggggggtnacnactccaccggcaaggtcacccgcctccggaaggagtgccccaacgcctagtgcggcgcgggggtcttcatggccaaccacttctaccggcactactgcggtaaggttgggcttacctacttctacaaccagcaggggtaggatgccccttctttctttttgtatgggaactggtaa

SEQ ID NO: 33165 - DNA, 484 bp, Zea mays
  unsure (1)..(484): unsure at all n locations
  Clone ID: MRT4577_130256C.1
gcacacacacacaaaccgtatcgggccccaaanccacccgggggggccggcgccgcaagagcaaagcanagagagaaccccgaccggcaagactaccacccncgagggggagaccgccgacaccaaggacaacgncaaggccaagacccaagacaaggagggcaaccccccagaccagcagcggcacaacngcggggggggggagggcgaggacgggcgcacgcccgcggacgacaacacccagaaggagagcacccnccaccnngngcnccgncacaggggaggcacgcagaacgaggcgaaaacccggaccggcaagacgaacacccacgaggnggagnccgcggacaccaaggacaacggcaaggccaacanccaggacaaggagggcagcccaccacaccagcagcggcgcaacancgccgggaagcaggngcaggacgggcgcacgcnngccgacnacaacacccagaaggagagcacc

SEQ ID NO: 33166 - DNA, 414 bp, Zea mays
  Clone ID: MRT4577_130257C.1
acgatgcacgcacgcgtaacgctagcatgctttactatagagcggccttcctttttttttttttttttttttttaaaaagaccgatttggtaattggctaaagaaatgatatacccttgtactggatacatggggaagatatataaattaattccaggaaaagggaacgtgagcacaagaccaacaaacttttatgacgtactgtctgtctttttataaaggggaaaccttcaaaaatgaatgctgcttgagagtcttactatctaccaacacgatgttgctgagattgtaccctgcaccactgtatctgcttgatggagatcctgggcatccttagtacttgcgccaccagcttaatgtgcacctgcgagaagaagaggttttggttggaactgccctccttggagttattaa

SEQ ID NO: 33167 - DNA, 750 bp, Zea mays
  Clone ID: MRT4577_130258C.1
tggaactcaaccccactcctccgcctcccccctctcccatctgctgccgctgctctgctctgctctgctcgcccctacccgcgatcgccgcggccagcccgccatggacgaggagtacgacgtgatcgtgctgggcacggggctcaaggagtgcatcctcagcggcctcctctccgtcgacggcctcaaggttttgcacatggatagaaatgactactatggaggagattccacctccctcaacttgaaccagctctggaagaagttcaggggggaagaaaaaccaccggcgcatttaggtgcgagcagagactacaatgtagacatggttccaaagtttatgatggcgaacggaactttggttcgtactctcattcacactgatgtaacgaagtatctgtctttcaaagctgttgatggaagctttgtcttcagcaaagggaagattcacaaggttcctgccactgacatggaggctctaaaatcccctttaatgggcatatttgagaaacgtagagcaaggaacttcttcatttatgtccaagattacaatgatgctgatccaagaacacatcaaggattggaccttacaaggatgacaactagagaattgatcgcgaaacacggattgagtgatgatactatagatttcattggccatgcgcttgctcttcacagggacgatcgctacctaagcgagccagcaattgatactgttaaaagaatgaactctattctgagtctcttgca

SEQ ID NO: 33168 - DNA, 330 bp, Zea mays
  unsure (1)..(330): unsure at all n locations
  Clone ID: MRT4577_130259C.1
ctctaccccatctccatccgtcaggaccgctactgcccaccgcacgactgaaccggttcaaactttaaccagccgggtcaacagcaactaagcaccccgtttgtctttctttttcttcactccggggtggggggggttctatttctcataaggagcggctccacgttnggaaccacacttttcaggacccccacgtaatccaacgaccgatcttggggcaactcagcagtcaaagacaactacgacaaaggatcttaagacggtaaagaagatcgtaatgaagaatggtgtagtgagtattcaacgctttggcctggtgaaagacttcta

SEQ ID NO: 33169 - DNA, 236 bp, Zea mays
  Clone ID: MRT4577_13025C.1
tttccaaagatattcctactccacacgtattcttcttgctgattcaatacaccaaaaccgctcggctctctgacgtgatggaggcgccgcccatccgccgcaagtcgtggctaccgtccatgctgcaacgagacccaccggctccggtcgtgagagagcatacaatgtgatctgctcccgagatcgacgaatccaacatcaaccgttcggcgaacacatgtgatgctagtagcttc

SEQ ID NO: 33170 - DNA, 208 bp, Zea mays
  Clone ID: MRT4577_130260C.1
ggcggacgagccgaggttggacatctggagcaaccggaggcggagtagatgaagacgtggggcccgtcgacggcctttatgcgccgggagtagaagcgcaactggcgcttcctcacggccttctacatcaccagcttcatcatcacgaagatgacgtacaacttcaccgaggaggacctcaagaactcctagatcgtgcaggaacaca

SEQ ID NO: 33171 - DNA, 315 bp, Zea mays
  Clone ID: MRT4577_130261C.1
gtcaccaagcaaatttgtcgagaccgcatctctgttaatcattatgttacaagaaatggtacaaatgttacaatagcatggaactgccaaaagtagccacaatcacacgcatatacaacacgaacctgcatcttataggtatttttttcttcttggttataacactaaaaacagcacacatattacagcatacgatggataaaattaaataactcatccctaggtacacagactttcaccttaaaaccatattcgtccatctcctcgtatgaacctgactctatatgccctatgtgcctcttgtacagctataca

SEQ ID NO: 33172 - DNA, 354 bp, Zea mays
  Clone ID: MRT4577_130262C.1
ggaggttgaatgctaaaaatactgccacatcaaaatgggggctatgactcatctgctatcttccatccctagcaacccggtccctacgtgatggtagtggaaaaaggattcgactctacaaactgcggactagatggctacagaccgattagcaagagctgagcctgccaaatcaacattcacatgaatgacctcctgcctcctgtacttcatgtaatacatgcatttgcctaaatatcagaatgcccaatccgagcctggccatattcggtaccaactggtttaggtgcgtggaagcaactaaatcccacgagaggtggccatcagctgcattcatactgccatctttgctgg

SEQ ID NO: 33173 - DNA, 416 bp, Zea mays
  Clone ID: MRT4577_130263C.1
acgctaatcaccgagtgattctattaagcacttgggaatgtctacaatattgcttggtatgttgcttgggctcccacaccttcaaatggccggttgggtcaagtatttataggccccaactccaaactagccgttggagaaaagctgacaccggacagtccgatggtctttctccgagtgccacctggaactagccgctgggctggagttccctttgtgcaccggacagtccggcgtggtgggcaccggaccagtccggtgcgccttcgcacatacagtccgcagcaacacacttggacttttcttggatcttcttaatgacttcttttgaggtgttgctttccttaattccttagtccaagttattcttacatcctgggaactgagcaatagctgcatgcaaaggcatgtctgaa

SEQ ID NO: 33174 - DNA, 445 bp, Zea mays
  Clone ID: MRT4577_130264C.1
ttttgggagagagtacgtgcgggcgtccggaggtgtgagcgtacgcccgcggccgggccgtcgcgccgatcgcgatggggtcgtggcggcgcaaggcctacggcgccctcaaggacttcaccaaggtcggtctcgccaaggtcaacagcgacttcaaggagttggatattgcaattgtgaaggccaccaaccatgtagaatgccctcccaaggacaggcacgttagaaaaatattcgtggcgacctccattaaccgccctcgagcggacgttcaatactgcatctatgccttgtcaaggagattgttcaagacaaagaattggacagttgcattgaagacattgatagtggtacataagctcttgagagaaggtgatcctacattcaaagaagagttcctggcctacttatacaagggaagcgttttgcagagagcatactttca

SEQ ID NO: 33175 - DNA, 1083 bp, Zea mays
  unsure (1)..(1083): unsure at all n locations
  Clone ID: MRT4577_130265C.1
ggccgcttttttttttttttttttagaaaaaactctgctctcagatttttaacgaataataacaagattagggaaaatgacagctccaatacgcacgatcctacatatatagctaggggctgtttttttttttttttttaggtgaaataccaacaatatagtcatacttcacactaagaagccagcgaagcctaaaaaccttaagactcaccacctactcaaagaggagctagatccgtatggagcactaccaaagaggggcgtaggttttacttaacctaaatctggacatttaataatgtttatgtggagattcagttttagatgtgaaggaaaacataacggccactacaacagcacccactcaggcctcaaacaaataagccgcttttttttttttttttttagagatgaattcattttcctgctttgaagacatatataacggccttcacgaaatcagcttcgcagtcagcaattcttccattactgaacttgctggacaagtacaattacatcttcacaaactcggcctcgcagtcagcaattcctgactaattctctgttttgcacgccaaaattgaattatggagttactttggattactaaattgttgatccctccggcgccaccaatttactatgatagaatcgataatgatctggttaatgtgtgcaaaaacacaagggataactagaagtccggactccccgagggctcctccaagctgctcaaccactgttatcataactggcaatgttttctgactagtcaccaaaatgacagctcgtgtgtactctttctttgcaaagactgaatcccctttcttttcaagatgtgacaagatatgcaacgttgcaatgttgaaagccaacagtgcaatatgtagaagcactccaacagtaatagcagcagcaaaagcttccacttgaacagataagatcagtgatcttgatttacttacttgaatccatgggactaggctaagaagcaccgcgtttccaactgaaatcctntgttggtttccatcaacaaaatcagcaataccttttgaggcttctcgagcaaccttccctatatag

SEQ ID NO: 33176 - DNA, 620 bp, Zea mays
  unsure (1)..(620): unsure at all n locations
  Clone ID: MRT4577_130266C.1
ccggtttccggcttggcatccgtcgcgaagaacgccgccgtggtccctcgcctcccctttcactatcaggcggttgctcncttcctttgngctcctttgctccntatcctgctctccccttctttntctccattaacctgcccnntgngttctgggtctggggggggggggccatcttctnttnttttctttctcttttttttttttctttctttttttctnnttttttttttttntttcttttttntntttccttnnttttctttttttttttnttttttttttttcttcntttnttttttttccttttttctcttttctccttccccccctcctctccncttttccttcttctctttccccnttctttctttttttctttttccttcctttcccttttttttttttntnntttntttccttcntcggtcttttttcttttttttttttttcccttttcctttttctctcctttttttttttttttttttccttttttttctttttttggcctttttgcttttttccnttctttnttttcccttttggtgtgtcctctgttnntttttctccctgtgccctttcggctttttttctctttccctttttttttttttttt

SEQ ID NO: 33177 - DNA, 360 bp, Zea mays
  Clone ID: MRT4577_130267C.1
ctcattgttacagcatatagtacatgcatgctgaaacaatggagatgtgaagtgaaggagaagacgtcagcacatgaagggtacatccattaactgtgtcgtatcgtatagctagttgcacaatgcatgtaacataaactaggcatgcatggcactagacaaatattgtgtacatatactacacagtgttgatcagtccatgagataaagagagaggttggtggtgctttacttgtttgtgaggtttaaggtttagtgttactgtgcatggatggacggatagaaggatgggggtgtaaaaatggtacaagcaagtactgctgctgtgatgtatttatttataactgagttgaccaacca

SEQ ID NO: 33178 - DNA, 608 bp, Zea mays
  unsure (1)..(608): unsure at all n locations
  Clone ID: MRT4577_130268C.1
gtttctttgcaccctgcccgcccgtcccctctcgccgatcgatgacctcacctcccacatctgactaactccggccagggacgcatcgccttggctgtatatataggaagctagcggacgacccgcgcgccccatcaatcgccatggcctccgtggacctgcaacgcctgcgccacatgttactcaccaccggcgccggcggcggtcaccaccagctcgcctccgccgctactatcccagcgagtgggccttgttatggtgctgcgctgccgagccagcgggaccaccacatgtgcgcggacctcttcagtctgccgccggcgacgatgacgacgacgtcggccacggagcagtattccgagttcttggcgatggctgctgccaatctggcgaagaagggcgtcaggcccgacggtggtcaggaaatgagcacaaacaagcggaagcgcgacgggcggtcgtcgatgcttgccgcggncgacgttcttgcggcccacgtccagcagcagaccatcgacgtcgaccgcatcctgcttaaacatgcgcaaaatttgtggactactctggcggagcagaggcagagccacacgaggctgatcgtctcgacc

SEQ ID NO: 33179 - DNA, 253 bp, Zea mays
  Clone ID: MRT4577_130269C.1
ggagctataaatctcggcgcccccccgctaccggaccccgcattcccgtgcgcgagctccggtgatcgccgggagcggtcggcggccatggggcagtgctacgcgaggaacgtgcgcggcgtcgacgccgactgcggcggcgtgggggcgaccaccatcacggtctcagcggcaggagggccggaggatgcggcgtctgtagggggagggggaggacgacgaggagggaggcggagcgcgcggccgtctacta

SEQ ID NO: 33180 - DNA, 295 bp, Zea mays
  Clone ID: MRT4577_13026C.1
agatcggcttccctgccaagattaaggtgaagaaagaccacgcatcattgccgttcgatgaccagcgctctattctagacaaggaggccgtgaaccctgtccctggagaacctcaagacctaccccttcgtccaggaaggactgtccaacgcgacgctcaagctggtccgcgagcactacaacttctcgacaagggagctcctcacatgggacaattaacagccatcgtcgatctatatatatacactacctgatgcaagatcctattcagcatgcacctacatacatatatata

SEQ ID NO: 33181 - DNA, 566 bp, Zea mays
  unsure (1)..(566): unsure at all n locations
  Clone ID: MRT4577_130270C.1
ggcggcggcagcggctcccggtcggggaaagtgtccgccaaggcagcaaggtggttatcgacgtgtcatcgtcggcggattacggcgcgctggcgtcggggaagaagataactaatacgaccacctcttcgatgtcctccgcggcctggtcgctggtcgccagcgacgtgcgcggggccgtagagtcgctgacggtgtacaagtactcggagctggagaaggccaccgcggggttcgcggaggagcatcaggtgccgggcacgtcggtgtaccgggccgtcatcaacggcgacgcggcggcggtggagcggttggccggcgacgtgagcggcgaggtcggcatcctgatgcgcgtcaaccactcctgcctcgtccgcctctccggcctctgcgtccaccgcggcgacacctacctcgtcttcgagtttgcggagaacggggcgctcagcgactggatccacggcggcngcgggagctgcagcggcagcaacacccttccgtggaggcagcgcgtgcaggtggcgtncggaatcgccggcgggctcaactaccttcaccactacacg

SEQ ID NO: 33182 - DNA, 359 bp, Zea mays
  Clone ID: MRT4577_130271C.1
gcaggcgccctttttttttttcttttttcttgttttactcgtctatttttcgccttttcctttccggactccaactttgtttttaaaaaatcaaaacccctactggctcggggccggttttggaagtttttaacagggccttttgttctcacgagggaaaacaatcattgttaactccctaggtactaccaatctccaaactaaaaaaggtttttacccataccctttcagccaaccatttccattcacatcctttagctccaagcttttcaacgggaacgattggttgccaccaaatgcccggttgctgacccccctgttcgttagccaaaagggcaggacctatacgactacctttt

SEQ ID NO: 33183 - DNA, 341 bp, Zea mays
  Clone ID: MRT4577_130272C.1
ggcctataaacacttgaatactttcattctatcctcatgatgatcaagcatgatatacaacttaacaaaatgagattcaatcgccttagcactgaggtgttacaagattcagatgctggttggactacaaggacctaggatgtgatttactaagctacaatatcctacaggggagccgacactctatactgtggaacaataagatgataccgtaccgttgctaaccaactcccatgaggtgactgagtagtgcgcactcccattgctgctaaaaaagcacactgcacacatgcatatcagaaggagccccacgaaaccatgcccatgttggtcgctgatgc

SEQ ID NO: 33184 - DNA, 335 bp, Zea mays
  Clone ID: MRT4577_130273C.1
gatttaaactttcctggggccgggattttttttttttttgtgacacaggctttaaaatccccaacacatatatacccattaagcggaacgcgcttggcggcaccaaaagaaccatttccataaacagaacctctatacgtataattaaccatcccgccacttggacaaggcgataagacagaccccacactgcattgagcgcatctggcgccagaacagaaaccttctgtggatacaacgctgaccgaatcccaatccctggcgtccgccctcaatcgaaaatcggccagccgaggagtaacacgaagtttcctgtatgggcccgggaaatcccc

SEQ ID NO: 33185 - DNA, 143 bp, Zea mays
  Clone ID: MRT4577_130274C.1
gaaaaaaacacgcaggatataccattttgagaatcaaagggattggtacatatctgacaaaacttatgataggataggataaatgccacatacacaatataaagctacctaaggtacttgtgatatactcaacactgggtaaa

SEQ ID NO: 33186 - DNA, 620 bp, Zea mays
  Clone ID: MRT4577_130275C.1
tgacctagcctgcacgccgtcctaagcttggctcctctatactcgacccacgcaggcgaggcggctacgaaggtggcaggggagggggctatgaaggaggcaggggaggcggctatgaaggtggcaggggagggggctatgaaggaggcaggggtggcagtgctcagggtggaaggggttacggtggccgtggaaggggtagaatgggtggtcgcggacgagggaactagtgcagttctggcgtttccttcaaaatgcatgcctcacctataccaggggaaacgacaagttatctgagcattttatgtttgaagccatgtgactgaggtctgttattttttcccctgagcgcgaggtttggttgtgagcataatgcatttgcaaagttttatcttgtacgtcatccttcaacgtttcaagttttatcatgtacggcatccttcaatgtttctgctgcagggttttcccagtgatcgttgagtgctgagcatgttgtccaatgttcatgcctgcagtattaacagatggccactctttccctgtgaaattgttaattgcattctgcccgggcggccgctcgaaagggcgaattcgcaatatcctcacacggcggcgccgag

SEQ ID NO: 33187 - DNA, 265 bp, Zea mays
  Clone ID: MRT4577_130276C.1
ggggaggggttttttttcttttgtttgtcctaaggaaaaaggaataaatctccgggatgaaaggaaggaaccttcgtgataaagggggggctattacagggtgccaccctggcaacccgacaccttattaaagctgaccctaccccttctttcttttttggcaagccaaatccccccccgaacaaatttattttaaagagacctcttccccgataaggtaaatcatccgaaaacccccaaaaattgctggtgggtttttcccctt

SEQ ID NO: 33188 - DNA, 294 bp, Zea mays
  Clone ID: MRT4577_130277C.1
aatcatcattcacttagtagtatattgcactttatcaaatctgcaacatcaattatctaactgcaaaaaccatgaagctggtgcttgtggttcttgctttcattgctttagtatcaagagtttcttgtacacagacaggcggttgcagctgttgtcaacatcatatccatgatcagtaacatcattcataataacatcattcactaaaacaactccattaaccaccaccacaacattaccagcatttttaatcccatctacatcaatgtttacatgtaaccacaaaatcattta

SEQ ID NO: 33189 - DNA, 146 bp, Zea mays
  Clone ID: MRT4577_130278C.1
cgctaacagagctcctccgatactacatgctctacattgaagctgctaaggatcgcttatacagacgcaccaaagccctcattgactatgagaactcaaacaaagctctggataaagcccggttaaagagcaaagacgtcaagttg

SEQ ID NO: 33190 - DNA, 477 bp, Zea mays
  unsure (1)..(477): unsure at all n locations
  Clone ID: MRT4577_130279C.1
aggtaccagtctagaattcncgggtcgacccacgcatccacccacgcgtccggccacagaaaacatatcttgctgtagcggcatggctgcacgcaactgctggaaaaaaatatatgacatcttgtgttatgctgctacggtgcttctgcagcagcatgaagttttttttcttcttgttaaaataggttttggtgcactcatgaattcatgaagtgtgatcgttttctattgccgttgccacccttgtttcccaggcgagatccatcttcagcttagggttctacagcttggtggcagtgccgtcggtggttgcggtgatgaacgtattttggttctggaagatactcaaggggatggtgaaaaccctttctaggaggaagcacagcgaaaatgggagaacagattagaaggaatgaaggaaggatgctactgaactgtacacatgttcatctcaacgcacttacggcactcgcattc

SEQ ID NO: 33191 - DNA, 847 bp, Zea mays
  unsure (1)..(847): unsure at all n locations
  Clone ID: MRT4577_13027C.1
gtactacacatatcagaccttgcttgattgtgaagagatttgtcagcagcaacaaagcaacactgngaaattcattgcctgctaatacctanaattacatccaaaaacttcatgaggaatttgagacctcaatgtcagatgatcttcacacttcagtggcattggctgctatttctgagccattgaaagttatgaatgatctgttgcacactcgtaagggaaagaagcaggacaaaaggctggaatctctttctgccttagaagagaaaataagagtagttctctctgttctaggattgctaccttcaagttatcatgaggctttgcaacagctgcgggataaggcactgagacgagcttccatcaccgaggagcttgtggtgcagaagattgaagagaggactgcagcaaggaaggcaaagcagtatgaaaaatccgacgagatccggaaagaactggctgccataggaattgccctcatggatggccccgacggaaccacttggagaccatctttgccaattttagaggaagcggtggttgcgaaaacatgatctgtgcaagggattccaatacgacccatggacaccagttctagtcggtaatcatggatttgctatatgtgacgaacttgttcgtttgactttcattcataccggcttgtactgcttctataatgttttttcataattctctgctcccattagatctatagtagttactagctgaatgcacgtgtgttgtaatgaaaatatataatatgagtatactatgataacttatatacaaaatgtatgttataccgttatgagaaaatgtttcataatcaatttatgattcgggccat

SEQ ID NO: 33192 - DNA, 371 bp, Zea mays
  Clone ID: MRT4577_130280C.1
ggggttaccaacaagaaaccataccatactctttgatggttaaaagggttttaggaagtttggtagtaccggaattacagacagttttggtcccacttcctagcgctaacaaaaactgctaccttgctcggcgaaaccaatgcatttcttacatgacatcaattttatccggggcagtcaccggaactcattgcgggcaccggattacctgatcgccacggtcaagtaaacgccaatgtgaagttacatgatcgcgacgctcaaataatagggaatccggaacccaagcttcgcaagagttttggcatcatcaccccttgcatggcactaagcaaagggcgaacccacctgtctgacaacaaaacgaacct

SEQ ID NO: 33193 - DNA, 525 bp, Zea mays
  Clone ID: MRT4577_130281C.1
ccggggacaacaaaaatcacgtttccatccatcctggcgcacaaggggaagcggagagcgctctctctctcccgcccgcaatatcatggcgagagcacacctagccctggtcagcttcttcgctgcctcaattattggtgcggcgtccaagtcgttcaccatcgccaacaactgcgagcacacggtgtggccggggatcctctcgagcgccgggtccgcggggtggacaccacaggcttcgcgctggcgccgggggagtcgcgcgctctgagcgtgccgtcggggtggtcgggccggctgtggggccgcacgctctgctccaccgacgcggccacgggccggttcgcctgcgtgaccggcgactgcggctcgggcaggcaggactgcggcggcggcggggccgccccgccggccacgctggccgagttcaccatggacggcagcgggggcatggacttctacgacgtgagcctggtggacgggtacaacctgccgatgctggtggcgccgcagggcgcggccctc

SEQ ID NO: 33194 - DNA, 320 bp, Zea mays
  unsure (1)..(320): unsure at all n locations
  Clone ID: MRT4577_130282C.1
gagcttactagtcggcggccgccctccctttcgcgttgttattcagagacggagggatttttgttgggttgtggcaggtgcgggtgggaggtgaagaggaagaggtcgaatgggctctcatgctgtaacgggtggtacacgctatttactacgcgagatattgagaaagaagacgacgagtaaggatttgacgacaacacttatcgcttcatacaaagtgtgttactgatacaaattgaatgcccgggccgaacggaaactgaacggtgcctggaattacgaggcncatgaaacatgaatggtccttgggaagccctgat

SEQ ID NO: 33195 - DNA, 108 bp, Zea mays
  Clone ID: MRT4577_130283C.1
gatagatcgccatcatgaacgacaccgtaactatccgcactagaaagttcatgaccaaccgactacttcagaggaagcaaatggtcattgatgtccttcaccccggga

SEQ ID NO: 33196 - DNA, 165 bp, Zea mays
  Clone ID: MRT4577_130284C.1
attgactgagatgaacttccctgaagcatctgttgtccatgaagtacctgttaccactagttttcagacattgaacccatttgttgaggaagacgatttgttagaggtgaatcaatcttcacaaacgactaatgatgtgtggctaactgttttagatattgcttt

SEQ ID NO: 33197 - DNA, 369 bp, Zea mays
  Clone ID: MRT4577_130285C.1
gcaaggtgttcgaccatcagctgtgccaaggcccatcggtaccatgtacagcaggataggggtgtttacacatattgacaggacacaactctccagtttaggctttgccaaaaacccatatagaataacgagcatactcaaacgaccaccactccaagcacaccatcatcgccaacctgacggagagcttctcgtactcccacataccatataaagagaatgcctcggaggagaaccctgtccatggtaccattatgctcttgcacatcatctggggatacgcatactaacatctaggaatatgtggtgacatacattgtccaaatgcttccaattcttgatgattacttttttatcgactgacttaac

SEQ ID NO: 33198 - DNA, 671 bp, Zea mays
  Clone ID: MRT4577_130286C.1
aatgcgcacgagccacgagccacgagccacgcaggccgagaaggcgacccaaacagagaatgatgattttcaaccaatcgcacctgttgtgaaagctcaacctcttaaaagtaactgggaagatgaagatgtggatgaagatgatgtcaaagaatcatgggaagaggaggaagagaaacctaagccacaacctgtagaaaagcctgctccaaaacctagtgctaaagctgctgtgaaaaaaggcaaacagccctcaacgagtactgaagtagtggacgatgatgttcttgatgatcctatttcagagaagcttcgccaacaaaggctagtggaagaagctgactttaaggcaacagcagagctttttgccaagaaggacggcagtgaaaagtcactagagactttcatcccgaagtctgagagcgactttgcggaatatgctgagcttatcgcaaacaaaattcgcccctatgagaaaagctttcactacatgggtctacttaagaatgtcatgagactttccatgacaccgttgaaaggtgcggatgcgaaagaaatatcctcctccgtcacggcaattgctaatgagaagatcaaagctgagaaagaagctgcagcaggcaaaaagaaaggaggagcaaaaaagaagcagctccatatagagaaaggag

SEQ ID NO: 33199 - DNA, 482 bp, Zea mays
  Clone ID: MRT4577_130287C.1
ttgacccacgccgcgcgtgttactcaccttgaccaccggcatgggcatgggcttggcctccgcgaacggcgccggaattttacggtccgccctgttcgcgccacaaggcgccggcgcgcgcgttcgggccgagcgcccgcaggcggtcttgggttcgcttcacgccgggaaggggcccggcttggggcccgggggggttgaaggccagggcaagggaaagaaaaagaaaggggccaagttcgggaacctttccggaacccttgaaggcaaaaataaggaaggccaagaattccttggaagggacccagaaggacctggttcaaaaaacctttcatttgaattaattcaacaaaaagggtttaaccttggtaatttgaagaaggaacaccagggccaaaaaggtcaaggtaccggccacctggcctaattaaaaaggaggccccaattttgttaataagaatgccaaggccaatggtaaaacc

SEQ ID NO: 33200 - DNA, 1086 bp, Zea mays
  Clone ID: MRT4577_130288C.1
gttgatttctcttgtgctgctgtggtggtgtttgttcatctggtttggccttttgggtttatggcttctgtggaagagagctctcttcagtccactctaaaatggctgtagggtttcattagctgccgactcatccattcacctgccaagaaccatgggcaagcggtaggtctggtcttggtagccgagtgggtggcgcgggagctaaaatcaaactctacgctgtttacggttggactgaagggtgctcccttcaatttgcccaaacactcctcgtgcatgaaatcatctacctcagcaccaataataatcttgattagatgccccgtcgcaattaattgccgtatgctcatcagttctttctaagcagaaacaaattaattaagcttgattcgtacaatgcccttctcgtcctccttttttttttttgctaaatttagtttgttattgtttgaaaatagttctacaagtatttctggttcatttttgtggtattacatgcgcagcgtagtacttgcaggcacagtgtacgtactttctttcttgtccaggacagtactgagatcttcgtcttctccgcttctcaaatgatgggcgcattggctttaccacatctcaaatgtgtcatggatttgtctgtaaaacataatgtattgttgcttagatcatgtccagtacttcaaaaaaacactgattgtatactgtatactgcactgttttgagtttgaatatgtgtatgcagcatcggtaagctgctagattataccacaataaaaattgctctgggacttaaaaaaagctagctttactggtatagctcatatgctatagtgttgttgatgtgacaggagtctcacagggagccgtcgcaatttttcacattctctaaagcgaaggacaactgaagagtgaagaggcattatgttatttgtgattttgtgtttaagatatactttatttctctttgcaatccatgtttcaggatacaccaacactacttgacatgaaattgtttttacgtatttggatacaatacaatgtattagttctgtaaacttctttttaaatataattaccttttacttc

SEQ ID NO: 33201 - DNA, 401 bp, Zea mays
  Clone ID: MRT4577_130289C.1
gactaataactttttctcaagcaccagcagcaaatggtaagggcacaaaaaataatgcatatagagatcatagactctgctagcttactaaaacgccaggccaaaggatgcacctcaaacaaaaaccttcgaaggtgatcttgcgctcacatggagatgaaaccagagctgttccgccccacagagtgatgattaaatcgtgctggcctgatccttgttgatgatgacaccttcatacttgacctggaaccacttcatggaaccctccttggtcaccctatgctgaatacccaacacaggacttgcacctactgcggccctcgacgcgatacccagaaagctcaaacacaacgtagaattccatcccataaatgccagttgatggatcatacttgatacca

SEQ ID NO: 33202 - DNA, 1035 bp, Zea mays
  Clone ID: MRT4577_13028C.1
ttgggtacctcgaggccggccgggtgtaaatatccaaaaaatgtctaaatcgcttggtaattttgtcaccatacgaaaggttatagagatgtaccatccgctggctttgagaatgttcttacttggcacacactacaggtccccaattaactacacaatagaacaactcaatgtcacatcagacagattgtactacacatatcagaccttgcttgattgtgaagagatttgtcagcagcaacaaagcaacactggaaattcattgcctgctaataccttaaattacatccaaaaacttcatgaggaatttgagacctcaatgtcagatgatcttcacacttcagtggcattggctgctatttctgagccattgaaagttatgaatgatctgttgcacactcgtaagggaaagaagcaggacaaaaggctggaatctctttccgccttagaagagaaaataagagtagttctctctgttctaggattgctaccttcaagttatcatgaggctttgcaacagctgcgggataaagcactgagacgagcttccatcactgaggagcttgtggtacagaagattgaagagaggactgcagcaaggaaggcgaagcagtatgaaaaatccgacgagatccggaaggaattggctgctgttggaatcgccctcatggatggccccgacggaacaacttggaggccatctttaccacttccagaggaggaagcggtgcttgctaaaacatgatgtgcgccgactttaggatcgagtcgagtatataggggtgattaatcttgttttaaaaagttaaatgcgtctgctagcagaaataaatgtgaatttagttagttgctctagtcaagactacggctctttatctatactagatctatgcccgtgcgttgccacggaaaacacatgaaatcgttatgtgtggtactacaaatcaaacaaagtgaaaaacattaaatatttattcacacgatattgtaaataaaccaacatatcataacaaaaaaaaaaaaaaaaaagcggcc

SEQ ID NO: 33203 - DNA, 310 bp, Zea mays
  Clone ID: MRT4577_130290C.1
aaatgggcaggggctagactgacggggccaaggaactgcttttgctgcctccaccccacccatgagggctgcaggggctacaaaagagctgacctactgagaattctggaaaacaaggtctgggctctagcagtgtggcacttccgacagagcacgtgaccgtccagggggaagcagccattgtcatctgcctcaatcgacagtggcttcccgcagtcctgggaagaaggaagggttgagggcactggaccggaaggcccctgctctggctccacctaccccaccccatccagctccatcttggaattag

SEQ ID NO: 33204 - DNA, 514 bp, Zea mays
  Clone ID: MRT4577_130291C.1
cccatcaacagataggataataggataaagaagttagagccaaagaaaagacccgatgtgcttttttttttttccaatagaataaacccagtttaggggacctcctccattttgcttttgtcagcgcaatcctcaagagggggcatgtggggggaagcctccggagctttttggtcctcggggatgttaaggcccatattgggcatgggggggatggggttgcaaaaggggtggggatggggggggttaaagccagaagggagaagggccgtttcaaacgggtgtatgacgaggtccttaagggatttggtgttcttggcagcctggggacgcttggggggctcctcaatgagggcgttctgggggtggatttcaatggtttttttgggggacatgtacccagacttggtggaggtcctaagggctggggtttttttgatccggtctatgttggggggtcaaaccgtactttgggggtcaccagggaggaggggggaggccaccaggggggggg

SEQ ID NO: 33205 - DNA, 280 bp, Zea mays
  Clone ID: MRT4577_130292C.1
ctggtgcttatctgaaacaacatctaccattcaatcaggtacctgctatctaccggcaggactatctttcattgagccgactcgcaccataaaactatgctgcttattcacaacacctacagctaccaccattcaaacacctagctgacgtgagccctcttgccttcttaacacaacaacatgtgttgacgctctacctgcacgctgcgcctaacgctgacaccctattacaactgcaacaattgctggcattcaaccaacttgctttaacaaacccaac

SEQ ID NO: 33206 - DNA, 380 bp, Zea mays
  Clone ID: MRT4577_130293C.1
ctcacgctgtgcctggctctgtgagttgctatcgcatctgcaatgcacatgccctgccactgcgcgtggctgtacgccttgctcggcgctttctccggcctgaccaccatgatggccaccatcatgctgtacccctacccggagtacctgacgcagccgctgtgcaacccgctgtccgcggcgctctactacgcccggtgctaccagccgagcgccatgttgcacgcgatgcggcaacagttctggcagcagcacatgaagatgatggacatgcagaccgacgcgcagcagctgcagatgatgatgcagattgagcgtgccgttgaccgcagcagtagcctgtacgagccagctctgatgcaacatctgctgcagctgct

SEQ ID NO: 33207 - DNA, 772 bp, Zea mays
  Clone ID: MRT4577_130294C.1
cgaacacgcaggagagctgcgtatcattgtattaagaagaagggtctaaaaattagaccaattacaaacacaacagaaaaagaaatataaagaaaaagaaaaagaaaaaggagaagaaagaaagcaaactagaccagcctgcccccacaatctaaacttaaccaaccaacacccttcccttatgaggttaactactgaactcactcctagataccctttttggctagaacgaataccgggtaaggctttttaagtgaacctaaccagtcatgctgtgattctcattttattcggtgaccctgacggttttcctttccatgtgcttcatggattgcattcagcatagaaatttgtcggataaatcaacatgttgagtcattataccactgtctgataaaccattattttggtgcaaagagacagaaaatttaagcatagagaaataaacaaatggaaagggaaagaaaattatgtgcataccgcatatgaattttctcacgattaacgatatccatgtctgcatgataataatctgctgaaatacccctttcgcgcagttcttttgcaacctgttcacattccttccttgaaaagcagtatataattccagactcattatttgggtatgattcacttataaactttgtgatctcatcaatgacaacctttccaactggcgatttctcagacaccttataaaaaaggttgggcctgttaactgtgctgacaaacttgatgcatctcgggatgtggagcatctccattaaatcca

SEQ ID NO: 33208 - DNA, 316 bp, Zea mays
  unsure (1)..(316): unsure at all n locations
  Clone ID: MRT4577_130295C.1
cccacgcgtccgcggacgcgtgcgatcattcgtgcgctaccatctccgtccacctcatggatacatcaatcagcatgttctctaatcttctgcccatcgatgactctgatcaaattcttctatcttcaccaagcaacggaagattcaaaaatgatgccactgaacatattgctcttgcgtccttcaaccatgcaaaggacaataactatttctataatctntcatgtaaattattaacactcaatgtaatgcaaaaagtagcatatgacaaaagcttcaatcagcctttgtcttgcagaaactattcatccacttc

SEQ ID NO: 33209 - DNA, 279 bp, Zea mays
  Clone ID: MRT4577_130296C.1
tccacgcgtcggcacacgcgggcgcacggggggttttaaaatacatcgggggtatgtacgtgcagtggctgtgttcacgctaaacagcagcagcgtgtgccacacgactacacacctgattgcggacctgatcgtgaactcgctagagcacgagctggacatggaccccagggcgcaaggacatgatgcgcgcgctgataaagatgctggaagggagggcgcccgatgcccctagacttttcatactcagcaagctctactgcgggaccaacaatgtca

SEQ ID NO: 33210 - DNA, 398 bp, Zea mays
  Clone ID: MRT4577_130297C.1
cttggctctattacatatctccttgatgatgtcacagcatcggataaaaggtgcagacccccaaattgggccctcacagacatatacttggcaaggtaggtgcccggtgctcaacaaaccacccacagctgagaccaatactgacaccaacggcttttgaggaccaaaccacggccaaagacagatgattgtatcaggtccggaacactggtgtaggctaagcctcatattgtggccgaagatagaccacaccatgagtcccaagcaggcatctggtgattaaagccatgcaacactcggagctcagtacaaacatagtattgaagagaactgtgctggcaaaaaagggtgcgtatattgcaataagggacagcacgataactgggttcctttcatac

SEQ ID NO: 33211 - DNA, 263 bp, Zea mays
  Clone ID: MRT4577_130298C.1
tccagctcttccccaaacacccactaaccaacacgggtcccccctaagtttgtgaggcccccactaaacaaaaagtcaacgaacggcacgcccgctatgaatcccctcacgcaaaagaagcggacgcagactatcaaccacaacgaggcactcctgggcataacccaggacgcgtcatagcactccaagtttaacgactcggcctacatctacatcagcgacgtcccattacacctaaccgagggcgacctcctcgccatctt

SEQ ID NO: 33212 - DNA, 772 bp, Zea mays
  Clone ID: MRT4577_130299C.1
tccaccgcggtggcggccgcccttttttttttttttttcacatatatgacgactcagtgtgtatataaaccaatgtcacaatctttattacatgacaaaacatcttacaaaaataactaaataaaataaaccagattaagataacttctccacaccctagatctcatcgaacttatcatagtagtcctcctccagagatacttgttcttgacatctgtataggtcacattggagtgtaaagcacatgtatattgagttctgaaatccttatatttcccgtatacgaaatttctgtgcgtctgaccgtgccctttgccatagcaagttctcctgtccctccaacaatgctccactcgccatttattttggaagtcccttgtatttgtagcgtggacccattgaacctgcttccctggccgaacaccagcccaagggagtagtgccacatgtagtcggggtaagtggcgacttgaacgccggtgccctgaagatggccgacgacgttcgcgtcggcgccggcgggcccgtcggtgacaggccacgagaagacccaggtggtgccgattggccctcggttcactagagtggtcactccgttggtcccccgcccaccgtacacctccttgttgtacagcgtcatgttcagctcgctttggacgggggctatggagtaagaaggtggcgccatggccggtaggttgggtaggcagctgtcttcccttgtgttttctgaggaggagccgaggatcccggccggcctcgacacgggcag

SEQ ID NO: 33213 - DNA, 2125 bp, Zea mays
  Clone ID: MRT4577_13029C.1
cctcgagtctggccgggcacattggctccctcgaggccggccgggcctcgcgcgtactgccgcttgccggctaccagaaaaatggccgcggcggcggcggcggctaggcgtgccgctggccttctccctctcctcctatcctcgcggtccggtgctcgcatacccctccaccgggctgtatcccagatccctccgccttgctcctatcgcctactctcgcagcaagccaagcccttctccgcctctgcctctgcctctgcctcagcctccgcgtcgaatggcgcgaccgcggaaagaacccgtgagctgcatctgtacaacacgaagtcgcggaagaaggagcagtttcggccgcgcgatccaggcggggaggtcggcatgtacgtctgcggcatcactccctacgacgacagtcacatcggccatgcccgcgcatacgtagcctttgacgtcgtctacaggtacttgcgctatttggactatgaagttcgctatgttcggaacttcaccgacattgatgacaagataatcgcaagagcaaatcagctgggggaagatccttttaacttaagtaaaaggttctctgatgacttcttgttagacatggccaatcttcaatgtttaccaccatctgtggagccccgtgtttcagatcatattgatgagattataaatatgattaaacagatccttgataatagttgcgcatatgtagtgggtggggatgtttatttctctgtagacagttttcctgactacggagaattatctggtcgcaaattggtgatcatggagctggtataagggacgacttgttctgttgacttgagaacacaagctgattttgctctattaaaatgttttttcataattctctgctcccattagatctatagtagttactagctgaatgcacgtgtgttgtaatgaaaatatataatatgagtatactatgataacttattctcttggacatacatggtgccggggtgggtctctgcttcccactccatgagaatgagattgctcagagtcgtgcggcatgttgtgacagtaccataaattactggatacacaacggttttgtgaatgtaaacagccaaaaaatgtctaaatcacttggtaattttgtcaccatacgccaggttatagagatgtaccacccgctggctttgagaatgttcttacttggcacacactataggtccccaattaactacaccatagaacaactcaatgttgcatcagatagattgtactacacgtatcagaccttgcgtgattgtgaagagatctgtcagcatcaacaaagcaacactggaaatccattgcctgctaataccttaaattacatccagaaacttcatgatgaatttgagacctcaatgtcagatgatcttcacacttcagtggcattggctgctatttctgagccattgaaagttatgaatgatctgctgcacactcgcaagggaaagaaacaggacaaaaggctggaatctctttctgccttagaagagaaaataagagtagttctctctgttctaggattgctaccttcaagttatcatgaggctttgcaacagctgcgggataaggcactgagacgagcttccatcaccgaggagcttgtggtgcagaagattgaagagaggactgcagcaaggaaggcaaagcagtatgaaaaatccgacgagatccggaaagaactggctgccattggaattgccctcatggatggccccgacggaaccacttggagaccatctttgccaattttagaggaagcggtggttgcgaaaacatgatgtgcgccgactttaggatcgagtcgagtatataggggtgattaatcttgttttaacgctccccgcaagggattccaatacgacccatggacaccagttctagtcggtaatcatggatttgctatatgtgacgaacttgttcgtttgactttcattcataccggcttgtaatgcttctataatgttttttcataattctctgctcccattagatctatagtagttactagctgaatgcacgtgtgttgtaatgaaaatatataatatgagtatactatgataacttatatacaaaatgtatgttatcccgttaaaaa

SEQ ID NO: 33214 - DNA, 313 bp, Zea mays
  Clone ID: MRT4577_1302C.1
gggaccataaaattttttttttcacattcaacctttttacgaaaatttcacaaaacctactccgacgattacaggccacaagaaaaaaagggctcctttacatactttaatcaaggatagattgggacaaaaattctgtttttcctagaatagaccaacatgtaatgaagtttggccataaatactgggcaggttcctttgttccactgggaaatgcacacctgcctgccttattgaaaaccaagtttgggcaagggaccctggcaggaacaaaataccttgctgctgggtttaaacgatcagttttgggccc

SEQ ID NO: 33215 - DNA, 594 bp, Zea mays
  Clone ID: MRT4577_130300C.1
ccccccccggaaaaaaacctctttaaccccgggaaaaaaccccggggggttttaaaaaagtttccccccaaaatttttttcctttttgccctaaagggggtttatggttaactttccccccggggtttttttgggattctttggggtctttttttttaagggggtttgcacttttttttttttgcccccaaaaaggtttcttttccaaagccccctctaccccaatgccccccccattttttggggggtttcattctccttggggggcccctttttcccccccgggtttggccccctttctgggaatctaaattttcccattgggccttttggggggctttttttgggttttgggtccccccttttttattaaaaccttttttttccccccctttttttaatttccccccttggtatttgttttaaaaaggggtgtttgggcatttttccggggggggaaaattttttcccccattttttattgccccccttgcacttccgtaagaatccctttttaaaaaaatttccttttgatacccgggggcccttttttttttccccccttttgctgaactttctaaaggtttctttttt

SEQ ID NO: 33216 - DNA, 261 bp, Zea mays
  unsure (1)..(261): unsure at all n locations
  Clone ID: MRT4577_130301C.1
aagaccgggccgcccacgcgtgcggtccagatacaacatgaccgcctccctaaattctaagacgatacttcgctagagaatcactgctacctgtcccctaaatctcacataactactatggacctcacctaactaacggaacagcgtagctcacccggtaccctagactgacatactatccaaacacagccaatgctatattccagcacatctactattacaaatcaaaaaaaaaagnggagaaaatcgtgttgaaaattg

SEQ ID NO: 33217 - DNA, 237 bp, Zea mays
  unsure (1)..(237): unsure at all n locations
  Clone ID: MRT4577_130302C.1
ctcgagccggccgggccgggactcggcggtctccgcgccatccgtctcgtggcgcgtggcggcggtcgctcccggacccgaaacttttcttcaatagagttatctgttccgcgtccctctcccttccgacctaatcctcacacgtcgtcccttccgcccaccggagacggcaccgaacctggaccgcgtcgtccgtggncgatgtctcccgcgcgcctgcgccggagcgcgtctgtc

SEQ ID NO: 33218 - DNA, 1947 bp, Zea mays
  Clone ID: MRT4577_130303C.1
cattgggtacctcgaggccggccggggtgggcgtgccggccgggccgggatcatcgagtcatccatctaaacatccgatccgaccatggcggcagacgcacttcggggccttctccccggcgtttacgccgtgctgatggtaatcgccgtcacaagcgccgcctccagcgacgcgtcctcggtggtcgtcggcctcgccaaatgcgccgactgcaccaggaagaacttgaaggccgaggcggcattcaagggtcttgaggtggcgatcaagtgcaagaacagcaaaggcgagtacgagagcaaggccatgggcaagcttgatggcttcggcgccttcagcatcccacttagcacggacctccacggcgctgactgcgttgcacagctccacagcgctgcggggaacccgtgccccggtcaagaaccttccagaattgtgccacaatcgtcaaagggcaacttcgtcgtggtccctggaaagacagactacccatcgaaggaatgtgcgtccgcaaccctgtgtgggtcgatcaagaagcacctactagaccatttccacaagaaacctgtgccaccaaagccaaagccagaacctaagccagagccggagccgaagccagaacctaagccagagccagagaaccacccacctacaccaacatatggatcctcaactccgatctaccatcctccatctaggcagttgtttgacaagaaacacatgtttgatcacttccacaagcaccacgactaccatcacttctttgaccacttccacaagaaaccagttccaccaaagccaaaaccagaacctaagccagaaccaaaacccaagccccagccagagtaccactctccaactccaacatatgggtcgcccacaccgatctaccaccctccggctaggcatttgtttgataagaagcccttgctagatcacttccataaggaccatgactatcaccacttcttagaccacttccacaagaaacccgtgccacaaaagccaaagccagaacccaagccagaacccaagccacagcctaagcccgagtaccaccctccgacacccacatatgtttctccaactcccatctatcacccgcccgctgagacagaaatgaagtatgacaagaagcacttctttgatcactttcacaaggaccatgactaccaccacttctttgaccacttccacaagaagcctgtgccacccaagccaaaaccggagccagagccaaagccaaagccacaacctaagccagagtacaagccccccatgcccacatacgggtctccaactcctatctaccatcctccagccaagaaagaagtggcatttgacaagaagcacttccttgatcacttccacaaagaccatgactaccaccacttctttgaccacttccacaagaagcctgtgccaccaaagcctaagccggagcccaagccagagcccaaaccacaacctgagcctgagtaccacccacctacaccgacctatggatcaccgactcccatctaccaccctccggccaagcattgatcgatggagttgaatggtggtcagtgatcgacgtcgctagctaagagttgcatgtgtggtctagctagcgtggtttgcagtcctgcttttttgtttctacagaataaattatagctttatttgggtatgtatacttatttgtgtatcggttagtatcatataaatgtatgatttgagtgtgcgttgtttttaatatgcatgttctatgatgtactttattccttttaaaatattattatttatatgtagaaaaaaaaaaaaaaaaaaaaaaaaaaaaagatgtactttattccttttaaaatattattatttatatgtagaagttaaaaggttgacagctcgcgatctagaactagtaaaaaaaaaaaaaaagcggccgtagtgtgatttgcttcttttcc

SEQ ID NO: 33219 - DNA, 1790 bp, Zea mays
  Clone ID: MRT4577_130304C.1
gggaccctcgaggccggccgggcatcgagtcatccatctaacatccgatccgaccatggcggcagacgcacttcggggccttctccccggcgtttacgccgtgctgatggtaatcgccgtcacaagcgccgcctccagcgacgcgtcctcggtggtcgtcggcctcgccaaatgcgccgactgcaccaggaagaacttgaaggccgaggcggcattcaagggtcttgaggtggcgatcaagtgcaagaacagcaaaggcgagtacgagagcaaggccatgggcaagcttgatggcttcggcgccttcagcatcccacttagcacggacctccacggcgctgactgcgttgcacagctccacagcgctgcggggaacccgtgccccggtcaagaaccttccagaattgtgccacaatcgtcaaagggcaacttcgtcgtggtccctggaaagacagactacccatcgaaggaatgtgcgtccgcaaccctgtgtgggtcgatcaagaagcacctactagaccatttccacaagaaacctgtgccaccaaagccaaagccagaacctaagccagagctggagccgaagccagaacctaagccagagccagagaaccacccacctacaccaacatacggatcctcaactccgatctaccatcctccatccaggcagttgtttgacaagaaacacatgtttgataacttccacaagcaccacgactaccatcacttctttgaccacttccacaagaaaccagttccaccaaagccaaaaccagaacctaagccagaaccaaaacccaagccccagccagagtaccactctccaactccaacatatgggtcgcccacaccgatctaccaccctccggctaggcatttgtttgataagaagcccttgctagatcacttccataaggaccatgactatcaccacttcttagaccacttccacaagaaacccgtgccacaaaagccaaagctagaacccaagccacagcctaagcccgagtaccaccctccgacacccacatatgtttctccaactcccatctatcacccgcccgctgagacagaaatgaagtatgacaagaagcactttgatcactttcacaaggatcatgactaccaccacttctttgaccacttccacaagaagcctgtgccacccaagccaaaaccggagccagagccaaagccaaagccacaacctaagccagagtacaagccccccatgcccacatacgggtctccaactcctatctaccatcctccagccaagaaagaagtggcatttgacaagaagcacttccttgatcacttccacaaagaccatgactaccaccacttctttgaccacttccacaagaagcctgtgccaccaaagcctaagccggagcccaagccagagcccaaaccacaacctgagcctgagtaccacccacctacaccgacctatggatcaccgactcccatctaccaccctccggccaagcattgatcgatggagttgaatggtggtcagtgatcgacgtcgctagctaagagttgcatgtgtggtctagctagcgtggtttgcagtcctgcttttttgtttctacagaataaattatagctttatttgggtatgtatacttatttgtgtatcggttagtatcatataaatgtatgatttgagtgtgcgttgtttttaatatgcatgttctatgatgtactttattccttttaaaatattattatttatatgtagaagttaaaaggaaaaaaaaaaaaaaaaaaacagagcggcc

SEQ ID NO: 33220 - DNA, 599 bp, Zea mays
  Clone ID: MRT4577_130305C.1
ttcgggctagatcacttccataaggaccatgactatcaccacttcttagaccacttccacaagaaacccgtgccacaaaagccaaagccagaacccaagccagaacccaagccacagcctaagcccgagtaccaccctccgacacccacatatgtttctccaactcccatctatcacccgcccgctgagacagaaatgaagtatgacaagaagcacttctttgatcactttcacaaggaccatgactaccaccacttctttgaccacttccacaagaagcctgtgccaccaaagcctaagccggagcccaagccagagcccaaaccacaacctgagcctgagtaccacccacctacaccgacctatggatcaccgactcccatctaccaccctccggccaagcattgatcgatggagttgaatggtggtcagtgatcgacgttgctagctaagagttgcatgtgtggtctagccaacgtggtttgcagtcctgcttttttgtttctacagaataaattatagctttatttgggtatgtatacttatttgtgtatcggttagtatcatataaatgtatgatttgagtgtgcgttgttttc

SEQ ID NO: 33221 - DNA, 313 bp, Zea mays
  Clone ID: MRT4577_130306C.1
aactcttctaaaaagtcttcctcttttgctccccgtgctacatggaattggtaccgtaaatggagagcgtggtacaaaaacaataacaacgagatgttgtgcaccgcgcgctatgtttgaattgccaatagcgagactgagagagtgttatgcctaggatgtaagatttgtgcttacagtcattgattaccttctttcgtgatagctgatatgtgttaggtataccataagctaaaaactcaagcagaatgtaagtggatgtgtagagccaaaatcaatgaatcctcatatacttctacctaggctccactta

SEQ ID NO: 33222 - DNA, 1748 bp, Zea mays
  Clone ID: MRT4577_130307C.1
gccggccggttcgggatcatcgagtcatccatctaaacatccgatccgaccatggcggcagacgcacttcggggccttctccccggcgtttacgccgtgctgatggtaatcgccgtcgcaagcgctgcctccagcgacgtgtcctcggtggtcgtcgggctcgccaaatgcgccgactgcaccaggaagaacttgaaggccgaggcggcattcaagggtcttgaggtggcgatcaagtgcaagaacagcaaaggcgagtacgagagcaaggccatgggcaagattgatggctctggcgccttcagcatcccacttagcacggacctccacggcgctgactgcgttgcacagctccacagcgctgcggggaacccgtgccccggtcaagaaccttccagaattgtgccacaatcgtcaaagggcaacttcgtcgtggtccctggaaagacagactacccatcgaaggaatgtgcgtccgcaaccctgtgcgggtcgatcaagaagcacctactagaccatttccacaagaaacctgtgccaccaaagccaaagccagaacctaagccagagccggagccgaagccagagaaccacccacctacaccaacatacggatcctcaactccgatctaccatcctccatccaggcagttgtttgacaagaaacacatgtttgatcacttccacaagcaccacgactaccatcacttctttgaccacttccacaagaaaccagttccaccaaagccaaaaccagaacctaagccagaaccaaaacccaagccccagccagagtaccactctccaactccaacatatgggtcgcccacaccgatctaccaccctccggctaggcatttgtttgataagaagcccttgctagatcacttccataaggaccatgactatcaccacttcttagaccacttccacaagaaacccgtgccacaaaagccaaagccagaacccaagccacagcctaagcctgagtaccaccctccgacacccacatatgtttctccaactcccatctatcacccgcccgctgagacagaaatgaagtatgacaagaagcacttctttgatcactttcacaaggaccatgactaccaccacttctttgaccacttccacaagaagcccgtgccacccaagccaaaaccggagccagagccaaagccaaagccacaacctaagccagagtacaagccccccatgcccacatacgggtctccaactcctatctaccatcctccagccaagaaagaagtggcatttgacaagaagcacttccttgatcacttccacaaagaccatgactaccaccacttttttgaccacttccacaagaagcctgtgccaccaaagcctaagccggagcccaagccagagcccaaaccacaacctgagcctgagtaccacccacctacaccgacctatggatcaccgactcccatctaccaccctccggccaagcattgatcgatggagttgaatggtggtcagtgatcgacgtcgctagctaagagttgcatgtgtggtctagccaacgtggtttgcagtcctgcttttttgtttctacagaataaattatagctttatttgggtatgtatacttatttgtgtatcggttagtatcatataaatgtatgatttgagtgtgcgttgtttttaatatgcatgttctatgatgtactttattccttttaaaatattattatttatatgtagaagttaaaaggtttaca

SEQ ID NO: 33223 - DNA, 287 bp, Zea mays
  Clone ID: MRT4577_130308C.1
cccacgcgtccgcggacgcgtgcgttagaaaaagggcaggtgaatttagcagggagtctgtgcagcacaaaggtgcatcaatcaacgcgtgtgtgacggacaggacacacatgattgatgaagctcgtgagcatttacagaagagcatgatgatctgactgggatgatgaattatgagggcaactctaggggatgcttacttgagggacaatggccctgtacaactaatggaggatgctatatctttaaggccctagcttgatcttatactggaatagaaagaggtg

SEQ ID NO: 33224 - DNA, 663 bp, Zea mays
  Clone ID: MRT4577_130309C.1
tattcggcacgagggctgaaacattcatgtccaccagctgaactagtttttgcatgcgcccctggccctctcatacctttcttgtactgacattagcttgaaagaaacgatcactgttcgatcagcagtttgcgaggcatggatggcgagggagagaggcgcatggtggatagcgagggacagatacacatggatccggcgttgtacatggcggcgacgcaggggaaagtgtcgatcctgaagcagctggcggatccggaggaacccagtgtcctcagcgccacgacgccccagctgaacacggcgctccacctcgccgcggtgcacggccacgccgagttcgctggcgaggtcctgggcatgaacgaggagctgctcgtcacccggaacggcgacggcgacaccccgctgcacctggcggccaaggcgggcaagctggaggtggccaggctgcttgtcaaccgcgccatagcgtggccggaggacaagaagagccctctcatcatgaccaacaaggcgggcaacaccgcgctgcacgaggcggtgcagtaccgcaagggcgccttgggcggtggtcctgctagacgccgaccccagcccgcggcacgacctcaacgagcagatggagtccccgctgcacatgggccgccgcgagggcctcgt

SEQ ID NO: 33225 - DNA, 312 bp, Zea mays
  Clone ID: MRT4577_13030C.1
aacacaaataatgacaagggtttaaagataaatgtcataaacatttttacattggggaagggtcttacaaaaataaatgataccaataaagcgaactaatattttttccttggccccataaagctgactgggagacccctcctaaacaagctcgccccccttataataaacccccccctaggctacctgcttttaacctatgggggtttatttatcgcaggggggagcccacaaaaaatcatagctcaacaagttggggggaataatgggcatgaacccaccaaaggggggagcccatttgaagggtaaggg

SEQ ID NO: 33226 - DNA, 285 bp, Zea mays
  unsure (1)..(285): unsure at all n locations
  Clone ID: MRT4577_130310C.1
cacgatcgagcacacaagcacgaatactcgtttaggagaaaccacaaaccaccaanccgggcaagggttatttagtacggtgagctggggcatctcgtccacggcgccacggaccatgtctaccagtacggcaacccagtcggtggcgttgagcacggcaccgttggcttgaggcactgcacgggaaccacacgtgttattgtccatctgtgttagcacggttgctctgacatagttggcgtgcagtttcagcctgttagggaggagcacaagaccggcggcatc

SEQ ID NO: 33227 - DNA, 157 bp, Zea mays
  Clone ID: MRT4577_130311C.1
gaggagggctgacattacatttattacccccctggcaaaacatgcttatggagaaaagatagtacaggcctacccataccaactagtccctcactactatatactaggagggccgacccctgggcggacccgtgggcggacacctgggcggaccccg

SEQ ID NO: 33228 - DNA, 405 bp, Zea mays
  unsure (1)..(405): unsure at all n locations
  Clone ID: MRT4577_130312C.1
ggggggaaaagaggaaattttcactttaaagatacaattcctgggacctggctggaaggcccataaggggaatccattacaactaaaaaaacgggcttttttttttaccaccccccccccaatttttacggccacatgtttaaaactcatgcctttttggaaaggagggggggggggcacaaaaactagctagttaaacggccctaggaaaaagggaaaggggtttgttcctgggaagaataagcccaaacggttaatccatgctaaccttcccgccaccggttttttttttattggggaccccccaancaaaagggtacatggggggggggaacataatctccatgggccgaagcccgaaagttggccccgggggaaaatccggggcccaaaaccaaagggggg

SEQ ID NO: 33229 - DNA, 389 bp, Zea mays
  Clone ID: MRT4577_130313C.1
ttcactcgtcctaccactcgtcctcggactcgtgggttttttttttttttttggttttttggtgtttttttttttgtttttttattttttttttatatttttttttttttcaaaaaagggacaatcaaattataaaaatttgcaagttcaattacaccaataaaattattttactaaggaaaaattaacaaaagtttaaagaaaggtaaaaaaccgaggataaaataattaaagccttcaaaaaaattttgtaaaatttttaaaataatcaacttgatctagaaattgatgaatacctgtttatataatctgaatacaaattttattttacaaataaaacttaacattaatctaaaaaaaaacaattgaataaaatttggttaatttat

SEQ ID NO: 33230 - DNA, 455 bp, Zea mays
  Clone ID: MRT4577_130314C.1
agcgtccggagcgtgaagccaaggggtacgacctcggcggccgttatattggctactggctcccgaccgggagcaaccctcgactccaccgggggcggccgctgcggcgggggggctaactgtaccctgctctgctgtggcaccactgtaccgctggggacccccacaagcgatcctctgagaacacccgggcgccggcctgcgcttgctggcccggggctccgcgttggccagcagttatggtccttaccatgtcccgatctatgataggctccgttcgcatacgccccgcatagacgtgctagtttataagcttgggcggtattgctttcgttgtcccctccttgcgggcttgtgtttccggtggtttaccccttgcatgccggcttctgggtgcgtgtgttgttggtgctcgggatgccggtggggttggatctccaccttcgtgttttggg

SEQ ID NO: 33231 - DNA, 410 bp, Zea mays
  Clone ID: MRT4577_130315C.1
gaacttgcacacttcctgtgtaactgttggatgccactctttactgcacatgcacaaggtatggcttaataaagcgctatgggtgaggatgggtatctctctctcttctcttgtccatagccagtcaatgatgttcataccctggcagtaaatgagaaaaaaaatcccagccccatgaatttgatctgcccagcgatgacaagaagcaacctcttcagaaccagagcggctgagcaggcctgtcttggggcttgtttggtgttcaaccaccactgattccttttcttttgtcatcctattttgaaacttccctagctgtattcagtccattttttgtgaactattctgagagtactattctgaacttccaaaaaaaaaaaaaaaaagggcggacgccgactagtgagctc

SEQ ID NO: 33232 - DNA, 668 bp, Zea mays
  Clone ID: MRT4577_130316C.1
cattgggtacctcgaggccggccgggacaccacttccagatcccaccaccaacgtgcccgagcacgagccaccacaaggttaaatgaggggagcaccatccatcgactatcttaataactcagcgctacgtcgctaaacatctccctacccacattgcctctgctgactgactctccatatctatggttgcctcggtcggttgcctcgcgccgctgccgccctgatgacagcggatcctgatcctgagctccgatgtaggactctctggacccgccttctactgacgatacaaaaacgacttcatcctcctcctccccctcaccgacggggggaacacgggcttctctcttcgttaacgcctccctgtctgtgatgctggccacctgccctttccctcctatccatctgcccaaggctaggatccttctgaatgacggctcgtgctgaacaacgaccctggaatttgcttgcagatgaagaagtccgttctttctactctgaatggtgcactcaatctggtgaaggatggacctacacgactgatccacctgaagaatttgactcttgtcctagcaaagagactggctactctgtaccggcgacattgcctctattgcaaagaagttacatagacctgactggtagctcaatagcagcctgaagtagc

SEQ ID NO: 33233 - DNA, 563 bp, Zea mays
  Clone ID: MRT4577_130317C.1
tcgagtaccacctctgcagagtataaaactgatatatcagccgtgctcccggttatgagcgacctagactcctcacatgataattgaacttgaagacggaattaaattgagatccgatgatctgccaataatttgcttaagtggtttcacttaagtgtttttgttatattcatattcctttgtttaaatgggatatatgggattcacacttattagtaagacaggtgttgttaataaaatattgaccaactaaaatgcttactgcttaaccttagcctcaccttgttatacctgcattaatttttcccccacttgctgagccccgaccataagtgagctcacccttgctaatattttgatcagagggtgatgctggaaactttgatggagattttatcgacgaggaaattctaagtctaacgatgcgccggtcatcttcctgtgggagattgcccagttgtttatttccgccttactttgatgtgatacttgttaaagatacaatgtttcagatgatgtaataaagtattatactctctttacgcctttattgcattgtcttt

SEQ ID NO: 33234 - DNA, 322 bp, Zea mays
  Clone ID: MRT4577_130318C.1
cacatatataaagctgttcctgtgcaattgcgacacgtatatttctataataccacgccattaccatccatctctttgacttttatgcggagaatatacaccaggagggtccattgaatgaatatcggatcctgatcctaaggacacccttacctgattaagaatcttgtagctactttaagtggtatatgctctaagtcttaccctctcctctatgctgacatgctactactctcttcattcagcgaataactatgctattctgaagtatattactattatatacattatctaaatcgatccactttaaatgagatagaga

SEQ ID NO: 33235 - DNA, 1387 bp, Zea mays
  Clone ID: MRT4577_130319C.1
gaagcaaaacggatggccccgagaggcggccgcgaggaggctagttctggctccgaggatgaggaagaggaggccgggttctccaggagctacttcctggccaaggagaaggagccgtcatccgtgaagaagcgcgcccgcgccgccgcaggcaagctctccgacctcaacctcgtcgacgagcaggtgttgcgtgcatcccttgcacagatccccccgaagcacaaggaagaggtggagtccctaacgagaagctacaaggaccagtaccgcaactggctgttcgaactaagatgcggttttggtctcctgatgtatgggtttggatctaagaagcagttactcgaggattttgcctccaccaccttgactaatttcactgtcgttgtaatcaatggctaccttccggccgtcaatttgaaacaggtcatagcaacaatagctgaaatgttctgggatcaaacaaaagctaaacgcaggaaacgtgcaggaacaaggtcccagttgtcacagcagtttccgtcacaatcaacagagggtatcatctcattcctaatgagacagacatctgacgatgtggatgatcacgtgtgccttcttattcataatattgacgggcctgctttgcgtgatactgaatcacaacaatgtctagcacaaatttcttgctgcccacaaatccgtgtcgttgcatcaatagaccatgttaatgcccctttattgtgggacaagaagatggtgcacaaacagttcaagtggagctggtaccatgtcccgacatttgcaccttacaaagtcgaaggcgtgttctacccattgatccttgctagtggtggtcacgcccaaaccacaaaaactgctcttgttgttctgcagagtctgacaccgaatgcacaaagcgttttcagagtccttgctgagtatcagttggcaaatgagaaggaggaaggtatgccagtcagcagtttgtatacaaaatgccgtgagcgctttctggtaagcagccaagtgacattgaatgcacacctgacggagtttaaagatcacgatctggttaaggtcaggaagcactctgacgggcaagattgcctccgcattcctcttgtttctgacgcgctggagaagttgctgcaagaattggcttgacattttgcattagcgcatttatttttcatggatgatggatgggttcactgaagtatttgtagttttctctgcccacgtggaactgaaggatcttgtccttattgaaggaaaatgtattaccatggaaagaactcagatgagcatgccattgcatggattatttataactcggattccggaactgaaagcatgttgcatgaaccgctctgctttgttggcttaaaaaaaaaaaaaaaaaaaa

SEQ ID NO: 33236 - DNA, 765 bp, Zea mays
  Clone ID: MRT4577_13031C.1
cttcatgatgaatttgagacctcaaatgcagatgatcttcacacttcagtggcattggctgctatgtctgagccattgaaagttatgaatgatctgctgcacactcgcaagggaaagaaacaggacaagaggttggaatcgctttccgccttagaagagaaaataagggtagttctctctgttctaggattgctaccttcaagttatcatgaggctttgcaacagctgcgggataaagcactgagacgagcttccatcactgaggagcttgtggtacagaagattgaagagaggactgcagcaaggaaggcgaagcagtatgaaaaatccgacgagatccggaaggaattggctgctgttggaatcgccctcatggatggccccgacggaacaacttggaggccatctttaccacttccggaggaggaagcggtgcttgctaaaacatgatgtgcgccgactttaggatcgagtcgagtagataggggtgattaatcttgttttaaacagttaaatgcgtctgctaaccgaaataaatgtgaagttagttagttgctctatactacggttctttatctatattcgtaagactgtttctagcaacattctctaaattttttcctctaaggaatattttctgtcatatacatgatactctaaaaagatttatatctatatcttctctgtctcgaaaaaaaaaaaaaaaaaaaaaaaaaaaaaaaaaaaaaaaaaaaaaaaacaaaaaaaaaaaaaaaaaaagcggcc

SEQ ID NO: 33237 - DNA, 539 bp, Zea mays
  Clone ID: MRT4577_130320C.1
cttaaaaaaaaaaaaaaaaaaaaaaaaaaaaaaaaaaaaaaaaaaaaaaaaaaaaaaaaaaaaaaataaaaaaaccaaaaaaaaaaaaaaggcttgtaaaaaaaaaaaagttttttcttgggccgaacccccccttggggcgatttttgcggttttccttccccttgggggccgttcccccttccttttgggggccccattcccccctttggggggccgttttccatttaatgggccgtgtttttccacctcccgggccttgggaaaaccccgggggttccccaatttaaccgctttggaaccaatccccttttccccggttggcttattttcaaaagggcccgccccgttcgcctttcccaccatttccccacccttattggaaatgggcccccccttgtggcggccctttaaccccggggggtgggggggttccccccagggggcccgtttcttttgccaggcccctagcccccgttcctttggtttttttcccttcttttttcgccacttgcccggtttttccccgcaaaccttta

SEQ ID NO: 33238 - DNA, 386 bp, Zea mays
  Clone ID: MRT4577_130321C.1
tggctttggacctttgggctgatttatgtgcttggctaccttatccttattaactcgctctttaactccctccgtcgtcttaacgtgtctcgcccatctggttagtggaaggggagaggagggtgagacgatggcggagaaggcggatgtggggtcccttgatcctgatgtttatcctgactgttctcctgtccgtttggatgttgatcttgatggtaaggcgaagtcgtcgtctccttcggttgattgtaagttcggtcttctttctcttcggcgttttgatcgtaatgcggtggagttggcgactcatgagtggtcggaggtatcggaaggtaaggatgtggcgtcttcgtgtgttcatgctggggataagtttatccggtgtg

SEQ ID NO: 33239 - DNA, 694 bp, Zea mays
  unsure (1)..(694): unsure at all n locations
  Clone ID: MRT4577_130322C.1
cccagcgtccgcctttctctcttcgttcccaattngaagctgcccaacccttgcgccggtaggtggtggcggtgaggatagnaggttnacctgagnagcagtgatggcggccacgattcagtacaaccggnacaacccggcggtgaagcggatcctgcaggaggtcaagnagatgcagtccaacccctcacccgacttcatgtccctccccctcgaggaggacatcttcgagtggcaatttgctatccttggtccgagagacagcgagtttgagggtggaatttatcatggcaggatccagctaccttcggattatccattcaagccaccgtccttcatgctacttacgccaagtggacgctttgagattcagaagaagatttgcttgagcatatccaattaccaccctgagcactggcagccttcatggagtggtgagtaggggtggtaatggatcaagatccaaatgttttttcacaatacgttagggcccttaattaattttagttcaaaaatgaatagtaatagagctccatcctaatccgatttgatccttaaaatttatagtgtaaaatctagagcccattaccacccctattggtgagtaatctttagtcatttgtttataaggctattctcaatggggagtttatgttgtttctaagactgccgcatcatgtaaaaaataaaacat

SEQ ID NO: 33240 - DNA, 196 bp, Zea mays
  unsure (1)..(196): unsure at all n locations
  Clone ID: MRT4577_130323C.1
acgggatccaaaatccaccacgatgagcatctttggccggccgaaagccgcgggccccggcgggcaagaagccgaagtggaagcccttatcccggccgggccagaagccgtgctccttaagctcaaagggaactcccacctcgtcttctcgggctncagcccttctttcgctcgacgcggcggaactcgatcccct

SEQ ID NO: 33241 - DNA, 250 bp, Zea mays
  Clone ID: MRT4577_130324C.1
gggtacctcgaggccggccggggaccccggacccctcccgcctcccaaatctcgatcggtcggcgccagctagcctcgcaaggttggatcatctcatatcatctaggcagatgaccacgatcctgcacatcatggccagggaagatgattcaaccagagtgcaaccacgtgccgggaggccgctgtgcgatgagatgtgcattgtactgaccgggaggacacagtgccatgtcctagcttgataccgagc

SEQ ID NO: 33242 - DNA, 618 bp, Zea mays
  Clone ID: MRT4577_130325C.1
cgggctcttcgttccaatttgaaggctgcccaacccttgcgccggtaggcggtggcggtgaggatagagggttacctgaggaggcagtgatggcggccacgattcagtacaaccggagcaacccggcggtgaagcggatcctgcaggaggtcaaggagatgcagtccaacccctcacccgacttcatgtccctccccctcgaggaggacatcttcgagtggcaatttgctatccttggtccgagagacagctaccttcggattatccattcaagccaccgtccttcatgctacttacgccaagtggacgctttgagattcagaagaagatttgcttgagcatatccaattaccaccctgagcactggcagccttcatggagtgcccgcacagctttggtagccttgactgccttcatgccgacgaacccaggtggggcattgggctcactggattacaaaccagaagacagacgagcacttgctataaaatcacgtgaggtgccgccgaaatttggctccccacaacgtcagaaactaattgatgagatccatgagcaaatgctcagtaaggctcctcctatcccccaaacgctgccaaatgtgccaaacgaggagct

SEQ ID NO: 33243 - DNA, 377 bp, Zea mays
  Clone ID: MRT4577_130326C.1
acctgaggaggcagtgatggcggccacgattcagtacaaccggagcaacccggcggtgaagcggatcctgcaggaggtcaaggagatgcagtccaacccctcacccgacttcatgtccctccccctcgaggaggacatcttcgagtggcaatttgctatccttggtccgagagacagcgagtttgagggtggaatttatcatggcaggatccagctaccttcggattatccattcaagccaccgtccttcatgctacttacgtccgcacagctttggtagccttgattgccttcatgccgacgaacccaggtggggcattgggctcactggattacaaaccagaagacagacgagcacttgctataaaatcacgtga

SEQ ID NO: 33244 - DNA, 3348 bp, Zea mays
  unsure (1)..(3348): unsure at all n locations
  Clone ID: MRT4577_130327C.1
ccggccgggtaagtcgggtcgcagtgagccaccagcatgccccctcgtcgtgtgcgggcgagaacagggggtgccattgaaatccttgaccttttcgttattcgggacaatctaagggcttgggggattcattgggttgttatggtggttttcttggccttcccgggtgaagtaatccaccggagcaccagtaattgctcaccggagatagtgctccgccgtgggccgccatccgtcgtcaaccaagcatggcgcgacattattcaagcctgaggtttcgtgtcatctgaagagcaagttggtacctggaatctcaagtcccaggtcaagaacaggtaccgcaagatgaggtgcatggtggttgctgcgatgtgttcgtgagaggtctaggccgtcgtctcccagtcaactttgggttgctggaccgttgtctccttataatgtaattatttatttattttgtacaaaactcctattatatagtaaagatgtgacattcgatccaaaaaaaaaaaaaaaaaatttgcggctaaaacgactaatattctcggccgcgtcgtgtcgtgtgtctcgggaccggccgggctctcttcgttcccaatttgaaggctgcccaacccttgcgccggtaggcggtggcggtgaggatagagggttacctgaggaggcagtgatggcggccacgattcagtacaaccggagcaacccggcggtgaagcggatcctgcaggaggtcaaggagatgcagtccaacccctcacccgacttcatgtccctccccctcgaggaggacatcttcgagtggcaatttgctatccttggtccgagagacagcgagtttgagggtggaatttatcatggcaggatccagctaccttcggattatccattcaagccaccgtccttcatgctacttacgccaagtggacgctttgagattcagaagaagatttgcttgagcatatccaattaccaccctgagcactggcagccttcatggagtgtccgcacagctttggtagccttgattgccttcatgccgacgaacccaggtggggcattgggctcactggattacaaaccagaagacagacgagcacttgctataaaatcacgtgaggtgccgccgaaatttggctccccacaacgtcagaaactaattgatgagatccatgagcaaatgctcagtaaggctcctcctatcccccaaacgctgccaaatgtgccaaacgaggagctcgcacctgactcttgtgatgagcatgcagacaaggtagatgaaggtggcaacacatccaagtccatgtcaggctcgtcgagtggccatcctgtgcctgaagctgaatcgctggctgcagaaaacacgggtgaagcatcagcagttgaggttgccaaccatcaagtgcctgaagcgagccgtagagaaagcattccaagagttccttcgtctctgcagaatgctgctattgcaacccagaagccaaagcatgacaggctattgaccttggccgcatttgggttgactcttgctattatggcactagtgatcaagaagttcttaaaaatcaatggcttgggcggtttcattgagggcaagttctgagtaggattgtgcataagttggatgtacgagatgactcattcctcgtactcagcatatgctataagctatataaccccgtaagatttgtaattgtttagttatagatgaaatcaaaatggaacggtactatcaataccccattgtatatgtacactggattgaaaattgctgagtatttaagcatctgatgtatatattgtgctacagcatgcactttgttaaaaaaaaaaaaaaaaaaacacccgactgaccggtgccacctcgcccaagtcaactgctccgcttgaagcagggacctggcatgcgtgctggtgctgcaatggatggcaggaggggagaggaataagaagtgtttccatttcacagtgagagcagtcgagctccaacgttgtcgtcgtcgtcgttttcttttgatattagtactctgtcagagatgtctcattcctcatactaatatgctataagctatataaccccgtaagatttgtaaatgactgtttagttaaaatggcagaaaaaaaaaaaaaaaaaaaagtgtcgttcgtttgtctgccattatgaccagaaaaacccacgcgcggacggggggagtaggggtggtaatggatcaagatccaaatgttttttcacaatacgttagggcccttaattaattttagttcaaaaaatgaataggtaatagaggctccaatcctaatccgatttgatccttaaaatttatagtgtaaaatctagagcccacttaccacccctattggtgaggtaatctttagctcatttggtttataaggctatttctcaatggggagtttatgttgtttctaagactgccgcatcatgtaaaaaataaaacatggataaagcatccatcctcactgcatagtttcattctatggtttcaaatacatttacttcacgacttatagagtttgtaattgtgcccagagagttctctcttaaaaatgttgccacgtcattaaaaacgcttatgtggcaccctatttaatacaaatgaaactcacataaaacttccacctagattggcctaaatggccgctgaagtgctctgtcagatttgctaaagggctcctgtattaagctgaaaagcaccattattcatcgcccacttttatatggttttgtgggctattacgagcatggtgcaaaataaatttgttttttcttttggtctttggatttccatcaggcaagtacttgccttttggctagaccaaaagtaaatatgtttcttcattcctaagatgaatatatgaataatactctagttgggtactaagggttggtttgcttctgagagtatttattaattttgtatgcttctttgaaaatgagcttggtgttgtatttgcaaatcatcagatggtgactatatgggaatgtatttggttacccaatgtggaatggtttattttcatgattttgtgttaacagaagttttaacctttaagggtctgtttggttgggctgtggctgtgaaaaaagttgctgtgggctgtgagctgtgaaaaaagctgctgtaggctgtaagctgttaaaaagtccgcacagctttggtagccttgattgccttcatgccgacgaacccaggtggggcattgggctcactggattacaaaccagaagacagacgagcacttgctataaatcacgtgaggtgccgncgaaatttggctccccacaacgtcagaaactaattgatgagatccatgagcaaatgctcagta

SEQ ID NO: 33245 - DNA, 333 bp, Zea mays
  Clone ID: MRT4577_130328C.1
gcttttataatctggtttgcgcaaaccccagaccgggagccatatatgtattccatggcccaaaacagcaaaccacacgacgtaaaaagccattccatatttgaatcagacatggacaccacctgctacaatggacacacattcaacactcggtggccgttacactaagcgtaacaccaacaaattgctgtactgctaccataagcagcacaccttcccatagaccatacaaaataccgagaggccataacagccgataggtatgatgtagaggccgtcggcctgcctttctagctccaggttggcgcctgcgcaaaccaacttataaaaacc

SEQ ID NO: 33246 - DNA, 426 bp, Zea mays
  Clone ID: MRT4577_130329C.1
catacaaagcacaataatataccaacaattgcttccaaaacattctgcttccttatgcgactggatctttctgcaagtgtatgctacctgatccatgtacatacattgctcacacgctactatagcttccattcttacaccatacctttgaccacctgtgtcttcaatgcgtgaaaccccaattgagcaaccttacaggatccaacactctataacaacaggcattttaccatgatcacccttgttcctacaacaaccgatagccctattacatcaaacacttctgatccatatgtttgcacaaaacatcatggcacaacatctacaacaacatgctctagcaaatcttgctacatactctcatcaacatcattctcgtgcatgcaactaactactttcattgcactcagctgcttattttcaaca

SEQ ID NO: 33247 - DNA, 375 bp, Zea mays
  Clone ID: MRT4577_13032C.1
caaggaaaaacccaggtttttctggaagggtcgtttttaaaaaggacatagcccttatgacctctttttgggggaaaggggggaagaccccatccatcgaaatgaataagttgaaaggggcgagttgggaaaaaacccctaaataaatagggaggttgtttttgtttcccaagtttacaacctttacaatgaaaatttgacccggggggggtttaacaaaaccacccttttggagcctggggggaaccctttgccccccatagggggccaagacgatgatgccatcggtcaaaggagctttgggacccgggggtaaaacccctggttgggtaaacgggagggggctttacagggtcccacaattaaatcttggaa

SEQ ID NO: 33248 - DNA, 348 bp, Zea mays
  Clone ID: MRT4577_130330C.1
gccgcatatccctatttgggcgctgcagaatctctggcgtgtccttatcctgctaccttgtcccgtttaatcggaacacatgccttgatgtaggatgcatcatagctgcgatacgctgctcgcgtagggtgtaacgggcggtgtcgtctagtcttctccgtccgtctcttcatgcctcggtaacgcacgaagcaaagtggaagtcataatgaagggcgcccaaaccacgtattgggtcaatgcccttgactcggtattatgcgggtaaaagtagaatctgcacgttacaggcctgaggcgccccatactcttaatgctagggacacgctacatgccattgatgtgggc

SEQ ID NO: 33249 - DNA, 248 bp, Zea mays
  Clone ID: MRT4577_130331C.1
ggatgatccatacatttacgccttcgacagcttgaagtacattggcattgagctgtggcaggtcggtgttggatagtcggatcttctctctcttgttcagaaggacataacagttatgcctctttttttgtttttctatgtacaggttaaatcgggcactctgtttgacaacatcatcatcactgatgaccctgccttggccaagacttttgcagaggagacctggggcaagcacaaggaggcagaaa

SEQ ID NO: 33250 - DNA, 183 bp, Zea mays
  Clone ID: MRT4577_130332C.1
aggcatgaacaacaccggcaatagatacttggaagcacaacaacctgcccccttgtctataattatcttgggaacttgcgacacaacaaagtattcaatgttggcatatagcatacatgatctccccactgctttctagggcaagatcgacatctgagtctagggcctctatgtcatcattga

SEQ ID NO: 33251 - DNA, 325 bp, Zea mays
  Clone ID: MRT4577_130333C.1
tagccttctaaattatttttgtggcccaaaatactattggcgtgctacaattctctaatctgaatcacaatctatgactaactcatcttcgtagacatccttttggcactcctaatcgttaaccttaccccatcagttgtattgtcccgcatgacacttatcaccaactgccctagtatcaggcgcttatgcttcacatgtaggctgcgagaattgcctacactcagactgagacttatcccacttactgtcctaacacgccccctgtaccactcgggcggcctgagacataaacccatcctctacctcttaagcacataatggc

SEQ ID NO: 33252 - DNA, 161 bp, Zea mays
  Clone ID: MRT4577_130334C.1
cccacgcgtccgcccacgcgtccgcccacgtttccgatccggtcacgagaggagcgtttagtaggaccagaaccggatttggtcacatcaggtgagcatctttgtctcggtcgtctgatttgactgttctaatccatgtttgctagtataatcttcttttt

SEQ ID NO: 33253 - DNA, 505 bp, Zea mays
  unsure (1)..(505): unsure at all n locations
  Clone ID: MRT4577_130335C.1
tgccactctttctttcaacgatgacacgataacatcacatcttcgtaataaagtatgtcaagaacaaggtattgaactagttttgctccgttttctctatttgagaattgagcacacattgtgcaaattcttcattatgttcaggaagaggccatagcaacgttgttgtagcgatagaggatgatggtagtatagtccctatagtttatatcttcacaattacttcattcatccgtttggacaatcaatgatgtcctgcaattcactcttaaaacgaaactaatgatttgatattgttagaaatcaaaataaatcattaacaactattataagggccagcgaaaatacactctcacatgtctaacctaactcttacaagtgtacttgctaatgcaaaatagtgagcgggtgcaaccaaatggatgcttcgtgatatttgtgagagtgtgccaccaatattgcaaggatcttttncctgtactgttctaaatatatggagtttgga

SEQ ID NO: 33254 - DNA, 893 bp, Zea mays
  unsure (1)..(893): unsure at all n locations
  Clone ID: MRT4577_130336C.1
ctcgaggccggccgggccgggatatttcttcttcttgcaagaacttaccttctactttcaaaccaccaacaaacttccagcgaatttggatgtctaccgcagctactaaacaacaacctgagatcacaaagtgggcctctaaagacggagagttccgtcgacaagtgtcttcctttcgcgattttgtcagtcgcgataaaaacgcacgcttcgccgctgaaccagatcgttatcacttgtacatttcttgggcttgcccatgggctcatagaactgccatagttaggcaattgaaaggactcgacaaaattatcgggctttcggtagttgattatttgttgctggataagggatggaaattctcaacatccgaggagacacctggcgctatccctgacaatgtgaaccatgcaaactatattcgcgaaatctatttcaaggctaatcctgactatgagggccgcttcaccgtaccggtcctctgggacaagaaacatgccacaatcgtgagcaacgaaagttccgaaatcatcagaatgttcaacgaggagttcaatgaattcattgatgaagataaaaagaagctaaattactatcccgaaaacttgagaagtgacatcgacgcactcaatgaatgggtttatgacactgtngaataacggtgtctacaagtctggatttgctactaaacaggcagcatatgaaaacaatgtgtatccattgttcaaatcgttggatagacttgaaaagattcttgcaganaatgagtatttagttggtgggactttcactgaagctgacatcagactgtnggacacaatcgntagatttgatcccgtgtatgtaggtcatttcaatggcaattgagacgattgaaaagatatcccacattt

SEQ ID NO: 33255 - DNA, 353 bp, Zea mays
  Clone ID: MRT4577_130337C.1
ggcgctcgccgtgaggggtcgaaggtcaaccccctatcttccacctcgggggactgcctacccggcggatcgacacataggctttattgggttcccccagacctgcaagtacgcggcgagctagacctagcaaccgctccgtgtcgaccttgggggtgttgggagtaaacatcactgcacaacgcaatacgcatgatgtgctatcaacgtgtggccaaccgaatggaacaccatagccctagccctaacaaacaacaggtggagcactcagctgactgggatacagaggaggcagcaggtgcttccaatttcaatgcagggttgggcgtgaaccaaagcttgcactggaccca

SEQ ID NO: 33256 - DNA, 1182 bp, Zea mays
  Clone ID: MRT4577_130338C.1
agcaagctgtaaaaacagccccgaaccgaagaactgttctcctgcgttcgtttctcttctcgacggggacgaccgccagagccgccgccttacgtccagctgccacggtacttcatcgggccctttgccggtgcaggcggcgcagcacccaccgcaccaggctataaatggcaggaaggcaccgggcaccccgacaataccatgatgaacctcgaggataccgtgatggtccaccacctccacttccacgaccaagacctctctcaccgcgtcgcatggcagaggaactgtctaggcgccgtgctgagatccgtagaatccatgaggacaatcagcgtctggcggatgaaattgttagtctcaagcaaaccatgccgcgtttgcaagaagacctccgaatctcaagccaggctgttccaaagctccgggcagagaaagagctcgagtcgagggagctgactcagaggaacctgaagctggaagctgagctgcgtgccttagaacccctcaggcaagacgctctgcatctgcgatctgaagcaagtaaactgcagtctctgaggcaagagttggctgcgaaggttcaaggcctatcaaaagagcttgaacttcagaagtctgaaagccagaaaatgactgctttggtagctgaacgtgatgcgctgtgtcaagaactgctccaggctagggcgaaccttgagtttgagaagaaggcgaagccagagctgactgcgcaggttcaggcaatggagaaggatcttgtggctatggctcaggaggcggagaagctgagggctgatatcgcgaagagaaatacacctactagtttcagcagccgtggaacgtatggagcctcgttgtcgactcctgggatgggtttgcaaggcatgtatgatggcggcggctattctatggctgggagccgctacggcagtggcactggggcttggagctcgcacgatccccatggctacccgcatctttaactgtgcttctgaccggtgtttcctcctgaacagctccctgagtaccttggctaagtttcttgtagtagtataactacccttcctctggtcaatacacaacaatataccaactttggttgtcttggttgttttttcccctactgcacacggtgacgctgttgtgagcattagatgtttggccactcggccgttttgc

SEQ ID NO: 33257 - DNA, 729 bp, Zea mays
  unsure (1)..(729): unsure at all n locations
  Clone ID: MRT4577_130339C.1
tctcttctcgacggggacgaccgccanaaccgccgccttacgtccagctgccacggtacttcatcgggccctttgccggtgcaggcggcgcagcacccaccgcaccaggattctgattgctcttcattaggctataaatggcaggaaggcaccgggcaccccgacaataccatgatgaacctcgaggataccgtgatggtccaccacctccacttccacgaccaagacctctctcaccgcgtcgcatggcagaggaactgtctaggcgccgtgctgagatccgtagaatccatgaggacaatcagcgtctggcggatgaaattgttagtctcaagcaaaccatgccgcgtttgcaagaagacctccgaatctcaagccaggctgttccaaagctccgggcagagaaagagctcgagtcgagggagctgactcagaggaacctgaagctggaagctgagctgcgtgccttagaacccctcaggcaagacgctctgcatctgcgatctgaagcaagtaaactgcagtctctatggctgggagccgctacggcagtggcactggggcttggagctcgcacgatccccatggctacccgcatctttaactgtgcttctgaccggtgttttctcctgaacagctccctgagtaccttggctaagtttcttgtagtagtataacttgtggtgcaccattgctacccttcctctggtcaatacacaacaatatacc

SEQ ID NO: 33258 - DNA, 315 bp, Zea mays
  Clone ID: MRT4577_13033C.1
atagaattataatatttattattattttatagattaattaaaacaatatagctcgcgagcctgaacaagccgtggcttaaagtttttttttttcagccctagacctagacaaaatagagggtgacaataataataatgaacaaaacttggcagttcgactaacggacacgacaaccgaccgacgcaacgactgaagctactgaagaagcagtgagccgaggaccaccaccattctctttttattaaggcgagctatgctaattctaatcacgtcgtcttgactagagcactttatctttgggtctttcgcctatt

SEQ ID NO: 33259 - DNA, 2491 bp, Zea mays
  Clone ID: MRT4577_130340C.1
ggattgaaggagatgatgcgcgcgatacagcagctggcacgttcgttacatgaacgtgccagctgttcgagctgttcgatcgtagcccgggagcacgcatctgttcccgtctcctcagcctccgtctcaaactcgcccggtcatcccatctccaccaccacatccgtcctcttccgccgccgccgatggcccgcctcctcacacaaaccctcaccctagcccgtcccgccgcctcctcctcccccaccgccgcattcgcctccctccgttgcctcgctaccaaggtcgagatcgtcgagatcgacctcaccgaggaagacgctggctcctcggcccacggctcctccccctcgtccccatcgatcgaggtggttgggatccggcgcctggaggaggccatccacggcgtcatggtgcgccgcgccgctcccgattggctgcccttcgtgcctggagggtcctactgggtgcccccgctgcgcctcccgcacgaggtcaccgcgtttgtcggccggatcgcggcctcaggaggcgcctccggggtcgccaagttcatggacggtgtcgcggcccctgggggcgccggggccgttggcggcgcgttcgaagtcgtggaactcgacgacgacgagctcatggaggaggaggaggaggaggcgctttgcttctccaccacgcgcggctggccctcggcctctttcttcgtccaagggaaatctccggatacaaggaggaaatctaggaaaggtgcaattcaaactgatgatgaagaaagctgattcgtttgtgctatgttgcaaggggctcctaaaaggaaacgcagtgcagagtttaatgactgccatgatcaatgtacatttggatgggaatgagccatttgctggtaaaccatggcacctgctactgttgatgttgcctcatccgacctggtcgcacgaggttgaaaacaaaaatcggcccgataggcacgccgagagaagcaagctgtaaaaacagccccgaaccgaagaactgttctcctgcgttcgtttctcttctcgacggggacgaccgccagagccgccgccttacgtccagctgccacggtacttcatcgggccctttgccggtgcaggcggcgcagcacccaccgcaccaggattctgattgctcttcattaggctataaatggcaggaaggcaccgggcaccccgacaataccatgatgaacctcgaggataccgtgatggtccaccacctccacttccacgaccaagacctctctcaccgcgtcgcatggcagaggaactgtctaggcgccgtgctgagatccgtagaatccatgaggacaatcagcgtctggcggatgaaattgttagtctcaagcaaaccatgccgcgtttgcaagaagacctccgaatctcaagccaggctgttccaaagctccgggcagagaaagagctcgagtcgagggagctgactcagaggaacctgaagctggaagctgagctgcgtgccttagaacccctcaggcaagacgctctgcatctgcgatctgaagcaagtaaactgcagtctctgaggcaagagttggctgcgaaggttcaaggcctatcaaaagagcttgaacttcagaagtctgaaagccagaaaatgactgctttggtagctgaacgtgatgcgctgtgtcaagaactgctccaggctagggcgaaccttgagtttgagaagaaggcgaagccagagctgactgcgcaggttcaggcaatggagaaggatcttgtggctatggctcaggaggcggagaagctgagggctgatatcgcgaagagaaacacacctactagtttcagcagccgtggaacgtatggagcctcgttgtcgactcctgggatgggtttgcaaggcatgtatgatggcggcggctattctatggctgggagccgctacggcagtggcactggggcttggagctcgcacgatccccatggctacccgcatctttaactgtgcttctgaccggtgttttctcctgaacagctccctgagtaccttggctaagtttcttgtagtagtataacttgtggtgcaccattgctacccttcctctggtcaatacacaacaatataccaactttggttgtcttggttgtttctttcgatactgcctcatccgtccttggaagataaatctgtaaattcggtctgaatctcaggcgggttgttgtatcaacaagtcctggcacaaagccttcgttgtaataatataagcattgcatggagctgtgtgctgaatgtgtgctacggtactttcaatactgggctcagcatcaatccagaagatgtactctaaacaaagattctggatggcttcttgtgccaactaggaacaatgtaaaatttatgcaagcatttctgctcactcctgatctatgtaatactaagctaaaagcttaaagggcttaagggcttgttcgttttaacgttaaaaaaaaaaaaaaaaaataatatt

SEQ ID NO: 33260 - DNA, 298 bp, Zea mays
  Clone ID: MRT4577_130341C.1
aaaaaaaacgtttacaaggcccagcgagcgatcaaatcaattattcagtggggagagggcaatcaagtgatatgtattacaaacccttactgaccaacaagacttgacaacaaacctacacctaataatattaagctactaacaaaagatagagaattacaccctacaaaacctatggtttctcaatgttatcgggcaacggcgagcaaaaaggtggcagaccttgttacagtttgctataccgactgacaaaaaaaccaaaaccaagtccactggtccaaccaaccaatacacatgg

SEQ ID NO: 33261 - DNA, 211 bp, Zea mays
  Clone ID: MRT4577_130342C.1
acccacgcgtccgcggacgcgtgggcgccctcttgttccttatcgacatctctgttctcgttgagctgacggtatattccaacggtaggttgtaacagatgttcctacacccacaaattacctacatgacaatgtctttcgcccggatcgctcctctgtggccggacgttttatccaacacgagcggcactgcaccaatgaggacccacag

SEQ ID NO: 33262 - DNA, 195 bp, Zea mays
  unsure (1)..(195): unsure at all n locations
  Clone ID: MRT4577_130343C.1
gcgaaagggtcnaatatcaatgggatcgtaaatatttttcacgttttttgtatatacctaaacaagcagctggggggcgtactactgatctgttagatctctaacaccttttttgtttttgagaaacctctaggttatttgacatatgctaagcttaagtgctatatatatcatgttgttggagttcctcacctt

SEQ ID NO: 33263 - DNA, 246 bp, Zea mays
  Clone ID: MRT4577_130344C.1
catcttgctatgacaaaacaagtacacttgtaccaacatcacattattgtcgtagccctataggagatggattattagttatgattcaatagtagaaatatataggatgatgcaagttacctcatagaactaagaagttatattctcaattatattgagatcagatctgggatgcgaactatctagaataagctgagataagacataaggggcaatataatatggtgatgttgtcacttgaagcct

SEQ ID NO: 33264 - DNA, 1305 bp, Zea mays
  Clone ID: MRT4577_130345C.1
ccggccgggccgtctaaagcccgggccatccgccttgcacctccgccgcctcctcccgctctccaccacctccacctcggcctctgtccccgcgccccagttccgaaccctagtgtccgcggcggccaccgatgcggctgcgaccccgccggaggaagtgtcggcgcccgccccggctggtgtgaaggtagagaggttgcagccgctgcagtggccgcccagggatgcgctgtgcagcgagctgggcgccggggacgctgggcgcagggtaaggctatgcggctgggttgcgctacgccgcgcgcacgccgggctcaccttcgtcacccttcgagaccgctccggcatggtgcaggtgacagtgttgccagagtacccagaggtttacaacatagtaaacaagctgagggtggagtcagtggttgctgttgaaggcgtgatccggccacgcccggtggatgccatcaatgcagatatgaggactgggactatagaggttgtggcacatcatgttctagtgctgaactcagtaacccggtcactgccgtttccagttacaatttctgatactgtaaaagagaagtttccagaagaaattagattgagttgaatactgtaggtttagaatgttgggacttgtgtcgtccacaaatgcagtcaaatttgcggttgcgccataatgttgttaaactcatacgccgctacttggaggatgaacatgaatttgttgaggttacatgttccaaggtagattgagactcctgttttgtccaagtctacacctgaaggtgctcgggagtcgggactatcttgtaccatcgagagttcaggaggcattgcctatggattggatcggttggtgatgcttttggcgggtgagagctcgatccgagatgtgattgctttccccaagaccacgactgctcagtgtgcactcaccgaagcaccatcagctgtagaaccacagcaactgaaggatctcgccttccccaaacctacttcgtgagacgctgttcatgtgttcatgacaaaaattccgtgctctcaaggacagctatagtttgcttcttctagtttttgagtgtattggcctattctatttttgcatagtatagaatgcccagtttttggcccgtgaatccgtgataaatttgtagaagatgcttaacatgccaaagttttggaagagtattgttttaaaagcggtgcttatgtgtttgtgcttgtgcccaaacttaaaaaaaaaaaaaaaaaaaaaaaaaaaaaaaaaaaaaaaaaaagaaaaaaaaaaaaaaaaaagcggcc

SEQ ID NO: 33265 - DNA, 2537 bp, Zea mays
  Clone ID: MRT4577_130346C.1
ctgggacacatatagagctcttttcttaggagcttctttgatgaccacaaatggaagaactttactattgaccacctgatgttagggcaacatctgttctcatctactggaataggctgaatcaagacggatgcaagatgcaaaaatcaatctgaccctgaactgttgcttcatatgtaagtggctataagcctaaaacatacaaatgcatatctgcatattggcttttttctatgcttgagaaatggattccagtctgaggtaagacgcctgagatcatcacctttttttcaacatggctttttggtaattgttttgctaatcttctattacaattttggtacatgtctaatttaacaattctgtattgtaatagtccttagtccttataatatttgatgtttagagaattgtattttgctgtttcatttcggctagcttttgttgcctgtcttttcttagaaatatatgagtttgtgtgggtgttaaaacacttaaagctgatgagaccaagatgccgtcaaaacctgagaaggctcgggtccctatgaatggttttcgcaaaaggggctgataacaaaccacctcaagccaacactctcacggtgcaactggtcagccggacacgccaaagaagcggtctgctgggccagcccgggtttgagttgcggcatcaacttcttaagtgaaaaattcagggggacgtctctcccatctctcgagaaaaaaaagaaaaaaacaaaccacctcaaagtttctgtcatgaaaactgaagattttttctatcattactttgcgcttatcttatccttgtcttatcaatgctgctgtcttttactgggtccagttctatttaaagtatgaagattatacaatcacaaagggtcaggaagaaaagtgatcgaaaacttcatcaaatttatgctgctgaacttgcaaatatagattttgcatatgatggtggctggtgacagtgttgccagagtacccagaggtttacaacatagtaaacaagctgagggtggagtcagtggttggctggttgctgttgaaggtgtgatccagccacgcccggtggatgccatcaatgcagatatgaggaccgggactatagaggttgtggcacatcatgttctagtgctgaactcagtaactcggtcactgccgtttccagttacaatttctgatactgtaaaagagaagtttccagaagaaattagattgaggtttagagtgttgggacttgtgtcgtccacaaatgcagtcaaacttgcggttgcgccataatgttgttaaactcatacgccgctacttggaggatgaacatgaatttgtcgaggttacatgttcaaaggtaggttgagactcctgttttctccaagtctacacctgaaggtgctcgggagtcgggactatcttgtaccatcgagagttcaggtgcgacttcagctatcggctcgctattcacagtttatatgatctggactgcgctcattatgatagcaatcatgctttcagttctcaactctcatagatcgtgttattaggcagaggagaaatttggctaccttttagaatgcttcgacatgggtgctcctccacatggaggcattgcttatggattggatcggttggtgatgcttttggcgggtgagagctcgatccgagatgtgattgctttctccaagaccacgactgctcagtgtgcactcaccgaagcaccatcagctgtcgaaccacagcaactgaaggatctcgccttccccaaacggccaaacctacttcgtgagacgctgttcaagtgtttatgacaaaaattccgtgctctcaaggacagctatagtttgcttcttctagtttttgagtgtattggcctattctatttttgcatagtatagaatgcgcagtttttggaccgtgataaatttatagaagatgcttaacatgccaaagttctggaagagtattgttttaataggggtgcttatgtgtttgtgcttgtacttgtgcacaaacttaggccttgttcggttaatcctgttacctatggattggatgtaattggaaaaaattaagaatgagtttgacttagtcttgcatagtatagaatgcgcagtttttggaccgtaataaatttatagaagatgtttaacacgccaaagttctggaagagcattgttttaattttgccgtagcgaaaatcataagtagtgctcagaagattgggaaggagtaggcccggtttatcttgttcattcatgattccccttgtggagtgaagtggaatgctaaagatagaaaagtgttccgtaggatctcgtcttagcccattgacaaaactagtccaagaaacccagattgctaagtctcgagtatgtcaatcaagccctaatgtttccattccgccggaccaactagcctaacctttcatagaatttatcatttatgcccaagggacaagaggttttgaactctctagtagttccaagtatgctcatttccttggatgtgtattcactaatgttgtgactggaagg

SEQ ID NO: 33266 - DNA, 1797 bp, Zea mays
  Clone ID: MRT4577_130347C.1
cggacgtttggggaactcagtaactcggtcactgccggggccagtttcaacttctgatactgtaaaagagaagtttccagaagaaattagattgaggtttagagtgttggacttgcgtcgtccacaaatgcagtcaaacttgcgggtgcgccataatgttgttaaactcatacgccgctacttggaggatgaacatgaatttgttgagattgagactcctgttttgtccaagtctacacctgaaggtgctcgggactatcttgtaccatcgagagttcagccaggaacattctacgctctccctcaaagccctcagctgttcaagcaaatgttgatggtttctggttttgaaaaatattatcagattgcaaggtgcttccgagatgaagatctgcgtgcggacaggcaaccagagtttacacaacttgatatggaggttgcttttacatctatggaggatatgttgaagttgaatgaagatttaatgagacatgtttttcaagcggtaggagatatcaagctgccaaacccttttccaaggttaacatatgcagaggcaatggatcgctatgggacagataggcctgatctccggttcgattgggagctgaaagatgttagtgatgtatttttggggagtagcttcaaggtttttgctgatacattggaaagtggaggcgtaataaaggcactgtgtgttcctggtggtgccactgttttttcaaacactgacctgaagaaaggaactgtttacactgaagcttccaaagctggagccaagggcttgcctttcctcaaagttatggagaatggggagcttgaaggaatcggtccactgttatcgagtctgaaacctgaaaagaaagaccagctcatggaacttctggacacaaagacgggtgaccttatcctgtttgcactgggtgaacaatcatcagctaatcagattcttggacgggtaagattatttattgctcataagctagaggtgatagacacgtctgcacattcagttctttgggtgacagattttccaatgtttcaatggaacagtgatgagcaaagatacaaggccctacaggatactttcactgcaccaaatcccgaggatatggacgatctaccatcagctcgggctctggcttatgacatgatttacaatggtgtggagattggagggggaagtttgagaatctacaaaagtgatgtacaacaaagaatttttgagatcattggtatctcgcctgaacaggcagaggagaaatttggctaccttttagaatgcttcgacatgggtgctcctccacatggaggcattgcctatggattggatcggttggtgatgcttttggcgggtgagagctcgatccgagatgtgattgctttccccaagaccacgactgctcagtgtgcactcaccaaagcaccatcagctgtagaaccacagcaactgaaggatctcgccttccccaaacctacttcgtgagacgctgttcaagtgttcatgacaaaaattccgtgctctcaaggacagctatagtttgcttctagttttcgagtgtattggcctattctatttttgcatagtatagaatgcgcagtttttggaccgtaataaatttatagaagatgcataacacgccaaagttctggaagagcattgttttaattttgccgtagcgaaaatcataagtagtgttcagaagattgggaaggagtaggcccggtttatcttgttcatccatgattccccttgtggagtgaagtggaatgttaaaaaaaaaaaacccccccccc

SEQ ID NO: 33267 - DNA, 309 bp, Zea mays
  Clone ID: MRT4577_130348C.1
aagatccgatttcccacatggaggggccgttgtcgtgaggttctttcgtgggtggcttgcgctccacgtgactgcaccgactggggatgctctccggtccagagtagccgcctcttctgtgtgtgcgagccacacacataccggagcgggcgttccgagggcgggggatgagctgcataaaggtcgttaggcccctgttggtcgtgcgggggcgggagagatcctacattttattcatgctctcgctcagggagctcgcacttaaggatctggagggccttatgccggcctagctcatccctatggagt

SEQ ID NO: 33268 - DNA, 975 bp, Zea mays
  Clone ID: MRT4577_130349C.1
ctgccgtttccagttacaatttctgatactgtgaaagagaagtttccagaagaaattagattgagttgaatactgtaggtttagagtgttgggacttgtgtcgtccacaaatgcagtcaaacttgcggttgcgccataatgttgttaaactcatacgccgctacttggaggatgaacatgaatttgtcgaggtaggttgagactcctgttttctccaagtctacacctgaaggtgctcgggagtcgggactatcttgtaccatcgagagttcagattttttgagatcattggtatctcgcctgaacaggtgcgacttcagctatcggctcgctattcacagtttatatgatctggactgcgctcattatgatagcaatcatgctttcagttctcaactctcagtttaagaaaaagaaaaatttttagttcgcctgattaggcagaggagaaatttggctaccttttagaatgcttcgacatgggtgctcctccacatggaggcattgcctatggattggatcggttggtaatgcttttggggggtgagagctcgatccaaaatgtgattgctttccccaagaccacgactgctcagtgtgcactcaccaaagcaccatcagctgtagaaccccagcaactgaaggatctcgccttccccaaacctacttcgtgagacgctgttcaagtgttcatgacaaaaattccgtgctctcaatgacagctatagtttgcttctagttttcgagtgtattggcctattctatttttgcatgcatagtatagaatgcgcagtttttggcccgtaataaatttatagaagatgcttaacacgccaaaaaaaaaaaaaaaaaaaaaaaaaaaaaaaaaaaaaaacaaaaaaaaaaaaaaaaaaaaaaaaaaaaaaaaaagaaaaaaaaaaaaaaaaaagggccccaagagggaggaccccaaacgaaaaccccgggtaccccccc

SEQ ID NO: 33269 - DNA, 516 bp, Zea mays
  Clone ID: MRT4577_13034C.1
cattgggaccctcgaggccggccgggattctttgacagttgttgggttgtctctacgaatttgttgaggcttatagttattagattttaagcacaggattacatctttgtgcgcgcgcgcgtgtgtgtgagacttaatgtattaccttttaggctgtctgaatatactcatggtccggtgttgtttgtagatttagataatgatccagaacctgattatgttactctattcttcatcgagcgtcttccccggatcaacctattcttcttatattgcttgtatagtcccgatgaggctcagagatttcctatactggagtttagactagctcctgaccgcgcgagcgtggacgctgacttatcctacatagtcgtatcacggcttgttatgtccatcgcctttctattgaatttcgactaggtggatattgactcccatgaaagctcatgcgactcaaacaagctctcaagagagtgacattgcacttgtctccttctagtcgaatggaatatatat

SEQ ID NO: 33270 - DNA, 202 bp, Zea mays
  Clone ID: MRT4577_130350C.1
ctcctttgtataccccacccttgactaactcctagctggttctatataggcggggggaggaaacatttagaccgctccagccctgccaagatcttcattggcggtctctccaaggatacatgcatgactacatccaaagaacattttacgaagtatggccatataacatattctgtcatattcatggacccattcacacaaa

SEQ ID NO: 33271 - DNA, 127 bp, Zea mays
  Clone ID: MRT4577_130351C.1
gtgtggttggtttttaagaatctagaaatggacttgcttatttctgggaagccgcaaacgtgtgagcactgtcctggtggtgtggctgtgactcatgagaaatctaagagggggcacctccaatgat

SEQ ID NO: 33272 - DNA, 173 bp, Zea mays
  Clone ID: MRT4577_130352C.1
ctcatacgttcggcacctagaggagccgtcgagcacctttacatctacaccaggatcgataacgtcaccagcaagaggcgacgggccagccactgcgtctatgccgacgcacagcgcgcgcgatcgtgtaccaatgcgctagtgcagggaacagttacgcggtcgctcgagcc

SEQ ID NO: 33273 - DNA, 314 bp, Zea mays
  Clone ID: MRT4577_130353C.1
cggaattccgcaggccagacagttctcggactcgtactctcacacttggagaatccatctcgtgctagatggaacatctccgggctggaataaacttcagaccgggtctcacgatgctgggagtataagctatgcccgccactaagcacaattctacgtcgcttgacaaacttgcactgcaccacaatctgcacacgactgattatcactcacagcttatcactacttgcaccaacataacgattctcgtgctaaggtacgtattcatcatctacctacagtcattcggagcgactacatccatgaagctccaa

SEQ ID NO: 33274 - DNA, 360 bp, Zea mays
  Clone ID: MRT4577_130354C.1
gccctatatcctagtatatgtcgcctgatgccctcctaccttagattcactcgtatacacgcacaccccttgaggttctttgcgaggggcatagaaaggctcggatgtcatgtccggactgcgcagacatgatcactataatctttactcacgcactctcactcacacacactctaaaagagggcgccaccaatgctcagttgatggcacagcacgttggagacgccaagataagagaaacgtgaatagactcaattggtacgaagaaaaaacggttaccagaattggtcatttcattcacttacaacctagaccattcagagtatctcaaggaagcaagggggctagcacaaggtagct

SEQ ID NO: 33275 - DNA, 281 bp, Zea mays
  Clone ID: MRT4577_130355C.1
ttttctccctctcccttgtgtggtttttttgaaaaaaccggcccttcccccccccggcagggttattaccaaaaccacttattacgacgcaaaactaaaaccccacattatttgagatgttacactatgcatcaacaaaccatggcaacatgcctccggtccagttacctttgcacgcaacgaacccctttcatacctatccccccttctggatggtatcccatgaatccttgcgataacgcctcaacgtcctagtggccaacagacgggcaaatccagat

SEQ ID NO: 33276 - DNA, 155 bp, Zea mays
  Clone ID: MRT4577_130356C.1
agcgaatcgtaccgcgtggctatggttccggtgcgcctctgcaatcggacgcgcagctaggctgggcatgaagggaaccttagcggcccggaataggtaccggacggagatggcgcacggggctcccgaccccgggaagctcaccaaagtacgat

SEQ ID NO: 33277 - DNA, 203 bp, Zea mays
  Clone ID: MRT4577_130357C.1
ataaaaaacatggaatcatttttttttatacaacatgcagaacagcatagaccctgggagactgcactacaagagcactaaccgatcctagctataaaacattacaggcaaacagcatgcagagaaggtagatcaaacaaatcacgttcatcctttagaaaaacatgacatttagtaccttggagatctgccataaatcctac

SEQ ID NO: 33278 - DNA, 1134 bp, Zea mays
  Clone ID: MRT4577_130358C.1
cacgcgtacgcggcggaaacgaagtatctcaggttgcgtggtgcgacaaaccgacaagccaacaatggcgtcgtcagctgctacgaccgcgaagctgatcgcgctcccgccggcgccaacacgcggcggctgctgctgctggaggacacgcaggcccgcgatccccgcggcggcggcgcgcctcaaggtctccgcctccgccgcctcgtcggacgtgccggacttcctctcgtccaattggcttgaaacccgcaagagaaagcccttcggtcccaggttgaattttagtgcagaagaagcagtcgaataccagcttgagtccttaaagtacaatgatctgccccgcccagattatgggatagaggtcatgtaccggtttgcaggctttgaccccttcgagaggtcaacttactttggacgacagtttgatctaggacagttcgagcgcttccggcgtctgtttcaccactcaacctacagagtgctgctgggccacagagagagaagaatattgagcagtttatgggttgaagagaaccagttcaagcaaagagtttggatacaaggagcccgtcccgaggaagaagagatatttcaattcacaatggttcagagggtcggaggatcatgggatggttactggctgacagagagcttaataaacgatggagacgcgttctcgggtgggattgcttactgatgtagtgatgattggtgtaaatcgatcaggtgcagactagcaggtggcgtgaaaaagctgagagacatgttggtgtgtagaatttgccctggctttctggagatgtttggcagtgtcggacacgctagtattgtacaggaagacctctcacggcgcccatagcaccagatggccaagcatgcatatctgtggaatacttttctgttgtacgcctgctgcttgcctggtttggtaagaggaagacggcgctgcacatcttgcgccttcatctgcagcgagttacggcgcggttctttcttgatgtcctctcctttctgtgtaaagtgcttcgagttttggccactgcctcttttcacttttacgtgtctgttgtttggtcgagacgtcgagtctatggtgtcgccagcagctcctgcatgcactctcgcgaccta

SEQ ID NO: 33279 - DNA, 323 bp, Zea mays
  unsure (1)..(323): unsure at all n locations
  Clone ID: MRT4577_130359C.1
tccgaaaaaaaagggggggaggaaaacaaaaaaaaaaaccagaaaaaaaagaaaaaaaaaggggaaccaaaaaagaaggaaacagggggggcgcgacacaagaaaaacggagggccgccccgacgggcgggcaccaaaacacccctgggaagggggagacaaaacganaggcagtgccctcgtggaagacgangaggggggggaaaacacgggcgctcagcaatatatgctcctgggcacgcctgacatggtcgggggggggcanagctatatggaggcgacgggggtgaaagataagcggccgctcccgggttgtgttgaaa

SEQ ID NO: 33280 - DNA, 1137 bp, Zea mays
  Clone ID: MRT4577_13035C.1
atggttccagaagatctgttgtcagagccggcagatggtggcgtgatggatgtttgtgctgatgtgcccgatgccgggttggggtcatcccgggcagcgtcccgcgcctcatcgaccttagagcgtggtcctgagggtcaggaggctggtctggattgcactgttcccacagaagtgactgagggtccttcagccttagaggtggctgttgcagagaacttggccctcaaggatggtgctggcgcttacctagcccccgagggtgttgccggagatgatccggcttggatgggtagcgcaagctgtgacccagcccccgagggtgtccgagtgggttctccctcccacacttccatggatgttcacgtagggtcttctcctccacattctggttgcatggcgatagcccaagccttgggtcaaggagtcgttttagaggccagcgcacctgatgacagagttctattttctgctgatgacactgaattggttcccactgatgcattgcgggttgttccgacgttggttgatgaaatggttgatatggctcgacggtattctgatcttgaagaaaaatgttctcaaggtcagactgaactggcccgggtttctgcttctctgaatgatgctaacatgctgagctccaccctccatgctcagctcgactctagaaaggacgaaaagtgtgccctcgccacttctcgtgacaatcttgacaagctatatcgcgatgccagcaattcgttgaccatcttggagaggagtcatcgcttcaccagggaggagttggataatcatcgttataagctgcaagagtcattggatgatgtgattcgcctcaggcagttggtgtcgaccaaagatactgtcatcaaggatctgtgtgcttccaagaaatcagtcgtccaggagctagaaactgctcggttggctgtcaaggctgctgaagatacttctgctactctgagggcccggcacgacagagctatggacaaagccattcgtgtaggacggatcttgatgaggaagcccggcgtggttgttcctaacgacatagtggcagatgtgaatgccgctcctgaatcctcaagtcgcccctcttcgtcggttgctcctgagaagaacattgtcaaatag

SEQ ID NO: 33281 - DNA, 399 bp, Zea mays
  Clone ID: MRT4577_130360C.1
attcggctcgaggggagcttgcttgctagcggttttcaagaggttgggcagcatcatggacccgggagacgaatggaattgcttgaagacagtggtagctgcaagcaaaatcaacgcatggaccactacgctgctccagtggtaagagcgctcaggcctcacgggggccagtatcgatacctacgaacacagtcgacttctgtgattctttgagatcagctctgactgtgaggtcacatccgaggcgctgacctacggtaaagagagacagctcgtgcaccaagcggggatcagaccgtgattgcatacagcgtacgtcactgagggggggccattcctagacgtcatcgccgcacatgcacccgcggttgccatgggacaagcacaagaagtcggggg

SEQ ID NO: 33282 - DNA, 427 bp, Zea mays
  Clone ID: MRT4577_130361C.1
ggggcgcacaggaggagagaggggggaattattataaaaaaggacacaaccccaaaaccccggggggtaggggggggggtaaaaaaaggcacccgggggcacaagcgggggggggtatataaagactaaaggggggccccccgggggaaaattgggcaaaacaaaaccaaaaccggacccggttaaacccaaaaaaataagagcttctagggggagattaaaattggggatcaaacgcccaagacaggtaagatcttgaaagatgaaaagccggctaaaaagaagatctttttacaggggcgcacatcggggggggcaccggggaaaaacaggaagaagagacaaacaagcggggggtccacacatttttgggggcgaaagaagaccctgctccaaccacgatatccagttttaacaccttgccggg

SEQ ID NO: 33283 - DNA, 274 bp, Zea mays
  Clone ID: MRT4577_130362C.1
cgtttacaatgaatgcactgcataaaaactttgtagcttccttattgtaaaacatattcaagatcctacagtaagagtgaaacattcacaaagatttgcgttaatgaagactacacagaaaacctttctaaggctttgtgtggatcagatacatacttggcaaatttttgagttttacattctctacagaaaagtccatttaacagtgatcatttgtaagaccaaaatatacataaaaagtttcaaaaatctaaaaccaaaaaaaaaagggggg

SEQ ID NO: 33284 - DNA, 301 bp, Zea mays
  Clone ID: MRT4577_130363C.1
atgcaagatattctatttgttggaattgggaactgtgtcttaagaatagatacaactaaagtgggtagaggaaaagacttcactgttgaagaccctgttaaatgtcatcttgaaaagcttgttgatggtgttcgcttagttggtaagcacgatggtgatgtgactgatttgtccatatctcaatggatgagcacccgcctggcctctggatccaaggatggctcggttaagatctgggatgatcgtaaacaagtgccattatccatttttaagccccatgatggtcaagctgtttattcag

SEQ ID NO: 33285 - DNA, 326 bp, Zea mays
  unsure (1)..(326): unsure at all n locations
  Clone ID: MRT4577_130364C.1
ccgggggattattcctaaaatttattccttggcataacatttccaaaagcaccatgtccctttgggggctagtttgggttttggagctaacgtttttatacagttgcccttttgatccttttttgaaaaacaaaaagatacccccccagggcaagcagggggacccaagggaacttcgggattttttccttaatcataagcagcaggggggggctcaaaactgttttaagggtctgagcattcaaccctttgaaaaagcctggaatgccttccttgctccaaaaagcatgcaaggcacctagcattgtttttggngttcttgattt

SEQ ID NO: 33286 - DNA, 519 bp, Zea mays
  Clone ID: MRT4577_130365C.1
ttattcggcacgaggggctaatggggtgcgtgagggccgtgtctcacactgcccggcctcgtcatagaattcacccgactcatctactgcgccaaatgaacgcccaaccgctcacgatgggaacccgcggacagtacaggagatcagactaatcgcgacggggggggcctgaggcgcaagaatcacctgcggcggggcgggggcggtttcttctctaccacatgcctgccggaccggctaatcacgctcgagggccaccaaaacggcgacacgggagcaaccccaaccaccagctgggggcccggaccccccagggcagaggcgtcatactagtaccgcaggaaggcggacacatcgggcaggggggggacactcacggacaacacaagcatggtgttgttcctgacgacgagaggagggcccgggtacgcaagctgcacgatgagggaaggagacatcggcgattaggacctgaggcggtgcgccaccaatttctccgggctccttacggtcttcgga

SEQ ID NO: 33287 - DNA, 212 bp, Zea mays
  unsure (1)..(212): unsure at all n locations
  Clone ID: MRT4577_130366C.1
cacccttttgacttcagtactcaaacaaagctantcacaccactcccctttgattccagcagccgtcttatgcccacgcgacggcgcctctcatcctcaccgctggccccaccccgcctgcccctgccccactcgccacctcttttgcttttcacccgagacctcaattttcctttggctccgttaaaggtctttgtcccccccagttctcc

SEQ ID NO: 33288 - DNA, 526 bp, Zea mays
  Clone ID: MRT4577_130367C.1
ccggccgggaaatttaaaaaacaaaaatccgctaggatccccccacaccttgccacctcgcgttgtcacccacccatcaaggttgaggacgccagcaagttcagccgctcctgatcttgataaaacaagaaaaagataggaggcagtgtctcagggagctgacctattcttgcttctcctcctcaactgagcatacgtgggaaccatcgatgccataatggtaggatccatgcccatgcatgccttgataatgaagaacgagaaacaccaggagaatgacaacgatatcgacaaggaggagaaaagcacggacaacgaagagagaccatgcttatcgtagagtctccagttcaagggctgctgcttcaacagcgacagatgcgccgaggggtgcatgaacgacagctttcccggtgcccagtgcaagcgggacgtggcacatgcacaagtgcttctgcaagaagccttgctagctcatcgctgcttgctaattgttgatgcgtgcttcattaatctgatttgatgg

SEQ ID NO: 33289 - DNA, 369 bp, Zea mays
  Clone ID: MRT4577_130368C.1
gccacgcgtccgcccacgcgttcgggcttgtactgccccaacgcttcgtattcaaggtctggttcttgggcgagagggatcgagatgtaggggccggcagcttgactaccatggttacgttggcggtctcggctgcgccatcgtggaccactacctctaaacttcttgtgatggtacggtgaggtactagtagtctaaaatgatcctaggtccacgagaacgagagttccgaggcttgaggttcatcatcttctccagagtgaccggtatgctcatagccgtagacggcatgaacagcaaggagctctactgtctgcaacatgacggttaaagaggtccagttctgcttctgctgtggaggcgatggtg

SEQ ID NO: 33290 - DNA, 107 bp, Zea mays
  Clone ID: MRT4577_130369C.1
ttcttttcttccagcctccaacacttttgacaaaagaaattgttaaaggggagtaagtgctgttgcacaaaaccctatcacagtcgcattcatcatggctatgtcca

SEQ ID NO: 33291 - DNA, 1005 bp, Zea mays
  Clone ID: MRT4577_13036C.1
cattatttcatgggtacatgcatgctaagtcaaactttcgtagcttcatacgtaccaattcaaatatatacacataccggcgacggcgagagccagaaggtagcggacagcaatacaaatatgcattgctcactaattgtcacaagcccctagaggtattgacggattcgcccaatatgataagggcactgcattttcgggattgtcatggctcgaaaggactaaaagattatgcatttttgcctgcaaagttgtccctaaaagttctggatttaagtgggtgcaacatagcctacctgccagcttctatcggtgaattggctgtattgaggtatctcaatgctccagagattaaaaatgaaatgctcccagactctctgagcaaactgtcaaaattaatatacctcaacctaagtgggtccaatatttcagcactgcctgattcaattggtgatatcgaaggtctaatgcatcttgatatatcaaattgtgtgcttttgtgtgagctcccagaatcatttgtggacctaaaaagcttggtatatctagatttatcacattgccagatcaaaattacagcaaaagtttttagtggtctcaccaatatccagcatttgaatttatcaaaaagtcttattcatggaggtgacgggttggaggggctgcaggaagccgttggtggtctcaccgaacttcggtatttaaatctatcagggtgctttgaaaatctgaggccagatgaggtattaagttctgttgaccgtatttgtaggcttacaaatctggtgcatttggatttgtctttcaatttgggtcttgtcagtgtgcctgaaagtattggcagcctcaggaagctgcacaccctggatctcttgtgctgccgaaacctagtgacgcttccaaaatgtatgctcaacatggatagcatgaagatcttaaatgttacctgctgccctaatctagatcagtctacgctccctcgatacaggtattttaccttgccgt

SEQ ID NO: 33292 - DNA, 682 bp, Zea mays
  Clone ID: MRT4577_130370C.1
caatctgacattccagcaggttttctttcacaaagcattctttatttcaaaactcaagttttacatgctagaaagatttgtaattattacaagtcctgatatactcaaagtgcaaagcttacatacaaaagtaggaaggtagaacccttccaaagctcatacataaacctaactaatcctccttcagaactggaaacgccctccagccacaggaacacctagagtactcctcatcaccttattgcaataaagaggtttcagatccctctattaaataccgagttagatggctcccatcacttgatgagcaagcactgaagcagactcctcttcagaaaccacttcttgaatttcatcatcttcttcttctaggaattctgacagtccaagttcttggtgggtgcatgaaactgctcggggaagtcgtacgttggccggccgacgatgaaactaaacacgacgacgatttgcggtggcgcgactacgttctggccacgtgaggttgaggcgtcggcgacgtggtcaccagacacgtgaagccacttggctagaggcttgggcgtttccagggtatagtctggagaagcgaaggcaacaatactgttttgaagtcacacaaagtggttacgacagaggcagggattctcctttactccccgaccggccgcctcgagcgccgcac

SEQ ID NO: 33293 - DNA, 246 bp, Zea mays
  Clone ID: MRT4577_130371C.1
cttccttctttcttttttctgttttttttttttttttttttttttttggctttcgcttttttttttttttttttttcgggaagggaacagaaattggattgatcttttaattccttaaaacgttggctttttttaaccccgaggttgttgggattcttttttaaaagattagtccactttaacccccccaaaatcaataaggcggccctggaagaaaagccctatttttgtctgaaaaccggggat

SEQ ID NO: 33294 - DNA, 178 bp, Zea mays
  Clone ID: MRT4577_130372C.1
tttcttatcacgatcgaggcatcgagctagtagcagggggcaacgggcaaccggtttagatggctttgccgtcggcaggcaaggcgttgtcgttggtcgtcgttctcgcggacgccgtggtcgtgtcccttgctcaagcccggcgcggtctacctgaggccgaactactactcgtgca

SEQ ID NO: 33295 - DNA, 1485 bp, Zea mays
  Clone ID: MRT4577_130374C.1
accgccacaattcggcacgagggcacaaggaggcaaggagcacgaacagcccacggaggaagcgcagccgcagttgcccgcaggctatggacgatgacatcgacagctcctgctccaccccgttcgccagcgcgccgtccagtcccggacgtccccacgccatcggcggcggaggctacttcttcagcgcgccggccagccccatccaccacctcctcctctcgacctcgtgctcggcctccgcgactcccagcaccggtgggcgtgggtgcgtgggcgacgcggagttcgagttcggcgggcctggcgggcccatgatctccgccgacgagctcttccacaacggccagatccggcctctcaccctgcccccgctcccggatctcgaccccgggagcgatgacgacgaggactgccgcgcgccgacgcgcggccgcgacctcacgccccggagcgcgtccgtgcaccggcgcgcgcggtccatgtccccgctccgcagcgcgtcaccgcggctcaagctgatcaatgcgctcgtcgttccggcgccggatctcggccccggccccgacgcgacgggaacgcacggggaggcagccccgccggtaaccgcctcgtcccgctcgtcctcgtcctcctccacgtcctcctcgtcctcgtcgggcacgtcgtcagcgcgcgggtcccggcgctgggtgttcatcagggacatgctcctccaccgcagcaagagcgagcctggcagcggcgcccacgcgcacgacgtccccggggcgcccgccgctaacaagcccgaacgagcctggcccttctcctccccgtcctgggtaaccagggacaggctcgccgcgaggctccgcccctctcgcgcgccgccagcgacggagaacgcttgcggtctcggtggcgaggatggccggccgcgggggcagggtaggggccggggccggggcaggcggcgacgttccactacggtggcggcggcgcacgagaggctctacgcggcgccgaaccgtgcgcaggcggaggagatgcggcggcgcacgttccttccctaccggcagggcctcctgggttgcctgggcttcagctcccgcggctacggcgcgcttcacgggctcaccaaaaccctcaaccccgtattctctcggtgaaaagtcatcgtcaaaaggaaaccagagatcgggccaggagcttgatttgccacctgttcgtcctgttcatgtctgcgagcatttttttttatcttcgttgtttgtgcgcgttctgtatatatagcagtgtcagtgtcgagttcggatcggaaggtagtttgccgatggtcacgtcaagcagaacatctgagagagaagcaatgcaatcgatgaatatggcgcgaaaaaaaaaaaaaaaaaagcgtctgtgtgcgtggtagtgtgtgtgtgccaagtataaaagcgtgtgatgttgcagtatcctgtgaaagcagtctcgctgcaccagatctgt

SEQ ID NO: 33296 - DNA, 1444 bp, Zea mays
  Clone ID: MRT4577_130375C.1
agcacctctgttgttaccacttgcatccctattgttgaagctttgaaattttagctgtattttctttgcaaattctatttacaattaaatatcacaagcttaattgattagttttgcatgtcgggacatcttaaatcgaataagttgttgttttgttactacaatgcgaccttgatttttacaggtgagagcaagagctgcggacctcaatttgtcacctacttctgatatcaacttattggagagccgtgatatccacatacattttcctgctggtgctgtgccaaaggatggcccttctgcaggtgtgacattggtaacggcactagtgtcgctttttagtaacagaaaagtgagagcagatactgctatgactggcgagatgactctaaggggccttgtattgccagttggtggtgttaaagacaaggttcatgatcattgccttaccccgttctctttttttttatccttctactttgaaaatgtggaaggtttaatcatttttgagccgctacccttctgctttgtgtaattccacaatcctttggaatttaggtacttgcggcacatcgttatggaatcaagagagtaattttacctgaaaggaacttgaaggacttatcagaggttccattaccaattctctccgacatggaggtatgttgttgcattgttgtttgcatgtttcttgggcagctttttggtactaaggtgttgtttgatcttcgacggtttctgagccttggagctactaaaactaaagctagatttacctgcagtttaggggcatccacaaactagattcaaacataaaacctcttgatatgtaattttggaagtagttggtgaaaccggccttttaattcagtgcttatcaaatatttttctgctgtcagattctgcttgtgaagcgcatcgaggaagtactcgaccatgctttcgaaggcggatgcccacttagatcacgctccaagttgtagcacccaactcgcgtttggtatggatgtttgcttgagaggatcatcgtcacagtaccacgaatggtcaacagtgtgagattccctgctggtcttgccacgcccttttcggtttggcttcgcgtctggaatgtgtatacaggattactggtcagaattctgagaataacgagaagattctctgctgggatagtgggattccctgcatatttatgtgaaaccagctgtcggtctttatgcacagatgcaacagcaacacaaatctggtaggaacactggtgggtttctgtcgataatttgagtgtatatgtaatattatgtaatctattccagggaaacatagttaaaccgaggttgtgaaagccaaagagattgagaaaaaatcatacgtactttagggttgggaaaaaaaaaaaaaaaaaaaaaaaaaaaaaaaaaaaaaactcgagaaaggcgccggtacc

SEQ ID NO: 33297 - DNA, 496 bp, Zea mays
  unsure (1)..(496): unsure at all n locations
  Clone ID: MRT4577_130376C.1
ggtaccctccnagtctggccgggnatttataacctctccccagcctccccttcccagttcccagttcccaccacttcaccataaccaggtcaacccggcgcaaggagcacgaacaggaaccgtccagcggagcaaaggcacccgcagccgcaggccatggacgatgacatcgacagctcctgctccaccccgttcgccagcgcgccgtccagcccgggacgtccccaggccctcggcggcggcggcggcggctacttcttcagcgcgccggccagccccatccaccacctcctcctctcgacctcgtgctccgcctccgcgacccccagctccggtgttcgtgggtgcggggccgacgcggagttcgagttcggcgggcctggcgggcccatgatctccgccgacgagctcttccacaacggccagatccggccgctcaccctgcccccactcccggatctcgaccccggaagcgacgacgacgaggactgcgtgg

SEQ ID NO: 33298 - DNA, 221 bp, Zea mays
  Clone ID: MRT4577_130378C.1
cgtctggctgactattgacggtaaccgtggaagaagcgcgcgtgaatctcctgaatatgcgggcttgaaggagagccaagaaaatgctgttgtggttgatgcagaggatgttggagtcgaagaaagtcaggatgaagctgttgaggctgaggcggggggttcatcatatggtgctgcccttgtgcgtgggaaccttggtgaggaacagtgggtgctgactc

SEQ ID NO: 33299 - DNA, 434 bp, Zea mays
  unsure (1)..(434): unsure at all n locations
  Clone ID: MRT4577_130379C.1
cgcgggagaaggcggcgacgacgtggggttcttgggatggacgaaccggacagcgcggcacgcagcgccgacaagctgacattcgatgatgaggacggccccactgtccctgaagcggtccaggtgggtagttcaccgaagtatagagtcgacaggaagcttgggaaaggtggttttggccaagtatatgttggccaccgcatgtcagctactggtccaggtgccgtcgaggtggcactgaagtttgagcataggaccagtaaaggatgtcactatggccctccttatgaatggacagcttacaacgccattggtggcattcatgggtttccccgagtccactacaaaggacgccaaggggattacttttgtatggttatggatatgctncgacccagtctgtgngatgtctggaataataaatctcacataat

SEQ ID NO: 33300 - DNA, 769 bp, Zea mays
  Clone ID: MRT4577_13037C.1
catatgtgcaaggatggggactgataaaggaccgcccctttttttttttttttttacgatccaaaagatggacaaatgcacgaacatataaacagaacatatacaattcgaatatgggattgctctttaagtactagaagactcccatactaatatagaagccactacatctaggtcttgctagacaatcgacatctggccttatctgcggcaatctgaacctaaatgacgccaacagatccataccctctgccgggcagaggcgatcgcccggcgccacgaccgatccctacctcctccgctgccacggccacggctgcctctgcctctgcctccgcggccttgcgcgcctccgcgacgcgctcctcgatctcgtcttcggtgtagccgtgctcctcgagcgcgtccctgagcacgagcagcttgagctcgacttggcgcttgcggtcgtgctcgaggatctccttgttgggcttgcgcatcccgccgccatccgcgccggcggcgtcggggggcagcggcctgtggggcccgcccggacccccgccggatgtggagcggggcttgacgaagaacgtgttgctctgcgcgtacccgttggtgcccgacccccgcgcggtctgcagcccgatgccgttgtacatcgcggccggcgggcggggagaagccggctggatcggcggcggcggcgcaaactagggcaagggaagcctggctaggacgaaactacaggtgagatttttcccggccggcctcgagggtcccaatg

SEQ ID NO: 33301 - DNA, 193 bp, Zea mays
  Clone ID: MRT4577_130380C.1
cgtgtcccgggtcgggcgtacccactaggagccaaaacaaaccctgtcgacggacggctaagcgtggcccgtgcgacaattagtcctgttccgttcgtcacagatacaccagccggtagcaaccgctctatggatacgtcggccgcgatcaccatggaccaacaacccacggtgtcttcgttattcacggaag

SEQ ID NO: 33302 - DNA, 308 bp, Zea mays
  Clone ID: MRT4577_130381C.1
gagcaaaaaactattatagcttaccttgttcaaaaagaccgggggggcatgacgggtgatcacacccgatcaaccatcccaagtttttacaggcccaaaactccccccgccccttatggtggggctccccgcgaatttagggctcccggcaattttacgatggggtcaaaatccaggcaaggggggaatctttggggggaattggggggggatctccccagggacaagggaggcagcctactttttggcctttctggccaccccctttctggccggaggggaaaaaaaaaccttttttgggggtgccc

SEQ ID NO: 33303 - DNA, 739 bp, Zea mays
  unsure (1)..(739): unsure at all n locations
  Clone ID: MRT4577_130382C.1
gaatcttcagaagaatacagattaaggatacatgtacagatgttcttttatgtgtttccggcatgtgggatgatgtcaagatctcaatgctatcagaagaggactttgaggaggatgagtgcaatgatcttcttctgttggccaagaaagagctcttcaaaagacctactgttgctgagttagaggaaaaagaggcaactgtacatgcagacattgtaaatcatggtagacttgttcatgctcagctgagtcggtctggactgtttttttgacaaccgagcagtttcggccttctccgaatcctgataaaagtggtttgataaggagcttcgaaaattggaaatggagttggaacgagcgcgtgagaaggggtggcgccaggaatatcctttccagatggactgtaatgatcatgcagcagtaacttgccatacttgtgatcatagttttgtatatattttcatattattttactatcgcatattgccagcctatgacttaatgcacaggaaagaaactttgtgcggttcttttttccttgactgattcttactatccatgacctaagttgtaaaaaagtgcttctaagcacaccaaacgaaagacagcgccgtcttgaggcgatcccagaagttattccagatgctgaagaggagagtaaagaaaatgggattgaatcaccagcgagcattccttttcaagggaatcgagacnaaaacagcgacgccctgaggcgatc

SEQ ID NO: 33304 - DNA, 479 bp, Zea mays
  Clone ID: MRT4577_130383C.1
aacacacgatattttttatccacgagcctttatgatgaggataaaaaaaacagtcgtccttcgctactcaatgcactatcatataaactgatagaaggtcttactaagtagtacggatagttcagatatgatacttatgtataaccctatgttttcatctgagcacacagacatcatcacctagttttaatatggacgaaatgcagtaaaatcaccttataactagacggcaagtttgcatagagatctcccatgcggatgccatctgccctcttgaacgatcgattagtctctgtaggtgactcctgcctccctgcctcccctcgcagatattttggcgaaggtggaggaaacatgaaggccctactgggttccgacaggttccgatggtgctggtgcatagggcccctgccacctcccgcctgcggtatgctcattggtgcagtctcgccgctaaaccgcgcccacgcgtccgcgga

SEQ ID NO: 33305 - DNA, 304 bp, Zea mays
  unsure (1)..(304): unsure at all n locations
  Clone ID: MRT4577_130384C.1
aggtttaatgangganaatgtaggtggntggtgntnaangnnatnaanannatggggtggtnnttatntttggttagggtgtaggaaaaagaaggatgngatggaagggaaatgatngaatggttaaangaggtggaggtgaaggttntgataggaatnantgggagtgggtnntgtgatgntgtnatgtaaggttggaaaggagtntnngagaggggttttntgatagttgtaaaaagagaagaataaanggggtggggttggattgaagggttggggggggaaaattaaatgggttggaggg

SEQ ID NO: 33306 - DNA, 475 bp, Zea mays
  Clone ID: MRT4577_130385C.1
gtatttattactatgttttttttgtcattacgcttgtggtctataaacgtgggggcagttaggacctcccagcagcaagctttcatgggcggtagaggagggcgggaggaaggggaataccctctttgatgaacccgacgaacacttgcacgcaggggcagctggagcacatccaactatgttgacacggcattcattgaaaggacacctctgggcgagctcaaacaaattgtcgacaagcaggggtatgcgcacgcatggctcgtgctgtggacgcgaacaagactgtgcgcttcgcaaaggattgcactgatctgagaatgaaccaaaaccctcaggagaggggactgatctaggccggtaccacttatactcgtggagccaaccagcgcaaaaccgttgctgagcctgggactattataagtccaaaagggctacaggttcgtagcagtgataccagggcagaaatctctac

SEQ ID NO: 33307 - DNA, 714 bp, Zea mays
  unsure (1)..(714): unsure at all n locations
  Clone ID: MRT4577_130386C.1
ggtaccggcnccctccctcgagtttttttttttttttttttttttttttttttttttttttttttttttttttttttttttttttttttttttaaagaaaaaaagctggggattcgtaaacgtcacagttaacacaagcccaagttttttggatcaccatttcaccggtggttgggcagggggcaaagcaaacaaccccccataggtgcccgcgaaaccccaaaccaatccccccccgctgggggaggcaaaacccccccccgtaaataaggaccccctggggcactggggtttaaacattttgctcgtttggtgccccctccccgagtcctccaggggggggccctgccccccaaaacaaatgttgaagacccccccgttgccccacccgggtttccgggccgggctttttgccgtcccggggccaaaaccgttgtccatggacaaattgttggaacacaaggggccccccatgggggggaaattatccttaagcctgccgggggggggggtcaccatggaaatctcgtcgccaaggaaaatgtcctttaatttccccagggggtgggggggggacaaaaccgaggacctcaaaaaagggcccgtcgggaaccccgccccccccgaaaatggccccagctggggcatggcctccatgaggccggggatgagcttcggggtgagcttttttttgggggatgaggagctcggggg

SEQ ID NO: 33308 - DNA, 677 bp, Zea mays
  Clone ID: MRT4577_130387C.1
gaacatatggtaagggacgaccataaccatgtagaacctgtaggtgttatctatatatacaaaagggggaggggggggggggggcaggatcatggtgttcggcaaatacacttttacaaaggttcatgacaccaaagcattgaacaccacctcccctagacaaaaaataacatggtggactaactctgcaccagagcacaggaaagcctcacgagatgcagataaactaatctttcaatccttaagcaatcatgttcagttatggagctgatctttgccgttgccctggaacctgagcactgcagagatggctcttcaaattagctatgtacctacggatgcgttgctgatccaaaggcgaaagggaaagcggtggatttagtggcaacataggtgcttcctgtactaaaaacgtgagcaagatgatagccttcgaatatagctctgcggatctgctttgatttcctaaaacttcattcgcagctccactcttcccatatcacaaagcagtttggaatgcaacatccactgcatctggcatctcggtgttaccatcacttttccgtcaatcacatgtgatatcttttctgcacgatcatatgccttcataaacccactttcaagccaggaaaaaatagaagccgttggagtgaaattcgttcgaagtactttcccgc

SEQ ID NO: 33309 - DNA, 1992 bp, Zea mays
  Clone ID: MRT4577_130388C.1
acatgtgcaaacaaggcacttgcaaatatattttttttttttttttttgaacatatggtaaggggcgaccatatagagcatgtggtgttattatctatatatatacaaaaaagggggcaggatcatggtgttcggcaactacaattttacaaaggttcatgacaccaaagcattgaacaccacctcctagacaaaaagcaacatggtggactgatctctgccgttgccctggaacctgagcactgcagagatggctgttcaaattagctatgtacctacggatgcgttgctgatccaaaggcgaaagggaaagcggtggatttagtggcaacatagatgcttcctgtactaaaaacgtgagcaagatgatagacttcgaatatagctctgcggatctgctttgatttcctaaaacttcattcgcagctctactcttctcatattacaaagcagtttggaatgtaacatccactgcatctggcatctcggtgttatcatcacttttccgtaatacatgtgatatcttctctgcacgatcatatgccttcataaacccactttcaagccaagaaaaaatagaagccgtccgagtgaaatccaatccttgtactacattcataggtgagtggccactcttagcaaggaaatgttcttgacaagatttagagaatttttcaccatctgatgtatccatgagcaagctacatgcatcaagtgcctctttccagatagttaataatacaagttcaattgataacgcctccaggtacaggcctttagatagcttttcccgagcaagatccgcaagaacaagaacatattgattcagagaatgaagtcttgtaatataatcaggtggtttccctcgtctacaatccacagtggctgactcctgtgaaatgaccacaggagcacatccatggctttgtacaccagtagctgtgtcagtaaagtctctgatttggttctgaacagaccctttgccagtggacctaccatagctgaccgttcttgtatccatatcatcctttgtggacttgatgttgagtgaagacatttccatagaagtacagttttccggaacaagcacatattctcgttcaatccactcccatgaatcaaaaactttcggattttttgattcaatacttccagactttgtttttaggacaacaggagaggtgattgtctggcagttatctcttaattctaggacgtgacgggattcatagcatttcccacttggatcacggtgcaggagtcttctgcacaaatcaatgcaatcaggacataaatcagcttcaatttctgaagggaagttaagatcatcggtagccatgacattttggtgcagctgaaaagcattactcccggtgaatggcaacttccctgtgactagctgaaaaagaatgataccaacactccacaagtccgactttgcatcatagtccttcccttgccaaatttctggtgccatataatatggcgacccacatattgtagcagctaaattttcatgcaccagcgacctggcaaacccaaagtcaccaattttcaatacgatgtcatccccgttggttgataggagaaggtttttcagtaaatgtctgtggtctttcacattaaatggaacgagctgccgcatcaagtccttggctacggcctccggcagccggccgtgcttgtggagaaacgcgtccaggtcgcctccgtcgcagtactccagcaccaggtacatcatgttcgtggtgtcgatggtgtcgaggaggcggaggatgttggggtggtcgatgctcctgagtatctccctctcctgcaggatgccgtcgtggacgcgcttgtcgacgaggcggcggtcgatcgccttgaccgccgcgggcgcgccagtgcggcggtgcgcggcacggtgcacctcggcgaacgagcccctcccaaccaacccttgcagcttgtactctcccacctcctccctttcctcctcgtccatcgcgg

SEQ ID NO: 33310 - DNA, 583 bp, Zea mays
  Clone ID: MRT4577_130389C.1
tttttttttttttttttaatacaaaaaaatagcttgattgatcgatccggaagtgttactacaaaaatgtatataggcagtgctcaaccggtgttagtgaaagaccaggagcctagccatatgcgccacgcgcaaactagctagtggagaaacggagggtcctctgaatacactaacactgttactcttccagaccaaatctcagcatcctgttagtatcatgtccttgctgctggtcgaacacgcgcggtcgggtaaagcaaacacacacaaacacaaacaaacaaattagtttagcaaatgccagcagactccaaaaccctggtgaactccgcaacatctatcctcccgtccttgttcgtgtcatacttggcgatcatctgctcgcactcatccatccctagaccttctcttaatcctagactcccgagcacccgctgcaaatctgatgcgtcgaagtacccatcattgttgtgatcgaacaccgagaatgcctgccatacctcctgcaggctcggctcgtcctcgtcgaaaacccgagctacagaatcatcgccaatggccatgccgttctctggttggt

SEQ ID NO: 33311 - DNA, 649 bp, Zea mays
  Clone ID: MRT4577_13038C.1
acctgcaatttcgtcctagccaggcttcccttgccctagtttgcgccgccgccgccgccgatccatccggcctctccccgcccgccggccgcgatgtacaacggcatcgggctgcagaccgcgcgggggtcgggcaccaacgggtacgcgcagagcaacaagttcttcgtcgagcccagctccacatccggcgggggtccgggcgggccccataggccgctgcgctccgacgccgccggcgcggatggcggtgggatgcgcaagcccaacaaagagatcctcgagcacgaccgcaagcgcgcaaggcgagctcaagctgctcgtgctcaggaacgcgctcgaggagcacggctacaccgaagacgagatccaggagcgcgttgcagaggcgcgcaaggccgcggaggaggtagggatcggtcgtggcgccgggcgatcgcctctgcccggcagaggatatggatctgttggcgtcatttaggtttcagattgccgcagattgtctagcaagacctagatgtagtggcttctatattagtatgggagtcttctagtacttaaagagcaatcccatattcgaattggatatgttctgtttatatgttggtgcatttgtccatcttttggatcggaaaatcatttattaagc

SEQ ID NO: 33312 - DNA, 520 bp, Zea mays
  Clone ID: MRT4577_130390C.1
gggaccctcgggccgccggactgctggttagagcgcatatgaacgggccgactttttctgtccgaattagcggcgcgcggtatatctatttgtccgactatgcgggccacgcacttcagatcaaggaggtaacgagatgatgcgatgctgggcaattggagctggcccgacgtcgccgcccagatcgcactggctgctactatgaacgcgcgatttcaatgttcggccaacatttcctcttcaataagggacactgactgtcaaaggagctcaagatccagagctacattcctgagctaccgataccagatgcattatcgagagaaacatcattatctaacatgcttgtgggaacagtcgggagggaccacattgacttgaggatctacttgaccgagcgctaggatctgaggtgccaggactgaatgcctgctggaggagtcgaactaacaccaatactagagcttttgggacatgatgagataatgcgaatacatgaccttgctgacactttgggtgt

SEQ ID NO: 33313 - DNA, 2302 bp, Zea mays
  Clone ID: MRT4577_130391C.1
cattggtaccctcgacgcgggcggccacgcgtccgctgcgatcaaaccgcacgcaagcgaaccacagcgtgctcgccatctcactgactgtgacgacggcaacaagccagtgagcagctcgccatggcagcagtgtccaccgcgccggcgctcgaaggccgcatcgcgctcgtcaccggcggctcccggggcatcggccgcgaggtgtcgtcccacctcgccgcgctcggcgcgcgtgtcgtggtcaactacgccaccaacccggccaaggccgaggagctcgtcgcggagctcgcctcgcgcggcctccgcgccgtggccgtgcgcgcggacgtctccgatccggacgccgtgcgcgcgctcttcgaccgcgccgaggaggccttcgggtccccgccccacgtagtggtcgcctgcgcgggcatcatggacgccaagtaccccgcgctggtcgacactgccgtcgaggacttcgacgccacgttcgcggtgaacacgcgcggcaagttcctggtgtgccgggaggccgcccggcgcatcccccccaacagcggtgggcgcatcgtgacgttctcgtccacgacggttgccgtgctgccgccgggctacgcggcgtacgctgcgtccaacgccgctgtggaggcgatgacgaaggtcctggccaaggaggtggcggcgaaggggatcacggccaacgtggtggcgccgggccctgtgcgcacggagctcttccttgccgggaaggatgaggcgttcctagagagggtaaagaactccatgggtatagccgagacgacagacatagcgcccgtggtggcgttcctggcgagcgaggcctcgggctgggtgaacgggcaggttatcagggtcaatgggggcgtcgcatgagtgcggcgttgttattattacctcattatctgccatggctttccaaggatgttgttttcctgacgtgtctatctacgtgactgaatgaaaaaggttgtacatctcgggctccatagaagtagttttcagttgtacatttctacggttctttgggagaaatatcgtagcaaagtattatgctcacaattttcaggcagtcaccttcgcctattatcatcatccgcgccttcatcgaacacaccagatgagccaacacggaagtcgagctgcttctgatgtttctgcctccgccgctggtcgaactcttcccacccctccacctgtcgaagaacatcatttgtgatttctgtgccatggagatccagtgtagtaagctgcgagcactttttgaaaaacgctgctggcaaggacgtaaggccattgttgcttataagcaaattcttaagattacgaaggttcgcaaaggtctctggcagttcagttaagagatttgatgacaggtgaaccacagtgagagattcacaatctcctattgatgaaggcaatgaagttatcctgttgttatttgctatgaggacctggaggtgcttcagcagtcctatttctacaggcaagttatcaagcctgttctttgcaacacacagttcacgaagagaagtcagtgaacccaaagttggtggcaagctaaccagtcggttttcgcttaaagataaattcaatagcttttgaagacatgatagaccttcccagcagatgctatcatcaactatatcattttcagttaggagcaatttatttagagatttaagagcagagattttgtgtggaatttccttgatacagttgtagctaatgtctagtattcgtatcgaggtgccacaatcccagacttcttcaggtattaccttcaagtcacagtcttgcagcgcaacaacacctgttaacttccagcgctcagatcggcttttggtgacaactacctctggcttttgtgtttgattctccttaacatttgaaggccttctcacagttgttgctgagctactgctattatttgtgataggaccatccccctgatggagcccctgcgacgcgatgagcatcaccttggatccgcccactacttgcatcgagctcaggcttgcggcatcctggagcactttgcctttgcagatgagcctctggccgcgcgggaggacattggtcagcggctggaggaggcgcttcagctccgcgccggaagccgctgccgggacctccacggggatcgtccgcccggcgaacttgacctggacggtgatggtggtaggcgcggcctccattacctctgtgccgtcagtccgtcacaggcacagcccacaagacaagactcgaagtcaggattctgtttcgactctactctgttgagaaccgc

SEQ ID NO: 33314 - DNA, 623 bp, Zea mays
  Clone ID: MRT4577_130392C.1
ggtacctcaggcggcggggatactccagcaaccatgtggaggatgtgtttagcgatggtgctggtcatggttggcgccgcgctgctcgccgaaggtgtcggcgccgtaatcgcataggaagtgatggagcatcatcacccgggccatgtttcatagtatgctgaaccaccgcggcgacagcgggtgacagggcgccttctacacctacgacgcctgcatcgagggcggcagcaagttccccggtttcagcaccaccggcgacgagcagacgcgcaggtgggatctaggcgccttcttcagccagacgtcccactaaaccaccggtggatggggaactgctccggatggaacgtttgcctggagatactgccgggtggaggaacagaaacagacggacccaccctactatggacgaggacccatacagttaactcataagtgcaagtacaggttcgccgggctagcgctgaaactgaacctgctgggcgacccggacctggtggtgagagacctcgaggtagctttcaagacggtcatctgggtctggatgaagccgcagttgaccgattcctcgtgacacgtcgtgatgaccggggagaggagggcctccggcaacgaccgcg

SEQ ID NO: 33315 - DNA, 402 bp, Zea mays
  Clone ID: MRT4577_130393C.1
gcgcaagaagcaaagagtaacgtatctgcccaaccgatgctaatctgcacattttctagttcaatcctctgaaattttgactgcaactgtatgtaacacagtggaggaatcacagggggctatggatgttcaggagcacaactctagcctgcagcagcctcctgaacaccttctcgcttctcgcactccagcccggcaatgcgaccctcgagctcctccagccttcgcagtgccgctggcgccactttcctggcctccgatgcgacgcccaacctcgctagccacctgtgcgaaggcaccgtccgtaccatgtccgacacgccaggcgacatggccgcgcagccggagaagacgaccgccgaggcctttgccgcggccacggccgcctccgccaccaccgtg

SEQ ID NO: 33316 - DNA, 140 bp, Zea mays
  Clone ID: MRT4577_130394C.1
gaaaattttactgaagaaggtcatactcaccaactactattgcaccaacaaattaattgatgaggacccccacaggggaattaatgtcgtcctactttaacaattagaactctcacgcttatgctcaaaaacaacagctt

SEQ ID NO: 33317 - DNA, 396 bp, Zea mays
  Clone ID: MRT4577_130395C.1
gctttctttgttttttttccttcttttcttttttaaaagaaagaacccaagggggggtctttggatgccttccctcctgcagaatgacaaacatttattcatcgcatcgacggccggtttccttaacaaaaaaatgtggttgggcacctaaaaagaaggcgggaggactcacccgacttcttttcttttccccgccactattaaaatccggcccctagcaaagaagcctttacttgttgccttcgggagggagatgctcccatgcaccccttcattcaagtaatgctagccctttttgaaagaaagagccgctggcttctctgctaggctccttaggaaaaaacccctacgggcggcgccggtttttgggaacttcttttgggaacctgaaagggg

SEQ ID NO: 33318 - DNA, 709 bp, Zea mays
  Clone ID: MRT4577_130396C.1
tccggaatcaacctcactcatgtctgccccatcagcaactcgtctgttcagccaggcaactcgcactgcttcgcgctccatcatccgctcacgccaggccaatgctttccacctccagccatgccgtgtcgtacccgccatcagagccgtgaacagctcaagaagtttctcggtcagcgcatctaaggctactggcctcatgccggataccgagaacccgagtacacccaagcgcgagcctcttgcgacaaccctgacacccgccaacatcaccgacgaagagttccacactctgtctgatgctttccttgagaaggttcacgagaaggcggagcaggtgcaggagggtagagaggacgtggaggtcgactattcggccggcgtcctaaatatcaccttccctcctaatggaacctacgtgctcaacaagcagccgcccaacaagcagatctggctctcctcgcctctatccggacccaagcgcttcgactggacgatccaaggcgagggcatgaactacaaggagggctccggagaaggcgagtggctctacatcagggacggaagctcgctagaggaaatcctgaggaaggagctcggactcagcgtggacatcagcggtcacgaagaggagatggaggccgctctgagcaaggatcctactgagtaaagggcaaaggataatggttattgcacaactggtcagacg

SEQ ID NO: 33319 - DNA, 770 bp, Zea mays
  unsure (1)..(770): unsure at all n locations
  Clone ID: MRT4577_130397C.1
ttcggccgggatcctctcccgtctcatatacacgtcgacatcttgcagcggcctcccctcctcctgcctacccatctgaacctttcgagaaaatgaaattcctcgccgctctcgccctcgccctctcggccaccgctggcacgctcgcccagtccagcggcaacgcaaccgccttcgccgacggcctcctcagcgctcttcgcgccaacaacctctcggcgctcgcagatgccgtcggcaacaactcgcagatgctcctcggcgctctccagggcggcaacaagacggtgctcgctccctccaaccaggctatccaggctctgggtgatgtcgacacccaggcgctcgttgctaccattgcctaccatgtcctcaacggcaccgtcctcaacagccagctcggcaccaacaacaagacgatcgccgcctcggcgctcaactcgtccgagtacgtcacgctgcccaacaaccgcagccaggntcgtcgtgctctccaagcaggccaacaacaacacgggctatgtccagctcgcttcgggcaacgtctctttcgccctgacccaggacggtcctcagtacgagaacatccgcgtgcagcccattacgcaggtgctcaccatccccggatccacctctgacgttgccggtcagctcggcgcttcgcagctcgctcagctngctgagcggtgctaacctcgtccaggcgctcgnacgactcgatcgtaacccgtcttcgcccccaccaacgaggcgattcagcaggtgcagtc

SEQ ID NO: 33320 - DNA, 246 bp, Zea mays
  Clone ID: MRT4577_130398C.1
gggatcaaatgtacaatacattcattctataaggcgacatatatatgatacaagaatatctgctttaataacaaaaatgtaagaaaaaccaacttgggattgagctccgtacgtgcaataagcttggattctaatttccacctccttatgaaactaaaccttttactccccaaaaaggaaacctacctattctttaatctggttcaattaccccaaagcttaatacctttgcttaatggttatttt

SEQ ID NO: 33321 - DNA, 369 bp, Zea mays
  Clone ID: MRT4577_130399C.1
gagagccacgcatcgccattttaatggtggggtgaaagccaaagaggacagattatcgaaatgggttatataccccatttttaacagggtttctacaagacccagagatgatgcgtgacaattgtgacggatcgaacggcggttgcagtacaaagcaagctacttgagcatgcatatggcaaagctttggtgacaacttgccgtgcggtcccggctgtcgcgagtggtgaggtgcgttcttgatcggaatgaggaccggtgactccaaggcgctcacgtttgccttaagtgagccgtcttccagcttggggaacttgaggagataacctttcttggtgaacagaggcgcgaacgtctcaaataacttgc

SEQ ID NO: 33322 - DNA, 672 bp, Zea mays
  Clone ID: MRT4577_13039C.1
ctaatgtctctggacccgaccatccctgccatcgaggtgaaggtggctcccatctctgggcatgccccgcatcgcgcatgccgatcgttcggggcggaactcagctccaggctacagggcacccatccaaagacccgcgcggcccccggtgtgtccaccgccaaggactgcgactttgcccagtcctcccaccctgacagatactcccaagaccgctgctgcacctgcaaggtgatacactacggcggcgcctactcagacaaacgcttctggggctacagcccccgcgactgggctgcgtacgacgctgtgtggtcctgggtgcctgaaaaacacaaataaaagtgcgacaccaactgctgcactactgggaaagtagagaagtgacatacacgccggcgaggtggcattcatttcaccgccagcccatgagtgcgatttccaatgcgaaaacgacgcctgcgtgttcatgatctgcagatagctaaccgaggacgaaccacgttctgaatatgccctactatagtgagatgcttattaccattatatatattgacgatttgtattaattatgccatgcttgcatattataaatatggatgacaactctgaatataatgatattaactggaatatattgttgatgattctattattgcaataaaaacatga

SEQ ID NO: 33323 - DNA, 431 bp, Zea mays
  Clone ID: MRT4577_1303C.1
aaaagcaacaaaacgcaaaaaacaaccacataaaattgcaacagaattgaacatatccaaacatagcagttatggaaaggggggtaataccccaagaaaaaaggggccctccatgacacaaaggcagcacagggaactctgggtcaaaacacacagctaagccctcattattcgaacaagttcaagaaaactagataatttttttatatgggggaacgctacttggccatccccactcccaaacccaaaggccaggatcgccgccaccggttgcctttttctgaattttttttttaacccttccgggggggcccccaccgaaggggcttgacaggaaaaaaaaaagggggttttaaaaccccaccctcaccatgaaagaggggacgttgccaatttgcccgccaaccccggagggaacccggttgaacaaa

SEQ ID NO: 33324 - DNA, 284 bp, Zea mays
  Clone ID: MRT4577_130400C.1
gaaaagacatttacaactaggccagggattagccactgtgggagggtggacaggcaatggttcagtggcctggctgttggcaggaactccaagtgcccaggcctcttgggcagcttagggccctgcctctgtttcatgatgcttgggtcatttgtcttgggtgtcctatcccatatggagaagaaaggggctctaagttctggctcttctttctttggggttctctgtacctgaggaaaccaggccctgggtgactttgcagatctgctacacctcggtgagca

SEQ ID NO: 33325 - DNA, 336 bp, Zea mays
  unsure (1)..(336): unsure at all n locations
  Clone ID: MRT4577_130401C.1
ggggggggaggagggggggggggggagnnnggtggggggggggttttatttgttgtttccttttaggctggcgcgggcgcttagtaaccactcttcttgtttacagtttaggatagaggcgctgaggcctcacccaccctttttcctggcgttgcacggtgcaacacacagcgcctgtttagattggtgttcagtagctacgagcccacccaccatgctgaacgcgcgcgcgatgtgtgcggtcagaggcggtggtagctattggcacagcgtccgtcgtgggctgtggcacgggcggggtgttcctcgctgtttttatcgtgcggttgtttgacc

SEQ ID NO: 33326 - DNA, 306 bp, Zea mays
  Clone ID: MRT4577_130402C.1
gaaaatatcgtatcccacaattctcgccactgatggtcgagtggccttgaaagcagggtcacagaacgagaggactgccgatggtccaaaccgacccgaacagtaacagggttaggaatcatcttttttgggatataaataaaaccaaatcacaggctagccatatcggggccagacggaaccatacacatccttttttgggtacctccgatcccacgaccaagggacatcttgggtgccataaggttggggaggaagctggtatggcacaggcaatctcacaatagatggatcctcttcgtcacc

SEQ ID NO: 33327 - DNA, 1029 bp, Zea mays
  Clone ID: MRT4577_130403C.1
atggacgctttaaactttgaataccctgattatgaacgactaagcaagggtgccaaagggacaaagagaaaaagagttgtcagtgttctgagcagacaggttgctaggatggtgaaagaggatgaagaagctctgaaaaacagaaaatccaatcttgggccgaaggtggttatttcgaagaagagaagggctgcaacaccggagccaaaagcagctgagatagaagaggaaaccccttcaatgtcttatgccgctgaagtagaagaaaatttaaaggaaacgccaccaccggccttagcatcgaaaatgacaccagctgccgaagttgttgcttctaccgaagctgccactgctgaagctaccaatctggagagtacattatccgctattgataaagtgctcttggatttggctgcggaggagactgctgcggccgcagaagatgtcctggtcgcagtgtctgagaaagggaaggaaattgccgaagatatttcggaagaaaaaggcttcaactttcaaaatataattggtcaagaattatccaaggctgagaaggaggagctgcaggagtatgatatatcctgtggctaccagccaggagccatgctcttcggcggaattaacgaagaagccttaggatgtattcgagatcgaactagggttttactgatttgtgacgaagcaaagatttctgatgaaggttattttgcacagagtatgctgctaagcaaagccttgagaatgcaacaagacctcgaagataaaaagaatgaaattataatcgagggcttggaaaagaaaatcaaagaccatgaagcttctctagaaaagaaagatttccttcttcagacgatggagggttcattggcagaagcccaagctaaaattgccagattaaacgatgaactcctccgaaaatcagaaagctttgaggaagaaaataagaattttgatgtgaagtttgaagccgaagtcgagaaaagttcgaatctgcaaaaatccttaaagagcttcaggacaagtgcttga

SEQ ID NO: 33328 - DNA, 397 bp, Zea mays
  unsure (1)..(397): unsure at all n locations
  Clone ID: MRT4577_130404C.1
ggtacccctgcagtaccggtccggttttttnggncgaaccccgttctaagagctcgtncgggcccaagtaggcctgaagctctgagagggtgaggatgagaagaagcggaaggaggagcttaaggagaagntcgagggcctgagcaaggtgatcaaggaggtgctgggcgacaaggaggagaagttgtggtntncgaccgcgtggtggactgcccctgctgcctggtgacggtcgatnacggctggacggccaacatggagaggattatgaatgnacaggcgctaaaggactcgagcatgnnagggtacatgtatnnnaagaagaccatgnatatcaaccaggacaacgnnnnnatggaggagctgnnnnagagcgaggaggccgacaagaacgaca

SEQ ID NO: 33329 - DNA, 441 bp, Zea mays
  Clone ID: MRT4577_130405C.1
ggccgaccgacgcgtacggtttgtgaattctttactttattctcaagcttatggtgcgttgaaaacaacagcggatctagaagactttgatttggcagatgaaactcattcttatgaataaaaagttgaaattgcacaaaaggatgtcccgtctgctgtgtttggaggtattcggaagagggaagatggcgatgacattcatgatggagatgatgcctctgctgccaaagaaaaatgcagtataagcctactgggtgcacttgaacgaattaaaaggcacaaacaagcttataaatattacacatccaactcgtactactgagatatatctttgacaattctatgaactaactgtgtaatgtctacactataagcgaaatttgagtgccatctattggatcattttgtatatttggaacaaaattatatacatttcaagtt

SEQ ID NO: 33330 - DNA, 303 bp, Zea mays
  Clone ID: MRT4577_130406C.1
tgattttaataggcggcttatgccctggctggcttcactggatgcgggggaggacccaagaaacgtacgaacggcatgaggatcctgtgcaaccagtgctacgcctgcgaggccacggtggtcaccttcgcctactaggccgacctgggcgcgctctgcgacctctacatccacgccatccacaagctcaacaggatgcaccagaagctccagctcttccacgtcgtggagctccccgccatcctcccaagcttcgacatgtgccacgagaggccggacattattttcttcatcttgtacagg

SEQ ID NO: 33331 - DNA, 138 bp, Zea mays
  Clone ID: MRT4577_130407C.1
ttgcggccaacccttaataggggttgtaatactcacacactgttgaggattgacaggccttgagtcgtttgttataacatgccatggagacaacatgcggtccctgacatatccacgtgaggttatgacagagcttat

SEQ ID NO: 33332 - DNA, 581 bp, Zea mays
  Clone ID: MRT4577_130408C.1
gtgcggcgctcaggcggcgggcttcaaacttctattcagcttcattgacaacttttctttctcaccattcaacggcatccacgttagccttcgaaacccaaaccacataccatcaaaacgagcaaataaacaaagcaaatatgtttcgtcaacagattgtccgccaggctcgcctgttcagcactacccccgttgcccgcaagagccctgtagacgctatcaaggatgccgcaaagactatcgacaagaccatctctggtgctgctgtgaagggtatcgagaagggcgaggaagtcgccaacgccgtcaaggaagctacacccaacaccgcgggagaggccaagggccaggcgagccaggttgcaggcgaggccaagggaaaggcgagtgaggttgcgggacaggccaagggcaaggcggcggaggttaagggggaggttaagggcaagatgtgaggatgatatgggggatgcgtaatgaactatgagcggattgcatatcttatgatggggaagagggattataaaagtaacccaagtagcctgtgcgcagggcgaaatgaatcttaatgttttcaatgg

SEQ ID NO: 33333 - DNA, 606 bp, Zea mays
  Clone ID: MRT4577_130409C.1
ctttcccgaataccccacctcgctcgcgcaagtcgtcgcacccttccccaggccccagctagccatggcgaccgcgccgcggaggctgctccccgcgctcctcaaggccctagctccagccggcgcgcgcggcctctccaccgagaaggctgtcggtgccgccgccgccgccgccgtcgccgtcgtcggcagccacaccgctaagtggatgcaggacacgagcaagaagtcaccgatggaactgatcaacgaggtacctccgatcaaggttgatggccgcatcgccgtttgtgaaggggttgctgaaggtgttgggcttggccacccaatcgagtatatctgccttgatctggaggcacccaacgtgtgcaaatactgtggcctccgttatgttcaaattcaccatcactaaaatagggaagatactgccgtttttcgctgcagaattttggagttgaggagcttatgcatgcacacttgtttcacaacgttctggtactggactttgtactatgcttggcgtcaaaacattaactttgatgatcatcctcttttcggatgactatttaataatcatgggttaactggtgtgtgattttttttttt

SEQ ID NO: 33334 - DNA, 654 bp, Zea mays
  Clone ID: MRT4577_13040C.1
cttgtcaggaaacctgttcctagtgggggcgctcgtcccctctggctccgcccctgccagtgctgtggtctggatagagatagatagggttcggcgccgccctcgcgcgtgggtagcttcgaaattcatttaggaattgaagagcgggagcggagcgggtgagatccagatttccctcctcctccttcctcttctctttatctttatcagtagtactagattacaaaaagagagggagagagagaggaccagatcctgattcctcacgtcatccgatccgaaataagattcgatttccaaagggaagtccagatcctgattcctctcgtcctcgcccgacggcaaccttgctggatccggattaaagattgatttgtttggtcagttggcccaaataaatagctagtccaagctagcgttggaggagggagagcacaagggttggcaatttctcgagtcacggggttatcgtccaagctaaatcaggccatgtccaagcagcggggtcgccgccggcgccaaacccgttacccccctgatggattaattgctggttcttcaaggggtaaaagaataatggcctcgtcctgccaacaagattgtgttccaggtggatcagcttatgcaaatggccaggcaaacacagaggccccg

SEQ ID NO: 33335 - DNA, 310 bp, Zea mays
  Clone ID: MRT4577_130410C.1
cccttggttccgctcgcacatatgggatggagtctgtgagacgggaatagttcctctaacgatcaagaatgagccagtaggagcgtaagtgatgtcaacagatatgttcgtaatgcattcggatcatacgccggccggggatcaacccgaagcgattgccaggctaattgctggcatcgaggagggagcaacacatcagaccttgaagggaattacagggtcagggaagaccttcacgatggccaatgtgatccatcggctgaagcgacccacgctcattcttgcgccaaacaagacgttgactgctcag

SEQ ID NO: 33336 - DNA, 921 bp, Zea mays
  Clone ID: MRT4577_130411C.1
gacacgactctcggcaacggatatctcggctctcgcatcgatgaagaacgtagcaaaatgcgatacctggtgtgaattgcagaatcccgcgaaccatcgagtttttgaacgcaagttgcgcccgaagccttctggcggagggcacgtctgcctgggcgtcacgcgaattaccccacctcgctcgcgcaagtcgtcgcacccttccccaggccccagccccagctagccatggcgaccgcgccgcggaggctgctccccgcgctcctcaaggccctagctccagccggcgcgcgcggcctctccaccgagaaggctgtcggcgccgccgccgtcgctgtcgtgggcagccacaccgctaagtggatgcaggacacgagcaagaagtcaccgatggaactgatcaacaaggtacctccgatcaaggttgatggccgcatcgccgtttgtgaaggggctgctgaaggtgttgggcttggccacccaatcgagtatatctgccttgatctggaggcacccaacgtgtgcaaatactgtggcctccgttatgttcaaattcaccatcactaaatagggaagatactggcgtttaccgctgcagaagtttggagctgaggagcttatgcatgcacacttgtttcacttagttctggtactggacttcgcactatgcttggcgtcaaaacattaactttgatgatcatcctcttttcggatgactatttaataatcatgggttaactgtgtgttgattttttttactatagatgaattgtgctcccctatcagaatctatacaagctgtatgtattgaaatcatactctgaaagtctgaatatgaaaagtatggaatttctgagggcaatttaatctcagaagttctaattttctgaaaaaaaaaaaaaaaaaaggggcgtccgggcc

SEQ ID NO: 33337 - DNA, 1168 bp, Zea mays
  Clone ID: MRT4577_130412C.1
tatggataaagagttcatatgtttctacttgagttctatactgttatggtcactattaagaagctaattttaagtcctatgtggctatgtgctgtgtactgcctcgttgcattatgtgaaagactgtgagtatcgagctctctaaagtcaatgtatattttcaaaaccttgatttaatatagttatacctgattacatatttgtttcacaatgttgtttcctactctgatttgtactttatgacaatttgaacatgtgtctcagttatttgcgaacaaagagttataattccaaacgggcatggggagaagcttgttggtttattacatggaacaagttcaaagaatcttgtgatcctttgtcatggattccaagccacaaaggatgacagcatcttggttgcccttgctaatgccatcacaaaggaaggaattagtgcttttcggtttgatttttctggaaatggggaaagtggtggtgaattccagtatggaagctacagaaaagaggcagctgatttgcgctctgtagtattacatttctcagaacagaaatatgacataattgctcttatcgggcatagcaaaggagggaatgctgttcttctttatgcttccaagtaccatgatgtccctgccattgtgaacatttctggccgctttgcattagagcgaggtatggagggacgccttgggaagaatttcatgaggagaataaacgaagatggatacattgatgtgaagaataaaaaaggggagttgcagtaccgggtgtcgaaagcgagtctggatgaccggctgagcactgataccctattctccagccgtgccataagcgaagactgcagggttctcacgatccacggcgccaaagacgagaccgtcccggcggaggacgcccggcagttcgcggcgaacatccgcaaccacgagctgcgcatcatcgcagatgccaaccaccgttacaccgggcacagggacgagctggcctcgctggtgctgggcttcctcagctcccatccctaccagaccacgtcgcgcttgcgtccgagactgtagatagagtagagcacacccacttgaccgtttgcgaacaaaaaaaaaatcccctgtaccaatccaagagttgtgggtatggtggtgtgtttatccagaaccagaacacgagc

SEQ ID NO: 33338 - DNA, 2439 bp, Zea mays
  Clone ID: MRT4577_130413C.1
gttccagttgacattgtgaagttgaacatccctgactactttcaaatagtcaagcagcccatggatttgggtacgatccagaaaaggatgaaggcaggcatgtactctacacctccggaatttgctgcagatgtgaggctcactttcagcaacgctatgaactataacccagctaacaatgatgttcatttaatggccaaaactttgagcaagaactttgagagccgatggaagcttattgagaagaagctccctaaaccagatgagaagcctcctcagccagatgagaagcctcctcaaccagttgagaagcctcctgtgaggaagcccacaaaaaagaattcaactaagagagtttccattgagaaagaagacctcactaagaaaaaaccctcaaagaaaagtgtacctaagcagtacatctttcggggagaagattcagctgacagtccagttctgcaaccaaagaaaaggaaaacctctcctttggtacaagatgctcctttggtaggggatattgttccaaccagaaagagaataatgacgagtgagcaaaaatatgatttaagtgcaagattacagtcatatggtgcattcattccagatcatgtagttgagctcataaggagtcacgctgactattgcgacgccaacgaagaggaattagagcttgatatggatgctctaggtgatgatacactttttgaattactgaggctacttgatgactatgacagagttaacccatcaagaaaccttacagaacaggatcctcatgaggttaagtctcgaagtcaatatgaactcatcaatgcgtcagtgtgtaacgaggaagtaaatgagctctttgacgaggacgttgatattggggagaatgaccctccagttttgacttttactcctttggtacttgaagatgaaacagcagacagaagccgcaaacatagtgcatctagcagttctagtagtgacggagaatcatcctctagtggttctagtagctcttctggaagtgatgccgatgccaaagctgctcaacaaaacagcgggtcaaaggaaaaaattctacctgtggatggcgtgggtcatgaaaaggattcactggacacattaaatttaccagagcaaagtacagaccctgtctctgtttctgcttatggtgagggggggtatgtatctgagaaggtctcccctgagaagcaaatccgagctgcccttctgagaagccgctttgctgatacgattctgaaggctcgcgaaaaggctcttgatcagactaccaaaaaggatcctgagaagcttcgacgcgagagggaggaacttgagaggttacaaagacaagaatttgagagctcggttgcaagctgaggctaaagctgcagaggatgcctgcaagagggctgaagaagcagcagctgctgaggctgctgcagaagctaaacgacaaagagatattgagagagaagcagctcggaaagctttgcaagagatggagagaactgttgacatcaacggagggagccactttctgaaagaccttgaaatgcttagaggtgtcacaggcgaagagatgcccaacttggttggtgaagggagccctgggtttcaactgggaagcagcaacgccctagcaaagctcgggctgtacatgaaagatgacgaagatgacgaggagggcgatttggcagatgcaccagtggtggttgatatcgaagagggagaaatagattaagcgtgcttcttctggaccattttttatacgcgacaggagacctgtgggcatcactgatctgcatagcttttctttggcatacaaagcgacctgacgaaaagatcgcctcgcaccagacctggaggtctggtattcgtttttgtaactgcccaagttttggagccaagtcactaggttcgtcgagcttatcgtttggattgagaatctctggacttctgatatccactttcgataaggacttgttcggttaagaggtgatcgaaggagattggagaggggattggagaggattaaatccctttctagtcaattgaacagaggtagcaactgaataagccctaaaatggaatggcgagtttactgcatatatgatgaggccataaaagcggatgaaaagggaggagaaggcacaaggagtgatatatatgatgaggccataaattcggatgaaatgggagaagagatggggtagtggggagaaggcacaaggagtgatggtgatggctcttgagctggtgccagccgtttttgaggggtagttttagagccatttccgtgtcgtgaatgtaatatcggaaactgtacaaaagttagctagttagacgatggaaatcattctttccttcaatttatgcagtgcctgttcttatgagacgttgcccaaaaaaaaacaaaaaaaaaaaaaaaaaaaaaaaaaaaaaaagaga

SEQ ID NO: 33339 - DNA, 1653 bp, Zea mays
  Clone ID: MRT4577_130414C.1
tatggataaagagttcatatgtttctacttgagttctatactgttatggtcactattaagaagctaattttaagtcctatgtggctatgtgctgtgtactgcctcgttgcattatgtgaaagactgtgagtatcgagctctctaaagtcaatgtatattttcaaaaccttgatttaatatagttatacctgattacatatttggttcacaatgttggttcctactctgatttgtactttatgacaatttgaacatgtgtcccggctaccctccgccgtcgcttcgcctcggggtcgcccgacgacaaccacgagtccacgacggcgcgcgcacctcgctgtcgcccccgtcgtgcgacgccgccggctgggcatcgccccggaactcctcctgaaggcccctcatcacgctcttgcaggctctggacggacgtgggaggccccgcggcgcccgtacgtatatctagcggcgagacggcaagctcccgccccatctccgccgcctccgctccccgtcgtccggctgcgctgttgctgctcatacggatcaagctcggctacacccgtttctgcgagcagatcagaggacgccatcgtcgggtcggtagggatgggacctgttcactccgatcaaaaggcgaagaaattggcgattatttgcgaacaaagagttataattccaaacgggcatggggagaagcttgttggtttattacatcgaacaagttcaaagaatcttgtgatcctttgtcatggattccaagccacaaaggatgacagcatcttggttgaccttgctgatgccatcacaaaggaaggaattagtgcttttcggtttgatttttctggaaatggggaaagtgatggtgaattccagtatggaagctacagaaaagaggcagctgatttgcgctctgtagtattacatttctcagaacagaaatatgacataattgctcttatcgggcatagcaaaggaggaaatgctgttcttctttatgcttccaagtaccatgatgtccctgccattgtgaacatttctggccgctttgcattagagcgaggtatggagggacgccttgggaagaatttcatgaggagaataaacgaagatggatacattgatgtgaagaataaaaaaggggagttgcagtaccgggtgtcgaaagcgagtctggatgaccggctgagcactgataccctattctccagccgtgccataagcgaagactgcagggttctcacgatccacggcgccaaagacgagatcgtcccggcggaggacgcccggcagttcgcggcgaacatccgcaaccacgagctgcgcatcatcgcagatgccaaccaccgttacaccgggcacagggaggagctggcctcgctggtgctgggcttcctcagctcccatccctaccagatcacgtcgcgcttgcgtccgagactctagatagagtagagcacacccacttgaccgtttgcgaacaaaaaaaaaaatcccctgtaccaatccaagagttgtgggtatggtgatgtgtttatccagaaccagaacacgagcacctgccgtccaaatcagcgtgactcgctctcgctctagaatttcaaaaaaagtcagtgccaggcatctaaaaaaaaaaaaaaaaaaggggcggcc

SEQ ID NO: 33340 - DNA, 575 bp, Zea mays
  Clone ID: MRT4577_130415C.1
aaatgaccttgcttattattaagtttatgggagtttacttaaacttataaaaaggacgagcccaccgacacttaacaccgtggtcagcaaaacaaaaataggagctggatcgcactaggttaaacgttgttagaaggggtccacttggagatcatgtttagtactgatacttggtccgatataaccatcttcaggttaacacaccatcatcatttggcgaattatgccacccttggttcgacttggaacgaacttccggaacatgcgataaattaacccaccttgttcaaatgcgacccaatactcgtaccaaggcttataaatcctggcttgagctatctgccacgcacttggtgaacaccacgttagaaggctccgacttcactcttactcttgagaattattgctaacacgtgtaacgaccacaagattcgatttggggcgagatggtgaggtgagggttgaacaagggatgacatgtttgacgactcaacagctaacaatgcgacgaccaactgggcatgatctgatctaatacgcatagggaggaatagcgaccaccacgatggactaac

SEQ ID NO: 33341 - DNA, 571 bp, Zea mays
  Clone ID: MRT4577_130416C.1
tccgtaaaaaaaaaaaaaaaaaaaaaaaaaaaaaaaaaaaaaaaaaaaaaaaaaaaaaaaaaaaaaaaagaaaaaaaaaaaaaaaaggagaaaaaaaatttaaaaagggggccggccttttttggagggttcccttgttttaggtcgcccgtttcttgtcaacgtgtttcgggtctttttattgggcctgcctcaattttctttacaccgggccgggcggtttaacaccgttgttgttctgggaaaaatccttggggtttgcccactttagctctttttgccgaattgtccccttttgcggcagctgccttttatggggggggtgtccctacactggtggcctttcccatcggtttttggcggcctttttggcgagggggacgttccttgtacgggctctttagccccgccggttgtgggggtttcgctgggcgggccctttactttggccggttcctttttgcccgctcctttcgttttttccctttctttttttccccggttggccgtttttcccggccttgttttagtttgggggttcttttgggggtccccttttagggctttaggg

SEQ ID NO: 33342 - DNA, 686 bp, Zea mays
  Clone ID: MRT4577_130417C.1
ggtaccggcgcctttcctcgagttttttttttttttttttttttttttttttttttttttttttttaaaacaacatcttttttattttataaaacctgggggttttgaaatataatttaaaatccttttatcccttggcttgggaagggaaaattccccgagggagggaatggcattaccggaaaggcggaaccagaaaagaaatccggttaattttttatgggcccccaacccagccggggagaaataacaatcttccccctaataaaaaattccaccatggcctcaacccttgggggacaaaagggcatttttattttaaagcaagttggcctttccaaagtttaataaacagaacctttgggtattaaggggcaaacggtttaacccaaagtttttttttcttgaagaaccttggggaaaaaacaagggcccaaaaagaacccctttaagggggctaaatggtttttcgaaacaagcttgacccggaaaaaaattttttaaggtttaagaaacccaaaggcccaaaaaaccccttccttgacctggtggcaaaaaaacaattaatttcccgagcgcgaaggggcccccccttacggggtaacggttgggcctttggggcccccgcccagggggggaaaccacctgtttccctggggaaaaaatccggacaattacctttttta

SEQ ID NO: 33343 - DNA, 2313 bp, Zea mays
  Clone ID: MRT4577_130418C.1
atttaacgcatctggcattgtgttcatgggagacaacatgaagccaaacttggaatcaggctccattaatggagaggcaaatggcgaggatggagctaaagctgatcagaagtccagccagcagatgggatctcatgctgcatatcctccatgggcaatgcatcctccatctggtgcagttgtttacccaccttatcctatgcaaggcatgcctttttatcctggggtgaatccatactaccctccatatcctccagtggatgatcccaggtaccactactcaggaaggaaatcttcgaggaagcactcctcggatagtaaggactcagaaactcttgacgttgaaagtgaccattgcagttcagatagaggaagttctcatggtcgcaagtcacatagaaaggggaagaggtccggaaagaaaaaacctagtgtggttgttatcaagaatgtgaatgtaacatctaaaaagcatggctcatcagagagcgaatcacaatcaagttctgaagttgagtctgcggacagtgacaattcacactccaaatcaagtgaaaggaagcataaaagctcaagttcaaagaaaaaggagggtaggagaactacttttgcctccggagatgaatatagcaaggatgaaatgtcaaatggccacgatgctgagcaaggaaactggagcgcattccaaaatttcttgttgagagcagaagaaaaaacaagatctagtgatgcagacctgtttgctggtgagaaagaacccccatcaaggagaaaacagaatgtaaacacagcagatcctattcttttagctgagagagatggtggcattgtccatgagcggaacatagtaggttttgattcagccaatgggaggactagagctatccgggtcatgtccaatgatgaacttgttatgtctggagcagtggtaacaacgcagagtacgcgggggattgtgaaatgaaggagattgaagctggtggaggaaggtacaggagagggacaggtgacgactacatggtttatggtcagggatgtcagatagacagacattgtttgttggatcctcttgcagaggcccagtacaagaatcctgttcagcaggacaagaataggaatggtgtggcggatgagtcctttatgattcctcttaggtccagcttacaggataatatcggagcagagagcagaactactattgacatagatgttgagcttccttctagaattcataaagcatcagatgaaaaggctgggcatcagcttttttacgaacctgacgaattggtgccagagcgtggatctgaagatgtttcatttggatatgatccagcaatggattatgatagccacatgcagactactgtgaaggtggaagatgaaaaaacagaggatgacttgccagttgctgacaatgatgtacagaaggtagagaaagagaagctaaggaatgcaaaggatggttcagataaacgaaggaaagatgccttattgaggaggttatcggcgccaaggaccccactgaatgatgcacaaaaacgtgcacagaacctgcgtgcatataaggcagaccttcagaaactgaagaaagaacaggaagaagagcaaataaagcgattggagaggctcaaattggagcggcaaaagaggatcgccgcaagaggtaatggaaagggtccagggaatggttctcctaaagcgaatggtacgaatggactcagtaaatcagttccaaccttcactgggttgaaaaaggagaaaaatggaacaactgaatcactcagcgatcgactgaagaggctttctgaacccaaaagcattgctggggcagagcattccttgaatccaaagtcaactggcgcagaccattcacgaagaagaagcatggcgtgagacggagaaccgagcatcttgaatccatcgtaccactcgctagctcagcaaccatgaatggcatatcaaaaggcttcttgtacagaaagaggaaatggctggcgctgtagcactgcctgcttccaagatttgtgatggaaaatcaagttaccttttcaatggcatggcgttgtacttccaattttaacataattatttcattcttttattgaggatggcttgtaatagctgtaaacctggatttttcggcgacgcggagctatattttggtttttggctgtatttatggaatggattgatcgttgtttgagatatattgtggtatttatacagtgtataaatgtcaattggctttgggttggacgagatgggccaattcaatttgtacggcagtagtatgacccgctgaagttggatgtc

SEQ ID NO: 33344 - DNA, 441 bp, Zea mays
  unsure (1)..(441): unsure at all n locations
  Clone ID: MRT4577_130419C.1
atttattttatatttattgattttgaatttttgccattaaatcttcttgttaaattttatataatatactattaggtgagtgcctgtgcgttacaagcctgagtttctcttggatatcattctggatggcttgcggatgttgtcattcatctcataatcgtataacacatatttgtatatataagttatcaagatattatatgttccagatgtaatgcacggacactgacctatcttatataatacactaagtgagtgcccgtgcgtcacaggcccaagtttctcttcgatgtcatctcgaacagctcgcatatgtcatcctctatctcataactatataacatatatgtacgtatataatttattgagatattatatggccttgntgcaacgcacgtgcactgacctagtaatggtttatgagcantaagtgtgttggat

SEQ ID NO: 33345 - DNA, 149 bp, Zea mays
  Clone ID: MRT4577_13041C.1
tcgagcactacactgccaccctttcaatgctattggataggattttctttagacaggcatgaagccccttcagctggcggccggagagcgctattgagctcacgaggccaagcacgcccgttcgtagagaaactgcggcgctcctacgg

SEQ ID NO: 33346 - DNA, 1612 bp, Zea mays
  unsure (1)..(1612): unsure at all n locations
  Clone ID: MRT4577_130420C.1
gagcagaagaaaaacaagatctagtgatgcagacctgtttgctggtgangaaagaacccccatcaagggagaaaacagaatgtaaacacagcagatcctattcttttagctgagagagatggtggcattgtccatgagcggaacatagtaggttttgattcagccaatgggaggactagagctatccgggtcatgtccaatgatgaacttgttatgtctggagaagggaggaactatatgcatagtgaaataaaggagattgaagctggtggaggaaggtacaggagagggacaggtgatgactacatggtttatggtcagggatgtcagatagacagacatagtttgttggatcctcttgcagaggcccagtacaagaatcctgttcagcaggacaataataggaatggtgttacggatgagtcctttatgattcctcttaggtccagctcacaggataatatcggagcagagagcagaactactatggacatagatgtcgagcttccttctagcattcataaagcatcagataaaaaggctgggcatcagcttttttacgaacctgatgaactggtgcctgagcgttgattcgaagatgtttcatttggatatgatccagcaatggattatgatagccacatgcagagtactgtgaaggttgaagatgcaaaaccagaggatgtcttgccggtcactgacggtgtacagaaggtagagaaagagaagctaaagaacgcaagggatggttcagataaaagaacgaaggattccctattgaggagactaccggcgccaaggaccccactgaatgatgcacaaaaacgtgcacagaacctgcgtgcatataaagcagaccttcagaaactgaagaaagagcaggaagaagagcaaataaagcgattggagaggcttaaattggataggcaaaagtggatcgccgcaagaggtaatggaaagggtccagggaacgatgctcctagagcgaacggtatgaatggacttagtaaatcagttccaaccttcactgggatgaaaagggttgaaaacggaacgactgaatcactcagcggtcgactgaagaggctttctgaacccaaaagcattgttggggcagagcattcgttgaacccaaagtcagctggtgcaggccgttcacgaagaagtatggcatgagttgatgtgagatggagaactgaatagcttgagtccatcgtgccactcgctagcccggtaacttacttactagaaacgtgaaaggcatctcaaaaggctttttgtacaggaaaaaaggaaatggctggctctgtagcattgtctgcttccaagatttgtgatggaaaatcgagctatctttcaatggcatggcgttggactttcaattttaacataattatttcattcttttgattcagggtggcttgtgatagctgtaaacctggtttttttcccaatgtggagctatattgtgggtgtatttatggaatggattgatctgtgtttgagatatattgtggtatttatatagtgtataaatgtccgactttggattggacgagatgggccaattcaatttgtacggcagtagtatgacacgctgaagttggatgtc

SEQ ID NO: 33347 - DNA, 485 bp, Zea mays
  Clone ID: MRT4577_130421C.1
ttcctatcgtgcctagttcgattgctgcctctcctccgaggccatcgcctacctaccaggctccccggaatataggggaaaaagctgcagacctcacatgaagaacgctcgcacggctcagcccgaaaggctctacgaccgaggaagagtccttgtatacaagtcgtgcaagaataaccaccaacagactacagcagtggcgcagatagagcgggggaagactcatgaggacgatacacgagactgccgcaagtggatgggctacgtctactagggcgcgacccttagccacggtagccgctagcgctgtatctgggggaaagtctactgtttttttgaagctccaccgtggagcgagcgaagttcagattaaagctgcagagggaatccatgggctgtgatgccagggtgtaacatgcaaccctaacagtaatctatagataatgagaatgcgtgttaggaccttttcttctacgattatatct

SEQ ID NO: 33348 - DNA, 320 bp, Zea mays
  Clone ID: MRT4577_130422C.1
cgcgccaacccttccgttccaccaaaaccccaaaatcaattaaccattttttttggaaacctttgcctaccagtagcgtttatttattaaaggaggaggctaatcctaaaaaaatcctaactcttgaaactaaaattaccctgtttttaaaacctgttaataagtccaattttccgaccccttaaaggattcaaggcttattaaaaaataactctaagtttggttttttcccaaattccacatggcagtaaaaataaaaaccttgttaggttaaaaaggttaaaaacctcaaataattttaaaagccacctaaggttgag

SEQ ID NO: 33349 - DNA, 542 bp, Zea mays
  Clone ID: MRT4577_130423C.1
aaacaaaaaaatggggctttgaggctttttaaaaaaaactttttgggtctcggggggtttgtttttatacccaacatgcggtctttgtaaaaaaatcacaaatagtccccgggggctcccgttttgccgtttttttgccggggggttaaaaaagctggtggctggtgctaaaatcgcccccaaacccccccgttttagctggtcccggggaacgggaagggaaactttttttaaggaaagcccgccccaactccaaaacaaggggatctggggaaagattaattggataaaccctttgcctccatgccctccaatatccgccgggccttttttttggggggggggacaacggtgggaattttcaacccgttttttagggggtcactacaaacggggaaggggaaatggaaggggttggaaacctcatttttccggagctcaggttttgttacatgaacaacaactttaacgttgaccaaagggtgttttggattggaaagctgggggtccaaaacacttgatttgaatcgaaggaagccccc

SEQ ID NO: 33350 - DNA, 647 bp, Zea mays
  unsure (1)..(647): unsure at all n locations
  Clone ID: MRT4577_130424C.1
cgctgcaattacatatctttttttgcgatttggaaaacggttctttttcatgacacccttttttgtgctggaacttatcaaaatgttgctgtccactgcggttttcttgctcaacattgctctcaatatagaagttacatatatcttaatcgttttggcgattaatggaacaagattttttcttcttgttctcaatttacaagggccaattatacgctccttgtgtgagtagggatggcaacgggtcagatttagatcgagtaaagtaaatatccgtccgtgactatacccgcggggattaattatactcatccgtgattatatccacgggtaaaaatttatactcgtgcttgtaactattaggtatcggacagtaacctacagttcttaagctgcgtatataaatgaagtaatctcctactcaccaacncacttaggttgtctatctcagtacttggctagcatagcttatactgttgtaccagataaaagagtgccactcttttatatattagcattaggtatagagttccgtagcaaaatggaagcaaagcacggacgactaggctcattttatagttatngcgggagtctaggacaatgatttcatggcttgctctgattaacaaacttttttcctatgcatg

SEQ ID NO: 33351 - DNA, 192 bp, Zea mays
  Clone ID: MRT4577_130425C.1
ttcggtggcagcggcggaggcggcgtcagggtaggccgcgccggcgccggcgccggcgtcggctacctctgccgagttcctctacgtggggacgctggcgagcagagccgacgagaggagcagcgacacgacgtcgtccggcgacgaggtgtcccggagctcgggcggttcgcctgtgcttcgcccgtttcc

SEQ ID NO: 33352 - DNA, 1564 bp, Zea mays
  unsure (1)..(1564): unsure at all n locations
  Clone ID: MRT4577_130426C.1
gccggccgggcttcgaagccaacgcggccgcgctgggaacgagactgggtcgcagtcgctcccggctcacggctccttgctgcacgccgtatgctgtcgcccgcaccacaagtccacgaccagcactcccttcatagacccccctccggcgaatccctcaccaatccagcgttcacacgtccttcttgcttcagtccactccaaggttaggtggacaatatgtcaagctctaaccagatgtgttctgatggcaagtttgggagaggtcctcgggagcttagtggtgctgtggacttaattagtcgctacaagctgctgaatcatcatagtttcttttgcaagaagcctttgccattggcaatttcagatacaaattaccttaacaatgttgtgggtgacacagaaattcgtaagggggaagggatggagttggaccaactctttcagaactcatgttcaagtgagaagactgcttacattcagccatttgacatggaaacactaggacaagcatttcagctgcgagaaactgcaccagtagacttgccttctgctgaaaaaggtacaccaaccatatctgggaaatccaaggtcaagtccaaggataaagtgaagaaacataagaaacacaaagagaaagatagagacaaggagaaggagcagaagaaacacaaacatcggcataaagatcggagtaaagataaagataaagataaggacaaagacaaagaaaagaaaaaggacaagagtgggaatcatgatttaggtggtgatcattccaagaaacatgagaagaagagaaagcaagaagtaactggaagttcagcaaatgtccaaaatcacaagaaaacacaaaagcacaaaattcagtgaaatttatgatggacttcgttaattgtcagcagtgcatgtttctattttagttcaactccatttatgttgttaatgagtggctctgaagtgttccttttccatatcttttctggcaaagacgcagttatcacagatggaaaatatttaatactacgactgctacagaggaaacaagatacctgtactgatggaatatgattcgtgtattattccttgggaacttgaacttatcatatggagttgtaaattattttgtcatttcgacttatgttcacttcatcattgccttgtatgatcatgtaattcagagaccgcagagcaaaggtgggctggggcttagggcttatttggaaacaaagtattttaaaactatagttttagaataatatagttttaagatgttacgacataatcgtagtgtcttttacatcactcttaacaatacatatttgtagacaaagtatttcaaactatgatatttagcacacatgtgcaatgctagttataggcaaaaactttgggttggaatgaagtttcaagtgtcatggtatctacaaaaccatgatatttaaaacagtgttttataatgtganaaaaaaaaaaaaaaaaaaaaaaaaaaaaaaaaaaaattatataaaaaaaaaaaaaacaaaaaaaaaaaaaaaaaaaaaaagggggcgtccctttttaa

SEQ ID NO: 33353 - DNA, 871 bp, Zea mays
  Clone ID: MRT4577_130427C.1
cagttgcgagaaactgcaccagtagacttgccttttgctgaaaaaggtaccccacccatatttgggaaatccaaggtcaagtccaaggataaagtgaagaaccataagaaccccaaagagaaagatagagccaaggagaaggagcagaagaaacccaaacatcggcataaagttcggggtaaagataaagataaagatagggccaaagccaaagaaaagaaaaaggccaagagtgggaatcatgattcaggtggtgatcattccaagaaccatgagaagaagagaaagcaagaagtacctggaagttcagcaaatgtccaaaattccaagaaaagtactgcatcatatatattgtttttatcatatttccataattaaaataaaatatttcctaatattgcgattttgttgttgaacattccttgtttgtttatgacagcccaaaagcccaaaattcagtgaaatgtatgatggacttcgttaattgtcagcagtgcatgtttctattttagttcaactccatttatgttgttaatgagtggctctgaagtgttccttttccatatcttttctggcaaagacgcagttatcacagatggaaaatatttaatactacgactgctacagaggaaacaagatacctgtactgatggaatatgattcgtgtattattccttgggaacttgaacttatcatatggagttgtaaatttttttgtcatttcgacttatgttcacttcatcattgcctttatgatcatgtaattcagagaccgcagagcaaaggtgggctggggcttaaggcgtatttggaaacaaagtattttaaaactatagttttggaataatataagtttaaagatgtatgacat

SEQ ID NO: 33354 - DNA, 917 bp, Zea mays
  Clone ID: MRT4577_130428C.1
ttccgctgcttaccatccgcttttcctcgtccccgccagaaccggagaccgaggaggagcccctcctcgatgcacgccgccaaactccaaaccctcaacgggctacagctacgctcttccttctccgctctcagctgctcctgctctccctctccttctcccggcgatggtgggaaacgcagcgcccgcagcctgttcgatgagctttccgttctttctccagtcgttccatgggaggtggatgatatatggagaatatatgcaggttatttcttcatcttgcatatccccctgagctttggagggctcgggtgattgccaaagtaatgcagcgctcgtcacttgactcgatgacaacggtaatttctacactcatgcttcagttagcagagcttgttttgaccttagtgctactccagtattctgcaaagccagggcaagctatccaacctttcttttgtgggaaggtttttacagaacggaattgggtcaaagagactgtattaggctttgtagttttgataaccctggtattgaccacatccatcttagctgacaaattggtagggtctgaggatgcatatgacccggtattaaaggagatcctttctggcagtccagcctctgctctagtgtgtttctttctctactgtgttattgctccactatcagaagaaaccatctaccgtgggttccttttgacggctttgtcatcttcaatgaaatggcgagacgctgtcgtgatcagttcgctcgcgttcactgtggcacacctgtccggtaaaagttccattcaactgttcgttgttggatgtattacagggctggcttactgtcgaactggaactttagctgcttctttcaccattcattctctgtacaatgcagtattattgtatacggcttcgacagcaacg

SEQ ID NO: 33355 - DNA, 335 bp, Zea mays
  Clone ID: MRT4577_130429C.1
gaaaaccgagagcttcaactctataggatccaacaagccatccgcgtgcgcaacataccttgatcaccctagattgaacactagacagcacctaactttggtgcagtcatacggcgcaaaccatgagggcacagcagctgcaccaactcgtgctacctgtgatcaacacaagtagttctggcagaacctttattactactctaagcaacaacagttcgttccattcaaccaactgtctacattgaaccgtgctgcttatctgcatgaacaactattaccattgaggcagctagctactgtactactctcagcaacaacaactctttccatttaac

SEQ ID NO: 33356 - DNA, 1353 bp, Zea mays
  Clone ID: MRT4577_13042C.1
atggcgccgaagaaagcttcagcggctggggctgcagcactacaaccgctggaccacaaccaggagaccgtctctcttcgggaggccagaagccagaagagaaaagctgttagcccgacgcttgaggaagaagagctggaccaagaaatcagagagatggagatgctacatcaacaagtacagaggaagaaggagaagatggcccgcctagctgagttgcaaaggcaaattgacgaagcttctgaggaagttcgccatctcaatcacgatgagcagaacagaaggcctcatcagaaagaccttcatcaggagggcttcgtcaacgaagacgactggtatgataatttccatcagggaaattttgtttttgatgatgcttctcccctatctgctgagctgcaggctactccttggcctccatcctataagccaccccagctccccatgtttgacggccactccgacccgaagcaattcttgatgagctacgaagcaacagtgtcttcgtacgggggcaacgctgcagtcatggcgaagtctttcgtcatggccgtcaggaatgttgctcagacctggtattcctcccttcggccaggaacaatcacttcatggcagaagctgaaggatatgttactgaccagctttcaaggatttcaaacgaagccggttacagctcaagccctcttccagtgtattcaggatcacgaagaataccttcaggcttatgtccgaaggttcttacgattgagggcgcaggcaccaacggtgcccaatgaaatcgttgtcgaagccatgatcaaggggcttcgtcctggacctgcagctcaatactttgctcggaagcctcctcagaccttggagaaattgctccaaaagatggatgagtacattcgtgccgacaatgactttcgccaaagaagggaggaggccttcagattttctgagatgaccaggggcttcggcggaagattcggagatcagccaaggagactgttttgcctattctgtggagagggcaagggccacaccactaggacgtgccatgttacaatacagaagcaaaaggaactagccgaagctgcatctcaacaagctcagtcgaagcaggttttgcatactgcttcatttcatccgccttatgtcccacaatacatagacaaccaccctgcggcttctgtagcttcggcaagtcaacctcaagcttcctggcagcagcctccacctccgcctccattgcagcaaggtcaacagccagaagggagtcaatacgctccacagcagagggacttcagagaacagtccgaagctcgcactgtcaacagcactgtgccagagtcgaagcacatttattga

SEQ ID NO: 33357 - DNA, 165 bp, Zea mays
  Clone ID: MRT4577_130430C.1
agcgcgataatagtagatatagactgggagcatagtttgccaattaggcaaaagccacaaaaccctgcgttccctgagcatgccctcattgtgaatcccagacctcaacacaagcataaggagccagaggacggacaaaatgtgcagactgcggagggcaatgag

SEQ ID NO: 33358 - DNA, 382 bp, Zea mays
  Clone ID: MRT4577_130431C.1
gggggggggacgaatcatgtacgctttttgcgtgcactatacaaatcaaccatggtgcatgcttaaatatattgcactcacgcaacatactgaatactatacatttgcttcgcataataatcatcctgttatgtagcattatacattttaataacatcaaaatatcactttgaatattgttaaccggaactagatctttaaaatcgctattgataacttatttgaaaactcattaggcttccataatagatctgaattcaccttgctgctctaaaaaactctcctgggtaaaaagtaaacaccaaaaacaccaaggccggccggccaagaaaagccatcaaatttttttggttcttaaccccctaaataaacccaatgaaaa

SEQ ID NO: 33359 - DNA, 118 bp, Zea mays
  Clone ID: MRT4577_130432C.1
gtattactgtggatatgataaccatgtctactcttatgtgcaaacataccgttgttgtccaacatggtgtactgctaagccacacctggaatgccttcatacagtaataagaccacct

SEQ ID NO: 33360 - DNA, 393 bp, Zea mays
  unsure (1)..(393): unsure at all n locations
  Clone ID: MRT4577_130433C.1
gttggtgtatgcaatttaatatggggtatcaaagctagaggtcatgaggttgaatcctggttagcgtaattaaaataaaataattgttgctcgctcatattccacatctgagacccaagagatgctcgacgtgagggagagttttgggaataatataagtgaattgcccatctctttcaatcagcttaaacttttaggttgaattagttggtgtatgcaacttaatagttatcattttcacttcccattagactttttctcttctttcaatacacatttttcctttttccaacatttgtctctatttctctagatctctcttggtttctgtgcaccacaccttttttacttctaaattatcgtgtcaaacttaanacatcaattattttggga

SEQ ID NO: 33361 - DNA, 477 bp, Zea mays
  Clone ID: MRT4577_130434C.1
agaaacaacgaccagggctggctgatttacttccaatcgagggagcgaaactagctgcttatagggggcaccaggcaagcgaagcaagcaccaaaccgggggggggctaaagaacaagaaaacggggctaccgggggggcccgggaacaggataaagggcgggggcccaccacggggggttaatgtaacaaggagaggggccgttgcgcgcggggcattgggggcggacctgagccggggagcccgggggaacggggccccgccccgtttggcgggaggagtagactaactgggggaagaaggggctttggtctagggggaaccccgggaggagggggcgcggggtaccgttgggaagaaggggctggaccggagtgaagagggcctgccggtggagcagataggcgcagtccttggtgaccaaggcgtggggggtgcgaatgtggttggcgggcaggttaactgtggagttgggcg

SEQ ID NO: 33362 - DNA, 305 bp, Zea mays
  Clone ID: MRT4577_130435C.1
tcgtgatgatctaactgcgatgctgtcatttgatgcactagctgagacttgagagcttgcgggaaaatggctaccatttgctaagaagcacaacattgaacctatagctcctgaatggaacttttgccataaaacggagtacttgaaggacaaaattcacccttcatcttgttaataccggctggccatgaagacagaatatcaataattcaaagttagggtaaatgggcttgacgctaaagcacaaaaagctcctgaagtaagatggatcatgccagatgacgcaccatggccacgaaacaata

SEQ ID NO: 33363 - DNA, 431 bp, Zea mays
  Clone ID: MRT4577_130436C.1
aaaacttgtccttataacggcaacaagcggggaggggggccaacggtagagcggaggcagggccaaaactggacagggtacaagcaccaaaccagggttgaaaaagatcgggaagggaccccgcataaaaaaacaatggctgcaccaaaacaccccaaaaaaacttggaaaaccgcccccccaggggggcctagaggtggccaaaaaaaccaaaaagaggttgtaaaacgggccgcgcaaggggaccttgaggagaggggctagcccaaaaagggagcaccgcacaaggggggacacccggcaccacgagggaaaaaacaacttgagcttgtccacgccaaaaaaagccaatgggagcccaacgccctagtcgaggggcccttgcacggtgcacgtccacttcccgagggcccatggcgggctgcccaggc

SEQ ID NO: 33364 - DNA, 1340 bp, Zea mays
  Clone ID: MRT4577_130437C.1
gtggtggtgtttttttttccccatttttgggcgaaacaaaactttatttattgataatgatatagtaacatccttttattgcttttctttgtgtatacagctggtcctctctgttgatgaagttcacggaaccacattactactactatattatatacaaagcttcgctcactcataaacgaatgactccagcaacaacttggagcatctaccatggaatatacagcgaaactacgatccccgtcgcgtgtaaacaaaacgaaagaacggcatgcttttttcacaggagcaaaacaattcggacaagtacatcgacctggaagtttgaccagagacaggatttcgggaaagcctatcagcgaaccttgtttttttttcccttttggcatgctcatgtatgtgtgattagtaagggcagcttggcttcctcgcttgatccctttctgatgtaggcatacagcagcaactgtacgatacccaatatggttccaatgccatttggaatatatatgaagccatcaccaagcagcactccgtatatgacgaaggatgcactcatcagaaacatggataatgacaagtagaagggcatgtattccacgctcttcgtccggatgaccagattgacgattgacatgggggacgcgaacatgcatacgagggacgcgacgctgagatatccgacgaacacctgccgggctttgtgatccaacaaagccagactaacaaacacaatcagtccgaacaccaggaagacagcggccaggagagcagagaccttgagcctctgcttggcgtcggcgaaggcgatgaacacggcggtgtaggcgagctggaacacggcgccgatggagttgacggtggcgacgaggacgacgccgtaggagacgaaggggaggccgtaccacatgcagatgaggcagttgagcagcgagtagatgtacggcgtgcacgagaactgctccgtggatccgttgcggacgatcctcttgaatgtggggagcggggagacgaagagcacgaaggcgaaggcgttccctgcgattccggccccgtagcagcagaggtggcggaaggacaagtcggcgacgaagctcgtcaatgccggagcatcccaatccatggtggtgcgtcctcccttgcctgcagcacgggagtgctctgctcgaatctgaatacctattactattagcagaagcaggaccgcaggcagcagcgggggcggcgccgtcaccagccggggtggggatttgaggatttcgctgttttgctcggcgtgttgcccgtgctccttgaattcgccctgtccttctcggtcgatcggaatgtgtcccggccgg

SEQ ID NO: 33365 - DNA, 348 bp, Zea mays
  Clone ID: MRT4577_130438C.1
tttgggctgatttatgtgcttgaggcgagtcttttcatcactattgctcatgccgccatgagcttcgcaatttcagaccgtagggtttctacgcttctctgtttctggaagaactggcgaaaattatgaacggcaggcgttgcgatggagaacgtagtggcgttcgcgtgaatggtggttttcgaaattgtcgcctatctggactagtacgcggagagcggcgtgacggcggaagatctcgtggtgcttatggcggtcttagagctaatcctcgatgtaaactaagtcactgaggatgtagctttagaagatggggcggattaagacatagcgataaacgccgacgct

SEQ ID NO: 33366 - DNA, 152 bp, Zea mays
  Clone ID: MRT4577_130439C.1
cgacactcgccgcgcaccaccaccagcgctgcggctcacggctacgcagcccgctctcccgaccgacccgtgacctcatctttgtgctattagaacatagagtagcgcttggatcgatcgacgactgagtccgctaaggttcggcccgatgg

SEQ ID NO: 33367 - DNA, 1515 bp, Zea mays
  Clone ID: MRT4577_13043C.1
atggcgccgaagaaagcttcagcggctggggctgcagcactacaaccgctggaccacaaccaggagaccgtctctcttcgggaggccagaagccagaagagaaaagctgttagcccgacgcttgaggaagaagagctagaccaagaaatcagagagatggagatgctacatcaacaagtgcagaggaagaaggagaagatggcccgcctagctgagttgcaaaggcaaattgacgaagcttctgaggaagttcgccatctcactcacgatgagcagaacagaaggcctcatcagaaagacctccatcaggagggcttcgtcaacgaagacgactggtatgataatttccatcagggaaattttgtttttgatgatgcttctcctctgtctgctgagctgcaggctacaccttggcctccatcctataagccaccccagctccccatgtttgacggccactccgacccgaagcaattcttgatgagctacgaagcaacagtgtcttcgtacgggggcaacgctgcaatcatggcgaagtctttcgtcatggccgtcaggaatgttgctcagacctggtattcctcccttcggccaggaacaatcacttcatggcagaagctgaaggatatgttactgaccagctttcaaggatttcaaacgaagccggttacagctcaagccctcttccagtgtattcaggatcacgaagaataccttcaggcgtatgtccgaaggttcttacgattgagggcgcaggcaccaacggtgcccaatgaaatcgttatcgaagccatgatcaaggggctccgtcctggacctgcagctcaatactttgctcggaagcctcctcagaccttggagaaattgctccaaaagatggatgagtacattcgtgctgacaatgactttcgccaaagaagggaggaggccttcagattttctgagatgaccaggggcttcggaggaagatactacccgaggcatgtccgttccattcacaacactcagaatgatgataaggggagtcagcaaaacaggccgcagtgctcctcacaggcttcggggcaacaacaaactttctttcggccaccagctccaagaggcagaggcgccaggggcttcggcggaagattcggagatcagccaaggagactgttttgcctattctgtggagagggcaagggccacaccactaggacgtgccatgttacaatccagaagcaaaaggaactagccgaagctgcatctcaacaagctcagtcgaagcaggttatgcatactgcttcgtttcatccgccttatgtcccacaatacatagacaaccaccctgcggcttctgtagcttcggcaagtcaacctcaagcttcctggcagcagcttccgcctccacctccattgcagcaaggtcaacagccagaagggagtcaatacgctccacatcagagggacttcagagaacagtccgaagctcgcacagtcaacagcactgtgccagagtcgaagcacatttattga

SEQ ID NO: 33368 - DNA, 374 bp, Zea mays
  Clone ID: MRT4577_130440C.1
cacggcccggcacctctgggctgatttagtgcttggttatgtacttggggtaagaaagaaggtcccctacacggagtgggaaatggagtgccaggtggtatgcctcgtcggcagggacctccactgcgacttccacaggggttaactgcgcggtttactcctcgaggttcgcctactgagtctgagactaagactgagactatgactctacctattacgttacgtcaggtgcacgacttcgggactaacgtccgaagtaagtaccggggtatgtagaacgtcctcacggtcgaacacacaatcgaacacggcgttattgacgtcattagcgaattgactctcctagggactctcttgatcctgatcgttacatt

SEQ ID NO: 33369 - DNA, 2307 bp, Zea mays
  Clone ID: MRT4577_130441C.1
cggacgcgtgggtgaagggtggagtgcttctcattggttattcatcatttagaaatttatcccttggaaagcatgtgaaggacaaaaattctgcaaacgaaattacttatgctttgcagtgtgggccagatattcttgtatgtgatgaagcgcatatgataaaaaatagaagggctgacattacacaggctctgaaacaagtaagaacacaaagaagaattgcgttaactggatctccattgcagaataatctgatggaatattattgtatggttgattttgtcagggaaggttttcttgggagtactcatgaattccgaaacaggttccagaaccccattgaaaatgggcaacacacgaattcaacatcagatgatgtgaagatcatgaaccaacgatcacacatcttgtttgaacaactgaaaggttttgtccagcgaaagagcatgaacgttgtgaagaatgatctaccaccaaagaaggtttttgttattactgtaaagctctcacagctgcagaggaagctatacaaaaggttcttggatgttcatggtttctcaagtagtggttattcagaaaaatctcacaggtccttctttgccaagtaccagacattatcccaggtatggaatcatccggggctcctccagatggctaaagaacaaagaggaaatttgcgtcgtgaagacgcggttgagaattttatgatggatgagagttcaagcgatgataatgttgaaaattacttgcctaatggagagaagcaaaaggataaagctgatcagcagtccaagaaaagcaacatcattatgaatgaggaaagtaactggtgggaggaacttttagatgagaatacttatatgaaagcagattacagtggcaaaatgaccttgctccttgatatcctgtcaaaaagttctgaattaggcgacaaagtattagtgtttagccagagtttgaccactctggatttagtagagttttatctggcaaaattgcaaatcaatggaaaagaaggcaaacattggaagcgggggaaggattggtacaggcttgatgggagcactccatcttctgatcgtcagaatcttgtggagatgtttaatgaccttgaaaacacaagagtgaaatgcacattgatatcaactcgtgctggatccctgggtatcaaccttcatgctgcaaatcgcgtggttcttcttgatggatcatggaatccaacacatgatctgcaagccatttatcgagtttggaggtatggccagaccaaacctgtatatgcctaccccctaatggcacatcaaacttaaaatcaatttatatataagcgccaggtgacaaaggaaggccttgcagcaagggtggtggatagacagcaagtttcaagaaccatctccaaagaagagatgctgcatctttttgaatttggtgaagaggaattaatggaacagaacgagaatggttctactatgattgagaagccatccacttctaacactattaaaacctctgtgcctgttcctgtcgacagtctcatgctgagcctgctcagtgagcaaactcggtggatttcaggttaccatgaacatgaagctctcctccaagaaaatgaagaagaaaagcttacaaaggaggagcaggacctggctttgtccgaatgggagtcattgaggaaagctgcatctgatcctgagagaaaatcaagcatgagcgcagttccaacatatcccaatcctgtgcggccacttaagcctgcttcaagaagccggcaactgcagcaacctaaggctaactcaaataaccaaaagaagtgcaccaacttaacccacttgctgactctgagaagccatggcacaaaagcagggtgcacgacaacctgtaacgagtgcggccaggaaattagttgggagactctaaacagagatggtagatcgagatgatgcctgtctctgtggcattgccagatttttttggggtctttatgtaatgttaacgtccaggtagcagtatatatattgcgtatacgagagtattagagtaggtagaatgtagaatggacaaaaaatggctcttgtggtacacatggtagaacgcatgggatgcaaaaaatgaacgatcacattgttatggaatgtagtcgtaacaagatgtttgttatgcacttattgtcttttttttttccttatcctcagcgctagctattttaagtcaagtgtttgtctgaaatttgccaatcggaaggcataactttataggtttaaaataatgaatactaataatgtcttggaaaaaaaaaaaacaccacac

SEQ ID NO: 33370 - DNA, 442 bp, Zea mays
  Clone ID: MRT4577_130442C.1
ggggggccccagaagaaaaacaacaaccccccaaccccaagaaaaaaaccaacgtttgcattggccccccacaagaacccccaccgcaacaaaaattattcaggggggaggaaaaaaaagagcctccaaaaaaattgcccaccaaaaaaaaaaacccctggggccacaatttatcaacttgaaagcccaacaaaaagcattccttttattaaacaatggggccaggaacttacccgggggcggggcgccaacccaaatctcggggagggggacccaaaaaaaaatttccttggccttgacccccggaatctttttgagccggcccttgggggccaccccccacaccttggggccaaaaaacaccggggggccggccctggcaaaaaaagggcccaccttggggggctgccggaaccacacaaaacccctttcccccaagaaa

SEQ ID NO: 33371 - DNA, 443 bp, Zea mays
  Clone ID: MRT4577_130443C.1
gcctgactcttacactcgcagggggggtgtcgcacctcttcggacgatgtcgacccacgccgactccggccgctagtgctgctcgtccgaggccaccaggcgccccgcgatagcggagggagctaccaaggcggggggaccggaccccaccgccgtgcaagcgaaagcagcgcaccgcgctcatgaacatcaccaacgtcaccgatccgggggcgagggacaacgccgttgggaagggcgcgccaccgatcaccgacgcgaagctgaatccaactacctcaggtgcacccttaaagaagccatttttggcaaatgctcacaccatacaagggttctgcgtgcgaaggcggatgccatcaagccagctacaccagtataatcgccatgacagcatatgatagcagaagcataatgttcctgtgactaccactgtaccatgtgcc

SEQ ID NO: 33372 - DNA, 198 bp, Zea mays
  unsure (1)..(198): unsure at all n locations
  Clone ID: MRT4577_130444C.1
cctactctagaggcgtttgctccccaatcccttcggcccgcccgctcgacgtgatcccaccggcagccatgggatccatacannagcaccgncnnccgtctagtgggggagccannactccagccttctgggaaccaccccaactcccgggccgcccccccggttcctgggnaacaaacaaactctggcccccttcac

SEQ ID NO: 33373 - DNA, 346 bp, Zea mays
  Clone ID: MRT4577_130445C.1
tggacgtcaccggcgtcatcttcgtgaacatcaacggcacatccatcacgccggaggtcatcacgctcaagtgcgctaacagcctgccatgtcagggcgtgcacctcgtcaacgtcgacatgtagtacaatggatacggtaacaagaccatggacgtctgcatgaatgacatcggcaagtccatcggattggcaaacgagctggcgtgcatttgaaccaattgactatcattcatatattatgtactatgtttgtgcacgtgcgttgacactgaagttatacattagtatcaccctcatctacgtaacgatagatatcactatgagattcaaagtaagatacaaag

SEQ ID NO: 33374 - DNA, 585 bp, Zea mays
  Clone ID: MRT4577_130446C.1
ctgcgatccggcgcctgcgtcacctccgttcgccgctctccccgcgtctccctatcatacgcagctcgtccaggtaagatgtcgtccgaggcgtcgaaggtggcggtgccggagtcggtgctccgcaagcggaagcgcgaggaacagtgggccaccgagaagaaggagaaggctctagtcgagaagaagaagtccatcgagagccgcaagctcatcttcacccgcgcaaagcagtacgccgaggaatacgatgcccaggagaaggaactggtgcagcttaagcgcgaggcccgtttgaagggtggtttctatgtcagtcctgaggcaaagtcaacaaggctactattaacatgctacgcagggttgagccatatgttgcatatgggtacccaaacttgaagagtgtcagggagttgatctacaagaggggctatggaaagctgaacaagcagaggatccctctgtccaacaaccaagtcatcgaggagggcttgggcaagcacaacatcatctgcattgaggatcttgttcacgagatcatgactgttggcccacacttccaggaggcgaacaacttcctgtggc

SEQ ID NO: 33375 - DNA, 264 bp, Zea mays
  Clone ID: MRT4577_130447C.1
tctagatcgcgagcggtcgccctttattttgatttcgcgaagaactgagaccattgactaggatcccaagattatcccccggtggaaatggaaaggtcccaaaaccagcattggggaacccgttcgcaaaatacagctcaggatatcaggccgtgacgcgatatttttaaaaactcggcaacatcggaaactttttcagttccttccttcctggacacgtacaaaagacacgagcaagcgtgattcgggtgcggttacagactt

SEQ ID NO: 33376 - DNA, 998 bp, Zea mays
  Clone ID: MRT4577_130448C.1
ctcgaggccggccgggctccgccgcctgcgtccacctccgctcgccgctctccccgcgtctccctatcatacgcagctcgtccaggtaagatgtcgtccgaggcgtcgaaggtagcggtgccggagtcggtgctccgcaagcggaagcgcgaggaacagtgggccaccgagaagaaggagaaggccctagtcgagaagaagaagtccatcgagagccgcaagctcatcttcacccgcgcaaagcagtacgccgaggaatacgatgcccaggagaaggaactggtgcagcttaagcgcgaggcccgtttgaagggtggtttctatgtcagtcctgaggcaaagctgctctttgtggtccgcatccggggtattaacgccatgcaccctaagaccaggaagatcttgcagcttctgcgattgaggcagatcttcaatggtgtgttcctcaaagtcaacaaggcgactattaacatgctacgcagggttgagccatatgttgcatatgggtacccaaacttgaagagtgtcagggagttgatctacaagaggggctatggaaagctgaacaagcagaggatccctctgtccaacaaccaagtcatcgaggagggcttgggcaagcacaacatcatctgcattgaggatcttgttcacgagatcatgactgttggcccacacttcaagggggcgaacaacttcctgtggccattcaagttgaaggcgccgctgggaggcctaaagaagaagaggaaccactatgttgagggcggtgatgctggtaaccgtgagaactacatcaatgagctcatcaaaaggatgaattaggttcacgatcgagctcattgataccctgtgctctaagtgacttgtgctatccttattttatattagaaagttggatcgtggatgaatatgcatgcagttttgatgtttcgaactagatgtgtatggaagaaatctgatcttctttctggaaaaaaaaaaaaaaaaaagcggcc

SEQ ID NO: 33377 - DNA, 845 bp, Zea mays
  unsure (1)..(845): unsure at all n locations
  Clone ID: MRT4577_130449C.1
cattgggtacctcgaggccggccgggctccgcctcctgcgtcacctccgctcgccgctctccccgcgtctccctatcatacgcagctcgtccagatgtcgtccgaggcgtcgaaggtagcggtgccggagtcggtgctccgcaagcggaagcgcgaggaacagtgggccaccgagaagaaggagaaggccctagtcgagaagaagaagtccatcgagagccgcaagctcatcttcacccgcgcaaagcagtacgccgaggaatacgatgcccaggagaaggaactggtgcagcttaagcgcgaggcccgtttgaagggtggtttctatgtcagtcctgaggcaaagctgctctttgtggtccgcatccggggtattaacgccatgcaccctaagaccaggaagatcttgcagcttctgcgattgaggcagatcttcaatggcgtgttcctcaaagtcaacaaggctactattaacatgctacgcagggttgagccatatgttgcatatgggtacccaaacttgaagagtgtcagggagttgatctacaagaggggctatggaaagctgaacaagcagaggatccctctgtccaacaaccaagtcatcgaggagggcttgggcaagcacaacatcatctgcattgaggatcttgttcacgagatcatgactgttggcccacacttcaaggaggccaacaacttcctctggncattcaagttgaaggcgccgctgggaggccctgaagaagaagaggaacactatgntggagggccggtgatgccggtaaccgcgagactacatncatgagctcatcaaagggatgantttaggtcacgatcagctc

SEQ ID NO: 33378 - DNA, 403 bp, Zea mays
  Clone ID: MRT4577_13044C.1
gggccccccaaacaagaaatgaaattttgaaaacccctggtgggctggggttaaaaattccaaaaaggtccgggcagccaacccataaaatttcatggggcctttcccccaaactaaaacacaggacttcaaaaattttctttggcgttttttttaaaagggatttattaaccttatctattttcaccccggtagcgacggtccattttcattcaattaagggcttaaatttgcccgtgggaacttctttagatttaaaaacataaacgacgatggtcttgcacagggatcaagtcattaattttttttgatcccacccccaaaatttgaaggcgtgaatcaggctttgggccttttttgtttttttggaatccccccatttaaaaaattttgagtttgcgtc

SEQ ID NO: 33379 - DNA, 1049 bp, Zea mays
  Clone ID: MRT4577_130450C.1
ttgggtacctcgaggccggccgggctctccgccgcctgcgtccacctccgctcgccgctctccccgcgtctccctatcatacgcagctcgtccagatgtcgtccgaggcgtcgaaggtagcggtgccggagtcggtgctccgcaagcggaagcgcgaggaacagtgggccaccgagaagaaggagaaggccctagtcgagaagaagaagtccatcgagagccgcaagctcatcttcacccgcgcaaagcagtacgccgaggaatacgatgcccaggagaaggaactggtgcagcttaagcgcgaggcccgtttgaagggtggtttctatgtcagtcctggggcaaagctgctctttgtggtccgcatccggggtattaacgccatgcaccctaagaccaggaagatcttgcagcttctgcgattgaggcagatcttcaatggtgtgttcctcaaagtcaacaaggcgactattaacatgctacgcagggttgagccatatgttgcatatgggtacccaaacttgaagagtgtcagggagttgatctacaagaggggctatggaaagctgaacaagcagaggatccctctgtccaacaaccaagtcatcgaggagggcttgggcaagcacaacatcatctgcattgaggatcttgttcacgagatcatgactgttggcccacacttcaaggaggcgaacaacttcctgtggccattcaagttgaaggcgccgctgggaggcctaaagaagaagaggaaccactatgttgagggcggtgatgctggtaaccgtgagaactacatcaatgagctcatcaaaaggatgaattaggttcacgatcgagctcattgataccctgtgctctaagtgacttgtgctatccttattttatattagaaagttggatcgtggatgaatatgcatgcagttttgatgtttcgaactagatgtgtatggaagaaatctgatcttctttctggaggtttgggattattatttaaagcatttcgtatctaagatgttaacaaaaaaaaaaaaaaaaaagcggcc

SEQ ID NO: 33380 - DNA, 757 bp, Zea mays
  unsure (1)..(757): unsure at all n locations
  Clone ID: MRT4577_130451C.1
aacagtggtaacaacgcagaagccctttttttttttttttttttttttttttttgtggtaagtactcgtaatatttttttttttttttttttttttttttttttttttttttttatgaggaaatttgttttgcttgtgtacattcgaacaatcttcttggggcctattttttatgggcacctcattattcttatacaaaagaaattgggctcgacgcttgggataccacacagattcaggggaaaaaaaaaacaaagtcggttcagcaaaacgtatcaaaatgaggctccctgccacaggttcagcaaacaaattccagaggccaaggccccgcgtactctgcgttgttaccactgcttaaaggagccgcgccttcaaagttgcgttccgttatcatttcagtttgtcgaagagctttggtgcaacacacttgtcaacgcatgaccagtagtcgaaatattggccggtgcagtgcttctgcccacttccgtcgctctcgactctcttgacgcatttctcataatcatacaatgtttttacacattgcggcttgcaacgttcctcaaggtaattcttctgatcaacaggttcagcatccgccatggattcgtgattgcaagggggaaatccctagtctcgtgcgcccagtaatgccgatacccgatccagcggttggagggtatggccttatgggttgtctagggttacgagtttttttttttttttttttttccccggccggcctcgnnnaggatac

SEQ ID NO: 33381 - DNA, 464 bp, Zea mays
  unsure (1)..(464): unsure at all n locations
  Clone ID: MRT4577_130452C.1
gttgcttatgccgaagaaacagttgcaagacgcggcattgcgatcacacattcattgacattcaatgcagggttttgtcaaaaaaaaaaaaaaaaaaaaaaaaaaatttattctgtgattgagcgatggcgaagttgttgtggatgaaggaccggtgttataaagggnccgggttgctttagtgcncgaaggaaacaagttgcaagaacgcgggcatttgcgaatcacacacttcannttgacattcaatngcagnnggttttgtnncaaaaaaagaaaaaaaaaaaaanaaaaaaattttatctgtgatgaagcgatgcgcgaagttgtgtnggatgaaggaccggtgttataaagagagccgggtttgctttatgttgccgaaggaaaacaagttgcaagaacggcggcattttgcgatcacacacttcattggactattcaatgncaggnngttttgtctc

SEQ ID NO: 33382 - DNA, 458 bp, Zea mays
  Clone ID: MRT4577_130453C.1
ctctctccataccaccacactgcctcccaaaacaaactcattcttattcatcaaacacacagcctacaccgccatgtccgaaatgcgctctgaagaaatcaaagaagccttcgctctcttcgacccccagaacacgggcagaattgagccgtctgcattccagaactttgttaataccttgggagacgaagagctgaagaggtcgatccgtatccctacgcacgccattgaccttcgtgagttcacagacttgatgaaccgctacaacaatgacacgaacaaggaccccgaggagccctaccgccgtgccttcgcctccatcaacaacgacggctctggccatgtgtctgcggaggagcttcgagccgccgtggggaagtttccttggaccaatacactctctgaggctgatatcgatgagatcatccacgagggcgacgtctcgggcgatggacgca

SEQ ID NO: 33383 - DNA, 609 bp, Zea mays
  Clone ID: MRT4577_130454C.1
ccggccgggatcctccctataaaggataatgcctagctcccttccggcgacgatgaagcggtcgaggagcggacgcgagagggcagaggagatattgaggtggaaggctgcgtagagcgaggcggcgacatctgcagcgataccggaagatgacgctattcgagcagctgttgaggagaccgttgtcacctcctcgtttgagcccgaggcggccaccagcgctgatttaggcgtgtcgctggtgggcgacgacgagcgcacggacatgataccgctcaagttcctccgtgcgcacaggaacaaggtgaaggaggccatggcgatgctcaggtcagtggtgttgtggcgcaagcgctttggcaaccatgagctctaggatgtcgacatcggcctaccggagctggagaacgtgatgttcctccacgtggttggctgacgctcgctgctcctcttccttcctcttccccatgaccgaccggtgcccacgacaaccttcctccgcacgttgtcgctccgtgtgacgcccacgttctcttgcgtcacgtccactccctgattatgataacataatttctcctgctcaaaaaaaaaaaaaaaaaatttgcggcc

SEQ ID NO: 33384 - DNA, 1088 bp, Zea mays
  Clone ID: MRT4577_130455C.1
ttgggtacctcgaggccggccgggccgggataacccgctcttcccatttccctcgccctccgccgcctgcgtccacctccgctcgccgctctccccgcgtctccctatcatacgcagctcgtccaggtaagatgtcgtccgaggcgtcgaaggtggcggtgccggagtcggtgctccgcaagcggaagcgcgaggaacagtgggccaccgagaagaaggagaaggccctagtcgagaagaagaagtccatcgagagccgcaagctcatcttcacccgcgcaaagcagtacgccgaggaatacgatgcccaggagaaggaactggtgcagcttaagcgcgaggcccgtttgaagggtggtttctatgtcagtcctgaggcaaagctgctctttgtggtccgcatccggggtattaatgccatgcaccctaagaccaggaagatcttgcagcttctgcgattgaggcagatcttcaatggcgtgttcctcaaagtcaacaaggctactattaacatgctacgcagggttgagccatatgttgcatatgggtacccaaacttgaagagtgtcagggagttgatctacaagaggggctatggaaagctgaacaagcagaggatccctctgtccaacaaccaagtcatcgaggagggcttgggcaagcacaacatcatctgcattgaggatcttgttcacgagatcatgactgttggcccacacttcaaggaggccaacaacttcctgtggccattcaagttgaaggcgccgctgggaggcctgaagaagaagaggaaccactatgtggagggcggtgatgccggtaaccgcgagaactacatcaatgagctcatcaaaaggatgaattaggttcacgatcaagctcattgatagtaccctgtgctctaagtgacttcttgtgctgtccttattttatattagaaagttggatcgtggatgaatatgcatgcagttttgatgtttcgaactagatgtgtatggaagaaatctgatcttctttccggaggtttgggattattatttaaagcatttcgtatccaaaaaaaaaaaaaaaaaaaaaaaaaaaaaaaa

SEQ ID NO: 33385 - DNA, 1278 bp, Zea mays
  Clone ID: MRT4577_130456C.1
acgcatccgcaaaaccctactacataacccgccattcccactcccctcgcccaccgccgcctgcgtccacctccgccccccgccctccccgcgtcccccctctcctacgcagatcgtccaggtaagatgtcgtccgaggcggtgaaggtggcggtgccggagtcggtactccgcaagcggaagcgcgaggagcagtgggccgccgagaagaaggagaagtccctggccgagaggaagaagtccatcgagagccggaagctcatcttcacccgcgccaagcagtacgccgaggagtacgatgcccaggagaaggaactggtacagcttaagcgtgaggcccgtttgaagggtggtttctatgtcagtcctgaggcaaagctgctatttgtggtccgcatccgtggtatcaatgccatgcaccctaagaccaggaagatattgcagcttctgcgtttgaggcagatcttcaatggcgtgttcctgaaagtcaacaaggctaccattaacatgcttcgcagggttgagccttatgttgcatatgggtacccgaacttgaagagtgtcagggagttgatctacaagaggggctacggaaaactgaacaagcagaggatccctctgtctaacaaccaagtcatcgaggagggcttgggcaagcacaacatcatctgtattgaggatcttgttcacgagatcatgactgttggcccacacttcaaggaggcgaacaacttcctttggccatttaagctgaaggcaccgctgggaggtctgaagaagaagaggaaccactatgtggagggtggtgatgccggtaaccgtgagaattacatcaacgagctcatcaaaaggatgaattaggttcacgatcaagctcattgtgttctaagaaactttctgtgctctcccaattttacattattaggaagtggatgaatatgcatgcagttttgttgtttggaactagatgtgtatggaagaaatatgatcttttttcccggaggtttagaattatatatatttactgttagtttggaaacttcatttttccaagggatttctattttccctaggaaaaatgaactgtatttcccaaactagcccatgatgcatttcccatcctgagtatcgggcctttttctctgtccaagacgctctttctgaagtacgatctgtatttaaatccatgatggatcttgatatattgtaaactggcttgaagcacttctggcttacaaactcaacaatcaaccgcttcgaaaaaaaaacacaccacac

SEQ ID NO: 33386 - DNA, 235 bp, Zea mays
  Clone ID: MRT4577_130457C.1
atggggacaaaatttagggaacaaacggggaataaagaggcccaaaaaaacgctaccaacacaaggaccatccacccaaaaataaaggtgaaaaggacacctggtcccaactaccgatacctctgggaaaaagctggaccatccagcgattgccactaacttaaaacttaaaacaaaccgattaagcgaggtggggaagctgggggccaaggcccccggggcggaggggggacgg

SEQ ID NO: 33387 - DNA, 401 bp, Zea mays
  Clone ID: MRT4577_130458C.1
tcacagtcccgttgctcgtgaaccacttgggggccacgacgaagctgagagggataaatccagagatggaagtcattaaagaccagatgaatagtatggatccaaaatcagtgcaggagggacaagctaaaatgaaagcgctgttcaaaaacttaacttgcaagaaggaatggagggaaatcctatggctggtaaaatgaagtacttttctagaggagtagctgttttgacagtcccatttacaatgaactttgccacggcagttttctgttactggacctcatcaaacatattcaccctgttatatggtcttgttatccggcgaccagctgtgaggaagtggtttgatcttcctgctttggaaaatacgccttcgctcacggcaaagccagtattcaata

SEQ ID NO: 33388 - DNA, 751 bp, Zea mays
  unsure (1)..(751): unsure at all n locations
  Clone ID: MRT4577_130459C.1
cctcgagccggccggnnnntttaannaaaaaaaaaaaaaaaaaaaaaaaaaacacccccggcgtctgcaccgccgctgcgggagccgggtatctcgccggtgtgcgctcctgcgccgcggggtcgcaagacggaggctattccggaggcgtctcgcatgcgctccgcacgggcctcctcgtcgccggcgccgcgctcctcctcatcgccgcggccatcgccttcttcgtggcccgcgacatcaggaaacggcgccgcgtcgcggcgcggggccactggaagatgacgcctttcgtcggggatcttggtttcggggaggagtccatactccggggcctgacggaggccaacatcgtcggccgcggcggttccggccgcgtgtaccgcgtcaccttcaccaaccggctcaacggggccgcaggcgcggtggccgtgaagcagatacggaccgccgggaaactggacgggaagctggagcgcgagttcgagtcggaggccggcatcctcggcaacgtccggcacaataacatcgtcaggctgctgtgctgcctctccggcgccgaggccaagctcctcgtgtacgactacatggacaacgggagcctggacaagtggctccacggcgacgctctcgccgccggcgggcacccaatggcgacgagggcgcggtccgcacgccggacaccgctggactggccgaccaggctcaaggtggccgtcggcgctgcgcaggggctgtgttacatgcacca

SEQ ID NO: 33389 - DNA, 1136 bp, Zea mays
  Clone ID: MRT4577_13045C.1
aaaatgcgcaacacgatgcagatcgctggaccgcagtagctttctgacacagccccgagagagtagggatagggccatagggggtcacaaaccataaaccaagaagctgcgggacgttcgaatcaaacatctctaccctctccttccagcgaaatggcaagagcggcggctcctcctctgcaccggctgcccggtctggccttgctgtgtcttgccgtggcagtttgcttctccggcggcgaaaacgccgcggcggcggcctggacgaggaagatagtcggcgttcacgagctcagggtgggggatttctccgtcaaggtcaccaactggggggcgactctcatgtccgtcatcctccccgactccaaagggaacttgggcgacgttgtgctcggctacgacaccgtcgctgaatacgtcaacggcaccgcctacttcggcggtctgatcggccgcgtggccaacagggtcgccggcgcgcggttcacgctggacgggaaagcctaccgcctctaccgcaacgacggcaacaactcgctccacggtggccaccgggggttcagcaaggtcgtatggacggtgaaggagcacgtcggcggcggtgactccccgtacatcacgctctactaccatagcttcgacggggagcaagggttccccggcgacctggacgtgtacgtgacgtaccgtctgtcgcgcccgtacgtgctgagcgtgcgcatgaacgccacggcgcggagcagggccaccccggtgaacctcgcgcaccacgcgtactggaacctcggcggccacggcagcgggcccgtcctcggcgaaacggtgcagctcttcgcgtcgcggtacacgccggtggacgccgcgctcgtgccgacgggcgcgctggcgcccgtggccggcacgccctacgacttccgcgcgccggcgcccgtgggggcgcgcctggcggaccttgggccagagactgagccggtggggccaattggtcagccgggagggcacaggcttagtattttagaaagaaaaataaagggtaataaatggtgttagatttgagccgaggtcctggatcgcttgtttaatagcctgctttgctggatgggcttatattattttatggttatggacatcatggt

SEQ ID NO: 33390 - DNA, 1785 bp, Zea mays
  Clone ID: MRT4577_130460C.1
tgggtacctcgaggcccctccctcgaagtcggggccgactgcgcgccgccacgcaccagcccagccagccatggcgttcgccgcgcggaggagcatcgccacccggctctctcaccatctcacgcgacgcctccatccctgcgttccacacgcgcgtacctccgactccctcgacgagcaggcgtcgagaccctcgccaccgctcccgctcccgctcccaccacttcacgtccagctcaagcaacgttctagagaagtccaaatcctaggcttcctccctttctcgctccgcctcgcggggccaacccgccgcaccttctcgtcctcagcccccgcccccaacctcgaggcggcaccagccgccgaggtcgatgccgcgggcgtgcttgcggatgcagcggaggcggcggcgtcagtgccagcgccgttcccaggggaggtagccgccgcggctgcggactcattcccccctgttgccgcacttcagcacattatcgacgctatccatacctttaccgggctgaactggtgggtgtgcatcgcgctgacaacatttattatccggagcgccacagtcccgttgctcgtgaaccagttgaaggccacgacgaagctaagagcaataaatccagagatggaagtcattaaagaccagatgaatagtatggatccaaaatcagtgcaggagggacaagctaaaatgaaagcgctgttcaaaaaacatggtgttagtccacttactccaatgaaaggactcctgatccaagggccaatattcatgagctttttctttgccatatcaaacatggttgagaaagtaccttcattcaaaggaggtggaacattgtggtttactgacctgacgactccagattctctttacatcttgcctatgttaacaggactgaccttcttggccacagtggagcttaacttgcaagaaggaatggagggaaatcctatggctggtaaaatgaagtacttttctagaggagtagctgttttgacagtcccatttacaatgaactttgccacggcagttttctgttactggacctcatcaaacatattcaccctgttatatggtcttgttatccggcgaccagctgtgaggaagtggtttgatcttcctgctttggaaaatacgccttcgctcacggcaaagccagtattcaatatgtttggtggatccaaggcaataccagccgcacagtcaccagtagcgatcgcaggagcccagcaatctggtctgggccaacctgatgcttctgctcttggctataaggtcaaaaatcttgagaagaaagtgaaatccaggggtaaatctcggaaacacaggtaaaattttgtgcatctgtgccccagatgagcaatctgtacttccaccatcggaatgatggatacttgatttgtcctgatatgccccccaaaaatcagattttgtattaggaacctatcttttcgtcgtttttggctgcttttgttttgatttttcaggggggaggggtgaaataagccacataaatgtttgacttagtaccagagttgattatacacaaaatgtatttcagtaacttgtgatagttaaaacattgggggtcatcttccaaggattggtatgaaagctacgttgaagttcagggacaatcaacttttgaggcaccattcgacattctgtagcaattaggttcaaagtgagctgggcagaattttgtggcctgaatgaatattgagtttgtatgtactaaactatcttagaataccatttgggggcctgtttgggcc

SEQ ID NO: 33391 - DNA, 2658 bp, Zea mays
  Clone ID: MRT4577_130461C.1
atgcccgactccagcaccgtcgtcttcctgttcatcgtcggcccgcgatgccgcgcccgtggtccatgggctgcttccttcgctatccctctgcataggtcggtcttccgggaagtcggcttcggtctcggcccagagcgacgcgcgcgtcgagtcggcgcatggaagagggttttctcctgcttcagtggtggttggttttcttctctgtttcgtccgcctgaagttgacgaggagtggcccctcctgagtcgctcttctgcttcgcgtcggatggatccaaagaatcgtaacgctaactgggaccgatggggtccaaaagatgctcctcagggttcacaatcttggggaaagaatcggagtcttagctggcgcctaaagccgggtactggaaaacccgagaacaaggatgacatccaaacctcttcttccggtgatggcggtcagtcagggattgcttcaaaactttatggtgtgagatctatcgcaaagaaactcacaacacagcgaggtgcgttctccccaaacaaaacaagccatagttcacaggctaagccaaaatccaaactccactctgtatggattgttgctgaaaatgtgcctgaagaacttcagagctaccaggctatctgtgagctgggctccacaattggggttgtagaagaagtggacattttgtccttagactctaaagatattgtgagattcaaagttcatgtcaaaagtgttgccatgattcctccaatcattgaagtaggtgtcaagccttttatgtatgacatctactttaaaattgataatataactgatgaagggtggaatgatgactccataaatctgggcaagagggctttggttgatagacagggttttggtgatccttctctggagaaatctgttaaaaaggcccaaagtggtggtgaaaaaactgtcatggatgataagggaaaaactcccttggaggatcccttagtgcatggtaatgaagctggttttcaaactgaacagtcagaaggactgaaggctgggaaaaattctgaaggtgacaaaggatatctagacaatctgggtaatgaggaagatgattacaatgaaaagaaaggaaaaatgagtataagtgctactcattctgaagatactggcaaagaagctagagtgaagaaaggagggtccatggaaggggagcttgcagaaggcatccgaagaagcagcaggttggagtccaatgatgaaatgaagattgcggataaggctacagcgagagcaatggctaaagacacgttcattaacaaaggggttgaattagaatcttctgttaatgaagctgtggaaaatttagacctgataaaatcgttagagctttctatgaagaatcttgttgtgcaatctgttaagtgtaattttgatcctaacaaggcagttattcatgactctgatatggataatagtgtccataatgaaggaggggataatgctttgactgatcttgaaaatgtgatggtgctcagaaaaggtcgcaaaatttgccacagaaaaaaatctatgaggaaaaagaaagacaacaaatctcctaaacataggaatattcctattaaaaggagagaggtaaaaaaaagtattgatatttggaaagaaaaaataaaacatctcaagaaaatgttgaaaggttggaacataaatgttgaagatgctgaaagaattgaaaagcttgagttggagtggaatttgaaaaaaaaaatatggaagaagggtgcaaaaaaagcaaactacagatcgcttttaactgctccttttaacatcaatgaagttaaaaaagtggtgtttgagataaaacataatagtgttcctggtccggatggttttcctgctgaattctttcaaaaaatttgggagcttatccacatggacatttggaactttttcaaagacttctatgagggaaatctagatattgaaagattgaattatgggatggttactctcttaccaaaagtggataatgcggttgttatgaagaactttagacctatttgtcttttgaatgtttgctataaaattattaccaaaattctaaataacaggctggctagttgcatcataaagaaaaaaggttttgggagtacttggtgtgattgggtgatgagaactatgcaaggtggcaaagtagccataaaaacaaatgatatgttgggtccatacttcacttcacataaagggggaggtttaggggttttgaaccttgaatttatgaatgattccttactaactaaatggctttggaatattgaaaattcaaatggtttatggcagaaaatcattgcaaatgacagaattgtttggggtcttggaaaaaaaggtttttctgtgaattctttatataaaaagaaagtgatggatcaagtttctgttccttacaagttcttgtggaaatccaagttgccacagaaaatcaagatttttatctggttggtggtgagaaataaaattcttactaaagataatttgaagaaaaggaactggaatgattctcaagagtgttgtttctgtggtggtgatgagtctattgatcatttatttttttcactgtcccattgcgagatacatgtggagagttatccaagtggctttgaacttggtggagattccaaaacgtattag

SEQ ID NO: 33392 - DNA, 456 bp, Zea mays
  unsure (1)..(456): unsure at all n locations
  Clone ID: MRT4577_130462C.1
gagctctctattcggcggccgcccttcgtgctgtggtgacgccattgaaaaggcgcttcaattgcactgcaagcagcctacaaggaagccggagctctatcgncgatcgaaccaaagtctggaaacgagaccgtgtgcgtgctaggccatgagactgtctacaggaacagcacgatgaggcgcaaccctcatgagagcacacctctggcgctcggggtcaatgaggagggcgttgatacttaaagcgcactatggacgatctttgtaccaagatctgacacatgggccataaaagacatccgaggactatggcggcacattgtaactagaacgatgggaggcagcgcataactagcgagggttgataggaaaaaaaaatgttgctactgataagcgggcatgctcagcattgacacagcttgatgaactgaactcttgttcgagccgaattcgagc

SEQ ID NO: 33393 - DNA, 591 bp, Zea mays
  Clone ID: MRT4577_130463C.1
cctggcacgagaatcttctcttaatggttatgttttggattaggatgttattgtctctgatctatgtggcttttagtatctaaactctttctgaatatatatctgaatctatgttgtatatcgacatttccatctctctatcaacggaattgagcagggaccaattaataaatttaaaaagacataatttcactaagactataaatagtagatactacttcatgattagagaggtgccagcaaaactcttattaatattatattaacaaaaacaatggtaaagaaatatcaggttctcgaccaaactaatccagcaaaaacaaaactaattcaaaatcaagtttcaactatacgggcagcaaaataactaggtttcatggactcggccgtataaaaccaacgcagggagaaagttgctttggcggggatagaagaaaataaacataagccaactgatttgcccaaactgagaatagggtaggattggtacctcacgcggcggcggctgggagaaggagaaattgaccttggcctggatggcgaggcggacgtcatcggcgtcgatctgagccttcccggcgtggtcggcgt

SEQ ID NO: 33394 - DNA, 1024 bp, Zea mays
  Clone ID: MRT4577_130464C.1
cagcatttcttgagaaattcattgctggaccttttcaggaccgggggactaataattggtcgggctttgagtcacaccatcaatttcagtttcagtgaagccttattcaatttcacccaggaaatctgctatgttgatgaagtcttctggttgtaaagagaaaacagtgaactctgggtttcccaacctgtctttaaaggcttgccacaggagggattctttgtctctgtacgcgcggtggatcgcggcggacccgtgggcgtcggcacgcgcctggacgagccctggaaggggcagcggggacgcgacgaggtgcgcggcggcggggcgggtcgcggggagcagcagcgcgggcgccgggaggagcgccgggatggaggtggccatcgccgccgctgcggtcgtcgccatgggcacggggaaccgcgtcctctacaagctcgcgctcgtgccgctccgggagtaccccttcttcctggcgcagttcgccacgttcggatatgtagttgtctatttctcgatcctgtatcttcgatatcaagcgggcattgtcaccgatgagatgctgtctctaccacagaaaccttttctagctgtaggactcttagaggcttttgcagcagcagcaggaatggcagctggagctgttctttctggagcttcaataccaatactgtcacagacttatcttgtctggcagcttcttctatctgctattttcttgaagaggcgctatagaattaatgagatagcaggatgctttctagtgaccattggtgtcataataactgtagtggaattttctggccgctgctaatgataatatcgttctttttccttattgccgttacaatattgaagatcatactttctatagatgcttgaaagaaattgaagtgtggctatgttgatcgatttgttgtcaattcatatggctctgcttatcaagccctttttatgtgtatcttgctgcctttcctgtcaaagttatggggagttccattccatgtgttaccaacctaca

SEQ ID NO: 33395 - DNA, 281 bp, Zea mays
  Clone ID: MRT4577_130465C.1
cgagtttgatgacaagtattttgtaagggagaagaaggcaacgaagactgagggtgaactttttatacacaggaggcaaccaaggacctgccacagctcaagaaggacgaccagaaggcggtggacgcttagttgatcaaagctattgaggaaggagataatgcgtataatgtgtgggatgatatattgctctgagccctcatgctgtttatataagagtacatggcttggaggacccaacaggtgttgacgatgaacgggctcgccaaggacgtgccgac

SEQ ID NO: 33396 - DNA, 681 bp, Zea mays
  unsure (1)..(681): unsure at all n locations
  Clone ID: MRT4577_130466C.1
ttcggtatggaggtggccatcgccgccgctgcggtcggcgccatgggcacggggaaccgcgtcctctacaagctcgcgctcgtgccgctccgggagtaccccttcttcctggcgcagttcgccacgttcggatatgtagttgtctatttctcgatcctgtatcttcgatatcaagcgggcattgtcaccgatgagatgctgtctctaccacagaaaccttttctagttgtaggactcttagaggcttttgcagcagcagcaggaatggcagctggagacttatcttgtctggcagcttcttctatctgctattttcttgaagaggcgttatagaattaatgagatagcaggatgttttctagtggcaattggtgtcataataactgtagcaagtggatctggtactagcgcttcatttaaaagtactggaattttatggccgctgctaatgataatatcggtctttttccaagctgccgatacaatattgaaggaaataatatttatagatgcttctaagaaattgaagtgtggctcggttgatctttttgttgtcaattcatatggctctgcttatcaagccctttttatgtgtatcttgctgcctttcctgtcaaagntatggggaagtccattccatgtgttaccaacctacataaaagatggggcagcctgcttttt

SEQ ID NO: 33397 - DNA, 291 bp, Zea mays
  unsure (1)..(291): unsure at all n locations
  Clone ID: MRT4577_130467C.1
ggccgggaccgctcaaaagaggggcccgagncgctggtgcctacgagcctcctccgatgaggaagacgccggagagcctgtcgcgccgctttgcccaccctgccccatcggtccgcagacaaggtctccgcctcctacggcagagagacctgctcctcggcctacgcctacacttacaccgccgccgccagcagccagccagagtgtaataccaattaccacgagtgatgactctccgcccacatcatcattacatcccccacatgccgcagatctccccgctccccctgc

SEQ ID NO: 33398 - DNA, 416 bp, Zea mays
  Clone ID: MRT4577_130468C.1
ttaaaaattacaaagtacataataattaaaataaaatgacctggtaattaaaataaaattacataactttaatcggactcctcgatctcatccttatcttcctcctcttaatgttccgcttccggttcctcttctttgtcatctagcagaccaagttctttttcgaccatctttacgaccctgccatgggtacgtctttcagccgggtccatatgtctggttgatgggccctttaggatgttccattgctttaaaagcttggccttcactaatccaccccacaagttcttcattttgaatgcttcacttgttgattcgctgctcggggcctccttccctttcggaaggtgcaggacaggacagtcaaactcgtgggaagcgagaaggtcctcttcgtcgcaggaactctgggatct

SEQ ID NO: 33399 - DNA, 192 bp, Zea mays
  Clone ID: MRT4577_130469C.1
tcaggcaacatagaaagcacaatagtgttctcaacattttcagctaaaaaaaaccgcctacatatgctccttggtctttatgcaagtgctgcttccgcgaccatttgccgacaatgctcacaagctactatagcttccattgcttactcgttccttttaccaacatgtgcttagtgctgtgaaaacccaatt

SEQ ID NO: 33400 - DNA, 213 bp, Zea mays
  Clone ID: MRT4577_13046C.1
agaaaagttatatcaaatttttattcgacgcaagaggaaaaaccaaaggtacaggtgctgcctcaaacagaagggggggcgcgtccacccagaagaagacacttgccatgattaatccgtcgtgcatacagaatggaggggacgaagaacatggacaatgtgagacgaaagacaataccgtacagtagggggatgaaaagggaactcgtgaaa

SEQ ID NO: 33401 - DNA, 395 bp, Zea mays
  Clone ID: MRT4577_130470C.1
ggtgcgtccaggcttgccgacacatggttagctcatgctcttattgacggcgaagcgcaagaaccgactctgggcatcaaccttgggaaaagggaatggctaatagctcctgaatgcgtgctaccatacagaccggctaatgtaatggatagcgtgtggcacaacatttgatccggtgcgctgcgcctttgcctgacatggaatttaccttctttgcccaagtaccatgatactatagtgaatatgtatcattggtctatattgttagatctttctaatgctatgatgagctctgcaaaaccgcgttcactgtgattggcactctatcacgctgaagcatttgaaccagaacctttgatcaccaacttggacttctactattagtacatcaattg

SEQ ID NO: 33402 - DNA, 375 bp, Zea mays
  Clone ID: MRT4577_130471C.1
tttgcattgaaacaactaaaaaacttattagcaagtttgaaaatctttaaaggaaaccttcaaaatggattcttcagatgaatataaaacagtgattgataacaatactaaaataactatggctgaacctgaatctcccactccatcaagatcaagacctcgaacacgatcagaatctacaaacactcgtgaatcttcatcaaactccccaaagcctcaacgtcgtcgacgagtttctagatctaaatcgagatccgcatcgaaatctagatctcgatctcgttcaagacaatctcgtaaaagacctcgatctcgttctactttttgttcaagacgatcttgacagacgcctcaatctcgttctacttctcgttc

SEQ ID NO: 33403 - DNA, 154 bp, Zea mays
  Clone ID: MRT4577_130472C.1
attcggctcgagaatgggaaccagtcttatattcgcccaaacagcctgggctccaaccggagcaggatgagcgaaaacacgaggctcataaacgaggaccgaccccgcaacctgctacaaccacaccgcacaaggctagaacgccatgccagca

SEQ ID NO: 33404 - DNA, 625 bp, Zea mays
  Clone ID: MRT4577_130473C.1
cgtacctcacacacatacactagcacaagagcactctactaatgcttgctgaggttgtccgacctagcaacgacaagatactactctgactggcccacatatgttcgctcaacctctcctacctcacaccactggcaatgaggtgaggacatgtacattgaaatccctaccgcgatctaccgccatgaatcccgctgcctcaaacgctgacgtgaactggggggtctgtctctacttcattaagatgcagtgcctccacaggctgctgtactacctcatcacgaccaacctgttcacctacataaagaacagatttgaggaggagaactaccgtatctcccacaagtcctacctctgggaggacacgatctatctcaaggacctcatgaaccacactcgtttctggagctcaacttgaccacgacctgctacatcgacatcttcataatcatctacatattgcttccagaggcacctgaccacgtctccgttcgaggaggtgctcggtgccgtactctcgttgccacgacaacatgtgtgagcctccacgacagatttccacgacatggctagcgatggcttggatgcacatcatcactttgggatcgagatagatatacgcgag

SEQ ID NO: 33405 - DNA, 387 bp, Zea mays
  Clone ID: MRT4577_130474C.1
ggagaacattgacatatttgactggtctattccagaagatttgatggcgaagttctctgaaatcaaacaggtcaggctgctgagagctgagtttgcagttcaccctcaaggcggctacaatacattagaggatttttgggatggtgaaatataaaaagcatacaaatttgttcagaatagaagagccaggcgaggaaactattctgacatggcagatgctttgcttggacagctgagatatgattgccttggtttcgagagagagaaactgaggatagttgcccctgttgctgttccaatagaagctttgtgtttcattgtatccaaagatgtctgttccaattccgaccaaataaaatgcagtaatggcattttcatcttatcctt

SEQ ID NO: 33406 - DNA, 294 bp, Zea mays
  Clone ID: MRT4577_130475C.1
actcgttgaccaccggcgatgcggagcgagagttaacaatgattcaatcaggaccgatcatgctgctagctgaccatgatgagttagtgtactgacaactgtcgtaatcatggcccactggggccactgtgtctatgcggaggagaccaagcttaaagatcaacccgattgtccccgtcgctcgattgtgaacaaccgaaccggatcgtaccctcaccagacgaaagagaaatggccttcgggcgcagagttaaagcggacttagtcaccaaggcgatggtggcactgccgcca

SEQ ID NO: 33407 - DNA, 758 bp, Zea mays
  Clone ID: MRT4577_130476C.1
gggaaataaaacactgtcaggtctcgaaccggcccgagagcgcaatgcaccagcaatggaggcgagcggcagtcgggtccggagggggagcccggtccccaagcgccgcagaggcgtcggcgtggctactggcttcgggtctacggcgcagtcgctgaacgacgacatcctccggaataggataattgaaacagctcatctcatgagggatatgtattacaaaaggaacccaccagcaagaggttcaagctctaatatttcagtaaaaagttactttgagatgcttgccatggatgagcatgcatctgctttctctagaggacctgctgaagcttttcagtggattgggcacccaatgagggctaccttgtgccgtatgaagagtggtttaattttaactggagttggagataagattctccgcctttggtctgctgaaagctgcaaattcatgaatgagtacaatgtgccaaattctaaaacattagtcgactttgattttgatgaaaataagattgtaggtttgaccagctcccagatttgcatatggagacgcagtgaaccaagaagcatatttcaatctggtggagcctcattcaatcatgggttatgcatgagttttgctgatccggaggttgtaattggttgtgaggatggtcgagcctttgtatatgatatgtacagcaggagttgctcacgtatttatcggcttcactcctctcctgtgacatgtttgatgataacggatgaccagctga

SEQ ID NO: 33408 - DNA, 532 bp, Zea mays
  Clone ID: MRT4577_130477C.1
ccgggttcccccctcgagtttttttttttttttttttttttttttttttttttttttttttttttttttttttttttttttttttttttttttaaaacaggaaggggactaaactaagggccggggaaaaccaattggggggttaacccccaggggtgtctttggccaaattagaaacccttccaacaaccgtttaaaaaacaaacttttaaaaacccggccaaatttttttaaaaaaacccgccccaaaaacccttttttttgaaaatcgggggaattttacccctttgggggaggccccaaaaaaccggaaaaagcggccccaaacccccggttggccaaaccccaaccatttttttgttttttggccggggggggcaaatgataattcggggaagggaaaaccgacccccccggcttaaagggggcccgggggccccttttggcgagagtatcccaacccttggccagcctttttttttttgttaacttggaaaaaagccccctggggtgaccacaagtcccccttttc

SEQ ID NO: 33409 - DNA, 1749 bp, Zea mays
  Clone ID: MRT4577_130478C.1
ttgggtacctcgaggccggccggggcgccggcccgagagcgcaatgcaccagcaatggaggcgagcggcagtcgggtccggagggggagcccggtccccaagcgccgcagaggcgtcggcgtggctactggcttcgggtctacggcgcagtcgctgaacgacgacatcctccggtccgtcttctcccggctggacgaccacttcgacctcgcccgctgctccgccgtctgcggctcatggaataggataattgaaacagctcatctcatgagggatatgtattacaaaaggaacccaccagcaagaggttcaagctctaatatttcagtaaaaagttactttgagatgcttgccatggatgagcatgcatctgctttctctagaggacctgctgaagcttttcagtggattgggcacccaatgagggctaccttgtgccgtatgaagagtggtttaattttaactggagttggagataagattctccgcctttggtctgctgaaagctgcaaattcatgaatgagtacaatgtgccaaattctaaaacattagtcgactttgattttgatgaaaataagattgtaggtttgaccagctcccagatttgcatatggagacgcagtgaaccaagaagcatatttcaatctggtggagcctcattcaatcatgggttatgcatgagttttgctgatccggaggttgtaattggttgtgaggatggtcgagcctttgtatatgatatgtacagcaggagttgctcacgtatttatcggcttcactcctctcctgtgacatgtttgatgataacggatgaccagctgattgttggtggatcaacttttggaaatgtagctattgcagatcaaacctcagggcagaagttaggtgttctaaaatcagatcatggaccattggcaataagatccttatcttcctgcacaaattcacacatgatatttgctggttcgtcagctggttatgcacattgctgggacttaaggactttgaggcctctctgggaaaaaagagtcagcccaaatgtcatctacagcacacgtcatttgcccggtgacacggcaacgctggcagttggaggcattgacggcgtgctccgcgttatatgccaaaggactggtgacatcattcgcagtcttgtcgttgacgcagatctcccagcagaagccacatctagatcccggcagcaaatagagaagaaacgtgttcgaaggattgaccctgatgcacagttggacggtatcccgaggcgtttgcgccctcagattaccagcctatcggttgggatgaagaagattgtgaccacgcatggtgaaaactacattagggtttggaagtttcgcatgaaaagttcgtaaaaagggcgagatgatggtaatctagttatctggtgtaacctgtactgtagtctactgaataagatggcgtggtaccgtggtgtgtcacctgcgcttgtaataatagcctgaaacatagttcatttgtacacttgtagtcctctttaggatactattagcaattaaaaaaatgtttgtgctcggttcttttttttttacaatagatcgctatatgaaaaaaagtctgtactcagcttacggtagagatgcctggtaagctaatgcgtggatgaaagctgaacttaaccttatcaacacattcaaaccgttgtagtttgaacctgaatgtatccaaacattgtcggcaacaggattgcttcaaaagaaagaagtgat

SEQ ID NO: 33410 - DNA, 367 bp, Zea mays
  Clone ID: MRT4577_130479C.1
atcgctaaaccttactccttcagcattatgccacaagtgcaatacatggttcaaaataaaggcgctgtttggactttggacccattagctaacagtaattagctaatagctagttattagctatctgatttggtccagtttgaatctagctagctgttagccaatagtaattagatatccaatttggtccagtttgagtctagctagctgttagccaatagtaattagctatctaatttcgtccagatagttactgtctacagaacaagctaacaattagctggtctattattagcaaataactattatgtattatccatatggattctcgtttctgctaaatctgactggtactagttcttccctt

SEQ ID NO: 33411 - DNA, 820 bp, Zea mays
  unsure (1)..(820): unsure at all n locations
  Clone ID: MRT4577_13047C.1
gtttctcttcccaatcgaatcgcacgcgagcacgcttccaggttcgctggcagcagctggtccatcgctctccacctctcccttcttcgcgtgcggcagtttcaacggccttcaccggcgtgcaacgagggtgggcccttctctggcgcgcagcgatgcgggcgggtcccaaggggaacgacacgggtgtccaagcgacgtagcatggcgcgggtcccaagcgacgcgacgcggacgggtctccgacatgtgctgcacgacgaatcccaggtgtgtgcaggcggatccccgacgagcgcgacgcgcgcggatcttagcgtgcggcagcacgggcctaccttggtgtacgcgccgcgcgggtccaaggcgtgcgcgacgcaggcggatctctagcagtgtggcctgcttgttctccggcgtggcgcactccctagccctcttctccggcggtggtctgctccaccatccctgctccagtgtctctctccttctcctccctgtctccggcgtgcacaggctccaacgactggcatgcgcgggtggatcatcctcctgctcgtccctgactctggcgctcgcgctgctcgactacgatgagctctcctgtcaacggcaggggctacggcgagctccgtcaactgcgttgaacatggaagacaaagagcaagaaacatttgatgtttgtatctgaacatttgctagttgaaactgaacatttgctgctagttgaaaatgaacatttgttgttgcatgtgccgctgaattttctagttgaaactgagatttgntgnttgtatctttggatacacatgtgatgntg

SEQ ID NO: 33412 - DNA, 372 bp, Zea mays
  Clone ID: MRT4577_130480C.1
ccccaaataacaaagactggattaaaactaaaattgccgtcccaaccccaaaaaaggaaggggccgggctaaacaaatggggggtttttgggaacacctaatttgcccatgggttacaaacaaaacccttggggaaccttgggccccattaaacatttatttaggttttacgggggtggcataagaacacggggaatacacttttccacaccgtggcccatatccagcctaaggaaagggaatatgccctcttttttcccccataaagcaaagcttttttttctccatcgttaaacttcggagggtggttcaaaagggctcctcgggaaaatagagttttttgcttaacagctttttaaatcaaggtcaaaa

SEQ ID NO: 33413 - DNA, 474 bp, Zea mays
  Clone ID: MRT4577_130481C.1
tttttttttttttttgaccagcaaacaattgcatataaaaatggtatatatatagtagcagtgttacatacacgacgcatcgtcataccatcaagagcaatcagcctagctgcctatacactgcaggcagctcgtccgacagaatgacggctcctgatgatatgtgcatgcactcctgcatctcaacgtacagtacatatactacggtgtactacatacgtacagtatacagcagcctggtataggctgcaggtagctccatgctcgatggatacctcagctcatcggtcaaacaaagctatagctagctagcaaccctggcaagcaaccaaacatttttttttaaaaaaaaaccagtggtatagtgatgcatgatactatatatatgtatatatttacgtcatgcatgcatgaataatgcatgcgactgatggatggaacgactccagactggacgactctatcgccagatga

SEQ ID NO: 33414 - DNA, 585 bp, Zea mays
  Clone ID: MRT4577_130482C.1
aaaacgacgtttaaattttggttaatcgtttagaagtcaaaactgcacccatcccatgaacatagatgaaaatcaacaatcctgatttaaagataaatcaacaattcttgccactacaaaggcgatgaattgcagaactaaatgggtaaacttcatcttatttgtaacaaatgagctgatcatcacacttccaacatgaataaatgtgcacaggcttgaacattttctttttgtgccatgatcacagttgaaaattatgtgcgcagatgggacgcttttgtgcaatgaccatattttcaccgaatgacaataccaacttgtagtccctgttctctttgcgagtccttttggacatgaacacagctcacaaagcttatggaggtatgcttatgcaaaagctgcagatgaattgatagcattgtacaataattgcaaaatgagttgagttgaagggaaaccacaaaacagtaatgggagtaattctaaagaacaacttataacatatttcactgttataggccaattgacatattcggatgacttaaattagttacacataaagggttcaggtaaatgactcatcca

SEQ ID NO: 33415 - DNA, 780 bp, Zea mays
  Clone ID: MRT4577_130483C.1
caagagggcaagacatctcaaggctcagggggtattgcaccaggctggagccgcagtggaggagaacgatagcagccaggcagatgaattgccagcagctatgtctgaagatccagtagccactgctccaagttctagttttgagccttccactgatgttgagagcaaatgccaggatgctcatgagcacgggtacttgacatttaatcctttattttctcagacagcaagcttgccaaacattcaggaggagagttctagctctggtcaaaagcatggattcagttgtgaaactattgagagaaaagttcttgcaccaagacgtgtggcatcaaatgataatgatcaaagcaatattgctggatcaaggattgtcttaccaatagtcagtctacaatcagaatacctcaaagctgatcctgagaagagtgaggcaagcaaaaatgtacctattattaataggtcaaaaaaggtatcaaaggacctggcaacttctgttatcagcatcccaagggtagatttaagaaggaattcagaaaacggaccctctcgagacttggaggatccattccacaagagttgagatgaaattgcgtgctttatctgatcggatggatgctgacagaactacggcctctagtagatcatcctcttaccaacctcctgagagagctatgacctcagctagatctgcatatcaagatagacttagcatatcttctagatccagtgtgtctcagaacactagtaaagccttggcaccttctaattagctgctca

SEQ ID NO: 33416 - DNA, 144 bp, Zea mays
  Clone ID: MRT4577_130484C.1
ctcggaaaatggctcgtggactactacacgatcggatgcgtctcctccgtgggcaccatcacccacagggcctttttgtacgggggtggcgccttcctgcggacgttggttaagggactcagttacctggactacccggaggcc

SEQ ID NO: 33417 - DNA, 328 bp, Zea mays
  Clone ID: MRT4577_130485C.1
gcagaacaacaataaccgtttgtttgcctattgctgtgcacctgatcccaaatggggatcgggtagcattgcaaaattcatttgcctaaaaccctttcctgttcacacaagccattacacacatgtttaagaagcgctgtcctgtccagtacatcaaattatggacgacatatatcacctccatgctagaacttcctggctactcttacacccatgctatatttaacatatttatcatatatgtctatgacacacatggtttatcttctacaacttaccttatgaaagctattttcaaggctatgggtgtgaggactgactttctgga

SEQ ID NO: 33418 - DNA, 604 bp, Zea mays
  Clone ID: MRT4577_130486C.1
ggcagctgcagcgatgcctttgttcccagtacgccggcgaacgccagccgccgccgccaccgccaccgccacagccggagccggactcgccgcagcagctggagcgcctcttctccaacctcaaccagaccaccatgaagcacgagccagggagcgtcaccagcgccgtcttccttgtggctggcacaacggttggagcaggcatccttgcaatccctgcagtcacacaagaagctgggttcttggcctcggcagtcatatgcatcctctgctggtcatacatggtaatagaatgtcactgactgggtaaattatcaaacccggcgtgttaaaaggtcgtgacggggctgttggttgctgaagtaaacgtcaatacgatgtgtgagctagggtctggtggcgtctcactggtctcgatggctatgcgcactctagggacatttggagtaagaacagcttgcttatcctatttatttatacattatgcacttcttgtcgcatatgtggcacgttcttcagatatcataacaaactcattgggcattccaatatgggagagtgctaccctgttttctctagctttcggaggggtatgctactttgg

SEQ ID NO: 33419 - DNA, 409 bp, Zea mays
  Clone ID: MRT4577_130487C.1
atatgattaagcgcacgagccgaaacttacgaggcttcccctagtaacggcgagcgaaccgggagcagcccaccttgagaatcggacggcctctccggccgcattctcctttacataggcctcctcagccaccgaccagacccaccttctgttaaatgggactcctgctaagaggcgagcacccttcatcccgcacactgtcgctccacgcggctccctcttcaaccaagctcgattaccaatgcagcccatatacggctgctatctccctacgtggctttactatcgcgagagacccatcacgaacagtgtaacctaacctgtatgacgacagtgctaccccaagtgactctccctattcttggaatagccatccaacactcggtgaattcctgttcacactcaccgg

SEQ ID NO: 33420 - DNA, 313 bp, Zea mays
  Clone ID: MRT4577_130488C.1
aggccgcgacaagctggaatcggctcgagcctgccagggcgacacaaaagggaaaccgaagggaggaagagagaggatcctcacctggggggggaggggaggcggcttgcgcggaggacacgctgctcgcgcacaccgttcggacccggccaggcaacgtccatggtctggaggtgcaagaccaccctcttcatccgaagacgtcaagaactaaggacccagggacctccatctgtcagggcggagcgagaggatgcggcctttggatcgcgatgaccgtcatctgcgacggtcctcacatgcggggaccggc

SEQ ID NO: 33421 - DNA, 270 bp, Zea mays
  Clone ID: MRT4577_130489C.1
gggcaccaaaacaaaacgacctttttaccccggtgttatagataaaatacgtaacgtagttacacaggacagatgcatccattttattttggcacacaaatttattatttatactttggagaggaacaccccctagatcaaggggggaagcagcacggccattcctttattcaacctgccgccggagccggagcattccgtccattcaggcgacgattttggggcccaccttctagcgctcgggcttaaagagcaggtcgtgcaggaacc

SEQ ID NO: 33422 - DNA, 598 bp, Zea mays
  Clone ID: MRT4577_13048C.1
tttctgaatacacgcgagcacgcttccaggttcgctggcagcggctggtccatcgctctccacctctcccttcttcgcgtgcggcagtttcaacaaccttcaccggcgtgcaacgagggtgggcccttctccggcacgcagcgatgcgggcgggtcccaaggggaacggcgcgggtgtgccaggcggcgcggcgcggacgggtctccgacgtgtgctgcacggcgaatcccaggtgtgtgcaggcggatccccggcgagcgcgacgcgcgtagatctcagcatgcggcagcacgggccgacctcggtgtacgcggcgcgtgggtccaaggcgtgcgcaatgcaggcggatctctagcagcgtggcctgattgttctccggcgcggcgcactccctagccctcttctccggcggtggcctgctccaccatccctgcttgagtgtgtctctccttctcctccctgtctctggcgtgcacaggctccaacgactggcaggcacgggtggatcctcctcctgctcgtccctatctctggtgcgcgcgctgctcagctacgatgagctctcctgtcaacggcaggggctacggcgagctccgt

SEQ ID NO: 33423 - DNA, 2228 bp, Zea mays
  Clone ID: MRT4577_130490C.1
gggtaattgggtacctccaggccgggccctacgcccaccccacccgacccgggcacacaacaccaattcaccaaacttctcaagactgtcactgtccactccaccacctcacttgcgatgcgaacaagagcaaagccctgaaatccttctccccctgcacgcacctgcagacctgctctctcgcgcgcatctcccgtgcccctcactgtttagtggcgacgactgggcgacagtcgccgccgccgcccgctaggggccgtgcccctggtctccatcttcggcgcttcgcccaccagatatgagcagctggcaattcgattttgaggccattatttgataacccgggacaagtgcactggttacctgaccattttagctttttgagatggctacacagttgccatgcttcacacagctcagtccaccgtcttgtagttggataaaagatgtcgggaactgcaaggctacgcctgatagggtagccagaagtgcccgagctttgggccactgtcacttccggtgctgtgcaggcccccgtagtgcaaactctttcaagaagaaagactctttcgagaagaaagactctttcctcgaacttcatccggaggtatctctgctccgtggcgagaagagtgccgaggttgtgccaatgaaaggttcctctgatgggggtctgttagagggactgggggtgccgccggaccgaaatgattacagtgaggctaagatcaaggtagttggagttggaggcgggggttcgaatgcagtcaatcggatgattgagagctccatgaacggcgttgagttttggatcgtgaacactgatgtgcaggccataagaatgtctcctgtgctcccccacaatagactgcagattggacaggagttgactcgaggcctgggcgctgggggaaaccctgatattgggatgaatgcagcaaaggagagcagcgagtccattcaggaagctctttttggtgctgacatggtttttgtgacggctggaatgggtggaggaactggaactggaggtgctcctgtgattgctggaatagccaagtccatgggtatacttaccgttggcatagtcacaacgcctttctcgttcgaggggagaagacgggcagttcaagctcaggaaggaatagcagcattgagaaatagtgtggacaccctaatcgtcatcccaaatgataagttgctgtctgctgtttctccaaatacacctgtaactgaagcatttaatctggctgatgatattcttcgtcaaggcattcgtggcatatctgatataattacggttcctgggttggttaatgttgattttgctgacgtacgtgctatcatgcaaaatgcagggtcatccttgatgggtatagggactgctacaggaaagtcaagagcaagggatgctgctcttaacgccatccagtcgccgctgcttgatattggaattgaaagagccacaggccaatgtgtggaatatcactgggggaactgacctgactttgtttgaggtgaatgctgcggccgaaattatctacgaccttgtcgatccaaacgctaatctgatatttggcgccgtcatagacccgtcactgagtgggcaggtgagcataaccttgatagctactggcttcaaacggcaggatgaaccagaaggccgcgtgtcgaagggtgggcaacaaggtgagaatggccgacgcccatccccagcagagggcagcagcacggtggagatcccagagttcctgcgacgaagaggaccttctcgcttcccacgagtttgactgtcctgtcctgcacctgcacctgcacctgtatgatatggtccacccacccttaggtcagaattagatgctcttgtgtggcaccgagtcttctctaggcatcgatcgtctctagcgcggtttgttctttctagttttccttttttcttttcttttccccgccaccaattcttatggttatggtcatcaataatgtgtagctgctgtgagctctctagcgctatatgtaatgtagtccgtggagaatgtgttttccctgttacactggttctgattagaatggtagctgaagaagtgatggttgcctgcattagtatggtagctgaccaaggccatgtttgttttcctcccagattaaatattccagcaaaaaaaaaaaaaaaaaaaaaaccaaaaaaaaaaaaaaaaaaaaaaaaaaaaaaaaaaaagggcggcccg

SEQ ID NO: 33424 - DNA, 310 bp, Zea mays
  unsure (1)..(310): unsure at all n locations
  Clone ID: MRT4577_130491C.1
gttctagaccgcaaccggccgcccttttttttttttttttttnnnnnnnnnnnnntnnnggggggggtgtttttttaatttttttttnnccnncncnnccccccccggaaataatggtattgcttcaaccaaaagcattcattctttggcagacaaaatacacttcccaccattttccaaattggctgaaactaaacccacagccccaatcttccaacggtgcatttgaagcggccattacaaaaaactgttcccacccctaattgtatccttatgggcctaaaaaaaggcccaggacccaattctgcct

SEQ ID NO: 33425 - DNA, 373 bp, Zea mays
  Clone ID: MRT4577_130492C.1
ggttaaacaaaaacactaaataatttttcgtttccagcagagaacattcggttaaaaacagggtcctggtggttacttaagcacacaacccaaagggacccagggcataaaccagttgttgaagcaaacgggtttaaacaggacgacacggggggctcctttcgggccaaattaaagcgacgggagcaaccaaaacatggaaacagcaaaagtttccatgaaggaccaggtgatgaacgccagcaccaccgagagggcttaccgggccaacgacaactgggggtacatcctgcaaaagtggacgtcccttttaaacaggatggtcacccccgcggacccccacgcgggaaaaaacgacagaattgcagggacc

SEQ ID NO: 33426 - DNA, 344 bp, Zea mays
  Clone ID: MRT4577_130493C.1
ttacaaaacatgcatgctgaatgaagaccatttattgagaccagtaatatcatccaccctatacatcgacctaattgaccggaatgcataccatcttacgctggctaatcctacgcgttattctcaagctcaactacaggttccggttgatgtaatacagcagccgacgttagatcagcattaacatgctgagatgcatctttcgatcgaaaaacctcgactcactgtacttgtgtcgagcaggatagccccgctttgtgtcgcgcacccagagaacaccgtgctattgactccaacttcaaccgtgccttgtaatttattggcgacaagtcgaactatgacct

SEQ ID NO: 33427 - DNA, 539 bp, Zea mays
  Clone ID: MRT4577_130494C.1
cctacgacgccgtctgaaactcgaacacttactgctacacttgcttatgatgagggcttacgacaggggtagtagactgcttgagacattccttgagtcgatacaggacttctcattgttgcacaacctgaagctcaacctggaactacgattagaacctaaaagactcactaacaatcttggacatgatattgtgcatgatacaatgcaattatgaatgggtctttgatacgaaggtgtatgcacaggcctgttaaccgacgaagataatcaggaagaccatcaggataaccaccaggaaatccacgagccttgtgaggggcatagtaagtgtgcgaatacaggagccaaaacggaacacagttgtttccagagatctttacctgaaaattctgctgaccagacctaagacgcgatgtgtgatgcactgaaatttaatgtgtactataatgcctactatggtgcgatacatagttatgacaccttttattctaactttcggtctggatgtcagcgggaatataaaaaaaaaagggcgg

SEQ ID NO: 33428 - DNA, 418 bp, Zea mays
  unsure (1)..(418): unsure at all n locations
  Clone ID: MRT4577_130495C.1
anaacncntctaacaacgttaatggatttcccctcccctcggagggggggggcccctttaaaaaaggggggcggcccctcttacaaaaaaaatggcgaaacccccccaattgtaaaaattccaacccccggggaaaaaaaaacctaacgggaaaaaaaacaaggtccaccgaggcacggggcccccagaaaaaaatacagctgattgatctttaagaacgggagtggcggcccccaaaggagaaaaacggggcttcctttaaaaggcaaatagaggctcccccctaaaaggggtgtaagaaaaaaaaaccagggcccaaaacttcccccccctaaacccaaaaagcgtggttaaaaaaacccccactaaaactcgcccccaaattcccccctgtggataaaaaaaaaaccccccgggg

SEQ ID NO: 33429 - DNA, 281 bp, Zea mays
  Clone ID: MRT4577_130496C.1
ggcggcaaacggataaaaacttaaattctccacgagggaaagaaaaaaacatgcccaggtggggacaggaatacccagagtttttgtttgggtaaacaaaacggggcagcagggggccccagccctgaagagaccacaaatgggaatcgacggagaaacttggcgggggcagacaagaagacatcccggggggacccccgtttttgggactggcatgtttgggcacggccacggaagtttaagacctgcttttgaacgggatggctttggggacccggggg

SEQ ID NO: 33430 - DNA, 322 bp, Zea mays
  unsure (1)..(322): unsure at all n locations
  Clone ID: MRT4577_130497C.1
aattcattctacaccactttatcccctcgcaagtnccaatcgacagagaccaaattattttcctatttataaacaagaacttgaagacagcgtactcaaagcgactcaatgagaaacaaacactgctctactgaaatgacctccagcgccctcaaagcgtagctggacatttacaaactgtcatcacaatgctactatgaatacccgtatcacaggaatttttataacaattgatgaacgcctttctgcattttaagctcgtgttcttccaccaccaaggcctcaagtacccgcaatacttccacatcaacctgattgaccc

SEQ ID NO: 33431 - DNA, 407 bp, Zea mays
  unsure (1)..(407): unsure at all n locations
  Clone ID: MRT4577_130498C.1
cgggggccgngcgagacgcgggagggatnggcgccggaggcttttcgtgatgancnccggcgacaggacgccggggaggggcagctgctgcaccaagaaacacgccagcctcgngcagancccaaggagggngnncngcaagaaggggggcaacgcggacggcgacaccngggacgagngcanaggaaaangcacngaaanacgccacaaagaaccggngcnagaagaacgccagnggagcgcgaacacngaccgancnccagggcaggaaagnnaccccnnggaaagccccaaagcacgggngaccggcagcggaancagaacngacaccccaacggagaagggcgaaaaaaacaagcccaanaggccacccaaaccaacagcncctgaacccgaagngaaacaaa

SEQ ID NO: 33432 - DNA, 107 bp, Zea mays
  unsure (1)..(107): unsure at all n locations
  Clone ID: MRT4577_130499C.1
gacccatgactgcaccaaagatatgggctgtcgattgtggatacttggttgataaaggnatgttgcttgccgcgaatgctagncggagcctatagggttgatgagct

SEQ ID NO: 33433 - DNA, 304 bp, Zea mays
  Clone ID: MRT4577_13049C.1
acgcccacgcatccatccacattttcctactattgaagctgcggttgcagtggagcgtccgggggtcaaggaagcggtggatgtggctattgatctgaatccacctaaaattatataacttgcaacgacaatggacattactcaactcttacacacagctatgaacatgttatacaaatatgacaccacacatgaatatgtctagctaagaggcatagctgtctgatgcatatcatgtgtaacacctcaaggcttgtcatgtagttcatgaaactggcatgatggtatacattactctcttcaa

SEQ ID NO: 33434 - DNA, 118 bp, Zea mays
  unsure (1)..(118): unsure at all n locations
  Clone ID: MRT4577_1304C.1
gcgttttgctcattccaggnggaacggaattgacttctctcctggtnganagggatttggncacataacagaagccatgaggccnagcaaaccnagggacacacatagagtgncctga

SEQ ID NO: 33435 - DNA, 374 bp, Zea mays
  Clone ID: MRT4577_130500C.1
aagctgctttctttttttctttttcattccattatgtctcagttatttatctattaacttcttgctacctctgatcaaccaaaaagctctggaaaacctttctccctaccctcagcaacaacaatttcttccattaaaccaactggttacactgaaccttggggcggattcgcacaaccaacaataaccattttatccagatttgctactgactactctgagaaaaacagcaccttccattttaccaattggcgggaggaccccggtttgtttagcaagggggaaaactggcaccatttaacccggttggttgagggaggccgggtttccccctggcaccgggtcaaatggcggccttgttcctggggttgggg

SEQ ID NO: 33436 - DNA, 317 bp, Zea mays
  unsure (1)..(317): unsure at all n locations
  Clone ID: MRT4577_130501C.1
gcaggnnaccggnnccggaattncccgggntgcgacgccacgcgnntccgcggaccgccgtggnnggtcagacccangtatactggattggttngnnaagctgnngtgaaaaaagtcgaagttgtcgcaggtgnnngtgggacccccatgtttcnnaccatggnnagctgacccaaataccccatatcanannatattnngcgaaatanttgcgtaaatnnttcaaanngataacaannntataaacananntgaggnnggatgnncttcgtacangnnttcttgggatgttggnnttgtggnnagttgctttagtt

SEQ ID NO: 33437 - DNA, 505 bp, Zea mays
  Clone ID: MRT4577_130502C.1
tatctgttgtatcatttgctgttgcttgtaagcagaacgcattgaccacataagagttggactacatgaaagcagctgatgctgttgcaagaatgtgataatgaccaccatggctagttgactaatagctgatggaaactgctgcaactgtacttattcgctgaaatgcgactgatttcgcaagagcatgtggccaaggatgcaaacattgtgcgtgtgtgcgaaaaaagagaccaatgtcactgcacattctgtgggtcaaaggggacacaaactgtgtgcgtctaaataaggcgcgaaggtttgccacgacctatgggccaaagagtggcgatggaattgggcgaacgaaagctgcaatactctcaacaactgggctaggggaaggctataagctctgacaatataaaaatgcatgcccattgccgaaactgatggtaagaactgtgaaataatccccctacctgtcctcagcggggcgtcaccacaggtacttgattgaatg

SEQ ID NO: 33438 - DNA, 247 bp, Zea mays
  Clone ID: MRT4577_130503C.1
ggctaaccgaccggcttgacccttatgaactttatgccatggtctccggaattgctcgacgcgtgctttcatccgggctactctgatcaaattctagagcccaaacatagccatcggtccggatacattaccatccaataactctatactatcgccctccaattcacttgcacttcggcactggcataatcattactcggttcaccgacggctattcatcatctatcttcagacccgaatgctcttg

SEQ ID NO: 33439 - DNA, 716 bp, Zea mays
  unsure (1)..(716): unsure at all n locations
  Clone ID: MRT4577_130504C.1
cttttcgttcccagtacttcacgagtacacgtccgtcgcaggattcggccctgtacacacgcgtgcaagatggttcaacgacatggtgaatgtgctgttctcgtccaaggctttcgttggtggcattgttgcatacgtgctggacaacacgctacacaggcatgacggcgctgtcaggaaagaccgcggataccactggtgggacaagttccggtcgtaccggactgacacaaggagcgaggagttctactccctgccgttcaacctcaacaagttcttcccctcggtttgagcaaagctgtgataaatgcaacaagacactaaggttacatgtactatctatctgcctctcccccaagttctctgaaggtggcaaactgttgggctgaactgtcttggtgcagggaaatcctatgcccttaatcagggtccaaaccctatggtataatcggcgtttcggtgtctcgctagaactatgttccgtatgttaggttaccgctgtatatttgataccctattcggggcaacgactaggaagttttgctactcatttgcatatgggaagggtgcgttagntcttagttcttacctctagtagtttatctcgttctggaacgaggtcactctattgactgccattgtggtgctactacttagcagtgaagctagattctgtatgttgtaagctttagcagaacaatcgaatggtattctac

SEQ ID NO: 33440 - DNA, 711 bp, Zea mays
  unsure (1)..(711): unsure at all n locations
  Clone ID: MRT4577_130505C.1
aaaaaaaaaaaaaaaaaaaaaaaaggtttntcctgctctatagacttctagaaggtgctaataccttccccgcacgccctccgcctccccgctgtacttcccggcgctcgagctcgtcgacgtctacaacaataacctgtccggccgctcccgcccctgagcgcgccgcacgcgcgctccctccgctacctccacctcggcgggaactacttcaacggctccatcccggactccttcgagtacctggggctcaacggcaacgcgctgtcgggccgggtcccgccctcagctcgctctcccgcctctcgcgcctccgggagatgtacatcggctactacaaccagtacagcggcggggtcccgctcccgcgcgagttcggcgccctccagtcgctcgtccgcctcgacatgagcagctgcgcgctcacggggcccatcccgccggagctcgcgcgcctgtcccgcctcgacacgctcttcctcgccatgaaccagctcaccggggacataccgccggagctcggcgccctcaccagcctccagtcgctcgacatctccatcaacgacctcgccggcgagatacccgccacgttcgccggcctcacaaacctcacactgctcaacctcttccgggaccacctccgcggcgagataccggacttcatcggtgactttccgttcctcgaggtgctgcaggtgtgggacaacaacc

SEQ ID NO: 33441 - DNA, 564 bp, Zea mays
  Clone ID: MRT4577_130506C.1
tcccgcccgcgctcgcgtccatgcccgcgctccgccacctcaacctctccaacaacaacctcagcgggcccttcccgccgccgccccccgccgcctacttcccggcgctcgagatcgtcgacgtctacaacaacaacctgtccggcccgctcccgccgctgggcgcgccgcacgcgcgctccctccgctacctccacctcggcgggaactacttcaacggctccatcccggacaccttcggcgacctcgccgcgctcgagtacctgggcctcaacggcaacgcgctgtcgggccgggtcccgccctcgctctcccgcctctcccgcctccgggagatgtacgtcggatactacaaccagtacagcggcggggtcccgcgcgagttcggcgcgctccagtcgctcgtccgcctcgacatgagcagctgcacgctcacggggcccatcccgccggagctcgcgcggctgtcccgcctcgacacgctcttcctcgccttgaaccagctcacgggggagataccgccggagctcggcgctctcaccagccttcggtcgctcgacctct

SEQ ID NO: 33442 - DNA, 310 bp, Zea mays
  Clone ID: MRT4577_130507C.1
ggatttcgtccctaatggagtgcgagcaacagtaggcaaaagagcaaacctaaccctccctctctgaacactgacattcaagaacctcatatggttcgtgctcggaggcgcggaccagccgttgtcaacgtccttataggggttttgcgactgagtgatctcccaccacctttaatacgacttgctcaccctggatcaccacatattggacgaagaacatccctgtacagcatgaactctgcaatatatctatcttcaaatcttccaaacggagctaaaataagtcatccatcccataatcaggatgcac

SEQ ID NO: 33443 - DNA, 178 bp, Zea mays
  Clone ID: MRT4577_130508C.1
gtgtaaaacgttttataaaaacgtcgaagacatgaacacgacccggctgggacaagatggtccgctggagccgctacaccacagtatatcatgcatgaacccgtcacacaacgttttacacattgcctggggacgccaatgttatttgtatttgaaagacagggcatggttaaccaga

SEQ ID NO: 33444 - DNA, 714 bp, Zea mays
  Clone ID: MRT4577_130509C.1
tcccgtgctcgtagttgttggagtagggttttagccatggcgtggagcgccgccgccgccgtctccagattcgccgcctccccggccgccgagatccgcctgcccttctcagcagcagccgccgcctccgtctcattcgccgggcgccgccgcttcggccccgtcgccgcgtccctcgccacctccgccaccgttcaaaaggaggctgttcagacggagaaggcgccagcagcactaggcccctactctcaggcgataaaagcaaacaatcttgtgtttgtctcgggcgttcttggcctaaatcctgagacagggaagtttgtctctgaaagcgtggaggagcaaaccgagcaggttatgaagaacatgggtgaaatattgaaagcaagtggtgctagctactcatcagttgtcaagacaacaatcatgttagcggacctacaggatttcaagaacgtgaatgagatttacgctaaatattttccagcccctgcaccagcgcgctcgacctaccaagtcgcagctctgccactgaacgccaggattgagatcgaatgcattgctgccctctagttacctcgtggctggccaccaaaaacctcaataagcattccatgcccgttgcagctggccactactattctgtagtgcactacatgacactgtaatccaattaaggtcttgaactgcatgtgatcggtgtactgtctctca

SEQ ID NO: 33445 - DNA, 247 bp, Zea mays
  Clone ID: MRT4577_13050C.1
ctcgttcgttccaaacggagaagaggatcaggttcgttccaagggaaatgagaagagggtcatgagagtgatagagagatagagagagagagagagagatcccgtgactcgtcgttcagcagcagagctccgattgatccgcaatgcaggcaatatgtacaacgcgccgtcggctcaggatatggccgactgggatcacgttcagaggcgccacgaggataaggtgctgtctctacgcctgtatctt

SEQ ID NO: 33446 - DNA, 448 bp, Zea mays
  Clone ID: MRT4577_130510C.1
ttggtttttttttttttggccataccaagggtcactctattctctattgggcctgtctcaatatctacaacaggcaggagcagcactaccatcttctgcattctctatttccctcctgctcataaacataaaacaccgcttcactaaaacctacgctaatcagatagaaaacgttgaatagctaacgaaagaatagaaccctctcactactctagcactggggaaactcaaaacctattccctaagcaaagaagctgtatcttctcctacctccctcactcacaatgcaagccacagacctctagaacaggtccatcgcacttggtggcgaaggggctcacccggacccacaaaagagagagtctggatgccagtcgcattgacagcacaacgacaacggtcggcaccctgtcctgcctggcgatcacgcccttgaggaacggggtgg

SEQ ID NO: 33447 - DNA, 488 bp, Zea mays
  Clone ID: MRT4577_130511C.1
ggggggaaagtattttatattttaaaagcaagcacccactcttttgtgaaaaccactatagattatcgcaaacaagaggggggtccatatatatcaaacggctgattgcttgcgtatccggaaaaaaccccctaaaactgggccaaagcccttttataaccaaaaagggcaaaggcaatcccccaaaaaaaatgacaaccctaaaaaaacctagcccaccataaagcaaccaaaaatttcttcatacggaccaaaaaatacccaacaagggaaaagaaaaaaataacccgggaaaacacaaaaaaacccccccaaagcggccacctgggcccaccccggaattcccgacccgttcccgcaagcggaccaaattttcctaaaaggaggaaaaataaaacttggggtaatcaagggaaaaagcgatccccggggaaaaaatggaaacccccacaaacccacaaaaaaaaccaacccgaaacataaagggg

SEQ ID NO: 33448 - DNA, 332 bp, Zea mays
  Clone ID: MRT4577_130512C.1
tcttcctcgcctgcgccctgccctccctctgtttttctagacccccggatcgctcataggggggggggtattcgtgcgcgggtgggctccttttcctcctttcccctcgcatcaacatagcaccacccggtgaccgtacaatggatgcggggggcgttggcctggcgctgcagactctggcgggggccttcggcgtcctgccagcgccggggcgtgctacagtcgcccattgggaggctgagaggtgctgaaccggtggtggctgcggttgccgtgcgggttctttggtccaagcctggcgtaccggtccgtgcgaagaaattattcggggg

SEQ ID NO: 33449 - DNA, 132 bp, Zea mays
  Clone ID: MRT4577_130513C.1
acgcgtccgcagtcaatagctattcagtgtctggaggcgctgcagtttctgcatggtcttggtctaattcactgtgtgttaaagcctagaaacatattagggaaagagctacagctccaggtgaaataaaag

SEQ ID NO: 33450 - DNA, 430 bp, Zea mays
  Clone ID: MRT4577_130514C.1
atttctagattcttaaaaaaaaaaaaaaaaaaaaaaaaaaaaaaaaaaaaaaaaaaaaaaaaaaaaaaaaaaaaaaaaaaaaaaaaaaaaaaaaaaaaaataaaaaatatgaaaaaaaaaaaaaaaaaagcattgagctgtgccctggcggggggggcccaatggaaaaggaaaaaaaaataaaaatatccttggcgctggccccggggggcctttaaagggggagattccaattaatctctatccccgtttggaattccattggactggctttaaaggggcaacacctggcataaaaaaaactttgccaaacccaatttccccggttttaaaaaaaattttcgttggaaaaacctggggtaaaacaaaaaagacccatccggatcacccccccttttattagcttggctttaatggaaaaggcccctcc

SEQ ID NO: 33451 - DNA, 577 bp, Zea mays
  Clone ID: MRT4577_130515C.1
ctacaaatagtttgagttcatatatcaatcatggaagcaatgaataaaaactcaggtggtataaaagcacacacacactgctgagctcctctgcaaaacaagaacgcagctgcgatcaaagcatgcccctatgctgctgtcaggccttccatggtttccattacacggtacaaaatctcatatgaactccaccatcagccaagcgatcactcaactaagtcagccaatcggatgagaaatacaaccccaccacggcagggcgctcctccagtgcgggggacatccgcgagcgacgtctgtgcgcctcaaggtcatgatgcagacagtagcagctgcctagccactctctctaatgcagttgcctggaaggagatatctgtaccgatcattctgctccagcagataggcagggagatgaacagcagagaatgtccttggaataggccccagcttggcaatgatctcttggaatgtgtattcttcagggagcatgtcgaaaagatcagccccttcgcaaatcacgtgctgaatcctcttcgggtttaagaagtacttgattctgatccgatcgacgtgg

SEQ ID NO: 33452 - DNA, 494 bp, Zea mays
  Clone ID: MRT4577_130516C.1
agtctaaaccaaatgaggaactacagctaaccatttcttatttcaacctaaatccttcaaagagggcagaaacaccccccatttacacacatacaagattaattctatagatatggcaacacaacacggtgggggggagggagcaataacactttacattcaaacgaatgctaacctactgcaaaaataatccatccgaaaaaaaacaagcgttacatactaagggactcatcacattggaacccatttacccactaactggtgcaatggttacatttaacacccctgagatttctaggaaaggccgatcatgtccacaatgcttaatataggaatgggaacatgccatggaaactcaatgatcttaaccggacaacctcaatgaacctggaatttcgtagcgaaacctgcactaaggccatctgtgcataagcatactcgtaatacagatcgaacaagtcccatgtataagtatttgatgttggaaacacaaa

SEQ ID NO: 33453 - DNA, 308 bp, Zea mays
  Clone ID: MRT4577_130517C.1
cttggactatattatgcttttgcttcttctgattttatctgatcattttcaaaatatcaataacagagctgtacttctaagaggtcaagtggtttggagttctataaagctataaggatgggcagaacctaggaaatgctgttagtaaaggagaaaaataaaatctaatggctagtaggaacaagggaattttagggaagatgagcttcccagttatattgagaggtccctttccacagtaagtagtagtttgatagagagattacatggctgggcatggtggctcatgcctataatctcagcacttt

SEQ ID NO: 33454 - DNA, 431 bp, Zea mays
  Clone ID: MRT4577_130518C.1
aggggggggggggaaaagggcccccggtccaaagggggagcccacaaggaacaaagggcggggccccaacacgaaaaccaaaagcacccctccttatgagggggaaaaccaggcccagagacccggagaccggggtccttgaaaagggggaaacggaaggaggaaaaaaaccggaaacagggggaaagggaaaagaaaccctcgggagacccaaaagggggcgggggtcaacccgggaaaaacggaccgggacccgggggggcaccaagaattcctaaagggagggcaattaaagacagggggaaaaaagggaaaagaagggtccagggggaaaaagttaaacgggaaaaattccacacaaaaaacgagccggaagcaaaaaagggaaaacccggggggcccaaagagggggcccaccaaaaataaatggg

SEQ ID NO: 33455 - DNA, 380 bp, Zea mays
  Clone ID: MRT4577_130519C.1
gggtccacgcacgcgtccggataaatccctgccattagtagcacgcacaaaacaattggaataaggtgcaaccaaaacggttttccacggttcccggttggaaccaaccgaggagattgtcgtcacgctcgattggaggcctgattgggacgtactggggtctggggggaccgctgtgctgggcgtgcagcgggtcgccggcagcggcgcactgccggacgtgcccgggcggcgcgtacctgtgcccggggtgcgacactgggcacgctcgggcggtgcacgaacgggtgtgggtctgcgaagtgtgcgagtgcgcgccggccgccgtgacgtgccgcgccgacgccgccgcgctctgcgccgcgtgcgacgccgacatc

SEQ ID NO: 33456 - DNA, 499 bp, Zea mays
  Clone ID: MRT4577_13051C.1
gggcttgggaattgcattggatgcccccattgggggcgttttattttttttgtttaccaaaacaaaattacacaggggaacgggcaaaaattatgtacaggacaagagttaaaacaggggaggccccttggagcctaacggcagaaaaccaaattacagggggtacctaggggcacgagcggtgaaaaaaacccccgggtttggtagctcaactaaaaaaaaagggctggggaaagcctccaaaaaggtgcagtttttaaaagggcactttggggcctaaaaaggccgggtatgggcttcgatttttttgaagggaaaaaaagaaaacactttggggcaaaaaaaaaaacctaccacctttctggaggctgaattgaacactttgcaaacaaatgggggggtggttgtttggaaaggacttttttaaaatttggacaagccttaggggagttttttttaatgggggggaacaattgccaaaaaaacggcaaataggccc

SEQ ID NO: 33457 - DNA, 777 bp, Zea mays
  Clone ID: MRT4577_130520C.1
ccggccgggccccctcgggacacctctcgctttaccaacccgccgttgtgctttctttcttttttgcatctgccaccaacgctcgctactcgaaacggggccataggatagtagtcagggcactaattaatcgtcgtattcctctccacaccttttgctctcggaacgggccttcacgcggatcgccatcgtgcttacggccgtcatcgccaaaaccctgggaaagcgttccccgcgaacatttgcgatagccttttggccgcggtccgactccactgcgcgtcagcttaccattaccatatcgacaactgcacaagggaatcggaatcatgatccgagccgtcgtctctgccgcaattgctgctgctgcgtttgcaggcttcgccaacgcagccggtgccaaatgcacaaaggatagccattgcccaaaagaaacgccctgctgctcgctctatggcgattgcggtgtcggcgctttctgccttggtggatgcgacccgctcatgtcgaatacctttgactcttgcgtccccggccctgtatgcaagcccggaacctattcgctcgacagcctcaacgacgttcaacgtattgaaaattacctcggcgatgcctccaagatcaactggcagtcgcaaggcgaccctaccccatacactgatcctgctacgggcagcaaggcgacgctcttgaccatggctcaaggatcaagtggaacactgttggcatctacccactatgtctggtacggcaagatctgctcaaaggtcagcagtg

SEQ ID NO: 33458 - DNA, 642 bp, Zea mays
  Clone ID: MRT4577_130521C.1
acgcctgcaggtatcggtccggaattcccgggtcgacccacgcgtccggcttattggggactcaggtgtaggtaagagcaacctgctgtcacgcttcaccagaaacgaattcaacctagagagcaagagtaccatcggagtggagttcgccactcgcagcattcaggtggacggcaagaccatcaaggctcagatctgggacactgctggccaggagcgctaccgtgccattacctctgcgtactaccgtggtgcagtgggtgcactgctggtatatgacattgccaagcacttgacatatgagaacgtggagcgctggctgaaggagctgcgggatcatgcagatagcaacattgtcatcatgctggtgggcaacaagagtgacctgcgccaccttcgggctgtgcccactgatgaggcccgtgcctttgcagaaaagaacaacttgtccttcattgagacctcagccttggattccaccaatgtagaggaagcattcaagaacatcctcacagaaatctaccgtattgtgtcacagaagcaaatcgctgaccgtgcagcccacgatgagtcccctggcaacaacgtggtggacatcagtgtgccacccaccaccgatggacagagacccaacaagctgca

SEQ ID NO: 33459 - DNA, 229 bp, Zea mays
  Clone ID: MRT4577_130522C.1
gagcggatccatggggccagcgacccacaggaacaacaacaccggacgaggcgacggaccacgcaccacctccggctccggagccaccgccaccgcaaccccaacggcggcaccacacgaggcggagaaccaggaggtgatcacgcagtcggcacagctcgctgacgccttcagcgcctctgaagctctacaacagcaggctcaggcagacgcttcacgccaagcagct

SEQ ID NO: 33460 - DNA, 749 bp, Zea mays
  unsure (1)..(749): unsure at all n locations
  Clone ID: MRT4577_130523C.1
ccggccgggagtccgtacacacctagccgtgagctaggttttgaccacctttgcagccaccagggcgctcgacgagctcactctcaatctcttcccaaatccctatccgacgtcgcctccgtcgctgtcaccgtcgtggcgtcgttctgctcagccccagcgaacctactccccaccgccactgaaacacatggcatttgaggttgaggaagatgatgcacatcctagagggcgttccaatgcaactgtgacagatgaacaaggcgattgccatcgcaaaggaaagcgtgtcactagacgagcatcaagcgacgttgctggtatgagcacaatgcctgaaaatactgttgaggtggtcacacaaaatggcgtgtgaaattaaaaggagccattgagagcccatggagccatggtgagccttatggaaatggttttagttgtaattattgcaccagtcgtatcaagggntggaggtgcgacccgtttaagagagcatttgggaggattgcgtggaaatgtggctacatgtattaatgttccacttaatgtgaaggcaataatgactgatgaagtgttcaaagaataaggaggcaaaacaatgacattaaactctatgttgagcaagaggttagagaatcaaataaaggattagggactttgagtaaagcaagaattcctttagatgaagaaggtcanatacacatggcattgaaagagtcactgagggaatatgatgaggagaggatcat

SEQ ID NO: 33461 - DNA, 1203 bp, Zea mays
  Clone ID: MRT4577_130524C.1
cgcctgccgtaccggttcgttgggccgactcgtccgcacgcgtccggcaaccgtcaaccgggaactggaataccgtctgacggcggcgaggaggcgatcgcccgtcgcggctgtggcgtcgtacaagctgccgactcacctggcgagagcgaacacccggctggttgccgcctgctcattcacgatcagtatatatacaaggtatctcatccactagcatttgatgctgccgagtgcgtagtcgattggctatggaatctgtggattacagagtcaggcgaatactgtatgctattggtcagcaagtgtgcgtcttccttaggagatgaggagcttctgttcatcttattctctggggaatccccattcttgatacagttcagggccaccactacttccttcattgacggccttgaatccctttctaactgcaaacactgaaatgccaactccatgacgagatctatcgatttctttgttccatcgtcagcctcatatccaagctcagggtcaaccagctgatcaacttcgtggttctggattctgttgagagccatgttggccaggttgatatcgctgtgggtcctgctcatgtcaacagctggtttagaggagatgagctccaccaacacaacgccgaagctgtacacgtcgctcttctcagttagcttgtagcactggtggtacaccgggtcaacatagcctggtgtgccctgcgggacagttgatacgtgtgtgacttcaggagggcacagacgcgacaacccaaagtcggcgactttgacgtggaagctgttgtccagcagtatgttgttggtcttgacatcgcggtgtatgatttcgaccgcatggaggtatgcaagtgcttcagctgtttctatggcaatgttcactcttagaggccatgtaaggtcgcgttctgacgcacgggatccatgaagatggtctgcgactgtcccgttagggatgaactcgtacacgagcataaggtcacggctgctacgagacgtgcagccatataggatgactaggttctggtggaggaggcgggacaaaatgtctacctcatttttgaactgttcaacccgtttgtagttgtttttgtagaggcgcttaaccgcaactactctcccatcctggagtttccctttgtaaacagttccaaaaccaccatcaccaagttccctcgagtcactaaatcca

SEQ ID NO: 33462 - DNA, 186 bp, Zea mays
  Clone ID: MRT4577_130525C.1
tacgtatgctcgcctccttcgtctcctcgttcttctcgtcgagcaggcggccatcttcttaacacccctggttggcggcataatgatgccctgctgtcttctagcagcgacgaacggggaggaggtattatctgctgggggactgctggtggcttctgtgactcgcgtcgtcgctactgtggggtc

SEQ ID NO: 33463 - DNA, 877 bp, Zea mays
  Clone ID: MRT4577_130526C.1
attgggtacctcgaggccggccgggcagcttgctctcgtcctcgactaccgaagcaggaaggcaggcacgcccaacctctacggcaaaccctaaccacggccccaatcctccaatcacctccctacctgtcaaatcccccaaattcgaccgcgaaatcggcatgtgcgactacggaaacccttctacatgagcccgccggagatgatcgcgtcgcagccgcgccgggtccgcccccttgccgccgtctccctggtgctgttcctcctcctcctgtacagccgttccggttgtggcccgccgcgcgctgcacggctcctgggctccggattgcacccggtgcaccgcagattcctctccgatgccgaccctggcggccccacatctagcgccgcgaatccttctggtgccgctacgctaaatggcgagcaggcggaggaccctgccgcggcgtgcgcggacatcgcgcggcacgaggggttcgggacgcagtgcgagttcctccgggcccacccgcagtgcagctccagtgggttagtcgactacctgggtttcttctactgcagatgcgagaggttcaggttgctgggctacgcggtgctcggggtatgcctggccgcgctgttctatatgctgggcaatactgctgccgactacttctgctgcagccttgagaagatgtcggcactgctgcggctcccgccgaccgtggctggcgtgacgttgctcccctttggtaatggcgctcctgacgtgtttgctagcattgctgcatttatgggcagcggtgctggtgatgttgggctgaacagtgtgctcggtggagctgattcgtcccttggtggtggggggtgggggagttttcattgtgtgttgccg

SEQ ID NO: 33464 - DNA, 732 bp, Zea mays
  unsure (1)..(732): unsure at all n locations
  Clone ID: MRT4577_130527C.1
tttttnnnnnnnnnnnnnnnnnnnnnnnnnnnnnnnnnnnnnnnnnnnnnnnnnnnnnnnnnnnnnnnnnnnnnnnnnnnnttttttttttttttttttttaaacaataattatattttaataaatatattaatatctatttatatatatactactctacaagaacacaacatagacatccacattagtatacatgccccgccttcacaaatcttgcatgcccctgccaccacccgcgacagcctctccctcgcacccgtccagccgggcctcagccgcctccgcaaatctcgcctccgtaaatctccacaaaccacgacgttgagatgcgagacccgccgaggcaacacccccctccctacacgcgggcacctgctgcctccaaaccaccacccccgccagggcagcgtcgccgccgccgccgcgcaacctcctgtgtgtggtcctccttcacgctgtgcacgaccaactgcggctgcctcagtcgtggcggtggagcgggggaaagatggcgacgagccaaaggacgaaggctgccaaggcgaggtggggctcggcggcgttgatgcaggcgacggccgcgatggccatgaggaggagccgcacctgcgctgccgctgccgctgccggcggtcgtgggtcagggtccatgagcgcgcggtggtggtgcctgctacagagtagagtatgttagcggaaatacacgcgggagggaagagtgagctcgtgccg

SEQ ID NO: 33465 - DNA, 2481 bp, Zea mays
  Clone ID: MRT4577_130528C.1
ggcaggaagcctcccgaaatagagaacattggttgagagggcgtttgcagtaaccaaagagtggcaagagcgctttgggatcaatatggacaatttgtcttctgaagacaaggaggtggagatggccgaagctgatgggtcagagaactcaggagcaacagagaagaaagaaggaaaagaagatgaggagcaggaggaggtggaggaagaggacgatgaagaggaagaggaggaagacccagaggaggaggaggaagaggaggaggaggatgacccagaggaagtagaggaacctgaggcaccaggaaaggaagggaatgaggtgaagggagaaggggcagagggaaaggtgtctgaggagggagaaggggcaggggggaaggtgtctgaggagggagaaggggcagagggaagggtgtctgaggagggacaaggggcagagggtaaggtgtctcaggagggacaaggggcagagaaaataggacatgaggatgagaagaagggagcagcagtgggcaccatgaaagtgaagacgggagaagaaggtaataagggtgcatcagagcaatcggaggcacagatatttgtgcagatggtagcggcatttggattgaaggataagttcgatgaggagttcttgagaaggctgtttgttgctaatggacggaagagggagcttgctaggattgcatgcgtgcttggatttgaggaaagccttggagatattgttgaggaactaataaagtcagggaatgctatagaggctatatatgttgcccatgaggctgatttgcttgggaaatttccacctgtgcctctcttcaaatcttatctgcagaattccactgataaggctcaggcagtgttgaaaagtggaagacattccagttctgcacttgaagaggcaaacagcttggagggcaatgcatacaggtccgtcataaggtgcgtcgagtcctgccagctacaatcggtgtttcctttagaggtcctgaggaagaagttagggaagttggagaaagagaagtctgataggaagaaggcagctggtccaagcagattcccgaacaagcgatcccgcggcgcagctggaccctatcccttccctgctgccaaggctgctaggggctcaagctttggtccgcgtttccagaacccagtctcacgttccttaaactacgcacctcatgctggatatataaacccagcagctgcatcaccattctctgtccctgggagcgtgtcggggagacgaggtggtgtaccatatggcggacctggagccacgtatggtggctcccctagctttgcaaccggtggtgggcagcaaccattccgtcgttaggtctagggctgtttgttgtaactgaatgctccttgttttctggctaatagggataatgtatgcctccagctattcaagcatacttgttcagttcttgatggatgctggatattgaacgtcgtgtagtacacattctatggtactgtgtttgctttgttaaatttgaactgtgtcttccataaatggattgaaggataagttcgatgaggagttcttgagaaggctatttgttgctaatggacggaagagggagcttgctaggattgcatgcgtgcttggttttgaggaaagccttggagatattgttgaggaactaataaagtcagggaatgctatagaggctatatatgttgcccatgaggctgatttgcttgggaaatttccacctgtgcctctcttcaaatcttatctgcagaattccactgataaggctcaggcagtgttgaaaagtggaagacattccagttctgcacttgaagaggcaaacaacttggagggcaatgcatacaggtccgtcataaggtgcgtcgagtcctgccagctacaatcggtgtttcctttagaggtcctgaggaagaagttagggaagttggagaaagagaagtctgagaggaagaaggcagctggtccaagcagattcccgaacaagcgatcccgaggcgcagctggaccctatccctttcctgctgccaaggctgctaggggctcaagctttggtccgcgtttccagaacccagtctcacgttccttaaactacgcacctcatgctggatatataaacccagcagctgcatcaccattctctgtccctgggagcgtgtcggggagacgaggtggtgtgccatatggcggacctggagccacgtatggtggctcccctggctttgcaaccggtggtgggcagcaaccattccgtcgttaggtctagggctgtttgttgtaactgaatgctccttgttttctggctaatagggataatgtatgcctccagctattcaagcatacttgttcagttcttgatggatgctggatattgaacgtcgtgtagtacacattctatggtaccgtgtttcctttgttaaatttgaactgtgtcttccagaaaaaaaaaaaaaattttttaaaacccaaaaacc

SEQ ID NO: 33466 - DNA, 544 bp, Zea mays
  Clone ID: MRT4577_130529C.1
caggggaggagggctcggggcgcgccggtcgctgacgatgggcggatgcacacagcaccgggaccaccgggacagcgcgcatgggttcggactatggaccgacatgaccgaaccgctcgtctggctagcccctgctggccctggcgctcacaagggtgaggctactaccacggcaccctgcgcggcaaacctgcacgccagcatcctccgagccggggccggtgccgttctgcggactgcacggacgcgctggtggggctggaggagggcctgggctacacagcatgacgggagcactgaggctagcgcccgacccggactgctgctaggggctcacggacctggtgcacggagaggtggccagcctacgccaggagttccagggcggacaagactttggtctctcgctcaacatagaccagtgacctgcatgtgaccaacgcgtgcaatgtaaacacgccaggcctccacaagagccgcgtgtctgcttctgaagagaccaaaacgggtgctgactctagacaatccacgactccgtacgccg

SEQ ID NO: 33467 - DNA, 263 bp, Zea mays
  Clone ID: MRT4577_13052C.1
ccccggggaccggccggaatcccggtcgacccaccgccgctatctccaccgaggactcccacgagggcaattaaaagttaacgggttcaaaccacaaaccaacaaaacgcaacacaccgaaccgcgagccaccgacgcgaacacccaccccgaggcgaggaagggggaatgccccccaaaatccatctactaaagacgccaacctaaagaccagcaaaagaactcgtgcgggacaaccaaaaagaatcaccaaagaaagaccc

SEQ ID NO: 33468 - DNA, 396 bp, Zea mays
  Clone ID: MRT4577_130530C.1
caccaaaccgaaggtgcgtgttttcaaaaactggaaattggcaaaggattccctcccgtttggggcgggggaacaaacacaaacccttaaattttccccccctgaaaaaaaaaaagttttttttttgggggtttttttgcccaccattttgggtggggttttgcggggggggttcccgggttttcttggcacggccccttttattattaacccccgggggttggttggaattttgacaatcttgagcttcctgaacttggggttgggtccccccatccccccgggcttttttttccccttgtaccccccgcccggggttgtcccggttccgatggaacccactttccgggggcttttggaacccgccttataaccccgcccttgaaattggccctt

SEQ ID NO: 33469 - DNA, 381 bp, Zea mays
  Clone ID: MRT4577_130531C.1
ttctggtattaccacacaaccagatcgatactggattgttgttacaagtggaggtcttaatcagcagagaacagggatagttgatgctgtagttgctgcacgtatattgaatgctacacttgttgttcccaaactggatcaaacatctttctggaaagattcaagcaatttttcagaaatctttgatatggactggttcatctcatttcttgcaaaggatgtcagaattatcaaagagcctacagaaaaaggaggtaaagcaatgaaaccttataaaatgcgtgtcccccgaaaatgtactccacggtgttacttgaaccgtgtcttaccagcacttctgaagaaacatgttattcgaatgactaaatatgattatagact

SEQ ID NO: 33470 - DNA, 368 bp, Zea mays
  Clone ID: MRT4577_130532C.1
gacccacgcgtccgcagactcgagagggagaggaggagggtgtccgatggttgagtttttattagctgcagggataggtcgggttcgggtccgccttcggagtgtcccaagagaagggaggcgcggcagcgggtaccaagaggatccaccacatccagcgcctctgggcggccaaagtgtcatgcgaagcggaggagcgaggccagagccgcagtctcgacgcgtcgctcaccgttattcgggagcgcgcccagctcatggcagaggtgctgcgtgctctgggtggggtgatagcctttacctcgctctttggggtgcctcttgggcacaactcatgctttctacaaggccctgcttttggtcccgca

SEQ ID NO: 33471 - DNA, 172 bp, Zea mays
  Clone ID: MRT4577_130533C.1
cccacgcgtccgcggacgcgtgggttccactttgctcatctacagccaacttactggtgtgcttccttatatctcctacataacattcttagctgaatgatactgcgtatgaggttgcccttggtgctataactaccaatccttctatacatgaacttctgttgagtactat

SEQ ID NO: 33472 - DNA, 240 bp, Zea mays
  Clone ID: MRT4577_130534C.1
cacaaaaacaccttatttctcaatcgggggacatcatcaattgaaaacccggctacccaaccattaaaatatccttcccaatcacccaacactaccaaattctcaaaccccaacctatccaagtttaaatttaaaataatttatccaccacaaacagtgctactccccatctcactgcgacccactttttatgatttgcccacatgatctccatctcccgcccctacagcagttaaaccc

SEQ ID NO: 33473 - DNA, 425 bp, Zea mays
  unsure (1)..(425): unsure at all n locations
  Clone ID: MRT4577_130535C.1
gattgggtacctcgagggcggncggggncacgtccaccagtaccacccactccgcgctagctgaggacggtacagcggnacagagcgacgacgacgacacaggcgccacacatggnatnccagctctccgccgncgtgncccggntccacggnctccggggatacgccgcgcncaggnccgcggtggcggcgctgacgancgtgaggntggncaggaagaggncnncnncncaggncatccgctgcnactacctcggntccgccaccaacctgatcatgccgaccacgaccaccctgatgctgctcncgnnacgccacggactggccccgacggcgaaccgcaaggcgacggccgggctgcagctggaggcgcgcgactccggcctgcagacgggcggacccggcggnttcaccctcgcccacac

SEQ ID NO: 33474 - DNA, 298 bp, Zea mays
  unsure (1)..(298): unsure at all n locations
  Clone ID: MRT4577_130536C.1
cgccgtccgacgcccgcgcctcccttcgttttcctcctctctcctccagctcaggtccggcggcgaagggaaggcaagatgtacaccgcgaggaagtaagatccagaaggagaagggccctgagccctcccagttccaggcctcgcctcccctttcttactactccttccccttcccccgccaccatattcccacaacttccttanaaaatactgacttcagcccatattcttcatcttcattgcctcatatatggttgggaggcatctgataatcctatccacagtgctgttctttc

SEQ ID NO: 33475 - DNA, 368 bp, Zea mays
  Clone ID: MRT4577_130537C.1
ggcccgggaaactgaaagttccgatatttcacacccatacaattggacaaacatgaatccaagggcctgggtcaccggtgcaatggaacacaaaacacttttacactttttaaattacttgcaccacaaccgtttattataggggcgttgaccaacagaaccgattataagtagcgacgctgacaacataacaggggctatgcgctgtttgctgggggctacattgaggcattaacaaaggcggttacattttttggccataacaagttttgcgggggggggaacatgtaaaagttttttccacattttaggaacgggaatggcccttatcccatttgaacaggaagaacggggaggcaaaacgggag

SEQ ID NO: 33476 - DNA, 725 bp, Zea mays
  Clone ID: MRT4577_130538C.1
ggccgggacggctccctggagatgttcagctcgtctgcgcttggtctttgccggtaaccgagctgctctctatgctcgagttcctagcgccctgctccctggtgccggagcttcttccttcccctgcgctcgccggcgttcggatctgcgcgactctgccccagctcggatctccctccccagccgaggcccttcttccctggtctcccatggccaccacccccatgtcgacggtgccctcgattcgtcggtgcccaggcgtgcatcctctgcaccggctattcccgcccaaaattcacccctgcacttggtcctcgtcgaggatacgtcgccctccactcggttcatggcgctcggcctccagctcgcgaagcttccctggtggccgcttcctcgtcgttttctatagtcgcgccggccgaggttcctccctgcgtgcgcaagctctgttgcgagcgtcgatccgtacccacaaagcctcgtcggtgctcaattagctcgaaccccctgctcggaccttttttccgtggcgctcagctcggccagatgcgacctcgctttggctcactgtccctgctgcgctcgccagtcggacgcctggccatcgtcaacgaatctcgcgatcacggctctctgttgctcaaccggtgactcgcttctcgtcttgttccaggtctgtgtatccgcatgtcgttgtgccttcgcttggcacaatttttaatttg

SEQ ID NO: 33477 - DNA, 376 bp, Zea mays
  Clone ID: MRT4577_130539C.1
ccgactcgttttgcaactaaattctgcttttcacagaaacaccaccgcataggggctcgatccttttgtcccgtgaagcattgacgggcctgagcagggctacctttgctgcttccgggcagaaagcatcgatccattactgcaagttctcaataccgaattccgttatgcttaccgaatcgtcttatgaagggctgctcaatcaccgagctcccatgctcattctcgtattactacaatggcaataccatcgagctcttaaatttacatgaacatattcttgctcataacgcaactgatgatgactagcaaacgcagattataccactgaacataaacattgcagtgcccaaattcaaaacaatgactattctaa

SEQ ID NO: 33478 - DNA, 497 bp, Zea mays
  Clone ID: MRT4577_13053C.1
ggaacaaactgaaagcatccggggtgggttatacaaaaccgaagccgatacattagatggggatggggggacagaccccgggaccgaagggacccaaaccccccccccagaagcccccccactacaaactacgatttttcctcgccacattccacacagggggggggcctccacctgcaccttgatgtcccccgggcccagccccgggatgtccaccaaaaacgcgtacccccccgggagctcctttacctcggccgggggggcccccatggggcccgcctcgcggacctaggtgcccgtgggccccccccccgccggggaaccacttgccttgtccccccccgcgccggggttgccgtggggcacctccaaaaggggcttcaaccccaccattaggggggttttgaaaccaaaattctcccggccattttttggttttgctaccgggccgggaaatcccgggtttttgctttgcttgttgaggggtgttaggtttt

SEQ ID NO: 33479 - DNA, 1119 bp, Zea mays
  Clone ID: MRT4577_130540C.1
ttacaagttacaaaaattttatattattttatcggagtgattacaaaagtataagtttgaaatatatgctagctcaaatgaccatcctcaataagaagtatagaaggagtacttagacttataagaaggccgagcccaccggcacttaacaccatcaacagcatcacaaagttaggacctgagtaacactaggttagtgttgttagatgacgtccacttgacgattattcatgtcctagcacttgattaggcaggttcgttcatcagcttcatcctgtggattagtccgtgcttggggtcgacttggcttgtcttccgcatcgcgcgattaattaacgtacctggaggctggagcaagacgagtagcgagtcgccggttgagcaacagagagctgtgatcgcgagattcgttgacgatggccaggagtccgactggcgagcgcagtagggacagagagccaaggcgaggtcgcatctggccgagctgagcgccacggaagaaaggtccgagcagagggttcgagccaattgagcaccgacgaggctttgtgggtacggatcggcgctcgcaacagagcttgcgcacgcagggaggaacctcggccgggcgcgactatagaaaacgacgaggaagcggccaccagggaagcttcgcgagctggaggccgagcgccatgaaccgagtggagggcgacgtatcctcgacgaggaccaagtgcaggggtgaatttgggcgagaatagccggtgcagaggatgcacgcctgggcaccgacgaatcgagggcaccgtcgacatgggggtggtggtcggacccaactgtgccgaggcaagcagggacagcgacaaacttgaagaaccaggggacacggtcaccaaatctgagcaggtagaagcaccagacacatgggctgggcgctggggctgggcagagggtgggcgggagctcgagacgagctcggcagggacctgagccttcggcgctgaggagctcgactgaagaacggtggccatgggagaccagggaagaagggcctcggctggggagggagatccgagctgaggcaggccgacgcagagagagatggagggagagagagaagccagggagcagcgccat

SEQ ID NO: 33480 - DNA, 113 bp, Zea mays
  Clone ID: MRT4577_130541C.1
ggaatacttattgggggcgatactccttcgggctacgaaggtcctcgcggaggctactgttcctaccatcgtctccttctcgttgaccttgtctgaggctttacttggtggcg

SEQ ID NO: 33481 - DNA, 1993 bp, Zea mays
  Clone ID: MRT4577_130542C.1
ggacagcattcagcagtcaacggttttgctcataactcagaagatattcatccaaaaataatgagctaggactttctggaacgcctaaaaaatcctctacaactttggtattatcatcaccatgagattagacacttagaaaggtcaaacattacaaaacaataatgctgtccagatttggacagaattcgattatacacttcaaaactccataactagagatttaggcatccaaaacaggtgatcctagactttttagaaagctaatacaattgtctacaattcgtttataaacatttcaggttgattcaatgtggatcaaagtcagttaatacaaacaaacatttcttaaccagaaccaaacgcaagtcttacactagagcataacatcaatatatcaccatacttagacttgagactcttgaatactcaagtcttggaatgagtataagagtcatttaactaatcttcataaattacttctctaggttaactggtacaatatttcgacttactaactttggtcaccccataatcgtaacaagggtgacagcaagttaattaacctcttaacccaacaaggttttgcgcaagcatgaaggaaacaatatatcaaacacatgacacgaggcattttaacctaacaattaatataaccacaatacccggttgcgactgtccagagaactgacataactaatataaataattaatccagtccatgaaccaatagtaggaactagcgaatcaatgtactattactagtcgatgcaaaattcatgagaacgacgatgatttcggttgagaccgtccatcaagcacttagcgcgtgatgaacaacgtcccacgcgtcgtcgcccaacagctagaatttcactccaattatcaaccacacacatcatcaaattaaaaattgtgccaagcgaaaggggcacaacgacatgcggatacacagacctggagcaagacgagaagcgagtcaccggttgagcaacagagagccgtgatcgcgagattcgttgacgatggccaggagtccgactggcgagcgcagcagggacagtgagccaaggcgaggtcgcatctggccgagctgagcgccacggaaaaaaggtccgagcagggggttcgagctaattgagcaccgacgaggctttgtgggtacggatcgacgctcgcaacagagcttgcgcacgcagggaggaacctcggccggcgcgactatagaaaacgacgaggaagcggccaccagggaagcttcgcgagctggaggccgagcgccatgaaccgagtggagggcgacgtatcctcgacgaggaccaagtgcaggggtgaattttgggcgggaatagccggtgcagaggatgcacgcctgggcaccgacgaatcgagggcaccgtcgacatgggggtggtggtcggacccaactgtgccaaggcaagcagggacagcgacaaacttcaagaaccagggaacacggtcaccaaatctgagcaggtagaggcaccagacacatgggctgggcgctggggctgggcagagggtgggcgggagctcgagacgagctcggcagggacccgagccttcggcgctgaggagctcgactgaagaacggtggccatgggagaccagggaagaagggcctcggctggggagggagatccgagctggggcagagtcgcgcagatccgaacgccggcgagcgcaggggaaggaagaagctccggcaccagggagcagggcgctaggaactcgagcatagagagcagctcggttaccggcaaagaccaagcgcagacgagctgaacatctccagggagccgtgacttcaggaacagagaagaaatggcataagaaaacaaatgagctgtgttcagataacgcctaggagatgaaagacgtggctggtagataatcctagggtttctacgtggaggtggaggagataaaggaatgcctacaagaatttctagagccagtacgtggaggcata

SEQ ID NO: 33482 - DNA, 1290 bp, Zea mays
  Clone ID: MRT4577_130543C.1
ttgctgccctcgatccctcccgggtagtcctaccacttcctattccccacgtactctctcggctgctcgcttatggcgatcgaagctgcgcgcctctcaccgtccatcgccgccgccgccttcctcgccagccgcccccctcttgccctccgcccgttctcccttcgtcgcaggtttcccctcctccgcgtcctcgccaactcatcgggcggggacggacgcgtcgtcgctctgtcctcatctgagctccgaaagcgccgaggccggtcttcctcctctggggctgcggactccgcatctgacggggatgagaagctacgctcgcttcgtcgactcttcgcgcggcccgacgttgctattgacgcctacatcgtcccttcacaggacgcccaccagagcgaattcattgcagaatgcttcacgaggcgtgcctatctgactgggttcactggcagtgctggtacagctgtggtcacaaaaaataaggctgctctctggactgatggccgttattttcttcaggcagagaaggaattgagccaccactggacactcatgcgcagtgggaatcatggtgttccaactactagtgagtggttgaatgatgttttaccatctggttgccgagttggtattgatccgtttcttttctcatttgatgctgctgaagaactgaaggattcaatcgccaataagaatcatgagttagttttggttcagggcatgaacctagttgatgagatatggggagatgcaaggccaaatcccccaaaagaaccaactagggtgcatgacatcaaatatgctggtattgatgtgccatcaaagttgtccttcattaggtcacaacttgctgaaaatgggtgtgatgctgtggtaatttcaatgctcgatgaagttgcttggttgttgaacatgagaggaagtgatgtcccacattcaccagtattttatagctacctcattgtggaggttagcactgctacactatttgtagacaacagcaaagtttctaaagatgttctggagcaccttgagcaagctggtgtgaaacttaagccatatgaagcaattatttctgaagtagaaagactggcagagaaaggtgcaaagctctggttggattcttcaagcgtgaatgccagcataattactgcatttaaatcaagttgtgacatgaaaaagaaaggaaaagcaggtgaagaagttggagaaaaagaagcatcttcaaacgaccggataactggagatcctagtgtccacaatggagtcataagtgctgtatacaat

SEQ ID NO: 33483 - DNA, 421 bp, Zea mays
  Clone ID: MRT4577_130544C.1
ctccgcggctcaaacctttcccgcttctcccaatgccttcaaccgtgcgccgctccatccgtacgacaacaccatgacggagggcattacgatccacatcgtatcagggccggtcattcagcttcctaaactcgtgatgcgatgtgtactgccttgagcgtgggattcgcgctgacggtccgatgcccggcgacaagaccattgtccgcaggagatgatgctttcaacaccttctatcatgagactgaagctcagaagcacgtgccccaagctgataatgttgaccttgaacccactgtcctcaatgacctgacaactgacaactaccgccaaatcttccactctgatcagatcatcagagacacgagagaagcatacagatactttgcgcgtgcccctgacaccaccgtcaaggagactg

SEQ ID NO: 33484 - DNA, 529 bp, Zea mays
  unsure (1)..(529): unsure at all n locations
  Clone ID: MRT4577_130545C.1
ccggccgggacctcttccattttacaggtcgacgccgttacctcttacacgcacacttcacttcgcacgggccgtattcattcctcctccctcctgccttcctcccccggccctcaccgtcacctcaccctcccctgctctcgtcgttgcatcgccgcgtctccccaagactacaccttgtccttagtctcgccattccattccctccggcccatgggcacgggcacgggcgcgggcgcggcgccggaccgggccaagcagcggcgggccagcgccggcggccacctgtggaagaaggcgctgctccacttttccctctgtttcgtcatgggattcttcacgggcttcgcgccctcctcctcctggaaggccgccagcacccacccgccgcaccgtctcgcagcatcccgcgtcgccgtcgacgtcgacgtcgacgcgcgcaccancctggnaccacccgccgacgcggnctcctcctgctcctcctctgtcgccacgggggacgtgggcgacgacgacgccgagggcg

SEQ ID NO: 33485 - DNA, 424 bp, Zea mays
  Clone ID: MRT4577_130546C.1
aatcataactgctgtaatcggttatatagcacgtcgactcgagcatagaatacatcgtttcggctcaacgacaaatcgaggaagcgtggactagaagaacgcaaaggttatcacatgctaccagttatcctaaaccctacgacataagcaagctacctagtaataaagtataagacgatgtcatccggcgcgcggagatatcgttgttttcttcggttagccgtagcagcagacagcactgtcgtgactcgccatcgccagcctttgggggtctcatgggcacgggcggcgaacccccttttcccttgtcgaatcatatcgctgcccccgtcatgccggaagaggcgtgtctgaacaaagacatacgacttctgccgtgcgcgcgccattttcacacggcgacgtacatcggcatgctcagagc

SEQ ID NO: 33486 - DNA, 459 bp, Zea mays
  Clone ID: MRT4577_130547C.1
aacccttaaaacccgtttaatttttttggagctacaagaaaaaaggggggaaacaaacccaaacccaagcctctttttaattaaccccattttactactatttatatattaaaaggaaaaacaaaaaacgggcatgctaaagccctggttttaattcaaaaaaaaaaaaaaaaatccggaatagggggcaggggaaataaaaaaactcgacgggcttgcccccgcgaaaaaaaaaaggaaataaggggttacttactccttttatccccccggggggggattaccttaaaaacatccccataaaaggggccagttttgttaaagctcatccaccttggggaccagttttaaaaattggacatttccggttcctcaaatgtaaacccttccttttcaaaggaggaaaaaggaactgtccaaaaaaaatacttccttatgccaccgaaccctggataaaaa

SEQ ID NO: 33487 - DNA, 218 bp, Zea mays
  Clone ID: MRT4577_130548C.1
tggtggattacgatgttagtgtcactggatgtaggtgctcgtatagcctgcatgcccttcagggtttcggtgaatgatgtgtttgtacccaggattgtcaagagtgcctgccccgggctgtgcgcagtcgtccgtagccgtgtcgtgcatgccgtcagcggtgacagtacaatgctggcctatctccgcttggagttaggtgtgttggtgcgctatgc

SEQ ID NO: 33488 - DNA, 549 bp, Zea mays
  Clone ID: MRT4577_130549C.1
agcagtggtaacaacgcagagtactttttttttttttttttttttttttttttttatttttttttttttttttttttttttttttttttttttttttttttttttttttttaaaacccaaaagccccccaatttttttttcacaaaagcctcacaattataaaatcattcacaacggggtcatttacagaagggtaaaaaccaccaggtttttttttaaatcaacctggaaacaacagatgggaacggggaaagctatgcggaataggcctttcaacgggggaagcaggaacagggctacaaaaggtcttctgggcttcgggtttgcttaacggagggggggccgggctgtttgacagggggggggccttaaacgggggggggctggaccgagggggggccggggggccaaggggcctccttgcgggacaaggggcagccccatggagagaacgagcaaaaccgggccccttgtaaaaacggaggggccccaaatgggggccctaaacccccggggccctcggggggggttcccaccgggttagggggg

SEQ ID NO: 33489 - DNA, 347 bp, Zea mays
  Clone ID: MRT4577_13054C.1
acaactcttacattatgcttgttgttactgaaatggttatatttacacaggcgaacttactgttgccatcacacaaacgctttccatttcaacggcggccatatagcaggatgctcattgcctattacaggacaaccagtgagggtttctgatgacccaaggaggggaagaccattccagcgagaacaaatggatatctcagccaaaaaagggcaagagacgaggggggtaggtggaagacaaacgcccacggtaaaaagggcgccgccgacagggggcttgatgggcgggttgatgcacatggcctcatctaggccctttaacccacccagaacttgggcaacatt

SEQ ID NO: 33490 - DNA, 405 bp, Zea mays
  Clone ID: MRT4577_130550C.1
ccccaacaaaaagttccaaaacatttttttccctaaaaaaaaatcccttcccattcaaagggtccatccaggcaaggggggggccggccccccgggggggggggggaccccccgtaacccacggggggtaagggggaaaacaagggagcgagggggcaggccaggggccccattacttaataacaaggggccctgggcggggcccccgcgaggggggaatccgacaccagggggggcggttactaggggacccgggccgggacccagcctggggggtctccgggcccagggcggtccctgggggaaatggggacccgcccacgcgcccccccccaaggggggcggggggctaaagggggaaccccggggggggccacggggggagccccccccctttaattgggg

SEQ ID NO: 33491 - DNA, 276 bp, Zea mays
  Clone ID: MRT4577_130551C.1
gtcgcatatacgcaatataaaattatagaagcgatataggaaaccaacatccataacgacgcccttaattaccctacgaaaaagcggggcggttcatagacaacaaagacttacataatagcgggtggtgaaccacaccggggaccttagcaaaacacagctcctgactatggacggctaggggagacccatagatcctatcttcatcattaccttgctgaaccgaaggaaaatcaactccgaccttgccattagcgcttgtagagcgctgacgga

SEQ ID NO: 33492 - DNA, 706 bp, Zea mays
  Clone ID: MRT4577_130552C.1
gctactgactgcctactggaacattcacgcctgcgctgcgcctccgtcccgtgacttgcctgccttcccctgccgccgcgactgggactgggagagcttcggggcgccatggcgcaaaccccaccgattccccgcgtcagcctcggcacccaaggactagaggtgtccaagctggggttcgggtgcatgggcctcacaggctcctacaactccccggtcgaggacgacgcgggcatcgccgtcatcacgcacgccttccgccgcggcgtcaccttcttcgacacctccgacgtctacgggccccacgccaacgagatcctcctcggcaaggcgctgaagcagctgccgcgggagcaggtgcaggtggccaccaagtttgggattcagcgggatgcccagggcaagagcaccatctgcggccgcccggagtacgtccgcgcctgctgcgaggccagcctgcaccgcctcggcgtcgaccacatcgacctctactaccagcaccgcatcgacaccaccatccccatcgaggacacgattggtgagctcaagaagctcgtgggggaggggaaggtcaagtacattgggttatcggaggcgagccccgacaccatcaggcgtgctcacgctgtgcaccccatctctgccgtgcagatggagtggtctctgtgggctcgcgacatcgagcccgagatcgtgcctctctgca

SEQ ID NO: 33493 - DNA, 151 bp, Zea mays
  Clone ID: MRT4577_130553C.1
ggccgctttttttttttttttttttagagtcggcgttagatccatcacaggtgagatggcacatcagacgcatgctgactctggagattaccagaccggtccccagagaacgcctccagaagagagcccccatgcgacagaaatattcaag

SEQ ID NO: 33494 - DNA, 306 bp, Zea mays
  Clone ID: MRT4577_130554C.1
gagggaattaactccctacattttttttcaataggggttttcagggggtacatataaaaacattttttggtaatttgaatctccctgcacggggaaaaggggacctggaaacaaaggtacacaggggcccaataatatggggacattttttggggcctaataaaaaacttatttgccaaacacgtacattacatatatgaattgcgggggtgggttaataaatgacataatgctacacctgacaaacctaagctgagaaaaaaaaaattttatggacaattcccctatcctgacttaaattgtttc

SEQ ID NO: 33495 - DNA, 195 bp, Zea mays
  Clone ID: MRT4577_130555C.1
tttcatgaactagagctcaagatacaactcaagatttatcgtccttcacagtgataaccaggccacagcaatcatccaagacgtggcatttgctagagaactcactgaggccaataatggtttgtgcctaataacgcacagacagtgtaaaagcgttacataagcttttctaaagcctaggataatagcacacgc

SEQ ID NO: 33496 - DNA, 186 bp, Zea mays
  Clone ID: MRT4577_130556C.1
ctctacttgcttcttaatataatcatgcgcagctctcctgcgcgttcgaaaaaaaaaactgcacttattatgtattttttgtgtgcaaaatctcagcaatctttttctggttgtaaatatggttttgaatggtacttttttctttggcaagtataagacttagattccataagaggtaaatggttt

SEQ ID NO: 33497 - DNA, 1775 bp, Zea mays
  Clone ID: MRT4577_130557C.1
tttttgtgtctagtcgggctcgctactctttatgaaatggacatggacgtaatatataagtgtcaagtcgagctcgtgaatagagccatttcagtattgacagcaagatctcttcaattaagcattttttatccattacaatgcgccttgctcccagtatgacgaaatacagaaaacaaaaggaaagagaaaaattgaaaggtggaggaacccagtaactctgcatgtgaaaattttcttgataacaacgaaaattttcttgcctgagaattatttaccgagggtatggacctgagccccaccaaggcgcccaatatgctctacggaacctgacattcaaaaaccttcttttttcccgttttggacatgaacggaacaacccaaaattgctagtgaatcgagcttgcgtgtgacctatcaatgctctcttattctgatggtaaagaaacccaccctcgccgcagcttctctacagagaccacagcttattcacattggagaggcctatcagaactgtgtcaagtgatagaaaatttatgatgagaggatcactcccaccagctcaataaaatcagcgcccaccaccagggctcgaactgccggcacttgtaggagtctgagtttgcataatggtatcatgatggaataccccttttggcaagattgctccaacaggcgcgggtcctgccactggtgatactacatgatttatagatggatctttagttgagatatattctggggaagacgaagatggagccaatgtggcaacagagaagccaataggatagggagcaattggcatgtcagatagtggcaaagcagatgaactgtagcctagtgtacccattgagtgatcatatttgcatgcaactccatatctgcaatatccattttgggcatagtacgcacaaggctgagcacccggacgaagtggaaggcatagatggctgaacatgtaattggtcttaggagtgctccaatctcgaggatggttatatttacacgtagttccaaatttgcaatcgccagtcctcatataatattgacactcaggctgccctggtcgctcaggaaatccatgttcttgatgattattgcttgattgtccagctgaggaagaatatggcaagtatgtaccgccataagcaattgcggtggaagatccatggtgtcctataccatataacggtccagcttgaacagtttgttgtgctccacctgatgccacatgatttaccgatgccggataagggctccatccttgcaatggaaccattccagatgagatcatcattggagtgtatgagcctggtatatatgatccaggaactgcaggtgatcttcccatttgccaatttgaagcatatgtaaggggggagggcacagatgctgattgtaatgctggatatatgccaggggttaccggaataccaccaaattctggatgatgaaatttacatgtagaaccaaacttgcattgcccagtcttcatatagtaggagcattctttctcacccggacgtagagggaatccattgttgtttaatataacagactgcacagatccatcttgcttaggatggtgatatttgcaattggaaccaaatttacaagtcccagtcttcaaataatactcgcatacaggttgcccttgtcgttctggaaagtattgtgctgctccatttttggcacctccaccaaactcaagtgccgccacgattgcgggggtggttgtaacggcagcgctccccgaaaccgcaggcggccgtggc

SEQ ID NO: 33498 - DNA, 282 bp, Zea mays
  Clone ID: MRT4577_130558C.1
atcgttgacgggcaaagcgagctgcacgccggggggcaagtggacctcgtgggcatccacggcaagaaggcgggcgtgcacgtgactgcagtgaccagggcctacccgccgataacagtctggacacaccaggccgagaagctccaccactgggaaggcatcagcttgagcccagaccggatcctctgcagcactcaactccatcaacaggacgggggaacaagccagatgcactcagaccgtgccagaccgaacaagagcactggcgctcagcaccactag

SEQ ID NO: 33499 - DNA, 404 bp, Zea mays
  Clone ID: MRT4577_130559C.1
gaagcatgcacctgctgccatcatcgtctctcatgtctgcgccagcatcagcccaggtgtctcttgcatactcatatggtgtcagctgctgtgttacggcgtcgcctacaatatctgcgctaaatgtggaccgcacatcgcaagtggctcccggaccttaacctacccacgatctatcttcaaccgtaggctgccttgagaccaatagaacttcgacacctcctggtctgcttatgaacacaaagaacctgatgtggcacatgatcctgctcatagccaacgccaacatgtcagatgctgaacataaacacatggttgattacctatacgctgaccaatgccagattgatcgaatactcgcagtgtcactacgccgcatcgacggaccactcagcgacaacttc

SEQ ID NO: 33500 - DNA, 538 bp, Zea mays
  Clone ID: MRT4577_13055C.1
aaacagaatgttttattgactttaagtcagttgggaacaaaaacctgtatttatgttctaagacatttcatctcattggggaaaaaaagataaatgttatattagagatttttgactttcatgtgttttctgctctgggttgagaaaacgttcagctcttccctgaaagatgtgtttcagtattacaactcatcaacaaaaggtgtatggcccaaatttccacttgctgccatggacttccggccagaaacaaacttctttgcagcatttacgatatcagcgtcagctacggaatcaatctgctgaaggaccgtggctggcggcgtgtacgatccagcaaccagcgcctgggacccgacttcatccaggaacccctcagaagactccactgacattaggtaggcagctttcagcttgttcttggcaacctggacatctacactggaaaggtttccttgagcaactgtttttacttgattataggcagccttgataacatctccagctgcagcagcctgtgagatagtgtaaatcccaa

SEQ ID NO: 33501 - DNA, 844 bp, Zea mays
  Clone ID: MRT4577_130560C.1
aaaacccacgtggtggaaggaaaggaaacgggagggagagaaaaacggaggccccccgatctcctcctcccactccgatcgcccgaccgatcgccgagcttccccgttccctccccgccccccgcgacgccgcgacgccatggagccgccgcacgccgagcaggccgtcgccgctgtagcagcaggaggagagggcggcaccgcaagcccgggcaccggcctcgaagggccggtgcttaggcgggggctggacggcggtggggaaggggaggacggggagctgggggcggggcaggaggcggacgcacggctaccggagcggcctggcgaggcggactgtggctactacctccgcacgggcgcctgcggcttcggggagcgttgccgctacaaccatccccgcgatcgtggtggcactgagtttggtggaggtaccaagaatggtgcagcacaagactttccagaacgacagggccaacctgtatgcgagtattatctgaagactggaacttgtaaatttggctccaattgcaaatatcaccatcctaagcaagatggatctgtgcagtctgttatattaaacaacaatggattccctctacgcctgggtgagaaagaatgctcctactatatgaagactgggcaatgcaagtttggttctacatgtaaatttcatcatccagaatttggtggtattccggtgacccctggaatatatccaccattacaatcaccttctgtgccctcccctcatacatatgctccaaattggcaaatgggaagatcacctgcagttcctggatcatatataccaggttcatacactccaatgatgatctcatct

SEQ ID NO: 33502 - DNA, 298 bp, Zea mays
  Clone ID: MRT4577_130561C.1
taggctcaggatgtcattgagcttccatacgcactggctcaggatatcctatacggggcgtagggactctatgatgggttcgagttgacggctgctaagggcttctggtacctctgctttgagtacttcacgctgctctactgcacattctacggcatgatggccgtgggtctgacacctaactaccacatcgccgctatccgctcctcggcattctacgccatctggaacctcttctccgggttcatcatcccgcgacctgaagtgccgatctggggtagatggaactgctggatat

SEQ ID NO: 33503 - DNA, 732 bp, Zea mays
  unsure (1)..(732): unsure at all n locations
  Clone ID: MRT4577_130562C.1
gccggccgggctggggagagaacagccgctgtcgcctgttgggccgaactaggcagcgtggaaaggctacggagagcggagaggcgctccattgaagcggacggcaacgagctctgcatgctgcgctgcgcccttctcaccgccgccagcccgccagaaggtctcctcccgtctctagagtggctctttctctctccgtcaaatggctctcgcgtgcgcctctcacgcgtgccgctttctcctcgccggccaggcgagatctttccacgcccagccctaccatgccaaggtcggcgtggtggagttcctgaacggcgtcgggaaaaggggtggaggcgcacgccgcgaagctggaggaggctgtgggcggcgacctccagaggctccttgaggcccgcacgctgcggctcaagaagctcggcatcccctgcaagcatgcgaaggctggatccacaacccgccaggacaggccaagggcgctgaccggatggaggcctgttcgaccctcttcgctcacacgagacaagacgaaggccccgccgaagtctacgggacctctggctctcacaccaccaagagaggcccatggtgcggttcggcccatagagttgngccccgcgtgggcatgtgcgattagggccgtgtctgtataaaatttaccgtaatgactgtctgtaactctcctcgtgggaaattctggggcaggtactcgagggtctaaatgtctttgac

SEQ ID NO: 33504 - DNA, 1536 bp, Zea mays
  unsure (1)..(1536): unsure at all n locations
  Clone ID: MRT4577_130563C.1
gtatctggcttgcttttttttcatgatgaaaatactgtttgccgtgtagttctgtaatattttttttgtataatgttaagattgagancaagcatctgtgctaatcttaattattaattgttattgccctcgaggccggccggggggccgaactaggcagcgtggaaaggctacgaagagcggagaggcgctccattgaagcggacggcaacgagctctgcatgctgcgctgcgcccttctcaccgccgccagcccgccagaaggtctcctccccgtctctagagtggctctttctctctccgtcaaatggctctcgcgtgcgcctctcacgcgtgccgctttctcctcgccggccaggcgagatctttccacgcccagccctaccatgccaaggtcggcgtggtggagttcctgaacggcgtcgggaaaggggtggaggcgcacgccgcgaagctggaggaggctgtgggcggcgacctccagaggctccttgaggcccgcacgctgcggctcaagaagctcggcatcccctgcaagcatagaaaattgattttgagttttgcacacaagtaccgtcttggtctctggaagccccaagcagaacccaggaaagttgaataaagttggttcgttcttgaaagatagtctactgttggactgaggcatgtttgggacattgaatatttgctttgtaatttagaaacctcaaacctttgttctctgtctctagccatacttatttgcaaccattacgcaaaaaaaaaaaaagattctagaaagattccaacttattgtgtgtgggtttgctccttttgtaataacaaatcataagactgttggtttcatccctaattcatcaggattaaagtggattgagggaggttttgacttgtaggggattcaatccctctcaatccttgcggtttgataaaaccgaacagggtcaaaggtgcagccccctgtgataatctgtcacttgatgtttgtatttttacttaggtttcttaccaacaacattgcagttttgttaacgtagcctaagtaaattgattaggttcagagttggacccgacggtccacaattcaacaatgttgtaatgacatagaagtttttgtggttctacgctgccctttcaagctgcaaatgcgcattatctgtttgcactgtgatgattttagtaatttcatgtggttgccacaggtagcaaattgaacactctagttataggacccatgggaaggctggatccacaacccgccaggacaggccaggggcgctgaccggatggaggactgttcgaacatgttcgctcacacgagacaagactaaggccccgccgaagtctacgggacctctggctctgacaccaccaagagaggtccatgtgcggcgcggcaccatacagctggtccctgcgtagacatgcacgattagggccgccgtctgagataaaacttaccgaaatgactggctgtaacctctcctagtgggaatattctggggataaaccaggcactccagggacgaaatgtct

SEQ ID NO: 33505 - DNA, 1014 bp, Zea mays
  Clone ID: MRT4577_130564C.1
taaagaagtcccacacaccatccaactccaaggccggccgtgactgcaaactgcaatacatcatctagactagatctctctttttcttgggcgtatatattcctacataagtacgctctgatcttcttccagctcgctcgctcgctcgatcgatcgatcgctcggcgcgcgccagtagataaatttatatatctctacacgtcatggggcctcagcaaggccggcggtcgaacggcggcgcggcggcgcggagcaaggaggaggaggaggtggggggcgcgaagaaggtggtgcgctaccgcgagtgccagcgcaaccacgcggcgtccctgggcgggcacgccgtggacgggtgccgcgagttcatggcggcgggcgcggacggcacggcggcggcgctcgcgtgcgccgcctgcgggtgccaccgcagcttccacaggcgcgaggtggagcagcagcccgccgccgactgctgcgactgctcctccaccacctccggcgcctgaagtgaactcatatatatatctacgatgaatcgccggcggctggccacgccgcttgagtgagctgctagctagcaggtgggtggatgggtgcatgcatggggtgggaccgacgatcatgggggcagggcagggcattcatcaaacggtgtgatttggccggtgtagtcgatcgtaggtgcattatattcatcaaccattaccatatatggaccggtggttttattttatttttttttacttcctcctctgcagctctctgctctttttttttctctctcctctctatttgttcttggatatggttttcagtgaagaattctgttgtgcgcgcgatgcatgtgacataatcgtccgtatatatgtatataaatggtgcttgtacgtgtgcctgtgctaggctgctagccgtgtgtgtgtgtgtgtgtaaagtccagcggtttccatgttactttcctgtatatatataaaatggacatgaatctctctcgcataaaaaaaaaccccaaaa

SEQ ID NO: 33506 - DNA, 184 bp, Zea mays
  unsure (1)..(184): unsure at all n locations
  Clone ID: MRT4577_130565C.1
gccatttgcacaacaaaaaanaacaagggggaggcaacgattttctgggtttgttacaacacaaggacaccgtaacggcacctacgtacaagaacacgcggccacgcaaagcgagcgaaatatactggaggcaccagacaagggagacgaaacggacgcaagactcctcacaacgaaaacagga

SEQ ID NO: 33507 - DNA, 496 bp, Zea mays
  Clone ID: MRT4577_130566C.1
cccatcattccatccaaaacagaagaacttgcgatcaagcgcgagcgcttgagaaatggcgggcggtggcttcgtagcaggcgacggccgtgcgcaggagtacggcggccgcatgacgttctccgtcgtggtgacctccctcatggccgcctcttgcggcctcatcttcggctatgactctggcgtcacaggtggcgtgacacaaatggaatcgttcctgagcaagttcttcccggaagtgcagagcaggatgaagatcccgaagcatgacgcgtactgcaagtacgacaaccagtggctcaccgcgttcacgtcatcgttgttcatcgccggtactctctcgtccttggtggcgagccaagtgacgaggagggtgggccgtcaggcaatcatgctgattggtggcgtcatgttccttgtcggttcaatcatcaacgccgcggccgtcaacattgccatgcttatcatcggccggattctactcgggtttggtctt

SEQ ID NO: 33508 - DNA, 748 bp, Zea mays
  Clone ID: MRT4577_130567C.1
cccggggccacgcccacgcgaaacaaaaaaaaaaaaaaacattactccgctcgcagccagatctgagtcctcactctgtctcttcctcagtcccggcatcagcgctcaaaccctaacacgccacgcgatcccgatgcgcaggggtctgggcagcgaggcatcgttgcgccggcggcgcgggccggcgcggctttgggtggcagtggcggcgctggtggtcggcaccgtgtgcctcttctcctcctcttcggtcggcctgttgggcgcctcttacagggtccaggtgcgctcgcctcgcccgcgcctgctttctggtttgtacctctccgtttcccgtctgctgtatgcactgcctggcgtgggagtgaaggcagggaaggcgttgatgtggttgtcccgttcctgtttgctcgtaagcaatttgggagctctttacactggttaagttagatgcatgctacattgtgtttggaagctgcttggagcctcattaatgaatgcagattagcacattggacacaacaaatctgcatccctagtgaagatcaaatcagatggaagttgcattaatttgtagacagcgtattgttaataattttgtctaagtcttgtttttaaatatatcaaacaatgtatttgctgcagtaaactagaacaagttggcggtttcagtgcaaattgtgcatttctctaggcgctgcacaaaacatgggcaatattgggtaaaccttgatcgatattcggatga

SEQ ID NO: 33509 - DNA, 1490 bp, Zea mays
  Clone ID: MRT4577_130568C.1
gaaggcgattcttttctggctgatagataaaaatccccaccacattcgcaagcgcgaactccctcccggatctactactagccggctcccctcccgatccctctcgccgcggccgagatccttccttcctccggcgagagccaggatgtactcgtgggagatgctgtcgttcaacatccacgacgggttcctggaggcgatcgtacgggggaaccgctcgggcctcctcacccaagccgattacaacaacctctgccagtgcgagaccctcgacgacatcaagatgcacctctccgccaccgagtacggtccatacctccagaacgaaccttcccccttgcacacaacaacaattgtggagaagtgcactcttaagctggttgatgaatacaaacacatgttgtgccaggcgaatgaacctctatctacattcctacagtacataacatatggacacatgatcgataatgttgtccttattgttactgggacattgcatgaaagagatgttaacgaactgttggagaaatgccatccattgggcatgtttgacagcattgcatcacttgcggttgctcaaaatatgcgtgagctttacaggctggttctagttgatacacccttagcaccgtacttctcagagtgcattacatctgaggatctggatgacatgaatattgagatcatgaggaacacactctacaaagcgtatcttgaggatttttacaaattttgcgcgaaactaggtggtgcgacggctgagatcatgtgtaatctcctttcatttgaagctgacagaagagctgttaacattacaataaatagtattggtactgagttgacaagagatgaccgcaggaagctgtactccaactttggtttattgtatccatatggtcacgaagaattggccgtttgtgaagatgttgaccaggttcgtggtgcaatggagaagtacccaccataccagtctatattttccaggatttcatatggagaaagtcagatgttggataaggcattttatgaggaggaagtcaagaggctatgcttgtcctttgagcagcagttccactacgctgtcttcttcgcttacatcaggctccgcgagcaggagatcaggaacctgatgtggatctctgaatgtgttgctcagaaccagaagtcccgggtccatgacagtgtcgtcttcatattctgagaacccccgccactatatatgtatgtacaaaatgcctgctttgatgatggcacaatcgctcgacaattataaatctgggacttattattattcccattccctctgttagacgccggcgtaaaaaatgccagacctggagttgatgtattatttgttttgtagtcaaataaaggtgtgattatctggcacacaaaataaaatcttgtgtattttggaacagacctttatcgtcaatgcacagtatgctgtcaaaaaaaaaaaaaaaaaaaaagccaaaaaaaaagcggcc

SEQ ID NO: 33510 - DNA, 367 bp, Zea mays
  Clone ID: MRT4577_130569C.1
gtaaaaaccgtggataaacgtgaaagaggttggtatgatgttgtcgtcctaccgatacatgaacgtaaatggaatttcaaagaaggcgatgttgctattctgtcgtttccacatcctggttcagctgctcaatcaggccgatctagtaggaggactatgagttcaaatgaggattctgaaccagaatgtggacggcttgtcggtactgttaggcgccacatgcctattgatacacgtgatcctgttggagctgttatccatttttatcttggtgattcatttgattctaactgtgagtctaatgttctgcggaaactccaatctcagagtacctggtatctaactggacttggttctcttgcaacaa

SEQ ID NO: 33511 - DNA, 286 bp, Zea mays
  Clone ID: MRT4577_13056C.1
acaagctagggagttctattctaagtgccaaagcccctatagcgagttttaaaaaaccagcaatctcagcgggctataaataacactgaagcgctggttaataccgagaggaaattattgccaccctttccatcatgggtcaggagaatccaccgcagcgtatcagaccccgcttaggtcctgcctgaagtgcatggaggacctatccgcatgcgcctatgatgccaacctgactggaggcctccttataatagactatgctaatggcgccccccttccttcctag

SEQ ID NO: 33512 - DNA, 640 bp, Zea mays
  Clone ID: MRT4577_130570C.1
cgcagcacgcaccctctcttcgatgaatatcagaacatagaccaggaccaccacagagcgctccttgtccgagtagcggtcgtcttcgttctcttacggcgcctccagggcccagccactcatttgcaccctcacaaacgccatccggttgatggcagccactccctactagtagtactatcgttgtcgctacgagcacgcatcaatctcccgaaatatctagacatggcctcgcagcagcaagaaatccgcctccgctcgtctgcggtagatcgcagccctgttaccgagtcggctacggttacgcgtgccagaaccaccacgttcgcttcatcctcctcgtcatcccctggaatctcacgatcgcacagtgcgtccagtacgtccaccgttgatacctccgatgcgatgcttccaccgcctcttcctcgcagcgactccttcacccggggccgctctcgtgcatctccctccgtctcccgccacaaaaaccgcctctccctcactcttcccgtcgccctgcagcttggagaaggccccaggctggccgactcaccggccataatgactgcgtcagcattggcctcgtcagttcctcagacgccattggagactcctgccagtgtcgcaacttctccct

SEQ ID NO: 33513 - DNA, 532 bp, Zea mays
  Clone ID: MRT4577_130571C.1
gcctcccgctcccctcatcgccttcgtggcctggcctgcccgtcgtgtgcgcctctgcgcctctccctccctccctccctcccccgatcgtaaccgccgcctccgatcgatcgccacgatgcggctcttctgacgaaccgccgggcgcgtcaccgtcaccgaccgagacccgcgcccctcgcctggactccatggccgcgtcctccccgatggtgctgtcgctgctcctcttggcgtcgctcacggcgctgctggtcctcgcgccgcgcctgtccccgccgcagccgccgacgggcgagcaggcgccggcggcccccggtggtggtggcggcgaggaggaggaggaggccgacgacctccgcctgttccgccgcgcggctctggagtcgtcggcggcgggcggccctcccaaggtggccttcctgttcctgaccaactccgacctcaccttcgcccctctctgggagcgcttcttcgcggggaacgaggcgcggctgcgcgtgtacgttcacgccgacccgttcgggcgcct

SEQ ID NO: 33514 - DNA, 420 bp, Zea mays
  Clone ID: MRT4577_130572C.1
cgcctgcaggctccgattctgattcatcgattttttgatacaaatatgtcggataggcactcatcaaaggctccagttagcgttacggatttctcttttaatacatggtcccctagctcagatggtcatcgaggtacttccgcgccacccaacgtctggatggctattatagtgagtccaaattctgaatcttgaaggaacccgcgcccatcactgactcgctcgccatgtgtgaccatatccaacagtggtccttcgttatgcagacatacttgctgctatagcatacgtgcctacataccacacttcatcactacgataatccggtacattacgctgtagccatacatgagccgcttacaccttcatgcgcattcaccgacttgcgcgctcttgccaaaacatattcagcctatattg

SEQ ID NO: 33515 - DNA, 2189 bp, Zea mays
  Clone ID: MRT4577_130573C.1
cgggctggcctggcggtcgtgtgcggctctgcgcctctccctccctcccttccccgatcgtaaccgccgcctccgatcgatcgccacgatgcggctcttctgacgtaccgccgggcgcgtcaccgttaccgaccgagacccgcgcccctcgcctggactccatggccgcgtcgtccccgctggtgctgtcgctgctcctcttcgcgtcgctgacggcgctgctggtcctcgcgccgcgcctatccccgccgcagccgccggcgcccgccggtggtggtggtggcgaggaggccgacgacctccgcctgttccgccgcgcggctctggagtcgtcggcggcgggcggccctcccaaggtggccttcctgttcctgaccaacttcgacctcaccttcaagcctatgtgggagcgcttcttcgaggcgaactaggcgcggctgcaggagttcgctcacgcccacccgatcgaccacgtgggccgggccggaaaaaaaaaaaaaaaaaaaaaaaaaattaaaaaaaaaaaaaaaaaaaaaaaaaatgttattgtcctcgcggcctgagagtgagaaggccgaggccgacgtgccacgctcggatctcacaactagtcacaagctgcttctccatattcgacaatccacacatccggaccgagcgcgaccccacctcccagatctcatctgcgacgacctcctccctcccgatcccgctccgtctccccccaccgccaccgctgccgctgccgcctcccccaccgaggtcttgtcttcggcgatccagccggagcccgcggcggcgacgatgtacgggtgggagatgctgtcgttcaacatacacgatgggttcctggaggccatcgtgcggggcaaccgctcgggcctcctcaccgccgccgactacaacaacctctgccagtgcgagaccctcgacgacatcaagatgcacctcaccgccaccgagtacgggccctacctccagaacgaaccttcacccttgcacacaacgacaattgtggagaagtgcactcttaaactagtcgatgagtacaagcacatgctgtgccaggccactgaaccactatctacgtttttgcagtatataacttatggccacatgattgacaatgttgtccttattgtaactgggacactgcatgagagagatgttaacgaacttttggagaaatgccacccattgggcatgtttgacagcattgcatcacttgctgttgctcaaaacatgcgtgagctttatagattggttctagtcgatacaccactggccccttacttctcagagtgcattacatctgaggatttggatgacatgaatattgagattatgaggaacactctctacaaagcatatcttgaggacttctacaaattttgccagaaactaggtggtgcaacagctgagatcatgtgtgatctcctttcatttgaagctgacagaagagctgttaacattacaataaatagtattggtactgagttgacaagagatgaccgcaggaagctgtactccaactttggtttattgtatccatatggccacgaagaattggccgtttgtgaagatgttgaccaggttcgtggtgcaatggagaagtacccaccataccagtctatattttccaggatttcatatggagaaagtcagatgttggataaggcattttatgaggaggaagtcaagaggctatgcttgtcctttgagcagcagttccactacgctgttttcttcgcttacatcaggctccgcgagcaggagatcaggaacctgatgtggatctctgaatgtgtcgctcagaaccagaagtcccgggtccatgacagtgtcgtcttcatattctgagaacccccgccactatatatgtatgtacaaaatgcctgctttgatgatggcacaatcgctcgacaattataaatctgggacttattattattcccattccctctgttagacgccggcgtaaaaaatgccagacctggagttgatgtattatttgttttgtagtcaaataaaggtgtgattatctggcacacaaaataaaatcttgtgtattttggaacagaccttcatcgtcaatgcacagtatgctgtcaatgcacaatatgtgtgtgcaaaagcaaaatagatatatcatgcacacatgtagggggagataaaaaaaaaaaaaaaaa

SEQ ID NO: 33516 - DNA, 653 bp, Zea mays
  Clone ID: MRT4577_130574C.1
cctcgaagccggccgggagtttctcattgactcagacagcagccgccgccgcgactccacgagtccgacgggtgccggccgcgactgtaagcactgcacctgcgcgcctgctccgtccgcccgtctaacggaccccgcgtctcgcagtgccgattccggctccttggatcctgtcctgccggtgcgcagcgcgctgcagcagctccagctcggtcgctcgggtactcacctgctgcctgatggctgctccgctggaggctgctcctgatcggtgctgtccagggtgctcggctgctccactggggttgtcgctctcgcctctcgctcaatcgtgctcgtgctccagctgtccagcagacaggcaggcagcagtccaggcatccagctccagtgctccacacaggcgagcagcgtgctgactgctcgtgctccagctcggcagctccacaggccacagcgcggcagctccacaaggcaaaggatatgggccaaaaaagtatctctctatattatgtgaacactccgctgctataatgtcttctaattatctaatacatgctatatactttgtaaaatgatagatttaaagagcaatgtcaggcaagcttctagtagaagtagaccaagctaaaaaaaaaaaaaaaaaagcgggc

SEQ ID NO: 33517 - DNA, 564 bp, Zea mays
  Clone ID: MRT4577_130575C.1
gtcgccaaaaccgtcgcctcgcttcctccctccctgacgggctcgaaacccgcgcccgccgcctcgcagaaccctagcgcggtcccgcatcgtcgtcctcctcctcctcctcctccgccgccggtgacagcggttgcgagggtgcgcgaagaaggcgagctctcctccggcgccgacgacgacgagactctgcaaactcagctaggtgctgcatccattcttgggaagtttgtggaggctggatctcaagtgccatcggcaagtctcctcggtaaaggcagtaacaccttgattgtctcaaatgctctgaatcataaagcgtctgctccaagttacaagaagatcatgagggtgaatcaggggcaattcaaacctggcactaaccggaatctttcatggcagaagcctgtgtcaagtgataaccttctgataactttctcagatgatgatagtggggcagactctgggaagacaaggcgagataaagttaggaaggctagctctcaaggtacacagagaacagggaacagtatgcaaactaggatcatgagagaggaagtatct

SEQ ID NO: 33518 - DNA, 318 bp, Zea mays
  Clone ID: MRT4577_130576C.1
gcatcgcgtccgtgcacaagaaggatggctgtaatgtgccggtactagtggtgaactgttttaataccgatgatgacacacagaagagcgctgggcagtgttccaactccgacatggaaatgcatactgtcagtcggagccagcatgcttggatcgggaccgggggcttattgccactgccaagcgaagggaaatctgcgaaggatggctggtgatcctccaggccatggcggtgtgttcccctgtatgactaacaggggtaagctcgacagattattggctcagggcacggagcttgtctgtgttgctaacttacac

SEQ ID NO: 33519 - DNA, 360 bp, Zea mays
  unsure (1)..(360): unsure at all n locations
  Clone ID: MRT4577_130577C.1
ccagaacggggacaaccggnccgggggggttatagaaccagccccccgcaggcccccccnggcgnggaacaagaacgagtgccagcgttccgacaactgcaaaaagctgcccaacagcctggtgctggacttcgtgacgaacgcccagagccgcggcatcacgctgctgaacagcaagtgcttccacatgaacatcttcgggagcaagaancgggtgagcgacaaggtgacgagcaaggcccccggcaacagccccaacacggacggcagccacagcggcgactcgagcaacgtgaccaacagcggcaccaccatccgccggcggcgacgactgcgtctgcagcggccccgggagcaaga

SEQ ID NO: 33520 - DNA, 804 bp, Zea mays
  unsure (1)..(804): unsure at all n locations
  Clone ID: MRT4577_130578C.1
ggtaccctcggagttggccgggnagcccgatcgcgctgcgcgcagggcgcaactgactactgagcaagcaaccaagttccaaccatacatcgcgcgcgcgcgcggccgaatgcagtcgacggcggccatgcggagcggcggcggcggcaataagcgcagcctgctgctgctgctgtcggcgtggtggctactcctcggcagcctcgtcgcccagctcccggcggcccgcggcggcagcggccacgtcgtcacgcgcatgcccgggttcgacgggcccctcccgttccacctcgagacagggtacgtggaggtggacgagcagctcggcgtgcagctcttctactacttcgtgcggtcggagaaggacgaccccggcgaggacccgctgctgctgtggctgtccggcggccctggctgctccggcctctccggcctcgcctacgagatagggcccttccattttgatgctcgagggtacaggggcgggtttcctacccttctctaccgacccgagacgtggaccaaggtgagcaacatcatatttatggattctccggtggggactgggttctcgtacgccacgtcggatgaggggctcaagtccagtgacactcaggctgtcaggcagctagccatttttctcagaaagtggcttgaagagcatcccgagttcctgccgaacccgctctacatcgctggagattcatacggcggcatgattgttcctgctcttgcactacaaatacacacaagtacagaactcggcgaaaacccatccttcaacctcaaggctacgttactggc

SEQ ID NO: 33521 - DNA, 231 bp, Zea mays
  unsure (1)..(231): unsure at all n locations
  Clone ID: MRT4577_130579C.1
aaccacaatatttgggaaaccatggttttggaaagactttgattccaaacaggcccttagcgacttttaggggtttccaccaaacactttttagctttttaacagctcacaggccggggggggttttttcacagctcacagcccacaacagtttttttcacagccacaccccaacttaacagacccanagcaggggaaggttggtttttggttttttgcgacggggccccc

SEQ ID NO: 33522 - DNA, 395 bp, Zea mays
  Clone ID: MRT4577_13057C.1
atgggtgaaggacacgtaccacacctgctagaataatttttgtttacatcttttggcatcaagcactcacaatataaacactcggttaaacacaaaatctaacgcatttcaaaaaacagaaccaaaaggacgccttcacaaaatgttccccaaaatcccaattccacagggaaaaaaagcctcaaaagaaaaattacttttactggttgacaactttctgggtccaaaataaaaaaaaaaaattttcttcaacattttttttacggaacaaaattttctttacggttaaaaaaattgtacaccaagttgataatttagagcccacacatggtcttttgaccaacaaattttcttacgggaaacataaatcttgttttctgacacgaaaacaaaaa

SEQ ID NO: 33523 - DNA, 373 bp, Zea mays
  Clone ID: MRT4577_130580C.1
ggtctaagtggcccgttatctattttaggttggcagaccggcttgtttgtgagtttttaattgcgacaaattagcgggcttcaaggtcaaacctcatgggggggggggcaataatacgcttgttgggccaagcctgcacactccaagcgaccgaggagcaaccttgtttcacggatgcatatgttccaaattagctgtgggctctctttgattagtgagttggctaggttccaatgcacccctgaagtttatctcccaaagcattctattcgtgtttaaaccttggcttatgctgccctcggaatcgtgcttttcatgttgaaaatcatggccaaggaccttaagctcgtcgggaagaccaatgactgcctgg

SEQ ID NO: 33524 - DNA, 535 bp, Zea mays
  Clone ID: MRT4577_130581C.1
ccggccgggatcctcctgtctctcctcctccctagcttgctttctctgctcacctctaccattgatccgggccgatggatatccaactccaccacgatgactcccacgggactcaacgaggccatcaagatgtgctcctcctgagaagaacggtgatagggatcctctgcctcggtcccgcgcccggggcctcatccggctcctggcaagcctgcaacgccgcaggctacatccgctcaacacgactgaacatgtgagcaccgactgtgataaaccttgctcaaagtctcctatgggctctgcgagcgggcatgactcagccctcttctcgatagcagagcgtattagatggcatcatggactgcaatgctgctctcctgcaagcttctgacatacctccgcctcgcacttacgtgaggtgatcatggatactatgacatgctcggcgtatacacctctcgaagcagggtcgaagcttcttctattgaatagagtgaaaatcattgttatggactgtctgcatgtcttactctct

SEQ ID NO: 33525 - DNA, 819 bp, Zea mays
  unsure (1)..(819): unsure at all n locations
  Clone ID: MRT4577_130582C.1
ggattccccaattcctctttctcttcatcacatccacaccagatacctctccacgccttcacaatgtctacttcccttaccttctacgatgccaccatcccagtgatgtgtggtatgtccaagagcgccattagcttcctcaccactgccaaagaggagctctcaaaggaaaactccaacttaccatccgagagcgatgtgcttaatgcccaactcggtgacatgctgcctttccgcatgcagcccattatcctctgcaagttccaactcgccggaattcagaacttcaagctcgctgaatccgctacggcaccaaccttggacccctctgccttctcctcgctcgacgacgtcatcagcttcttcaagcagctcctcgccgtccttgaggccgttgacgcaaaggcgtacaacgagagcgctgacaagggcctcgatatcgaaatcggccccaagacactacacatgagctctctgtcgagcttcacaaacgactttgtcgttcccaacagcttcttccatctcaacgccatgtacatgctgctgaggagcaagggtttctccctgggcaagacttcatacattggtggtttcatgtctgagcagtcgctcaaggactgggcaccactngagggcttaagtttggcaaggaaaaataaaataaaataaaataaaaacaagagaaggataattgggaatggatacgtggatcgaaatgttaacatagcgaaagcgccatcgtcgcgctgttgtgtggacaaagagcctaaaaaaaaccaagtagagaccaacacatcaccatagacctttatcaatcac

SEQ ID NO: 33526 - DNA, 600 bp, Zea mays
  Clone ID: MRT4577_130583C.1
atacatcgtccgagcaatagggctttagttttaatttcttgacgttacaatgttgcacctgcatttctactgagtttcggtgagacctactttctgaaatgtcatgcatttttttacagtaccatacccccccaatcttcagtgccatgatgctttacatatgtttgtccttcaaataatagatggtccatgaacatggaagaaacgtgaggaggcaattgattccaagttcaaatcatgaactagaatgtggtatgttaaacctacaatttgaagtaggcttggcgtttatcagtcaaatttgagccaagttattctggcttgggcttgaaatgttgagccaaatatttgttcaactatttaacttgaaccccttatattaaatagagatcaaaaaaaaaaaaaaaaatgttaattttcttctttcttcatttgtttgtatctcgtataagatcgtacagttcagacattttgttctccactaacaaaatattgtttttataaaaaaaaaaaaaaaaaaaaaaaaaaaaaaaaaaaaaaaaaaattaaaaaaaaaaaaaaaaaaaaaaaaaaaaagtcctctgcgttgttaccactgtt

SEQ ID NO: 33527 - DNA, 256 bp, Zea mays
  Clone ID: MRT4577_130584C.1
accaatcaaaagataacacagtataggaacataggaatagttctttctttttctttttctcttctttttattgactgtaaaagtaccagatcctaacctttacttttcgctttctaataaaatgcgcagtaggggttcccctcctgatccttaaaaaaaaagagttagcgtttgtttgactgctcgtgaattgtgtgttttaacctgctcgtgagtgtgctgtgcacgcagcaccaagtcgatgaggagtgacggc

SEQ ID NO: 33528 - DNA, 745 bp, Zea mays
  Clone ID: MRT4577_130585C.1
ctcttcggtctccgcagaagaagccctagcttccgccgccgccgccgttttttaccttggtctgctgggtgctgctgcggcttctttcaacctccagagacttccgacctccatctctcaactaggatcgctcggggcactgtttcgttcctttctttgtttccccgtcgatccgttttcattgaggtttgattcctcccgatttttcgcttccctgtcgatacgtttcaacatctccggggagttggatagattttctcgtgtccccccctctcgaacgcctatttttctcgtgtccatattctaaacagttaagcgactattgattttgctggattggtttgatgtgcgggttggctttggttgtcgttgccggtgatgacagcgtatggcatgagtctcggtaactattttgcgcttcgggtaatcttttgcccgagttattggcgactaagattaatgtgccaaaatgctaatctgaggccaaacacatactgcatttttaatgcaacaaacagattttgtactcggctggattctcattgttatagtttacgcaagtctttgcaacatcagtcatttgagggcgatctacctcagaaaggttgatgtgttcgtattctggatggattgtgtcgatgtcgtatctttttttaagaatatatgaggattttttatacaggaatgctttggatctggatttttggcaccgtacaagcgttcaaagctcggggacggggctaag

SEQ ID NO: 33529 - DNA, 248 bp, Zea mays
  Clone ID: MRT4577_130586C.1
taaacgctctatcgcttaacacgacctcctcttaaacctatacaacctcctttaccatctgtacggatccagttcccatcgacccttactccatatccacaaccaccttctaacattactaccgatacttctacaccaacctctcatcgctagtttgactgtaccaagagacctccatgctcaccttccagggccagaactttccacggcccctccgccattgccgtcaatctcggatctatcccttt

SEQ ID NO: 33530 - DNA, 339 bp, Zea mays
  Clone ID: MRT4577_130587C.1
aaaaaaaaaaaaaaaaaaaaaaaaaaaaataatttaaaaaaaaaaaaaaaaaaaaaaaaaggagggaaaaaaaaaaaaaaaaaaataaaaaaaaaaaaaaaaaaaataaaaaaaaaaaaaaaaaattaaaaaaaaaaagaagacccttataaacactaccatttacattgagagtatttctacacaatcaattttttatacggacgcactatttaaatatgtagccctaatataatcaactactcattatgaaaaatccaccatttaaactaataattttgctggaaaccttacaacttttaaactttcggtcgtttttaaaaattctgcgaacatata

SEQ ID NO: 33531 - DNA, 649 bp, Zea mays
  unsure (1)..(649): unsure at all n locations
  Clone ID: MRT4577_130588C.1
aattcggcacgaggccgacctcgcctcacccgcaatctccgctgccgcgcccacgcccgcgacatccaccaccccgacctcgccccccacccgccgaaatttcgcccgcgagatccctctgcccatcgatggaaggcgccattaacgacgtgccaaactcgctaccgcccccacgacgccataccatgccctcgcccccaccctccgcacagatctacgaagaggccgccaccccgcccccgttcttgcccctcgtcggcgtcgacctcaccgcggcacgggctgcactcctcggtcccgctcgcggccgcggtgctgggccacctccgggcctctggggtggccgtgctcccgggcctgacggagttggagctggcgggcgccgaggccgagatggggtttgcgttcccgctcgacctccgcgccgtcctcgccacgggcctgccgttggggcccaagttcccagacacgcggtcgcgcgtggggctacggtccgcattcgacctgcccatcgtggcggcggcgctgcagatcacgcggngcacgctgtggctgcgctgctggggcgcacgccccgccgaccttgactgcgtgctgcggctcgcgcgcntcgncatctgccgcgcaggagaagcatcgatcccgcgca

SEQ ID NO: 33532 - DNA, 143 bp, Zea mays
  Clone ID: MRT4577_130589C.1
tagtaaccctgtgtctctgactggtgcgcctgtcacggcttcatcgaagaaacgtggcataccaccagaatcaccaatcaccgagtagtcagctgagccgcttgaaaaaccttcccagcctgaagctgaagagatagtagacc

SEQ ID NO: 33533 - DNA, 623 bp, Zea mays
  unsure (1)..(623): unsure at all n locations
  Clone ID: MRT4577_13058C.1
gcgggacaaattgggcctactaattatcanncagcccagtaaaaacccacaccacccatccacaaaacccgaaaccccgtgtgctttctagtttctctcccgtataaacccttgaccgggagacggaaaaccccaacgccggcaagaaccgcccctcgcaagcaatcgcttgctcgtcgcgctcgaatcccgcgcgttcgcgggagcggcgaggaggaggaggagcatggccgggaagggaggagggaagtcgctggtcgccgcgaagatagcggctggcatggacaaggacaagaagtcgccggtcaaccgctccgcgcgcgccggcctccatgtcgccgcccccctctctttctccgctcgcttgttcttgttttgctcgtagctccgcttcgtcccacccttgtcgcgacgagggctcgtttcgttcttgggcgtgacgtacgcgcgcgtgctgctttctgtgcgttctttatcatacggngtgtgggttgttggcgcggcctgccgtgtccgcttggagtggaaagcgtgttcgttgttctcttttcaagagatttggcttcttcttcttctttgggttgngccatntcttttgttagtttgcgtagcagtcaggcgtc

SEQ ID NO: 33534 - DNA, 1171 bp, Zea mays
  Clone ID: MRT4577_130590C.1
cctcgcgtccggccggagtccgctcgtcgccgtcgcagtcgcagccatttttctgtcggtctgtcccccgcgcgtgccgcttctcacctgtgcacctcgccgactcctcggatttgtcatattcgcctgaggtgggctcagtcgctgagagtggccacggtgaggaaggacgaggaagagggggccgcggaccgcgtgccgcacctgccgtggatgcggtaccccgtcgatatcgacaccttctctggctgccccgtcacacagctcccccgcctcgacccgaggttagagaggtttttgatgatattgctcctatggtgggcttgtcagtaggttcagcagttggtcaatcatcaatagcagatgaagtttctagtcttgtcccgaagcccaaacaagagttttacccaactattgacgaagaatatgtccaaatggaaccacagactaaaattgatatattggtggcaacccctgaaagactaatggatcacattaacatgacaaatggtttcagtctggagcatcttcagtacctggtcattgatgaaacagatcgaatgctaagagaggcttatcaatcctggttgccaacagtgatccaacttacacactcaattaccaaggggtgtggagcgtgtatttaaaggtaaatgctatccaagattggggaagatggttttatctgctacactgactcaagatcctagcaagctatcacaacttgaattgcaccatcccttgttgttgaatagtgggaagaagcgctattgaattcctacaaaacttgagtcctacaaactgatatataaattaaacttaaaaccactctctctccttgttcttctccaagaactgcaagggaataagtgcttagttttacgtcatctgtggaatcaagtcaccgactaagcacattagcagagatgttctcgccatctctctttagtgttgcgggtgtttagtctgatgttgccgctgtttttctcgctgtgcgtgcagcacatccgcgtcgcggcatttcatctctttctctgcacatgtgggtactgctattactgttggtcaacaacgaacttgactagaagggtgaacatgttgttgttgtatattattttacttgaatctgtttacgccgatctgaatgtcaaacactgggagatgaatcgtc

SEQ ID NO: 33535 - DNA, 260 bp, Zea mays
  Clone ID: MRT4577_130591C.1
gcgcggtaggctgcacgatgcctgcagttactgtaacaggcgtgaagcagcaggtgctcgtcagagctctgggaatcttcctcataaagaccgggaagctgacagtccccgaatggatggataccgtgaagctggccaagcaccaagggcttggtccctacgatgagaactagttctacaggcgagctgcttccacagagcggcacctgtacgtccggggtggcgctgaggttggctccatgaccaagatgtatggcgga

SEQ ID NO: 33536 - DNA, 379 bp, Zea mays
  unsure (1)..(379): unsure at all n locations
  Clone ID: MRT4577_130592C.1
caatgttgctcctatataatgcatgccttgagcttggagcaccgatgagtgacatggtcagagtctagctgactggttggcagattgcatcgcacgtgacactctcactctcaacagtgtacgcttttgatacgtcaccacgaagcttatggcgagggaatctgtgaggatgcgccatagcggggcatcgaagacactgngacgtagttggttccgccgccggngnctttctgcccataatgtatgccccactagcttgtgtttttttaggtttgttttttggactttgtcttgcgaagctcgttgtccggcaccgcgctaagggcgagggctgcggcaatgcangngccgggcggccgnggcgccctgcatctagagg

SEQ ID NO: 33537 - DNA, 238 bp, Zea mays
  Clone ID: MRT4577_130593C.1
gcgctgcctcgctcggtctggatcgctatctcgtgtctagcggctcaagatggagggaaagctagcgcacagccgagaggagaaagcagatagggagggagaacaaagagagaggggaggaaaagaccacagagggtgagcgagagccgatgcggatccgccgtttgtcgctcgtgggcgagggcgagcctgccggcgccccctcggtagatcgagaggaggcgctgttcagttgagg

SEQ ID NO: 33538 - DNA, 603 bp, Zea mays
  Clone ID: MRT4577_130594C.1
cattgggtacctcgaggccggccgggcccttttgtccctctgtaactggttcgcattgctcggccggccgggaccagcacccgtcccgtggacactccactgcatccaccacaccaccagatctgctgccgtccgcgcagaggacgagaggaatacttcatcgcgatgggggcggtggtgacggcggtgatcgcgatcgccgcggtggtgctcggctggatcaccatcgagatggcatgcaagccctgcctcgagaccggccgacgcgccatggaccgcgcgctcgaccccaaccacgacccggactcccccaccaacgccgccggcgcctccgccaacgagccgctcctcgccgacctctccgcctccaccgcgccacccgcaaaggccatctgaatctcatcacctcccagagcgagccagaggcggaccacccttttcccctcgccttgtaatcttgcttctttctatgtcattttgtgcttatgagtttgctattaatattaatggtgttttggttatgaaacgaccactgctagcaatatataaactacttattcaaaaaaaaaaaaaaaaaaagcggccaaaaaatctgatggggat

SEQ ID NO: 33539 - DNA, 463 bp, Zea mays
  Clone ID: MRT4577_130595C.1
ggggcgaaaaaaggcaaaatccttaaaaatgggcgcccccggctcaaacatacgggggtaaataggacaaaacgctttggcgggcaatcatggggggaaaggggaactcccaagcaattccataaggtacccaggggaactccctaaccccataacagacaatcataggtaaggggggggggcgtcttcaagctatatttacattttacaaccccggaacagccctgttagcgcatacaggggggggggggccctgactaggcctcattggcgtaggccccattttaataaacccgcactgggagagggccaaaaccagagggcccaacaccgatgtttccagggggatttgggataggccaatctgactgatgaacggggcttgctttttccccttaaaatttgtaatttgcccaggggctgttggcggaggttgcgtgctttgaggggtaatttcggtgcc

SEQ ID NO: 33540 - DNA, 419 bp, Zea mays
  Clone ID: MRT4577_130596C.1
atgaaaacatttttattcttaactatgttctttcaggagccagtgcattaaaatttagagaaactggtgaattttcatgtaaccagttctacaggccattgaacactgtactttctaaaaaatgctacaacaaactggcaggtgtacagggtttagagggcctgatgcttctaacagaatggagtataaaccactgggcgaccggaatgccgattttcctataactggaaggcacgggtctttgcctttggagacctcaaaggagggttgccatttccacgtggtaacctggtgccggctacaccagggtggattggcctaaaccggattgcacccatactagctggaataatagcatttggttccattaggagtgtttttctggtgttttgggtcatctttgtctgtcaaaggaccac

SEQ ID NO: 33541 - DNA, 567 bp, Zea mays
  Clone ID: MRT4577_130597C.1
cccacgcgtacgaaactgaagatgacgtccctctcactaggttaaagaggctaaggagagggcctgcaaagactaacaaaaggtgacagaaagtgaaaatacacgccggtgcaatgcttcatttggactggacggattttggacttaacgagactgatgcatgaatcatgatggcatgagaccttcgtttagcacactgccagctataattctctagcttttgtgtagtagaatttggaaacatgcgttgctgttggattaggcgtctgtttgtaaataggtgtccctcgcattcaaatgttgcagcttaggccctgggatccattagctactaatagttagctagctaatagactaaagggtgtttgaacgtactagagctaatagttagttgactaagtgaaattagctagctaacaaatatttatctaactattagctaatttgctaaaaatagataatagctaaactattagctagactgtttagatgtcatagatgtcatcagctaactattatctctagtgcgctcaagcactccctagctaatattatatgctattaact

SEQ ID NO: 33542 - DNA, 312 bp, Zea mays
  Clone ID: MRT4577_130598C.1
caacagttatgacaactgtccatgaagatttgacctgtgcgatgcatactatcttaggtatcaggggatgcctgagtttgaccacgcaatgcaacattttgaccctaaatatgaatgcacgacatttgatcaccactatatctcccgctaccatgcagacgactacgtgattgctacccacagagggagacttgcattcagccgactaacttccactgcactatcatgtatattgactaccgcatcgctagctaaatgcctgcagtgtataaggtgtgatcgtactacgacgcttgactatccacaggattt

SEQ ID NO: 33543 - DNA, 473 bp, Zea mays
  unsure (1)..(473): unsure at all n locations
  Clone ID: MRT4577_130599C.1
gggggggattttttgtttgagggagcgtttttttttnnnggncgcngnggttttttttgtttggggcaagnggagtaagacgnggggggggatgnagnattttggggantgaggacgagtactgnnagtggagtgttgaatagggtatggtgaccggaaccttttgttgtgggcggggagtgagcagttgncttcttttttttttttggggnnggggggnnaaataagngatagnggtggnggtggtagtaagagcaagttgtgtgttattgggaagatgttgttgaagagtaaggtgtgttgtaagttttggggttggacttgtggttaggtgatcaattggaatttgtggtatggtatggaggaggtgtggaagtgatttgggaattgggaggagattgtgggtgggtattaggagggtatttaggatttggaggagtaagatgtggtgatgatgacatttgggaattgtt

SEQ ID NO: 33544 - DNA, 192 bp, Zea mays
  Clone ID: MRT4577_13059C.1
attataaacaagatactcaggggggtaatcgaatcaggggggccgaccgtactagcaaaaaaacatatgcataaagcaaaggttcatacatcattacatcactcgaaacgcattatttcaacaacaatggagttttaatacttacaaagacacaccaacgctgccactcagtgaagaatcagattacatata

SEQ ID NO: 33545 - DNA, 371 bp, Zea mays
  Clone ID: MRT4577_1305C.1
ttgttttcagacgctgacgcgtgagtcttgacgagagaacttttttcgcggagccgacccatctggggaaaacaatcacggaggcaggagaggaactccaggacatgccgaaactgtacacccaatggaccttaaacgaaatgcaggagaaccacatcaatgtccacgactagctaggatccaacggaacgaaacaggcgatgatcctgcgatacaccggggggcgttaattcaagaaacggcgacttaaggggcagcgacctaacgttgcccgccgtaccaactctctcatgatgcaccagctcctcaactgccggaatgacatagactgaccccttcatcaagcatgcgctggagatcattcacctgct

SEQ ID NO: 33546 - DNA, 209 bp, Zea mays
  Clone ID: MRT4577_130600C.1
acggctgaacgacattgggctcaccggcctctttggggtgtacgccaacatgtgcctcctaggggtcgcggtcctgttcgtcacggtgcccgaaaccaaaggcatgcctcttgaggtcatcaccgagttcttctccgttggggcaaaacatgccaaggaagaggaggatgaggatgccaaagaaagttgatcacccgtacggtcggccc

SEQ ID NO: 33547 - DNA, 153 bp, Zea mays
  Clone ID: MRT4577_130601C.1
ctgcatgcgcacaacatacctcatgtatagtgacacctaaatgcaacaaactggccgaaggtctacaactaatagactggaaaaaccactacactacccaacttaatcaaattgctgaacatacaaatttcaacagccggcgtttttacacag

SEQ ID NO: 33548 - DNA, 298 bp, Zea mays
  Clone ID: MRT4577_130602C.1
gaacgagaacatgattctaaaaaggcaaacaccctaggcatacacaagccccaaagcccaaactccccaaagggaaagaaggatacattcgcaaaaccctgaaaggggaatgccagaacaaactaaaagctaaaaaccagggagccatttcggccttaaacaaaagaccaaatttgcctaaattgcatacggggatgatccaggggagacaccagggaggcaggccccatcactaaaacaggaccccgttaaagcctgggggggccagcgggaactgaaggccgggtaccaagaggaa

SEQ ID NO: 33549 - DNA, 867 bp, Zea mays
  Clone ID: MRT4577_130603C.1
catccccttcctggtgcacactcgagcagtggttgtggagttcaatgactccatccttgtccttctcagccacctcattcatgacccctcggaaccattcaaaggacccctcttccctggtcacccagtagaagtaggccctctttgtcatgaatggcctcttcttggccttgccactgccctcaggctccgtgcctgcaacagatcctccaagctggatgtggttaagtacatccttcacaatgctaatcaatggtgtggctccaatgcccagtccaatgagcattctgacatcgtattcccttatgaagaagtttccccaggatttggagactgccgacgcaagcctttctgcttctcagaacactgcagcatcggtcgttccttccacaccgacttccaggacttcaccatgcaagcttgaggggaggaagtctcgccaaatgatcgcgagcgggattctgctggttggaagcatcgtttgtctatctcgaggccgatccaacctcggggcgcagctcgcgatggccttcttcctgaaaaaggccttcaagcaagagaggcaatcaagctcctcatcgacatgaatggtgaaaacaaacgtgactagatgcaggcggtacccgtactggtttgactttgagccgtgcagactccagacaacgtattattagcatttttaacctttctctgattacagaatacgtgactagataacctttgaccctgagccgtgcagacaagttgtaaagagttttttccggaactagttttgtaaataatcgttttcaaatctggaaacatagaattactttgagaatggaagcccgtgcatgcctgattttctaagggaaaaccaaacaaaaa

SEQ ID NO: 33550 - DNA, 269 bp, Zea mays
  unsure (1)..(269): unsure at all n locations
  Clone ID: MRT4577_130604C.1
cacggataaacaccaatacaatttatagtttatgacaaattccatcgtactacggcaggtgatactatccgccggaagaccatangaaattattcttcactgtttatccctcagaaaatttcacaataaaagggttattctgatcgcctgtacttttacgctgttcacaatacgtaccttgaagaaccttcttcatgcaatgcttttgttgtcaaagacaatgtcatctctaccgcagccatacaaggaacaatatcacctggcatcac

SEQ ID NO: 33551 - DNA, 319 bp, Zea mays
  Clone ID: MRT4577_130605C.1
acaaatccaaacacaaaccgaaacttttttatcaccccccattcaatcccacttcaatttttttacaaatccggtaacattttgtccaaatccaacttttaatcacttttaaaggaaaaggccaacaacaacacattcttccatatattgccaccaacttcattgcttccttaaacacaaatacaaccaaggcaacaccaaacccaaatttaaaaaggtacactttttgcctaattcaaacaacccccttttctcctttacctttgttcttctccatttaatcacaagctaattttttatcaaaccttctcaaacaaat

SEQ ID NO: 33552 - DNA, 286 bp, Zea mays
  Clone ID: MRT4577_130606C.1
attccctgcatcaatttaaatcagaaagagaaaaaaaaaaaaaaaaaaaaaaattaaaaaaaaaaaaaaaaaaaaaagggcaacggttaaaaagaaaccggcactacgatcccaatcatgcaacgtcatatactactgctttcacctcccttaaatctgtttccttggccgcattttacaccgcccgtactcggtaaaccctgggactacccgtcctaatccgtcctgcgtgccatccccctttcatcaggcggcatcaccatgccacaagcccgctcaaacgccc

SEQ ID NO: 33553 - DNA, 282 bp, Zea mays
  Clone ID: MRT4577_130607C.1
cccacgcgtccgacctgttcgatccagacagtaagcagcatcccatgtgcaaggtgttgacgctggacacggtcgccaagcacaactcctaggatgattgatggctcatcattggctgcacggcgtctgatgtgactacggttttggtctaccacccaagaggatattatgttgtgataccctcaactggcaaggattccactgatgattcttttgctcatgaggaagagaaacactaccccctcgacgatgtttgaggactcgtggggggaaaacgccgca

SEQ ID NO: 33554 - DNA, 301 bp, Zea mays
  Clone ID: MRT4577_130608C.1
tcgctcccatacactttccatcaattttactttttctcgacatctcttctccggcggaggaccttcagtcagctggcaggtcactttttaaactgtattgatacttgatttctgactcttttgcaattttcataccgcaagacattttgtcaaaatgctcaatgattatttaatcactaacatctacatatctttctattaagctttcaaaaacactggtctctctacatttatactagtcattctttcatccatacatttttcaacattacactgagatttatccacatttactctattt

SEQ ID NO: 33555 - DNA, 796 bp, Zea mays
  Clone ID: MRT4577_130609C.1
ttgggtacctcgaggccggccgggatcctcattcccccctccctttggtagaccattacaaagcctgcctggctgcgctgcttatctaccatgccaccctacacttccgacccaagttcttttccagaccccgtcagtctcgcccacttgctatcacgcagcacaaaggcccgtgaggcctcgaccgtcaagcaattctacaaatactttcagattcccggcattgcccaattagctggaggcctacctgatgatcactacttcccatatgacacactcgaggccaaggtcgcccgccccgaccgatggcagccaactccaaacaaacccctcgaccccccgcctgaggaccctccgtccccgcagcaaaatagattctgggccttttcgcgcaagaaggccaagcagctacctgcctcgcgtctggttgtaccaaaagactccaacgtgcaggaccctctgcgcatgattgacctcaagtcggcgctgcaatacggccaggcccagggatatccccctctgtactatttcattcgccagttcactcgcgaaaacctgcacccctttgttccatacaaggatgggcctgagattctcttgacctgtggttctaccgatggcttctcaaagacattgaccgccctcagcaacgagtggtccgcagagcatgaccccgtcgaagagcgacccggtcttctgtgcgaaacctactgctacatgaatgctatccagaccgccaagccacggggcttcaacattgcacctgttgccattgaccacgaggggatgatggtgt

SEQ ID NO: 33556 - DNA, 166 bp, Zea mays
  unsure (1)..(166): unsure at all n locations
  Clone ID: MRT4577_13060C.1
gggggggggggaggccctacaaaccacaacttttttanatatattttaccaacncattaaacaaaatggggtcacagatgttgctccatacgtacatgctcattgtggtacacacanctaaccacctaaagctgtatacttacttattcagactgatccagcatgt

SEQ ID NO: 33557 - DNA, 211 bp, Zea mays
  unsure (1)..(211): unsure at all n locations
  Clone ID: MRT4577_130610C.1
gggccaccgggcgggggaacgngcaaaacggcgccggggcgaagacggagccggcaccgcggcgccgcaagagngccggcgaggagcacggcggccgggaacccngccaggccgangggggggcaagaaggccccgggngcgcaagaggaggacacgccaggggagnccacggaccacacgcccncgacacggcgaagggcggaccacacc

SEQ ID NO: 33558 - DNA, 415 bp, Zea mays
  Clone ID: MRT4577_130611C.1
gaagcctcaacggtggttgcgccttaacttctttttccgttctgaaaccaaaattccttaactccggcaacaaccaagttgcgacccgcccaatggccggaccagaagggttggaggcggcggcaggggccttcgtaaccggtaagaggaaggccaccggggtagccaaggcgtccgggaaaaatatggtcaaaaagggggatccgggggcggatgccacatgcggccatgcggaatggacattgacacgctggttctgttaaagaggggggctgccaaaacaggccggggttgtgtttatgggagggccatcaaagattctgcgatggaaaatactcccttttttttgaaaatggccggggatgatgaacataaggggtggtttggaactataaagctttaacctaatttcccc

SEQ ID NO: 33559 - DNA, 580 bp, Zea mays
  Clone ID: MRT4577_130612C.1
ctgaagaaaaaaacagtagtcgcatggggaagcagcaaatcattcttcccttgcagcaacagatccttctctcacaacttagcaacattcatcgccaattcatccatgtgagctacttctgcttccaaactcgaaacctcgttctccaaactaataatcttctccctcaactctgcattgttttcttctgaaattcggaaaagtcagggtcattccactgataaagctcgtacttgccattcggattgctaaatctaagaggacagacggtaaatcttctcattgggttagcacaggtccacgagacaaactggactgccggctgcttgtccacgcactggcagtggcgtggtgtcggattttaaaactgtccatcaaatggcagtggaggtgggtcatgttggcgcgatgagccagtggtggtggaggtcgtagaaatcatcgtctgcggctcacggttcttgcacagccacatttgccatttttttagcaaacaacaaccatatacaatttataggaaatgggcatgaagtaggatggtccgattcaaaaaatttataactatatagtattttacata

SEQ ID NO: 33560 - DNA, 480 bp, Zea mays
  Clone ID: MRT4577_130613C.1
tttcttatttctgggaagccacaaacatcatacaaaaaaccttttttatggacctttacctaataacaaatctaaaaaagggcaccaccaatgatgggtggtgggtaaaacgctgctgggttggtcaaagcaggtgggttgaatggcagcagtggtggcagttgtaggatggggccagctttaggcccatcgggctggtaaaacggaaccaactgtggttggatcaaaaaggtatcagggttaacaccacttagctggttgaatgggagaagttgtggctgctgaaaataaccaggaaagttaattgctgccagttggttgaatgaaaaaaatggctgggggtaggcagaactaacctacctaaatggaagttgtggttgatgcaaacaacaaacatagttgaatgcagctagttgaatgaaagaaacaaactgctgtggcagaaagcaggcaggatggctagctaacacaagtggatgt

SEQ ID NO: 33561 - DNA, 1587 bp, Zea mays
  Clone ID: MRT4577_130614C.1
ccgccgccgcatcgtgtcgtttcttccctttcccgtttcccccgttcagttcagcttcggttggctcgccgtactcgggtttgttcctcgcctcgcttccttcctccgcagtcctcgtctcgaattcgctcgcggtgggagaaatcggggcgcgaggatgaccgggatcgacatcctcacctcgggtggacgcgatctgccagaagtacgacaggtacgacctccaccaacctcaacggcgggatcgtggtcgccgacaggccccgcggcatcgtgtcgtttcttccctttcccgtttcccccgttcagttcagcttcggttggctcgccgtactcgggtttgttcctcgcctcgcttcgcttccttcctccgcagtcctcgtctcgaattcgctcgcggtgggagaaatcggggcgcgaggatgaccgtgatcgacatcctcacccgggtggacgcgatctgccagaagtacgacaggtacgacgtcgacaagctcaacggcgcgaacgtcgccggcgacgacccgttcgcccgcctctacgcgtccgtcgacgcggacatcaaccaatgcgtcgataaagcggaaacggcgaagcaagagaagaaccgggccgcggtggtggcgcttaacgccgagatccggcgcaccaaggccaagctcctcgaggaggacctccccaagctgcagcgcctcgccgttaagaaggtgaaagggctgacaagagaagaaattgcgacccgtagtgatctggttgccgctttacctgacagaatacaatcaatcccagatggtagttctactgccacaaagaaaaatggaagttggggagcctcaggatctcgcactggaggagccataaagttcgactctactgctgatggaaactttgatgatgagtactttaaggggacagaagaatctaatcagttccgtcgggaatatgagatgcgcagaatgaaacaggatgaaggtttggacgttattggtgaaggactggaaactttgaaaaacatggcatctgatatgaatgaggaattggacagacaagtccctctgatggacgaaatggatgataaggtggatagagccaatgcagatttgaagaataccaacgtgagactgaaggagactgttcttcaacttagatcaagtcgcaacttttgcatcgacatcatccttctgtgtgtcattcttggtattgcggcctacctttacaatgttctaaaaaagtgaggtggagtcttcttgccttggaaccgctcatgtcgtggtccctttgtcaccatggttctacccagttctttgagcgatttgtggcttgttttgtcttatatctgtattattatggtgtccaagttgaaccttgactaggcttgttgaagagaacgctggtaacatgtttgctatatatctggggagtcgatttcgtagcgaggaatgattacacggcaccattcttatcgtcttatcgaaccacgggctcatgtatattcattccgtcagggcttaaaaaaaaaaaaaaaaaaaaacgtctccattgtttctgatgaatcagtcttggtaccaacagcggtgctagtgagcc

SEQ ID NO: 33562 - DNA, 200 bp, Zea mays
  Clone ID: MRT4577_130615C.1
ctgaccgtggacggcattctcctcgctcctgctgccatcgtttttcctttttcctggacagccactgcaactgctcccaaatccttccacccggttactaaggtctcgctgctaacgtcgcgaatccacctctgtcgccaccaaggtcaagtccaagggcatcaagggtcacgagctaggcggtcccgaggtgctgcggt

SEQ ID NO: 33563 - DNA, 622 bp, Zea mays
  unsure (1)..(622): unsure at all n locations
  Clone ID: MRT4577_130616C.1
ccccgttcagttcagcttcggttttctcgccgtactcgggtttgttcctcgcctcgcttccttcctccgcagtcctcgtctcgaattcgctcgcggtgggagaaatcggggcgcgaggatgaccgtgatcgacatcctcacccgggtggacgcgatctgccagaagtacgacaggtacgacgtcgacaagctcaacggcgcgagcgtcgccggcgacgacccgttcgcccgcctctacgcgtccgtcgacgcggacatcaaccaatgcgtcgatgtgagatcccgtcctctcgctctgcgtcagcggcccggagccctggatctgaatctgacgacggtctgtttggcgtttggaacagaaagcggaaacggcgaagcaagagaagaaccgggccgcggtagtggcgcttaacgccgagatccggcgcaccgaggccaagctcctcgaggaagacctccccaagctgcagcgcctcgccgttaagaaggttgccgccctagtacccgcattgcctccgctgagttatgggtgaagtgtgctcgatcggggagctctgnaacttgggcctttgtcttcgtgtttggcagtaactaaacttgcttggactattggctggctaaa

SEQ ID NO: 33564 - DNA, 498 bp, Zea mays
  Clone ID: MRT4577_130617C.1
tgtgcggcgctcgaggcggccgttcaagaagggggagctagaccaatgtgttccccagctgctgatatgccacctcagggaggttttcccgaggtcagataccgtcgttatttgcctaagcgtggtccctctggattagtcatactttctggaattgctgccatttcagcatacggtttctataaagttgcagaaggcaatctcgaacgaagagagttgaagcgcgaaaatctttgggcacgcattcatcttatccctcttttgactgctgaagctgatcgtgatgcttaccgtcgctctgaagctgccaaggctcgtgaggcagaaatcatgaagaatgtcgagggctggaaagctggagaatctgtttacaacaacaccaaatactatactccacccaactttgtcattgttcccgaagaaaattagaaagtttattttttttttcatgtataaacgcagattcacacagaaaaaaaaaaaaaaaaaaggccccta

SEQ ID NO: 33565 - DNA, 391 bp, Zea mays
  unsure (1)..(391): unsure at all n locations
  Clone ID: MRT4577_130618C.1
aaatnccggggccgaccacacccttccgccacacccttccggggggatttaataagcctgtcggtccccttaagaactttccccttaccgtgggggctcccaaataacatgggccggatgttaaagggccctaacctggttcccatccaaaaataatggccctgcctcaatgttcttgggttaactgccctgcctgttgcaccggcggtctccgcaataaggctaataatgcgtgattccagcacctaccattttttcgttgttctttgaaaccgaccgtttcctttcctttttgttggaatgctgacccagacctagttttttttcattttaagggaatttttttccatttttgtaaggttgcccctttttttttttgattagatgtttt

SEQ ID NO: 33566 - DNA, 256 bp, Zea mays
  Clone ID: MRT4577_130619C.1
gtatcctcagtctgcatgtaacttttatgatagttattccaaattcaagaagaagcagtattaacatcaattgatcgacacaaagtaatttttaatttaattcatcatttcacatgtttgtactttgtcttcccattaacctttgccagtgttatgattgtataaatttttttaaatgctggttgtacaggaatgcttaaagctttaaaagtttaacagtctaaaacatttttgctattattcaactgcagaataa

SEQ ID NO: 33567 - DNA, 580 bp, Zea mays
  unsure (1)..(580): unsure at all n locations
  Clone ID: MRT4577_13061C.1
cttggnatggcacaaagcaaaacttggttcactcgctgggggtactgccttgccaaggttgtttcagcgtgtctaggtccacttatactgctgcacttgaagcccttgctgccctgcctgttgattgtctccgtagtcgtcatgtccgtcgtgtggtcaccatctaccgccgcctctccagcaaacctctggttacagtccgcgagtttctcctctgcctgcttgattggaagcaccgtgagcccccgctttctcctcctcccgtgaaggcatcctcgcggctgatgttcttgctgccaaagtcatgtatgatgaagaggcccaggcagccatgtcaacgctttgaggacgtagttgacctgcttgagtgtcggtggtcaaagaagcgtctgcttagtgctgcaaatgttgttgttgcaaagctgcgagagcatgcggatggcacaaagataacacggcaagcagtgcgagatgctgcaaggggtggcatcggtgacactggtctcctggacttcgtcatcaagtccctcaataacactgttgttggtaaccacattgtgcgccgcgtgcctggaccctg

SEQ ID NO: 33568 - DNA, 447 bp, Zea mays
  unsure (1)..(447): unsure at all n locations
  Clone ID: MRT4577_130620C.1
gcatagatggaaaatatcaatatctcaaatctgcgcagcgggcatacaatcataatctgaaacttatatacttgccagctacaacacggtctatgatttctcagctagaacctacaaactcaataaagcccgcacccccaatcgggataaaggcacagcacccagcacgagccagtcacaacacgaataaaatcatttctgctacaccaacttaatctttccgagtccgggctgtaccaaccttccttgctcccaggttccctgcttgcaacaaatcccccggacgatgctcccaggaattcccccttcccatttgcgatagataaatatatcctcctccggctngccttttcctaccaagaagtacttcccagccagtattattcctatgaacatctcccagcgatcgttagggtctcgaccatcaattaccttttcatcaacatg

SEQ ID NO: 33569 - DNA, 770 bp, Zea mays
  Clone ID: MRT4577_130621C.1
ctacgagtaccacaccactccgcgctagctgtggacggtacagcggcacagaggtgcgacgtacgacgacgacgacgcaggcgccacacatggcatcccagctctccgccgccgtgccccggttccacggcctccggggctacgccgcgcccaggtccgcggtggcggcgctgccgtccgtgagggtgggcaggaagaggtcgtcgtcgcagggcatccgctgcgactacatcggctccgccaccaacctggtaggtatatatatatgtatacatgtgaagtctgatgagtacgtgaggaaaagaccgacgatcatatcactgacgacggcatatgcacgcacgcagatcatggtgacgacgacgacgctaatgctgttcgcggggcggttcgggctggcgccgtcggcgaaccgcaaggcgacggcggggctgaagctggaggcgcgcgactccggcctgcagacgggtgaccccgccgggttcaccctcgccgacacgctggcctgcggcgccgtcggccacatcctcggcgtcggcatcgtgctcgggctcaagaacaccggcgccctcgaccagatcattggctagatccctacgtcgccgttgttaagatcagactcagcagcctcgatcgcgccgccggccggcagcaggtgccaggtggtgactttgtaacgtgtgtgcgtgcgtgtaacattgcatccatcttggttccaatggacatatagctcctgttgctcctccaaaaaaaaaaaaaaaaaagcggcc

SEQ ID NO: 33570 - DNA, 547 bp, Zea mays
  Clone ID: MRT4577_130622C.1
cgcccaggtccgtggtggggcgatgccgtcccgtgcgggtcggcaggaagaggtcccagggcatccgctgcgactacatcggctccgccaccaacctgatcatggtgacgacgacgacgctgatgctgttcgcggggcggttcgggctggcgccgtcggcgaaccggaaggcgacggcggggctgaagctggaggcgcgcgactccgggctgcagacgggcgaccccgccgggttcaccctcgccgacacgctggcatgcggcgccgtcggccacatcctcggcgtcggcatcgtgctcgggctcaagaacaccggcgccctcgaccagatcatcggctagacgatccctacggttgttcttaagctctgatgaagctcacaatcctcgatcgcgccgccgccgccggtgcatatgcctatgtaacgtgcgtgcgtgtgtgtttgtgcgcgcatgccatgcgtacgtctcgttccaatggacatagctcttgttgctcctcttgctggcttgcatgagattccattccaggtcatagttcataactg

SEQ ID NO: 33571 - DNA, 639 bp, Zea mays
  unsure (1)..(639): unsure at all n locations
  Clone ID: MRT4577_130623C.1
cggncgcgtgggcggccgcgtgggcggtcgcgtgggcggacgcgtgggcggacgcgtgggggatgttctttcagagatgttaaatgctatcgatcctggtaacagagagggtctaaggcaggaggtcattgtggaccttgtggaccaatgtcgttcatacaagcaaagagtggtgcagcttgtcaactcaacatcggatgaggacctattaagtcagggccttacgttgaatgatgatttacaacgtgttttagcaaagcacgatgcaattgctgctggcatagccattcgattacaaaaaccaaaatcagccccggcccgcgcagacagttctccaacgaagcctgagccgacaaaggaaacagaacaaaggtctgctaaagttgccagtagtgtgactccatttgagcagttagcacttcctgcaccaccatcatcaagtgcttcaaagtctcatggagaatcagctgttagcccaaatattgatttgcttagtggtgatgagttttttaaaccagaacctgttcattcccaagctcttgttcctttagtcactcaggcttcagcttcttcaagccccagtactttagaccttttagacatgttttctgatagcaatgctatcaataacaccagcca

SEQ ID NO: 33572 - DNA, 599 bp, Zea mays
  Clone ID: MRT4577_130624C.1
cagtaccacaccactccgcgctagctgaggacggcacagcggcacaggggtgcgacgtacgacgacgacgacgcacgcgccacacatggaatcccagctctccgccgccgtgccccggttccacgaggctccgggagctacggccgggcccaggtgccgcggtgcgcagacgcgtgccgtgccgctgagggtgtggcaggaaagaggtcgtcgtcgcatggcatccgctgagactacattggttccgccaccaacctgatcatggcgacgacgacgacgctgatgctgttcgcggggcggtttcgggctggcgccgtctgcgaaccgcaaggcgactgcggggctgaagctggaggcgcgcgactccggcctgcagacgggtgaccccgccgggttcaccctcgccgacacgctggcctgcggtgccgtcggacacatcctcggcgtacgcatcgtgctcgggctcaagaacaccggcgccctcgaccagatcatctgatagatccctacgtcggccttgttaatatcagactcagcagcctcgatcgcgccgccggccggcaggtgcctgcatgtggagactctgtaacgtgtgtgcg

SEQ ID NO: 33573 - DNA, 781 bp, Zea mays
  Clone ID: MRT4577_130625C.1
gcctccgaacacttctgctcgacccttgtctcccgtcacctctcttcgttcccgtctgtccgttttggttgtttggtgaaatctgtcgctatcttcgtcgactccagttcgtcgtccatttcttaaagttcaaaaaggcctgctttgtccccatttttctccccgtccctttggatctaaggttagtcgttgtcctcccccccgcccttcccgctccttactctggcgcccctgtccccggcgtggcgcttccggtcccgtgcccctttctcttccctcgcttgccgcgcccccggctccccccttcccctgctagccccacggactgctgcatgttgctacccccgtcgcttccattcccctgcaagccacgctctgctatggatttcccacctaaagttgtttgtccattcatgacccatgttcatgtgcaatagctacaactttcaaggtatttgagagattgctcaaaaagtttgccagatctaaagcatcagttgaacggtcataatggtgaatcaacaaggaactcggcggggcatctctaaaaggttcagcttggttgtaatctataaactggaggaatgtagataccaatgacgtcttactccatcagaagctactagcttctaatgaagaaccaaatttctgaaaaaatacggactacaacattatccgccattttagtaatttatgaaactataaacactgtttttgtaaaaagtaaatgatattatcttccaaaatgattattgttttttaaaaaaaaaattaagctctc

SEQ ID NO: 33574 - DNA, 753 bp, Zea mays
  Clone ID: MRT4577_130626C.1
attgggtacctcgaggccgggccgggactaccaccagtaccacaccactgcgcgctagctgaggacagcacagcggcacagaggagcgacgtacgacgacgacgacacaggcgccgcacatggcatcccagctctccgccgccgtgccccggttccacggcctccggggctacgccgcgcccaggtccgcggtggcggcgctgccgtccgtgagggtgggcaggaagaggtcgtcgtcgcagggcatccgctgcgactacatcggctccgccaccaacctgatcatggtgacgacgacgacgctaatgctgttcgcggggcggttcgggctggcgccgtcggcgaaccgcaaggcgacggcggggctgaagctggaggcgcgcgactccggcctgcagacgggtgaccccgccgggttcaccctcgccgacacgctggcctgcggcgccgtcggccacatcctcggcgtcggcatcgtgctcgggctcaagaacaccggcgccctcgaccagatcattggctagatccctacgtcgccgttgttaagatcagactcagcagcctcgatcgcgccgccggccggcagcaggtgccaggtggtgactttgtaacgtgtgtgcgtgcgtgtaacattgcatccatcttggttccaatggacatatagctcctgttgctccaaaaaaaaaaaaaaaaaaaaaaaaaaaaatgtggcaatgatggcacatttatttcaaaaaaaaaaaaaaagcggcc

SEQ ID NO: 33575 - DNA, 790 bp, Zea mays
  Clone ID: MRT4577_130627C.1
cctcgaggccggccgggactaccaccagtaccacaccactccgcgctagctgaggacggtacagcggcacagaggtgcgacgtacgacgacgacgacgcaggcgccacacatggcatcccagctctccgccgccgtgccccggttccacggcctccggggctacgccgcgcccaggtccgcggtggcagcgctgccgtccgtgagggtgggcaggaagaggtcgtcgtcgcagggcatccgctgcgactacatcggctccgccaccaacctggtaggtatatgtatacatgtgaagtctgatgagtacgtacgtgaggaaaagaccgacgacgatcactgacgacggcatatgcacgcacgcagatcatggtgacgacgacgacgctgatgctgttcgcggggcggttcgggctggcgccgtcggcgaaccgcaaggcgacggcggggctgaagctggaggcgcgcgactccggcctgcagacgggtgaccccgccgggttcaccctcgccgacacgctggcctgcggcgccgtcggccacatcctcggcgtcggcatcgtgctcgggctcaagaacaccggcgccctcgaccagatcatcggctagatccctacgtcgtcgttgttaagatcagactcagcagcctcgatcgcgccgccggccggcaggtgcctgcaggtggtgactttgtaacgtgtgtgcgtgcgtacgtgtacattgcatccatcttggttccaatggacatatagctcctgttgctcctccaaaaaaaaaaaaaaaaaagcggcc

SEQ ID NO: 33576 - DNA, 752 bp, Zea mays
  Clone ID: MRT4577_130628C.1
ttgggtacctcgaggccggccgggctcgccgtgtccaggctttaagccacacgcacttgagctccaccgccactaccaccagtaccacaccactccgcgctagctgaggacggtacagcggcacagaggtgcgacgtacgacgacgacgacgcaggcgccacacatggcatcccagctctccgccgccgtgccccggttccacggcctccggggctacgccgcgcccaggtccgcggtggcggcgctgccgtccgtgagggtgggcaggaagaggtcgtcgtcgcagggcatccgctgcgactacatcggctccgccaccaacctgatcatggtgacgacgacgacgctgatgctgttcgcgggacggttcggactggcgccgtcggcgaaccgcaaggcgacggcggggctgaagctggaggcgcgcgactccggcctgcagacgggtgaccccgccgggttcaccctcgccgacacgctggcctgcggcgccgtcggccacatcctcggcgtcggcatcgtgctcgggctcaagaacaccggcgccctcgaccagatcattggctagatccctacgtcgccgttgttaagatcagactcagcagcctcgatcgcgccgccggccggcagcaggtgccaggtggtgactttgtaacgtgtgtgcgtgcgtgtaacattgcatccatcttggttccaatggacatatagctcctgttgctcctccaaaaaaaaaaaaaaaaaaaaagcggcc

SEQ ID NO: 33577 - DNA, 317 bp, Zea mays
  Clone ID: MRT4577_130629C.1
aatttgttggactacccacgcgttcgcccacgcgtccgtccacgcgttcgcccacgcgttctttcaaagtttaccccatctaacatggttccaagggtcaagatcttggtcttgaagatgcagttcataatccgctaggaagtcaagatgctgcccaccttcctgagaggcttttcccaatgtggagacattgcatgttctgtcacatgaaactgatgagcaaaatggtaagtttaatttgaagttctgggaggaggttgtctccatcaactgcctagagacacgcatcaccaagggggtgtttgaccaaatttaaa

SEQ ID NO: 33578 - DNA, 360 bp, Zea mays
  Clone ID: MRT4577_13062C.1
actgaccccttctacagattcatctctcacaaagctaaaaactcataatctcacactaattggagaagagtttgttgcactcactttccgggaacaaagtttgtggctttaagcccaggcgttgttgttaactgggtcagcaatgtggtcggcaaggttctccaacggaccctttccggtgacaatagcttgaacaaagaatccaaacatggcagcaacatagcaagtctaccattcttgatctccttcaccttgagctcagcaaaagcctctgggtcttcagcaaggcccaatgggtcaaagctaccaccagggtaaagtggatcaacaacctcaccaagaggcccaccagcaatacgg

SEQ ID NO: 33579 - DNA, 980 bp, Zea mays
  Clone ID: MRT4577_130630C.1
gggaccctcgaggccggccggggcttctcttcactcacctgcagagtgcaccgcaataatcagcttccggatggtggcgttttgtcagttttggatggaaatgccgaactggcagcgtctgttttccctatgcatatgtaatttcctgcctccttggcatattatacatattgtaataataaacatcgtacaatctgcatgctgttttgtaataattaattaatatcccagcccaaaaaaaaaaaaaatcactaccaccagtaccacaccactccgcgctagctgaggacggtacagcggcacagagcgacgacgacgacacaggcgccacacatggcatcccagctctccgccgccgtgccccggttccacggcctccggggctacgccgcgcccaggtccgcggtggcggcgctgccgtccgtgagggtgggcaggaagaggtcgtcgtcgcagggcatccgctgcgactacatcggctccgccaccaacctggtagatcatggtgacgacgacgacgctgatgctgttcgcgggacggttcgggctggcgccgtcggcgaaccgcaaggcgacggcggggctgaagctggaggcgcgcgactccggcctgcagacgggtgaccccgccgggttcaccctcgccgacacgctggcctgcggcgccgtcggccacatcctcggcgtcggcatcgtgctcgggctcaagaacaccggcgccctcgaccagatcatcggctagatccctacgtcgccgttgttaagatcagactcagcagcctcgatcgcgccgccggccggcaggtgcctgcaggtggtgactttgtaacgtgtgtgcgtgcgtacgtgtacattgcatccatcttggttccaatggacatatagctcctgttgctcctctagtcctcttgcgttgaccccgatcgatgagtatgacttctaccttccatgatagcaaaaaaaaaaaaaaaaaagcggcc

SEQ ID NO: 33580 - DNA, 1048 bp, Zea mays
  Clone ID: MRT4577_130631C.1
ccgaccgggacatcgctcactcccgctcctcctccactcctcgccttcctcggtcgcatcaagaacacgagcaggaaggagaagaggaggagtcctatcagagccagacagccaatcagtatctgtaccattaccgttcgggcaccagattaccaaaatcctgcagaggggaatggcgccgagcagctacgagatggcggcttccaccctgctgtgcggcgaggacagcagcagcatcctggacctcgaagcggggggccaggaggaggaggaggaggtgctgctggcgcggagcaggacgcgcggggagcctagcgtggtcttccccgtgccgtccgaggactgcgtcgccggtttcgtggaggcggaggcggcgcacatgccgcgggaggactacgccgagaggctgcgcggcgggggcacggatctccgcgtccggacggacgccatcgactggatttggaaggttcacgcgtactacggtttcggccctctcaccgcctgcttggccgtcaactacctggaccgcttcctctcgctctaccagcttccggaaggcaagtcttggacgacgcagctgctgtccgtggcgtgcttgtccctggctgccaagatggaggagacctacgttcctccgtctctggacctgcaggtcggggacgcgcggtacgtgttcgaggcgaagacggtgcagaggatggagctgctggtcctcagcacgctcagatggaggatgcgagcggtcacccccttctcgtacatcgactacttcctccaccggctcaaagacggcggtgcgccgagcagacgcgccgtcctccgatccgcggagctcatcctgcgcgtcgcgagaggaacgtgctgcttgggtttcaggccctcggaggtcgccgcggctgtcgccgccgccgtggccggcgaggagcacgccgtggatatcgacaaggcttgcacccaccgcgtgcacgaggagagggtgtcgcgatgcctcgaagcgatccaggccaccgtgcctgcacagccgctgaaagctgaaggcccgagcagc

SEQ ID NO: 33581 - DNA, 1021 bp, Zea mays
  Clone ID: MRT4577_130632C.1
gccggccggtccggggtttccctacctcacacagtcctcttggttccagacggccagagccactaactcagccagcgagctgtagctctcagtctcagcgccggccacacattgagcaagcaacatgagtggagaggagaccagtatcacatcttatccgatccgatctacgtggcagcttccctgctctaacgagacgacgccacgtcagcagcgaagatcctgaacctatccacgagtggccgctgcaggccacaagctgccccggtggctcccatcccacgcctcgccgtgtccaggctttaagccacacgcacttgagctccaccgccactaccaccagtaccacaccactccgcgctagctgaggacggtacagcggcacagaggtgcgacgtacgacgacgacgacgcaggcgccacacatggcatcccagctctccgccgccgtgccccggttccacggcctccggggctacgccgcgcccaggtccgcggtggcagcgctgccgtccgtgagggtgggcaggaagaggtcgtcgtcgcagggcatccgctgcgactacatcggctccgccaccaacctgatcatggtgacgacgacgacgctgatgctgttcgcgggggcggttcgggctggcgccgtccgcgaaccgcaaggcgacggcggggctgaagctggaggcgcgcgactccggcctgcagacgggtgaccccgccgggttcaccctcgccgacacgctggcctgcggcgccgtcggccacatcctcggcgtcggcatcgtgctcgggctcaagaacaccggcgccctcgaccagatcatcggctagatccctacgtcgccgttgttaagatcagactcagcagcctcgatcgcgccgccggccggcaggtgcctgcaggtggtgactttgtaacgtgtgtgcgtgcgtacgtgtacattgcatccatcttggttccaatggacatatagctcctgttgctcctctaaaaaaaaaaaaaaaaaaaaaaaaaaaaaaa

SEQ ID NO: 33582 - DNA, 295 bp, Zea mays
  Clone ID: MRT4577_130633C.1
gccacgacaaccgctataggcaaatctggggagaagaagccaccgatcgtgagtgcgaacgggccgacacagtatctgcagcagtagcgcctgacatgtcggcctccggtggcggctccgaggtaatcgcacggtggcagatgtgctgatggggaacgcacgggctgctgccagcaagacgaagaaggcatcaccatctctggagaatccgcaagcaaagaccgaccgtgcaaaggtcgaactggaggtccaagcggtgccgtccccagcgaagtcccccaaattaccagttgtg

SEQ ID NO: 33583 - DNA, 639 bp, Zea mays
  Clone ID: MRT4577_130634C.1
cggacgcgtgggcaaagttctgtagattaaaaatataacatcgtccgcgctctggagagtctggatcctcctgaacctccaagcagcaagcgatgaatggagggacgcaagcaattagcctgatggtgcaccttgctgtgccatggctctgccttgcttcttgggcagctctgctaccagcgctactagcatctgcaaatgtgggtgcagcagctccgacactgagagcggagtacatgaatttgaacttcagcaccgcttcggcgacccccgacaagtacaagagcttcatcgcttctgttcgtgctggcttggtgagcaaagcggggggcaacagcagcgggatccccgtgctggtcgacgaagacgacccgctcgcgctcgaatcgtttctaaacatcactctggtgaacaaggcagggcgctccgtaagcttgaagatggatgtctccagagcctacttcgtggcttacgtagcagggcagcgctcgtgcctcctcaagagatcaggccgcacgttctcgtcggcgatctgttactacggtggcccgtggggaacaagttcggctcctgtcgtcacgcgaccgcggtccactcgcaggggcagtgaccgtgctgctgctgctgccggcgacggcg

SEQ ID NO: 33584 - DNA, 844 bp, Zea mays
  Clone ID: MRT4577_130635C.1
caggccggccgggccaaccaaacaaagttctgtagatataaaaatatagcatcgtccgcgctctggagagtctggatcctcctgaacctccaagcagcaagcggtatttttgtcctctgaattgtttttttcagagaattaatttaatcctctctggagcagtcgtctttccctactgctctgctccagtatttataaatttatgaaatcaactacactaccctcgttcttaaatatttgtggcagtcgtcgtctttgccacgaattcatgtacaaagcagctattcactatatataatatgttggatgtagatgaaaggagggacgcaagcaattagcctgatggtgcaccttgctgtgccatggctctgccttgcttcttgggcagctctgctaccagcgctactagcatctggaaatgtgggtgcagcagctccgacactgagagcggagtacatgaatttgaacttcagcaccgcctcggcgacccccgacaagtacaagagcttcatcgcttctgttcgtgctggcttggtgagcaaagcggggggcaacagcagcgggatccccgtgctggtcgacgaagacgacccgctcgcgctcgagtcgtttctaaacatcactctggtgaacaaggcagggcgctccgtaagcttgaagatggatgtctccagagcctacttcgtggcttacgtagcagggcagcgctcgtgcctcctcaagagatcaggccgcacgttctcgtcggcgatctgttactacggtggccccgtggggaacaagttcggctcctgtcacgcgacctgctgctgctgccggcgacggcgaagatcctggggtcgcg

SEQ ID NO: 33585 - DNA, 603 bp, Zea mays
  Clone ID: MRT4577_130636C.1
tcccggggcagctgtcagacaactgtatttcttgatgcttgaaacgacatccagcggcagttggtctcgctgctagtgttggttcatatgctccgcccactcatctgctattaccaaaatcgattatcacgatccctgatgcgagtcctctccagactgtaaagaacacaccttttctacagaggaatgccactagagctatctccagttggatcgcttaacttcaactcctaccgttccggccgcgtaccttcagataactcgccgctgtcttgctgggctacgctatattcccatacaacggcctcgtgcacactctcttcaatatctgctgattgaacgatctgccaagtcgggaagatcattgggcctcataggagtatcatctactagtaagactatgacaaggaaggcactcataaagataccaaggggcaagcagatctggctcaacattgcaccataaagtattctgaaaactggtacactgaaaccaaactggtgctctatgttaagttacaataacaacaactgttttcaaagctaaaaccttaatgcagccatagccactcacaaatctctcggagtcactccagaaccggc

SEQ ID NO: 33586 - DNA, 177 bp, Zea mays
  Clone ID: MRT4577_130637C.1
ttgttgttgttttataaaacaaatctggctagaatagcacttaataaaaaagacattgttcatatttcacagtttatcaacatgccgagtagtgaattgctacataattatgcattctgcgcatttaccgaatattcatgaatactctcttgtacataccattcgtctcaaggcatc

SEQ ID NO: 33587 - DNA, 410 bp, Zea mays
  Clone ID: MRT4577_130638C.1
gggaaccccaaaagggccccaacccaaatttggaattggggaaacccaaacaatccggtggggcccccaaaccttaaaaaaaaagggggggtttttattggcccccccggggggggaaaaaaaaccggacccaaaaaaaaattccgggattcccgggggaacaaaaactataggggcggccttttttgccctaaaaagaaaagaaccccattttttgggggggggggggcaagggaaaaaccttgttcctaaggaccgaacctggcgaaacccccgggcattatgagcctgaaccccccaaaagaaacaaatccccccccgttgggggccacccccctaataatgcgggggaactgggcaaaggggggggaattccccaggccccacaaaaaccccccaaacttgggggg

SEQ ID NO: 33588 - DNA, 385 bp, Zea mays
  Clone ID: MRT4577_130639C.1
atggccggggcgagccacgcgtccgtctactcgccgacaccccctcttttctgtttctccgtttctatcaaactccgggactgcgggttcatctataatacgatcacgaaatctcatatttctactttaactgttacaccgaacacgactgtaacactctcagagaactctcgttcagctgaggaatcctcatatacaaggtctatagcgatgacacagcctctgatacaaactcatgataggaatgtcagtatcaaacaatcctatacagcgacatttatttctaagctgcatccaacaagggagaactatgatgccctggtcacgcagcatcaaggaatacgcatctattactacacataagactgttgatgattgacaggac

SEQ ID NO: 33589 - DNA, 331 bp, Zea mays
  Clone ID: MRT4577_13063C.1
aaaacaaagagaagttggaccatttttttaacccccccgggaaaactggggcgggggggggcccaaaaggtggccccacaaatttttccgccgggggaaaaacctttatcattggtaccaagctggtccctacgggggggcgcactgacccctttgggccccccccgggatgccccaatccccgggggaggccccctggggctgttgttgccccccccgaatttccgtttggaggttcacggaatagggaattgtttttttgaacttggccagcttcatgggggggtactggaaccccggtttgggggggaacacaacccccagggccttg

SEQ ID NO: 33590 - DNA, 261 bp, Zea mays
  Clone ID: MRT4577_130640C.1
ctcccccgggaatggtatcgctcgctgggatatacgacatgtaccgactgagcctgctggcccccctgcccaacagcttgaataccgtgtccatacttccgattccgagcattaagcttgacccccagcttcagatgaccaggactaccacgtccagcgcgaggaataataatggctctctcgggcttatcctgtgccccaaataccagatgttcttcccgctttggatccaccactactgtgcctcttacacgccgtttc

SEQ ID NO: 33591 - DNA, 157 bp, Zea mays
  Clone ID: MRT4577_130641C.1
caagatttgcagcagatggattgtgatcctaatcaggcaagtaatggtggctgcatgcatgcagcagaaccatccagaaagcaagacattggcattttgagaatcgttccatcagatgccgacgctgatgctgattactggcttccttctggcgttg

SEQ ID NO: 33592 - DNA, 255 bp, Zea mays
  unsure (1)..(255): unsure at all n locations
  Clone ID: MRT4577_130642C.1
cgcgctgcgcncgcagcaactcgcgaaccgcatccacttctctttcctcctctcccttcttctcgcgaacaaaacacaccacacaaatccacggggggttttgtcacctccaaacttccgaattccacctcacccacccacagcaccgagcaactaaaaccctacctcacgactcacccagcaaaacaccgtgccaaccgtatccccaaaaccccacgcgcggagcactaaactctagccttgcagcgctacacc

SEQ ID NO: 33593 - DNA, 406 bp, Zea mays
  Clone ID: MRT4577_130643C.1
ggcagactactattgcttacttaataagtagtagagattataacactaattttacataaaaaactgtttcttttggctgaactgtaaagctccggtcgttgccaatctctgctcgacgatgtgctgcaccttcggaattccgccgaaaacgtcaataagatcgaagcaaggcaacagccaagtacgtcattttctgagtgctagtgcaagatcaccgcgacaaccacctcgcagtgtatggtgtggtgtccagtgtccactacactactcccgtgcctcaaaagttcgtggcgtttgcggcgattactagtgcagcagcaccacgtgatgcatcaggtcgcactgcaactctttttttttttttctgaatgcaatatcacacagttcgctccaaccaaacagactg

SEQ ID NO: 33594 - DNA, 660 bp, Zea mays
  Clone ID: MRT4577_130644C.1
ggccgcttttttttttttttttttggatacctctcttccagttgaattcaatggaattgcccacaggaaagagacctggctgggcacggatacctcacgaacgactgctgcctgctacaagtagacttggagacagaaaacagccgagaagcttttacaaatttgggagtcttggacccagccaccgcttcttgggctttctagacaggtcgagagaggctcggggatgtttaccagcgccatgattagcatgtgcagctggcaatgcgctcccaatcgtcagaaaccgactcgattacctcatcaggcgaataaagccaacctaggctcctacgagttggatgccaattgggcgggatatttggctcgactccgactccgactccgactccgactccgactccgacgatcttttaaacaacctcagaacagaacccgaactcttcccaggaatacccctatatatatagctgcctctgcgcctcggccttcctgcaccaccttccttttcacagccttcgtacaccggagaaccccgcaagaaacctgcagcaggtccgccgggcatggcagccgagaagcgcaccattggcatgggcatggactactccgccgtccagcaaggccgccgcggaggtggggcggtcgacaaccctgatc

SEQ ID NO: 33595 - DNA, 384 bp, Zea mays
  Clone ID: MRT4577_130645C.1
gtagtacgccggcgcggcgggcggcggcggcagcggcggcggcggcgacaggcactccatgctgaagcacctcttcatggctacggctacgggcgacgaggaccccacgtgcagctgcaccccgaacagcctcacgccgccgccgttgttctcgaaggccgccgcggtcctgctgtgcccgccgcaggtcctggagttgtggccgttgttcccacagctagagcacttcctagccatatgggcggcgaacggcaagaaagctagctagctaggtccggctgccggaggaggaagcgggcgaggaatagaagggaatcctacctacggccttcgaccgggagctaggataagatgtctgtgaggagcaggagaagagggaggatg

SEQ ID NO: 33596 - DNA, 851 bp, Zea mays
  Clone ID: MRT4577_130646C.1
ccggccgggaccgttcagtcccacctcgaccgcctcctctcccctcccccggctctgtctgttgacttaccccgtcgaggtaaggcactgggtgcttgaattcacggttttgattcagttgttactattcagttctgtctgaattgtttgatgctcgattcattattaggctttcaagttctgtaaattgttccctagtttttgtccttcacgcatatattactaggagtgttgctcttatgtcgcgcacctagctaagctgccaatcgtttttctttcttccacttttataataaagcagatataccaaatcaaatagttatacagtatatatcatcgcatcgcccacctgattaaattcaaattcaactaaaattggtgctcccatcttctaacggtgaaaacagagggtctcatctcctatcctctcgggtgaggccgtgggaccgggccttgtggtatactgtagttgatataattctgatataggttcgaatcctattgggtgcttcaatttagtttcggcatctcctgtttaattcgctccactgccagactcactcacatagcctgctaggcaatatctgtctgtgtattcttggtttagatacatcatgtttgcttgcctacttatatttattagcatggcatcttgtatagcttggttaattagtatattatattatttgttcctgctgcatctatctttatgtattcattcggcagttgtgttgaatgctctgatttgtcttgctcggttgctcttcattggtatgaattactagttacagatgggtgaacactgactgcacggtctctgttttcttgatgactgactatggtggctttgc

SEQ ID NO: 33597 - DNA, 1752 bp, Zea mays
  Clone ID: MRT4577_130647C.1
ctcctgccggccttgtatttacgccccagtccccagtctctccacctagaatcgaatccgcgatcttcttctgctccaagcaaagccgcacccagacctcgacggacggcgagcagcaagagggcaagcctgtaccctatcgactcgaacctcggagcggcggatcggtactcgtaggcagtggcggacatggcttcggcggcggtgatggtgagctcggcgggctccctgctggcgatgctgcaagagccggcgccggagctcaagctccacgcgctcgccagcctcaattctctcgtccacgccttctggcacgagatctccaccagcgtctcctccattgagagtttgtatgaagacgaggagtttgtccagaggcaacttgcagcactagttgcctctaaggtatttttctacttgggcgagctaaatgatgctctgtcatatgcacttggcgctggacccttgtttgatgtttctgacgactctgattatgctcaaacactgttagcaaaagctttggatgaatatactgccatccaatcaaggggcactggggaagaaaaaacgatcgaccctaggctggaggccatagtggaaaggatgctggacaagtgcattcttgatggaaaatatcaacaggccatgggtatgtctgttgagtgccggagactggataaactggaggcagcaatttcccgatgtgataatcttcatggagtgctttcatattgcatcaatctgtctcaccaatatgttagtcaccgtgaatatagattagagattctacaatgtcttgtcaaaatatatcagacattgccaaatccagattatttaagcatttgccagtgtcttatgttcttgggtgagcctgaaagtgttgcgaacatgttggacaagctgatttctggaagcaaggatgatgctctccttgcataccaaactgctttcgatcttgctgaaaatgaaaatcaggctttcctcctgaatgtgcggaatcaccttgatgcactgagttcacatacttctgcccacgtggaccttgacagcggaccgactgtaccaagtaatcaaactaacgctgctacagaactgtctggggatgtccagatgagagatgacataaacatgccaaacggcagtgctaccactgtggattcaaatgcagcaacacatgctgacaggctgacgaaaatcaagggtatactgtcaggagaaacatctattcagttgacattgcagttcctatacagccataatagatctgatcttcaaattttgatccctattaagcgttggagacatgtcactgcccagcaatatgcggtttgcaatcagcccctccaaggcctggacaacagttgttaccttcttaggccccccctgtttgcaagggttgtaccccctatttgaaagttgctcataaggccctgggttcttaggttggagttgtgagaatttcccttttctgtttctctttggccatagttttctgagatcagacaattttttcggggatctgccctaaaggaatgtgtaagttgcctacaggggtctattttctccatatttgggatatatccttatttatgttgtcatcccccagctttcttttgcaaggtggttgcatgaatttagttgtgtgtcaagttccctttcccgaattccgcaatgttggttagcaaggcgtttttttcccccaaaaaaaacacacaaaaaaaaaaaaagttatgagggtgattaccaaaaggt

SEQ ID NO: 33598 - DNA, 292 bp, Zea mays
  Clone ID: MRT4577_130648C.1
gggaaaaaaaaaaaaaaatgggtttaaaaaatttctttaaaaaaagggccccgggaaaaaaaacacatttgggaccaaaaggggggtttgtttacccgcatttaaatttttatggcaaaaatggccgaccttttaaaattttttggtgaaaaaaacttttttccaggtttaaattaaacttgggtgttaaaaaataagatgggttccattttttacgcaaaaaaatgggggggggcgaaacttccgggtttaaaataaatgttttttggtaaaatacccctaaacacattat

SEQ ID NO: 33599 - DNA, 485 bp, Zea mays
  Clone ID: MRT4577_130649C.1
acaaggaaaaagcgagcttgcgggggcaagggggagggcgccgggccccagggccagggggggggggaaggaaaaaacggaggggacggggacgaccggcaaaggagggggggagggagggggggggaaaaaacagatgccccgccaacccaaaccaaaggccaaccagcggcaaaaaaaggcaaaagccaaagggggaacccaaaaaaaaagggggggaacccagcccggaagacaaaaaggggggaaaaccgggggaccccgaaaaaaaaggggggcccccctgagggcccgggggggggggaaaaaaaaaaccgagcaaaacgggggccccacccaacaaagagccggaaaagggggacaaagaaaaaccaaaaacccaccgggggaagcggctagcccccgaacagggggggcacaccggcaaacggcgggaacaaaaggaacccttcaagccgcgggaaaatgctcgggcccccgggcca

SEQ ID NO: 33600 - DNA, 1455 bp, Zea mays
  Clone ID: MRT4577_13064C.1
ttgggtacctcgaggccggccgggaaggatttagcactccatacattttccctgcaactcggtcggttctccttccccatatcgttcctctcctgatacgtggcgaaggaggaactgaacgtctgaatctgaaccctttcgttcctctcctattcgaactcctcgcagccaaatccgatggcggcctcatcatcagcgggaccctcggcggtagacgcggcctctctcgccgcggtggcggaggcggcgccgccggaggagatgacgctggtggtgaagtggcgcgggcaggagcaaacggtgcggatggtgggggacgatacgctcggtgagctcaaactgcgcatctgcgaggtcaccggggtgctccccaagcgtcagacgctactctaccccaagctcatacttaaggacatggacgactccaccctcctctcctccatccctttcaagcccaacgggaagatcagcatgatcggtacaattgaagaagaaatatttgtcggccaagaagatgatccggagttacttgacgattttgactttgagcagaatgaagctacacccattaaggataaagatgtctacaagcaaaaattaaagcgacgcgcaagtcgttataagatcaagctcttgaatccgtgccgcaaaggaaagaagctgcttgtccttgacattgactatactctgtttgaccataagtcaacagctgagaatcctatggaactcatgcgcccatatcttcaccagttcctcacagctgcatatgcaaaatatgacatcatgatatggtcagcaactagtatgaaatgggtggagttgaaaatggaacaacttggagttcttagcaaccctgacttcaaaattactgctcttatggatcacttggctatgataactgtgcaatctgaaaatcaaagtagaaagaagacttttgactgcaagcctcttggtgtcatttgggctcagttccctgagtactacaacgaaaagaacaccataatgtttgatgatctaagaaggaatttcgtcatgaatccacagaacggtctcgtgatcaagccattcaggaaagcgcactcgaacaggcatgatgatcacgagctggtaaagcttacacactacctgctttcgatcggagacctagaagatctcagcaagcttgaccacggtaaatgggagtcctttgtagatgagagcgtaaagagacgcaagcgctcttagtttccgtcagtatagtgactgtcagaaagaaaaacagaacacccatcttcttttcttttcagtgctatggatacctcgcagattagagtaaccgaatgaccaggatttactttgaacaatctggggcttcagcctcgtcaagttacagtgcttcctgcttcctgaatctatgctcaaaacttttaaacaaaaaaaaaaaaaaaaaaaaaaaaaaaaaaaaaaaaactcgag

SEQ ID NO: 33601 - DNA, 1107 bp, Zea mays
  Clone ID: MRT4577_130650C.1
agttgaccctgatgcttcttcaagattaaataacccagattcttctaaaatggacaccaattttttgaaagaggcctacccattacacacaccaaatccatccagtgtgattgaaactgtgtatgaaccgatggcgttggtgacaatctctcccccttttatatgttcagatggtttgtctttcgcacccgaaattagatctaagccaggagaaatgtcagactgtgaagcagagatggtcacatgctcaaacaatttttttggtaatgccgagcaatctgctaaacttgccagcagtgatgacaggccagaggctttcacaatgactgagagcactacaaactgtggggatgaacaattgacagatgtcaaagaacctgtggccagtacagcaaaagaacagttatcgaaagacatcgagactatgccagataaaaagaagggtgagggggctctattctatgaacctcctcgattccctggtttggatgtcccgtttatcagttgcgatcttgtaacttctgctgatctgcaagaatttagtccccttggaattaggcagtggatgcggtcgaccatgaatgtcccaactcctttaagattatggggctctccaacacatgatgaaagcccagatgcactaaaaactgctgctgaaagcttcccatgcacaagttcaataatgaaaaaaaacagagaagtctattgtcccctactccagatgaaagaattgagaagaaatctgggattgcaaagggggtgacggacatctcctatatgataacggccacatgttccatgaatgcaaccaatgatgaagacattgttactgaatcagctgtgtgtgctaagcaaccttctttgaaacatctagacaagaagcttgagttctctgacattaacaaggaaaactctgatggagcatctgaacaggccaaagatgcacaaaacgcacaactcgtggatgagcaacattcctcaccaaatgttgtgaatcctaacactgatttacaagacaatatagtaagtacatttaaataaattatttggtgatacttagccagttggtagtaaccatgctcctataaacgaaaatagtgtggacat

SEQ ID NO: 33602 - DNA, 862 bp, Zea mays
  Clone ID: MRT4577_130651C.1
cctgtgcggcgctcgagccggccgggttcgggacttttggaactaagctattagtactgtcagtgttggatgtctggatcttgcatttttggagaaataccaatttacctcgttcaaggatgcaaaaaaaaaaaaaaaaaaaaaaaaaaaaaaaaaaaaaaaaaaaaaaaaaaaaaaaaaaaaaaaaaaaaaaaaaagaaacaaaaacaaacgaaaaaaaaaaaaaagaagggccccccgggccggggccgctctaaaaaaaggggcccccgggggcgggggggctagaaaaccggggttcccccggccgtggaccatttagggtgggcccgttacccaccccgcccaacaggggggggccccgggcccccttcccgcccgtgggggtccaacttcgcggggggaaaggccccggcgttacccaagggggggggggggaacccccgccccccccccccagttggcgtatggccgaacacccccttttcgatgggggtgtcaaatgaaagggcgccctcccaggccacctcaacaaaatggggcccacccgcggggcaaggggccaacccatcccccttatttccgcccatctttgcccaaaatctgctcgatacccgctcgttttttttaccctctccggtacgaacgagaccctccctccaacatcaacagcccaccccggcaatgccccctcgctgaccccctccgcgccccacggccgccccaaatccaccccccctccccccacaccaccccccccctcccccccctctcccccccccccccccccccccccccctaccccccccccctcccctcttcccccccatccctctgacccccccctccccccttcccccct

SEQ ID NO: 33603 - DNA, 240 bp, Zea mays
  Clone ID: MRT4577_130652C.1
catagcggagcacgcatgtcaccatatgtattaattgaaattggctgcaccagcgccgctgatggcagcacatgatgtatcccatgacatcacacaccacgcgagctatagggccctaggtaaccattcgaaagtcccagactggctaatcaccgcaggaggaggcctactccgctcgtgtccccctggacgcatcagcaagtcaggttcgggccggagtgcatatatagaatcccgcaa

SEQ ID NO: 33604 - DNA, 223 bp, Zea mays
  unsure (1)..(223): unsure at all n locations
  Clone ID: MRT4577_130653C.1
gagagctttaccccttacctgtnacctgaagacttaccgaacataccgaaccgtnctacctacctacctacgnngtaatacgaccgacnnccttactagantncatactcagnaggncgtgacngatngaangcgcgagaggttngnnggtcatggncgatgctgnacggagggtacncgcacctaccaaggtacctacatacctacgtacggtgacagggat

SEQ ID NO: 33605 - DNA, 266 bp, Zea mays
  Clone ID: MRT4577_130654C.1
cggacgcgtgggcaacgtgcacgttttgcctcacacccacgactactactgggggtttaagaccatagagcggggctacttttgattcaacaactccatttacttggcatgtgggcacataaagcaaggatatgctcatttctccgctcttcttgatcccataaccccaaaatcatttattttgaacaggcatttcttcaaagatgggggaggaacccaaatgacatgatccatgattcagcgaagggggctttatcatcttttgg

SEQ ID NO: 33606 - DNA, 164 bp, Zea mays
  Clone ID: MRT4577_130655C.1
attattataaaatgtgaagattacttgtttacaatcataatatgccttaggagctcaatacatcgtcagatgccaaggggggataaactaaaattgttgtggtttcatgtcaaaaggcatattagagcacatttaaaataagagcatgggcagtgataatgttt

SEQ ID NO: 33607 - DNA, 148 bp, Zea mays
  unsure (1)..(148): unsure at all n locations
  Clone ID: MRT4577_130656C.1
ccaagaaacgccagaagncccggggcagcgttaatgaaacacaaacgtgggttcattaagggaaaatataaaggcataatcttacaaacaatattgacagaacacggaccaagctagcatcaagcaacaacataaaaaaaggttggca

SEQ ID NO: 33608 - DNA, 528 bp, Zea mays
  Clone ID: MRT4577_130657C.1
aaaaaaaaagagtttttaaaaataaagggccctaatatatggcaagaagggggtttttttaatttgtcaaagacacaagccttttttttttttaattaaaaggccccggggccaaataattgaaaaaaaataaaccccccccaaaaaattttaaacggggggggcaaaattttaaaatgcaggcagccccaaaagggggcaagtttaccatttacccccccccattggccttggcacctttgtgggggcccttcaagggaccattggggggtttatccaaggaacgggtgttcccccccccatttttgggggaaaagctttttttttttttgccccaacccccgttggttttctcacccccaaaaaaagtttttttttttgacaaaaaaaaatttgggggccctttaccttaaaaaaaaaaaaccttgtttgccaaaggaaaaccttgttaaccaaaaaaggggggggtacccccggaattatcccaaggggaggggtgtttttaaccaaataactgggggccccccc

SEQ ID NO: 33609 - DNA, 520 bp, Zea mays
  Clone ID: MRT4577_130658C.1
atacatcatccattgtgagtaaaagggaaggtggaattttcccacatatgccccctttctcttgttgctagttcaaattttcaagagcaaagagcatcatcatcatcatgtacagataagagcaagttcttttttttaattttttttagggggataccagagctgaatgcaattagtggcaagcctaaaggtcgggatggcccggtacagcctcgtcactggatgcatattcttcttcgtcactcatctcctcgtcacttgacttctcttctgtggcagctccaatgtcttccgcctttgcgtatttctcacagtattctttgactctctgttcataagccgtcttgtcacgcatcataagagccgcagcctccccatttagtggatcagatgggtttgggtacagcagaagcttggggagaaacacttccaaatccttcaccaaatcgaacatgggactccatgtttgggtgataacatcaaaacacactggaccctgacatctcatgaacattagggc

SEQ ID NO: 33610 - DNA, 392 bp, Zea mays
  Clone ID: MRT4577_130659C.1
gggcgaaaacatagcataaagccccaaggcaccggtaatttttggcctttttaggtccaaaaaaatttctgaaaaagaaccaccccgacaaatccggaaatttaaacatccttaaaatacgggaatttttaggcacaaaactgtatgggttggggcacttaaacaaaggatttttctagacccattactggaataatggggatataggggggattttttttgaaacgtaactcccatgaaggggactaaaaaaaattttaaccttaacctcctcttaaaaaggatgacactggcccatgcccattaatcctgggaaggttgctttaagggggcccctgggaaagtatggtggggccgaactggttcttccttccatgggccaacactggaat

SEQ ID NO: 33611 - DNA, 406 bp, Zea mays
  Clone ID: MRT4577_13065C.1
ctaaaccaaaaacatataggggggagtcctacaaatgcactgcggagacccatatacagaggacaagactttccccagcctttcggactcccagcccttctaagcacccctccgaggggatgccatgttaccttcccaggtaccgttacaaaaccatagcaggctgtggtttcaagcaaacggacaacgcaggcgtgagctcattaatcagtagacaccatctaattaacgaacctacctaaggggctgggcctcactactagcaggcagagaggaactgctgtacatcgttggactcatggacctaggcggctagcaccaccctaactcaggcactgacgcactgatgctcgggaccttcgatctgttagggagcaacccgagtccggatgcaaggggggaaaca

SEQ ID NO: 33612 - DNA, 405 bp, Zea mays
  Clone ID: MRT4577_130660C.1
aacacatgtccgaccacgcgtccggtttgacatagtttgtcagtgacctattcctggttggactgttctaacaacagtataaccagattgctacaaacaccttggcgcgagtggctcttctgacacatgcagtctgcaatgtgtagaaacgtgttcttgtcatcagattctcaatcatttgcttttggcaacagacttaacatacattgtggcattggcacctcgattgtcataactgatgtcgctacgtcctccttacattaacgctaagattgacgacgacacaaggaacaagagcgcattactgctgtgaatacaaatctcgagaccttccatggacagaatatcgtctactatcacgacctacgtctatagcttgtattgttctcaccttgaatcagtcag

SEQ ID NO: 33613 - DNA, 344 bp, Zea mays
  Clone ID: MRT4577_130661C.1
gtgccgttgacgccgttactttggagaaattagagtgctcaaagcaagccattcaatgtggatgcatttgcatgggataacatcataggttttctgtcctataaggaaggcattctcaaacggcgtagtgttgaatatctacttatgggaggaagaaaaattaatgagaccgaatggcaagttgtatagtgatcaaagaattatataccgcgaatgttttttggtggatggatattccttggataaacaatgtttactgggggatgggctcaattaaatctttccaaaaccttcttgacaatatttttctctctctttatgaagtaactgttgacccagcttta

SEQ ID NO: 33614 - DNA, 192 bp, Zea mays
  unsure (1)..(192): unsure at all n locations
  Clone ID: MRT4577_130662C.1
ggaacttgtccgaagataccctgaagctatacttctctaggttgagcatcatgcaggtttgatgaagacattaaaaaacgccagttaggtcatggaggattgaagcactatgacaggatttaaccatgatatcatatgtattatattataatgtgtaatcttanaaaaactagtcaaattatcatgtaagac

SEQ ID NO: 33615 - DNA, 214 bp, Zea mays
  Clone ID: MRT4577_130663C.1
agggacttgcctactatggatggggttcataacctgagctgcctgaactatttaatactagtgactatattaatgaaaatagtaagtcaatgctctgatctttcagaagcaaatcgttggcgttatgataatttgtgacttaccttgtcttatgttctgatccttgctaatgatgttaatattggacattttctttgactctaccttttgagtc

SEQ ID NO: 33616 - DNA, 174 bp, Zea mays
  Clone ID: MRT4577_130664C.1
atttgttataagaatgactactcaagagcgagggggaattgtacagccttagacgtactagtcctatggccaatcctctcttatcctacaacttctcttaaattcattttcatctctatttaaacttaaatttttttaaattatctctcctcatataacaacccttcatcaaac

SEQ ID NO: 33617 - DNA, 243 bp, Zea mays
  Clone ID: MRT4577_130665C.1
aaaggtttcatcacgccgcccgttgggaagggagctccgaggcggcccgtcgctgctcgtcagccgggcggggtgagccaatggcacgggcccttgatgcgcgaacaccctaactgtggttcggttcgtgcggtttgcagaggcgcctgttgctagcttggattttgactaaattgcgttgtatacattatccatcacactggtaggtttttgccactgtgttttcgaattaagtgcgatgac

SEQ ID NO: 33618 - DNA, 200 bp, Zea mays
  Clone ID: MRT4577_130666C.1
actggacaaatatgcgtaaccaaacattggctgacgataacctccctcactgtggaatagggcacacccccacacaaatatgacgaggggtacggaccatctacgcattagataaacatgcggttaaatgacaccattgattacttgtacgcggcgaggggagtaactcacggtgacgaccctgagaaataaaggagggt

SEQ ID NO: 33619 - DNA, 949 bp, Zea mays
  unsure (1)..(949): unsure at all n locations
  Clone ID: MRT4577_130667C.1
aaacaggccgcccgcaggaaccgggccggaaaaaccgggcgaacccacgcgacaggcttccttggttccttccctccctctcctttgatcctttccggcctggcctccgcctttcccccagcccaaagcgcagcacgaagcaacccttcccttccattccttggccacgtaacccaattacccaacgcatcgaggagcgcacgaaggcaaccgccttcccatcccaccgggcatcggcccatctgatccgatcaggctagatcctgccggtgccggtcttcgcgccgcctatggccgaaggcgacgcgcccgcctccgcccccgccgccgcggcggcggcggcgtccccgcggtcgcccatgccgcaggagacgccggcgatgcagaagcggaggcagcgggggctcgtgtcgcgggtgtggaagggcatcttcggcggccgcgaggacgtcgagaagctgctgcaggcgctgtccaaggaggaggaggccgtgcgggcgcgccttcgccgccgggcccgcgcctcccgccagtccgcgcacaacgtcctcgccctcgccgccgcgctcgaggtggttcccgttgcgcccgccggcttatctatcccatcatacatagcaaacaccgcacgtntctncncacttcgctgctgtatttctgcnccnncaccgtagaggatgggaattcctttctcgtagggngctgaatccggttccaacagtngaatnaggaacatgatgagcaacctgccaggccatcgtgttacggtagtcagcaatagccgttgttatnattgggcatntatngncgcctcgcatcacacgcgatgcttttcgtaanttcagcgagtagagttagtactgttgctgaatggaatcgcattnggatcngctcatgagtncncctncagatctaggccctttgagcaggagaaaattgttttttgaga

SEQ ID NO: 33620 - DNA, 970 bp, Zea mays
  unsure (1)..(970): unsure at all n locations
  Clone ID: MRT4577_130668C.1
aatgcctaacaatggcttgcctactgtgctggatcccagcataagatacagcctgttagaagagcaacgctgctaacctggtgttgctatgattctatacgttactggtttcatcctcatgcttccgattgcaggtaccccatatatagaattccaacagggccaacattgaaggatctcgnatgcctgttttttgacattccattgcctagcaacgccccgcgcagattgtgaccctcctacgccagcatgccctggctttggggggatcaaccgctgcacagctgcatctgggaagctatctttgcctacctttgggctggcaccgtacaaattccgtgcctccatttggatacctgacggaacccaagaacaggaccgcgtcacctcactgatgcaggaggctgacagctggctccgcagaatacgagtagaccatccggacttccggttcttcgtctcccgttccagtacgatgtggagatgactcgcggctgtaaatggtttttcttttttagtatgattaccgcctcgcccgtacaaactgaacccccttctggtgcaccaagtgccctctcgtaacgggggttgtatgaattataagcctgcatttttaacttttttcttttcttccgtgcctccaataagttgtaactgttgtaggtttgttttgtgggaaagtaaagatggatggtggaaaaaggcagatgtagaactggaatgaaagaggcaaaaataggacaaaattgaaaggtaactattagagttgagaagtaacagtgtgttcattcatgtattgtattggatgtcgctcaccggagtccagaggtgccatggacgaacatgctgagcctatgttacccccaagtacaacgtttatttgttttcataatataggatgctgatgatctttctcatgttatagtgcacaagtccgtcagtcacctgtatgcgaaaaaaaaaaaaaaaa

SEQ ID NO: 33621 - DNA, 801 bp, Zea mays
  Clone ID: MRT4577_130669C.1
ccggccgggacatcatacctgtgacatcctcgtgactttgggcccaacttccatcttccatttatccctccagcaataccgtacttgacttgacaacaccactctcctataccatcaacttcggaacataccaagtattccatcaagctttctccccagtacttcacccgtctactcgccgagtgtcgttcatcgcgccggctccggaaccctttggatacccttcataacccgacatcggaaactactctaaccgcccatcatgagtagccctcgtcgtagaatagagacagatgtcatgaagatgctcatgagcgactatgaagtcacacttgttaacgacaatatgcaagagttctatgttaggtttaagggaccggctgaaactccattcgaaggcggaacatggaaggtccatgttgagctgcccgacacgtacccttacaagtctccaagcattggatttgtcaatcgcatcttccatcctaacatcgacgagttgtctggctcaggttgcttggatgtcattaaccaaacttggtcgcccatgtttgatatgatcaacattttcgaggtcttcctcccccaacttctgcgataccccaacccgaccgaccctcccaacggcgaagcagcagccttgctgataagagaacccaagagctacgatgctaaagtcaaagaatacgtccagaaatacgcctctaaggaagccgcagacgaagccggagccgagagcgaagatgacgacgagctatcctcagttgccagctttggcgacgacgacgacgagcagcaggc

SEQ ID NO: 33622 - DNA, 559 bp, Zea mays
  unsure (1)..(559): unsure at all n locations
  Clone ID: MRT4577_13066C.1
attgaagagtgagatgtatgtatgattagcctggcaacacgtgtatagttttgattttcagtcaatcacatattcatgtagagagaagaggacagaaatctatgctctcctatcaaaaacatgttgattgatgctcgaaagaataaacggaattcatatcctcaaatccctcaaaaaaaaatggagacgccgactgccgtttccctcgatcagagtgcgggatctctgctctcctccgaaactgccgtctcagccacctgcttattctggccttcgtctgatcgcgccgccgccgcctatctctggccttcctccgacgccaacgccgacgccgcggagtgggaggcggcttcttcggtctgaaatgactcgaggtccgcagccatggcgcgctcggcccgtagtataggctcgtagtaggcggcgtgcgcatccatacacttccgcagagcggccgtggcgtcttggcacagctccacgacgtcgacgctgggaccggcggncttcggcttcttcacgcactttttccacgcgacaaactcgtccttgcagccgccgc

SEQ ID NO: 33623 - DNA, 356 bp, Zea mays
  Clone ID: MRT4577_130670C.1
tttctttttttgcaaggaccatccttccaagaggcaccgaacacacacgaaagcaacttttttaattacacaggcagctaccccacatggcgcagcagcaaatgcaaaacaagattcagcctcactcattagactcacagctacgacacattccccacccactcataacaaggcaacacctaacctatgaggaaggctgcgggggcaaagggattacacaactgtcatctgaaacacataaaccccgtctataacctccaaccaaaactagacgcgggagctggcggccacaacccacaccatggttatcatagctgaggtagaaaactatctactccttaaaaagccaccccgag

SEQ ID NO: 33624 - DNA, 334 bp, Zea mays
  Clone ID: MRT4577_130671C.1
cccacgcgttcggcaagactttacatatgatcggctcggagcgcatcatgtgagggcgtgtcacaattgaccggatatcgctttgaagatccttacttggattaatactgatgactgcgaaggaacctatcattgccctgtacaagatggcattaacggacgagcctattatgactacatctcgtctgcgcacggatgaactactgtgtgtctaacatctactgataatggtctatattaccctgaccagacgacgtgtcattcggtggagattgatgctgaatatgatcattgggcagttcgatcatctttgtacgagctgcataggactggt

SEQ ID NO: 33625 - DNA, 277 bp, Zea mays
  Clone ID: MRT4577_130672C.1
acattacacgggcagtcccctctctactctaaccactctctctctcgtatcatctctggaagcagaagaaatcatccgccctactagtctactgctacggtactactctactacacagaagaaaaccccttttttccacaaaatagcgaaagaaaaagtaaaagcaggaaaagggcatcaaatcctgtgatggtggcatccggggatcttatctaggcgagcagggccgccgcacccagcagcaccgcgacggccgacgacgcgatcacgcccgccg

SEQ ID NO: 33626 - DNA, 300 bp, Zea mays
  Clone ID: MRT4577_130673C.1
cccacgcgtccgctcccggtccggcagcagacatcgggggtgcagagaggtcgaggtccggaggccgcgagttggagcgccaccaccagcgagtgctgcaatggcgggcacggtgacggtcccggggtcgtcgacctcgtccacgccgctgctcaaggacgagctcgacatcgtgatcccgacgattcgcaacctcgagttcctggagatgtggcggcccttcttccagccctaccacgtgatcatcgtgcatgacggcgacccgaccaagaccatcaaggtgcccgaaggcttcgacta

SEQ ID NO: 33627 - DNA, 394 bp, Zea mays
  unsure (1)..(394): unsure at all n locations
  Clone ID: MRT4577_130674C.1
tccgaattccctttcgacccacgcgcccgcatcgtaggaacaggaccacataacagaaaggggcacatattaaggatttttgtgcctcgacgcagggcaacataaaacggaccagaggaagacaaaggcacgttaccagcgcggggagatacggggacaaggggacacaaccgaagaggactgacaataatgcactgcaaacgcgatccggggaggggaggtactcgcgctctcagggccaagaggagggagctgccggactaacactggcaggatctgaaacatanccaaaatactgacacttcgcacaaacagtgttgattcacaggatattatcttaaccatntataggtccctgacgagacaatgtcaactgctcactttcttgcaaaac

SEQ ID NO: 33628 - DNA, 1910 bp, Zea mays
  Clone ID: MRT4577_130675C.1
gattggaaccctcgaggccggccgggctcgtggacgtctccggcgcccaattgtatagtagcccgcgcgctctagcgagaagctagcgcgccatcgctgccggcgtcgtgtcatggaaatggtagagtgctccctcgttgctacacttgctccgcgcccgctgcccggacaggttcggaaggccttgccccggccggcggcttttggggcgagagcgagactccgcgtgcggtccgtgggccgagaggagcctctgcatccgcagcagacggcagtccgggcttccgggtcggatcacggaagccgggcgctggggcaggctgcggtggggttcgccgccgctgccgttgtgtcactaaccgggttctccggggatgtgtccccgctgccgacgccgcctgcccgggccgagtcgctcaccgtcgcgttccccgtctccaaggcgcgcgaagtgaacagagtgcagaggacgctggtggagacgtgggggctgatccgtgagacctttgttgatcccaccttcaaccaccaagattgggatcagaaactacagcaaaccatggtagagatatttccactgaaatcagcggatgccgcctacagtaagattagtgggatgctgtccacactcggcgacccatttacaaggatcatcagccccaaggagtaccagagttttaggataggaagtgatgggaatgtgcaaggggtcggggtgtttataaacaaggagccaagctctggacgattgcttgttatggactgcattcagggaggcccagcagatcgagcaggcatacatgaaggcgatgagctagtcgagatagacggcaaaagtgtttctggtttggatggagaggctgcagctcagaggcttagaggccgtgtaggaacaacagtgaaactgaagttgttagatggaactgacgatgaaaggggtgggggtttaagacaaaaggaggtccagctgtctcgtgaaattatcaacctttcacctctgtcaactgcaattatctctcatagaacagacgatggccatgagtgcaagactggctatgttagattagcttccttttatcagactgcagcagctgaaatggaaaatgccgtaaaaaggatggaggatatcggtgtccagtcttatattctagatctgcggaataacccaggaggtttagtaaaagctggtcttgatgtggctcaaatttggttggatggagatgaaacccttgtcaacactattgatcgtgaagggaatgtgctaccaataaatatgatccaagggcattcattaacgcatgatccccttgttgtgcttgtcaatgaaggaagcgcaagtgcaagtgaaatcttggcaggggcattacatgacaatggacgagctattctggttggccatagaacctttggtaaaggaaaaattcagagtgtgactgagctggacgacggatctgctctgtttatcacagttgcaaagtatctatctccagcgctgcatgaaatcgatcaagtaggaatccaacctgacatacaatgcagccctgacatcctttctttgccaagagcgccttcgctaagagaaaacagcaacgccacaaatttggagatggattcgtgtatcatggtagcagaacaagcgttggaaattcagcaaagcaagggttccgcttcttagatgcactatgggctctgtacattatttgcattctacagtagattggatagcttaccttagagacttataaagttctgtagcggtatatagagagaggctgatcctcacatgtttcattttaggcattatctattcggtgattcatgggaatgtatataagttgaccttgtcatatatctgtgtcgggttcattcttgactatccatactcagaaatataacgtgcaattaggcct

SEQ ID NO: 33629 - DNA, 133 bp, Zea mays
  Clone ID: MRT4577_130676C.1
gatcgtccgtggacgcgtgggtttatacgtgcatactgatgactagctgtcggggtagggcaaggagagaggagaggaggaccctgaggagctcgtaacggaatcatatcagatggtgcgtcttcagatcaga

SEQ ID NO: 33630 - DNA, 248 bp, Zea mays
  Clone ID: MRT4577_130677C.1
ttttccttacacccacacaagcccaaatagcgccgggatcattaaatgaaaggactgctactcaccacactgaccaaacctgcaaaaccgaccataataagggacaggtctctttacaacaccccctgagcgtgccaagtaaaccaccccatattcagcaccaccacataaatcacctacatggtgcaccactaacgttcaatggaacctgacacaaccaccatatgaacctctaagccaagcccaaa

SEQ ID NO: 33631 - DNA, 313 bp, Zea mays
  Clone ID: MRT4577_130678C.1
aacatcttcatgcacaccttcatctccaccacctcccaacccaatttcaaagaacatcctccctctattcatcccaataacaacctctaccagtccttcccccacctcaataactaacaatcagcaaaaccatatgctctactcaactaacacacaaatactacatatatatatatataccctgtgtgtcaattaatgcgttctaagctccttctcatgcaccttctttcttcctctttccccctcttattatatactgtaacccttgtctttcaacctcctcttctaaaaaccatatcttctctttccatac

SEQ ID NO: 33632 - DNA, 393 bp, Zea mays
  Clone ID: MRT4577_130679C.1
aaagggaaccaagtttttttttaaccaaaaataacatccttgacaacaattttgagggggggacccttttttaaaccctaaaaaaaaaatggtgtgatttccatcccgaaccctgggaatgtcaaaaacaaaacgaaggaaaaaaccctttggagggcgcaacccaacattttactacaaaacaaaatctgcccacgcttatatggaaaagctgttggaaaaccccatgggaacaagcccctgtgccttatggccggaaacggcccacggggtggggaaaaaaagacagttgggaatttccccgggcccctttcgggttttaaaatccggaaggacactcattcggagttgcaccgatcttaaaccggcccccagcgcggttccgaatatttt

SEQ ID NO: 33633 - DNA, 141 bp, Zea mays
  Clone ID: MRT4577_13067C.1
tcgagccggaaatttttgaccaatgttatgcaatagtaccagttcgttagggggggaaatcgggttatcttaggttgtttaatgtttgtgtgctgttttagagctgaggaaaagaaatgctgaaaagaatctcacatctta

SEQ ID NO: 33634 - DNA, 352 bp, Zea mays
  unsure (1)..(352): unsure at all n locations
  Clone ID: MRT4577_130680C.1
tctcccctttttttccttttatcagcaccgaactncnctgtgggatccggtagaattattaattttttttcttgaacacacaagagagtggcgtatcattacattaaaaggaagagaaaaaagattacaaaatacaaaaaacaatcacaacacccacacttacaagcacaacccaaaccacacacaaagatgatctatgacaacaactcaaagatggtcatgatttgtaagcaagggtaaacccttcgctccagccatgttctaactccatagctctggaccaagttactactgaacgaatgcaatcatatatccattgcttgagagctcgatgatgtgccctttttcctcc

SEQ ID NO: 33635 - DNA, 534 bp, Zea mays
  Clone ID: MRT4577_130681C.1
gctggcacgcctgcaggagccgggccggaattatattgccgggtcgacgagctctttagtcagcgggcgtccttaagttggtcgttatgctcatgccgagaggcaaaaccactacaagcgtacagctcctaccgaattcatctcattagtagagagagtgtcagccatgacgaacacaacgcgctcattgttcgtgcacccaatcactggatgcaacaagacagcagggacacagtgcactgcctgctctatcgtagggaacctccacagccataccgattggatacatacaaacagcctaatccaggatgatgacaactgtaagaatctgaatacctggggggaatgatcggtgcctcctgctgatagttacttatatgcccgcctattggataatttgtcagcttaaacactgaccttactgtgagacctaatactatcgtccttgacagagctgtgaacctctacaactcaattctgttagagaacgcacacaaagtagaccacgcggacaatgattgtacctgaactcta

SEQ ID NO: 33636 - DNA, 332 bp, Zea mays
  unsure (1)..(332): unsure at all n locations
  Clone ID: MRT4577_130682C.1
atttcgtggncccaagatagtggagggcattattttttgcgcaattccaagaaaactcgtgtatatagcaggggatacaaaataaaaggtactacaaaatgtggcccgcttaagtgttgccaagcgcaaaaaaacaggggggcttgtattacaaggactaggaccaggccaacaacacattggtaactaaaaacctatgacatactggtcaacagaaatgcgaagacgtgcattttcacaaatgacaacgatatggcaaatgaaactgctccagataaactatcatgccaatgacagactggtgcgctgtaaaaatcaagctattattggcc

SEQ ID NO: 33637 - DNA, 687 bp, Zea mays
  Clone ID: MRT4577_130683C.1
gcgatttattatattattatgttttctctagaaaatgtgtggttttgacgaagacgcgaagtcttgtaaggattctagtgcaatagaattggcagaaacattaaataattggcctcaaatgaattattacatcacactttgcaaatttgttcttatgccattgaaatactctacaggctatgtacttttcgttattaatcatgcaaacaaatctatgtctgtgtttaatttcacaccaactccagaatggtgcaaagatatactactaaaaagattttgggaagctattcttcttatttcgaagaaatataaggcagcatacggtgtcaaacgtattagatggtcacatgacatttatatgtggcgacattcaattcgacccgatgctccaatcgacataaaaggtcttaatactggtcattttgctctgcacattatgtagtggtgggatagtggtataaaagcacaacttagtatggatggtgcgactctgcgtaggaatttatttattaatctgttgacatacgaggggaacacatatcgatttaacattcctggacatatacaagagtaccttgaccgcattatggaaaaaattagatgaaatagatagttatgtttatgtttattttgtatttattgatttgaattttcgccattaaaatttctttttaaaatgtatataat

SEQ ID NO: 33638 - DNA, 255 bp, Zea mays
  unsure (1)..(255): unsure at all n locations
  Clone ID: MRT4577_130684C.1
agcagtggtaacagggganagtacgcggggacttctctagagcgaaaatagcttgaggatgtgttgggccagctatttctacagtgtgcgttaggttgtctgagtacgttatcagtatgaaacgaattttgaacagtctcttgtaatgcgtcagaaatatttttttagaacgggggggtgtgttgaaccaatacgatggctggattatgtcgattttttttgtgctnaaaaaaaaaaagaagaaaaaaaaaaata

SEQ ID NO: 33639 - DNA, 491 bp, Zea mays
  unsure (1)..(491): unsure at all n locations
  Clone ID: MRT4577_130685C.1
aagctgatcctcagagcggtcccctcattttttaattaccaacaagaaaacacaccagaagagtttttaaaagctttttggggttaccccccaaacagnatactcaaaaacatacacaaggtcacggccacaaaatccagagaaagaacggacaacaaacgaaaacaagatagcggaataaaaaatggatctctgtcccggagaagtacaaacagggctacctactaagcaacctgaatgatggcatgtcttgaaagcaaaaaatacctccgacagcaagctctggctataacaagaccccgcgaagactagacaaccggagtgaattgcatataactcgctcgccttgcaagccatggagaatcaagcacccgaaaagccacacagaaaagggggcaacaagccacaccggcatcagcggatagggaccaaagagaacaccaactttagaactcatttcacctgactggacaccagccttcgaactaaac

SEQ ID NO: 33640 - DNA, 867 bp, Zea mays
  Clone ID: MRT4577_130686C.1
cgctgccgagcctttcccccgacgcatataaacgggagcgaaaagcccaacccttcctcccctctcctcctttgcggcggcgcgacggtaggggaactccatccaacacatggccgccgccgccgccgtccgctcgaagcgcaggctcctaccccacctctaccgtctcctccactccaccgccgccccctcgctcgaccgtttcctccgccacgcgtcgccggtgccccgcgccgccgaccactccccttttctccgcctacccgccgcgcgcgtctccacgctccccaccggcctccgcgtcgtcacccagtcctacccggccgccacccgcatggcctccgtcggcgtctgggtcgacgccggcagccgcttcgagctgcccggcaccaacggcacggcgcacttcctcgagcacatggccttcaagggcacggagcgccgccccaccgcgaacgcgctcgaggtggagatcgaagacatgggcgcgcgcctcaacgcctacacctcccgcgagcagaccaccttctttgccgacgtgcagggccgcgacgtgcccgccgcgcttgacgtgctcagcgacatcctgcagcacccacgcttcccgcagcagggcatccagcgcgagcgcggcgtcatcctccgcgagatggaggaggtgcaaggaatgatggaggaggtgatatttgatcacctgcataccgcagcattccgagaccatccgctgggggacacgatattaggtcctacggagaacattaaatctatctcgaagaaagatttgcagcagtacatttcaacgcattatacctgtccctagaatggttgtatctgcttctggagctgcgatcatgatgagggtgttga

SEQ ID NO: 33641 - DNA, 287 bp, Zea mays
  Clone ID: MRT4577_130687C.1
gctcttatcctctatagagcgctcccccttttttttttctttttccacaaaaccaaagaattggaggggattttttttatacttctgccggataataacccccctcccatatacacatatccagaaagataaaaatatccctacacaagcatagactctgtccgagctaaaatccctaggacatcccacaatctagaacaaaatttaatttccttgcacaaactaattgccaccattcctctcagatgtgacctcaatactccatccttggctcacccatttctcat

SEQ ID NO: 33642 - DNA, 344 bp, Zea mays
  unsure (1)..(344): unsure at all n locations
  Clone ID: MRT4577_130688C.1
ggcagccanccattgccccacaggagggaccagacgccgacncngacacaccaagagcgcnaccagagtaagcccggaactgcggcgaggacgccgccctcatcctgcgcgccgacggggggggcggccgaccacgaagacgacggcggggccgagccggacaccgtggacggcgcaggcgccgaccccgaccccgagggaagcggcaagcgcccgcgcagccacggaggcaggagccagccccgccgcaccgacgacacgccgcacaacgccggaggcgacaaccgggaccgccccgagaagaggcccacccgggaagacacgaggcggcgggggggggggga

SEQ ID NO: 33643 - DNA, 240 bp, Zea mays
  Clone ID: MRT4577_130689C.1
ccggacctcccggggcgggcgacgcgtcccgtcttctcgaaaccgtaatacatggtctctgattttcctcaccacttccggcggggtggcctgcgcgggcgtcggcgccgacggccagcggctcctctgcaccgccacggcagcggcagagaaaaccgggccacccgtacctatccgccgacttcgccagctctgccgcgctgggcggcatgactacatctactcgacctttgcgcccct

SEQ ID NO: 33644 - DNA, 838 bp, Zea mays
  Clone ID: MRT4577_13068C.1
gccgggctgcgggacaaccacttgcattcgacagcatgcgcatgcgatctcgtcgggtactgaagtagcgtccacgcctcctgcccccgcaatcacttccacctccctgctctgctttgctgtttgcatcgcatcgcgtcgcctttgctgaatcccagcgacggacgggccgccacgggcactgtacggtgccgacgagcattgcttgctgctgcctcggccggcatggcgatggcggcgccggtggaggtcggcacgcagggcacggtgggctcgctggtgctccgggaggtcgagcacttccggaggatggaggtcgccggcggccacggcaagaagagcagcaaggtcgttgcagccggcggcgccagcccccggagcaacggcggcaagaagcccaggccgaagaagggcgccgccgcagtagtaggcaatgcgtcgtccttcttgccgaggatgtgctcgtcggcggaggtcgtggaggaccccgccggcagcggccggagggagcggccgtccagggtccggtaccggcctctcggcgacgacggggacggggacgccctgccccagcaggactagctggtcacactcacagagcagggccgggcatgcaggaggatcgatattatgctgtgccagatcagattcagatccggagagatctgtgccaatagggtactggatggatgatgtcttgcctttttttttcatccgtttcttttgcttccgcttgttcagtgatgtttaggagtggtagatgtatgacgactgtggtttgactcgtatccaataataataataatctctattttgctaaaaaaaaaacaaagaagaa

SEQ ID NO: 33645 - DNA, 543 bp, Zea mays
  Clone ID: MRT4577_130690C.1
taccggcgcctctccctcggtttttttttttttttttttttttttttttttttttttttttttttttttttttttttttttttttttttttttttttttaacggagggggggggaaaaccggggaaaattaacactgtttttggcccaaaaataaaatatcccccccccttccccaaaaaaaacgggggggacttgcatttactggacagggggggcggggggggcaacccccagcaggatcaaccaaaaggggcgggggcaaggaaacagctcccggaaaatctaccactaccattttttaaaatctaaggaaccccggaaacgtggggggtaaaaaaaaaatggggcccacagggcccggggttaggaacataaaacgggccgtattggacccataacaggggtttttaagccccaaaaggatttgggggcccgtttttttttttcgggggaccaaaaatcttttttgggcaaactgaaatcagggttgccaaaatgttctttggtggggggggactgaccctctttaggttttttggggg

SEQ ID NO: 33646 - DNA, 431 bp, Zea mays
  Clone ID: MRT4577_130691C.1
aacggagggggggggaaaaccggggaaaatttaccctgttttggggccaaaaataaaatttcccccccccttcccccaaaaaaacggggaggacttgcttttactggacaggggggacggggggggcaacccccagggggatcaaccaaaaggggcgggggcaaggaaacagctcccggaaaatctacccctcccattttttaaaatttaaggaaccccggaaacgggggggggaaaaaaaaaagggggcccccagggcccggggttagaaacataaaacgggccggattggacccatcaaaggggtttttaagccccaaaaggattttggggcccgtttttttttttcgggggaccaaaaatcttttttgggcaaactgaaatcatgggtgccaaaatgttccttggtgggttgggacggacccccctta

SEQ ID NO: 33647 - DNA, 523 bp, Zea mays
  Clone ID: MRT4577_130692C.1
ttttttttttttttttttttttttttttttttttttttttttttttttttttttttttttttttttttttttttttttaacggagggggggggaaaaccggggaaaatttaccctgtttttggcccaaaaataaaatatcccccccctttcccccaaaaaaacgggggggacttgcatttactgtacatgggggacggggggggcaacccccagggggatcaaccaaaaggggcgggggcaaggaaacagttcccgggaaatttacccctaccattttttaaaatttaaggaaccccggaaacgtggggggtagacaaaaaatggggcccacagcgaccggggttaggaacattaaacaggccgttttgtacccataaaaggggtttttaagacccaaaaggattttggggcccgttttttctttttcggggaccaaaaatcctttttgggcaaactgaaatcatggctgccaaaaggttctttggtggggggggactggcccttcttaggttttttgggggt

SEQ ID NO: 33648 - DNA, 335 bp, Zea mays
  Clone ID: MRT4577_130693C.1
aaaaaaaataataataaaaaataattaattaaaaaaaaaaaaaaaaaaaaaaaaaaggaagaaaaataaaaaaaaaaaaaaaacaaaaaaaaaaaaaaaaaataataaataccaaataattaaaaaaaaaacataactaaaaacacaaacaaccactccctccacaacaccttcaacacctacaattaactcctccactccaatatcatcctcgatcggaaaacccacagtttccccaaattcaacttcatcaccttctacacccacgaggcaatcccgaacaccatctaaaacatcaactgcaaggaactttacaaccttaacatcaccttcaa

SEQ ID NO: 33649 - DNA, 411 bp, Zea mays
  Clone ID: MRT4577_130694C.1
cggccgcgtgggctaagcgcgtgatatgtaatgtaacattttcctaggaggatgaagaacccgccaggcctgttctccgggagcaccagccggagctgctgggcgggggccggctggggccgaccgcgatggtgggcctgtggctggaggtggggggccaccagcttagcccggcgggggggggcctcctggtggggtgcgtgttctctcccttccttggccgcgagcgccacccggcggtggtgggccagaacctggtgaagctccagaaggggccggaggtgttccaggcgcggctgggcacgtgcaccttcctcgccggggactttcttaggctcgccggccttaggccctttacccttatgcccttgcccttgggccccgcggtccccgcttttcttccttcccttc

SEQ ID NO: 33650 - DNA, 1402 bp, Zea mays
  Clone ID: MRT4577_130695C.1
accacccgagctacctagcaacgcgcagtaagcagcgtgggcaaagctacgagcgcccggctagcttcgccatgaacatgggtggggtgtccccgtcgacagtccggtgcaagcactgcagcacgcagctcaccgtgtgccccggcgagcgcgccatccagtgcacgcaatgctgcggcgtgacgcgtatccggcggcggcgggtccagcggccggcggcggcgccgcccaccacgggcttcccgcgcgcccgcggcaagaagcgggccctcctgatcggcatcacgtacgccggcacgcgccggggctgcggccagctgaggggggccctcaacgacgtcaagtgcatgaggcaactcctctgccagcgcttcgccttccccagcgactgcatcatcatgctcactgatgaccagaaggacccgttcaggctgcccaccaaggacaacatccggttggggatgcagtggctggtggaggggagcagcgagggcgactccctcgtgttccacttctccggcctgggcgcgcaggtcgccgacgacgacggcgacgagctggacgggtacgacgaggccatctgcccgatggactcgttccagaagggccccatcctggacgacgagatcaacgagactatggtccgcccgctggtccacggtgtcaagctgcacgccgtcgtcgacgcctgccacagcgccaccgtcctcgacctcccgttctgctgcaacatgtccagaagcgggagctggcagtggaaggacgagagccccccgtccggcgcctacaggggcacgagcggcggcaaggcgatgctcatcagcggctacagtgacggcaaagccaagtccagcgtggccagtgcgcagaaaccggaggcctgcgcgaccatgggggccatgacgcacagcttcatcacggcggtggaacgcgagccgcagggtgtcacctacggccgcctgctcacctccatgaaggccatcatgaccaactccggcggctgcgccgtgcagggtcctattggcgccggcgcggccgctcgaaaggacgtcaacttcagcggcgtgcagaaacctaacctgtcttgctcggagatgttcgacgtctaccgcaagccctttgcgctgtgaacctcctctgcgactctgcgttgccattgccttcagactaccacagattccagtctggaccctatatataaattaccgtgacgtacggaataataaaccagacggatttatattgtatatgatgatatgaggcttgcttgctcataatgtgtgccttaattgtcttggtgccaataatgtgtgtccatgtgtcggttaccggctatgagccaagcttatattatagcctgtgaaccgacgactttgttgaccatcaaaaatacaatgttgat

SEQ ID NO: 33651 - DNA, 433 bp, Zea mays
  Clone ID: MRT4577_130696C.1
cacaagagaaaagccatgacgtggcctccacacctaccaagctattcatctcgcgcgagctacatattatctctgttaacaaacttatgattgtacattatcctatagggacaatacctatctcatcctacctgccttctatcaatctaagatcatacatcccatcatctcattcatccacatcataccctcctattctgctgattgcaatcatgactacactgatcgcaatcttgactaccatactcattgacacaacattcacttccactgactctaaccacataacacccctgctttaaattatacttcagcaacagatcttgcatcaaaacctagcataaattgaaccctttttactatcggaaactcatggttctaccttcattgcacttaacgctctatatatagtactaaaaactattctttatgt

SEQ ID NO: 33652 - DNA, 549 bp, Zea mays
  Clone ID: MRT4577_130697C.1
cttccaaaaaaatcggactagtttgcaattaataaaacgaagattttctcatttgttacatgccatcgaattacatgacgacgtctttggcattagtatgtttaaatcctagtaattgcttttctcatttgtttcagtgtcccgactgaaaaccatgaacgaacgacggggagagtccacttcatcaccctttctatctgtggaccctttttctgattgccacgacatgtagctagctagccagttgtcgtcgaggcatgacacatggctggggctcaaaataaatttagattgactttcaagtgtgcacataattatagccagctagctgaagatatcaacatttgcaatcactatcgaatcagaagctggccaaagtctgtgtagttgtctcatgccggaagattttctgcgataagataaccaatgcatgctcatcatggatcttgcatcaatgattgagttccttttagcagcaaattgtagatgattatacttgcagatgtctttcatcttctcaaccagaaggactgctcagtgtcaccctcc

SEQ ID NO: 33653 - DNA, 204 bp, Zea mays
  Clone ID: MRT4577_130698C.1
gcaagtttaattcggtgtctcacgccatgtatttacaatggcttcttggtgtctccgcagcagggctattacaaggtcaacgacctcaacaagcgctacaagcgcgtggtctacctgctctgccgctgccgttccttcctagtggtctataaccacgctctgctttacgtcttttactaacttactctcaatgccaaagactaa

SEQ ID NO: 33654 - DNA, 331 bp, Zea mays
  Clone ID: MRT4577_130699C.1
cccacgcgtccggttctagatcgcgagcgggcccttttttttttttttttttttgttttggtttttttttttcagccttaggtactcactagcgtttccttctcattatacccttattcgttctcatacagatctcctggacgaagaaacatacaaaagctacatcaaaatcaaacggctattttgttctccttttgctcattaggagggctctccagttggctgtccgtgtccggttgggaggccccgggcgcactggggtgggcggctgcccgcctggccgggcagccgtaagcgccgagcggcgtgccggcatctccgttgcggtgtg

SEQ ID NO: 33655 - DNA, 459 bp, Zea mays
  Clone ID: MRT4577_13069C.1
gagataaagatcatgacttctttgcggcatacccatcccaacgatgaattttgtcatacgtaatcattgaagactgcatatcccagatacatgttggatgtcattgtagataggacattagaccttatacattttctgaaatggagcgaaaactccaggggcgtgccctcctgacaaataccaaggaaccttaccgtcatgctaggctacactctagattgtggagccctgtgagaccctccaccatgtggatgagattgcctgggaatatagggttacacacagctaatagaatatccacgcgtgcgcctgtgacgaaaacgaccgaatggactactgttgccaagagcacaacattcttgtagtaaatcatcatggttgttctgcgagttacactaccaaaccttgctttaactacacataactgtctgacactaagggcatcccgaaattttttga

SEQ ID NO: 33656 - DNA, 313 bp, Zea mays
  Clone ID: MRT4577_1306C.1
acgcccaggcgtccgcccacgcgtccgttccgtttaagacgtgttttgatgtgaacgatcagtagtgtgcttacaaacaagtgatgccctattcttctttcacttcttgccgcttttccaatggttaaaacattcccttctaataattcttacaccttttttttttctttctttgaaaagaacctaataattcttaaattgacccaattgtttgaattgtaacacgcacaaaccaaggttcgtcttttctacttttgtataagattgtgcctctaataaaatggtctaaaccccttactaagggatctgcttg

SEQ ID NO: 33657 - DNA, 408 bp, Zea mays
  Clone ID: MRT4577_130700C.1
ggggcccccaaatggcaaattaatattatgtgaaattaggggaactacctttcaaccgcaggggccagatttccttaccagttccaggtacaacggggtccctgctgaagtcaagatttgctgggctcccgctttcaacattacaaggggaaaggggcccccattttgctttttgggggatttatacggctcattgggcgaattgggcttctctgccacgcgcttctaacgtgaatgctgggcctgagcacctcgttaaaacatgggaggccccctcctgctcccattggtgcgccggacacaagctttccgagcttctaggtccttctgctcggccggaaccgatgctaatggttgatttcagctcctcttatttaacattgaaagggtgcaggtgctcttcattac

SEQ ID NO: 33658 - DNA, 414 bp, Zea mays
  Clone ID: MRT4577_130701C.1
atggcttcgtcctatatgaataagaatgcagatagacaactaacacggcgccaagcttatttatatcgcagcaaacaaaatgcgttgggagcatgcatggggatagttagaggtcttcgcgctctctacttgtttgtgctactaactggtgaggaagtccctttggtagctggtaccaacaccacatgcgagttgcttggtcctggacatgatggtcccctcgtctctgggttggtagtgacggtcggatcgaagctctggcgctgggtcgccggatctctgcgtatcggtgatctgcgccgccttggagctctttgctctgagccgcatgggtgtttggaggaagatggcaccagagccgtggattttggtgatgaccggttaggattagatcaggggacaggtagagtttga

SEQ ID NO: 33659 - DNA, 383 bp, Zea mays
  Clone ID: MRT4577_130702C.1
aaccggccgacccacacgaacgtttttttttttgtccacgcgtctgagaaaagccagaggcatacgtaaaggaatcccagtcaggcaaacaaatggaagaaccaattgctgtcgccggagatgtcctcccaaatgatcaacgagcaccttttggatccaggaggagcacgtatggcacgatctgtgccagcgcaagtcgcacgaacacttggaggagctggaggtccaacacacacttcttccgctgaccatccaggacgagggcacttacaacctggctatccgcctcaggggaggcatgcagatcttcgtcaagaccctcactggaaagactatcaccctcgaggtggagtcttctgacaccatcgacaacgtgaaggtca

SEQ ID NO: 33660 - DNA, 447 bp, Zea mays
  Clone ID: MRT4577_130703C.1
ttccgacaccgccaccggataaggctgccccgcccgctgggagcctgcgattccggaggcttcgaggagcaggccatggcgcggggcggccacctcagtgcgctctgcctgccacctcgcctcggcgccacgccgccgtgctgcggtcgccctgccgccgtccgagccagcagctgctgcgccaggccgctgccaccaggcggcgcgcggcggcggggccgcctcttggtggtgcgcgccggcgggccgcccagcaccaacgcgctcatcctcgccttcgtgctcccgctctcccttttcgtcggcacgctcgtcaccgccgcccgcgtcgccgacgacctcgacgaccgattcctaaggcagatggagataaaccgagcgatactggaagagaacgaggcgtcatccgatgacgagggcgccggtgaggaacacgacgacattaac

SEQ ID NO: 33661 - DNA, 209 bp, Zea mays
  Clone ID: MRT4577_130704C.1
tcgttaccatcatcacagatcatccacagaggccatctttcgtgtaagagacaggagagtgggagagaggggggatatatggcagacatcgcgttgctggtgacggagcagttcgacaagaagctgaagcgaggctcccccggcgaggacatcggctgcggcgccagccaatatatgaggaacatcggtgcctgttccaatgcgtggag

SEQ ID NO: 33662 - DNA, 695 bp, Zea mays
  Clone ID: MRT4577_130705C.1
aacaatttatcatgtgaagagccatctgcagataagaaggcttcctcggaggataaaaaagcacaattaggaaagggcagcattgattcaagcaaaaacaagaatttacaagtggcagaagctctaaggatgcaaatagaggttcagaaacagcttcatgaacaattagaggtgcaaaggcagttgcagctacggatagaggaacatgcaagatacttgcagaaaatactagaagagcagcagaaggccggcaatgtgccactaaaagctccaaccaaagcacaagcaacaaagtcgtcacctgaatcgacgtcagacgagagaactgaatccgaggtagacaccatttctccgcggccacccaagaacaggaacccgggtgtagacgcagaatgcaaatcgccgggaaggatcaagcgaacgaaggttcaggctgatcttgaaaacgagggcctgtgttcatagcgagggctcatgttcgtagctgtgcgggctcgccagtgattttctgaacatttgcacttcccgttttagttcaggagctatttgttactgtttgtaacttgaacagccgtagtatctccagcgatctgttgatatcttggcgtgaattggacttgacatcttagccattgtattatatagtaattcgcctttggaatggaaatgaaataagtttatgtttgaagaagaag

SEQ ID NO: 33663 - DNA, 308 bp, Zea mays
  unsure (1)..(308): unsure at all n locations
  Clone ID: MRT4577_130706C.1
cgcaaacntccgcccacacgttcggtttctcgtccgcgaggaccatcatataactgtcgccttcctctcgttttaaacaaaatctgtctctgcacggggcgtcaacggcaggcggaaccacacgatcggcggcggcgggcgggagcacctggacttggcggtggagtctgtcatacgctgggcaggcacgcaccatcttgtgcaagcgacctcacttgagtcctacctcgtatgctagcactagcaacgtggattcgagcgccggagccgtcaacgatcgatgggtcgaattgttgaaaaaaaaagaa

SEQ ID NO: 33664 - DNA, 180 bp, Zea mays
  Clone ID: MRT4577_130707C.1
tcgatcctgaatgacacgctttctaaccctaatttctcttatatctcgaagctgcccgaggagggggagtgttagcatactcactaggcggccttcgaaaataacctcaacgtcattaccctgatgggcaccaactccgatatcgaggcgaaccacgatccccttactgaaactttacaa

SEQ ID NO: 33665 - DNA, 323 bp, Zea mays
  unsure (1)..(323): unsure at all n locations
  Clone ID: MRT4577_130708C.1
agggaagacaagccnngcnggcggagcanaacnggcagcaggaagccaggagccggnaanccngcnggggccggcccaccaccacgccncgaccaagnngncgcgagccacccaggagggagagancnganaannnggaggccngnggcggggcgncacncggcgncaaaacannaccaccaggagccaacggaagagaagccaaccnggaggcnncggaaaggnccagggcanccnccacgngacgccnggggccacagaacaagnngggacggagggacaaaggcaanagnncagggaggacaaaccggagaagagnggac

SEQ ID NO: 33666 - DNA, 1003 bp, Zea mays
  Clone ID: MRT4577_130709C.1
ctgaaccatttttttctaatataaggccatccttggacgacattcccatgctaatcccagcactgcacaaatcacgttttcatgtacatgctaacaatgccactaattcagttcctatttgcacaactggagcggtcagtctaaaaaataacaatctttgtgtctcaaaacactaacgcttactccctccaacacaaaagaacaatatgtccatacatagttatctagatagaacaacaacaacacaacctataaggctgtaatctagatacccttgtcaccttccagagcaagatagctagctgcatgttgctgtttccaatactaatgtctgatgcataattcgttagcgacgttcatcccgtgcctcatcaacgaaacaagcaaaggctagattgttggcactggcatagtacccagcacgtgcaccctaagtgacagttcgccctcttcctcttcctggaacatgaaagcacacacgtgtcctgcttcgatacggtgactcttcacaaagaggggccatccaccaagaagccttagttctccatggatcattgagaagttgagcttactgccgaacaggtccctgcctgcaaaaattctggtttcacacccataagtgcccagacgaccgaatatgtgtcgcttactgaactgtcttgaaaataccatctgtctcttgacaacattagacttcttcatggtgcaaatgtatgctggaatgccagagccacaggcacgtgacaaaccaagcgcagcttcttcttgcttgggtgtaagtcttgtgcgatcgccataccataagttaggtcccacgacgtcgtggaggttcccctcgcactggggatctctccgccaggcgtcgacgagctggatgactccggcgcggcggcgaagtgcgacggacgagggctctgtagcggcgggggtcctacgccgcttgcgaccagttccggaggccttgacggcgctaggggaacaaatctcccggccggcctcgagg

SEQ ID NO: 33667 - DNA, 375 bp, Zea mays
  Clone ID: MRT4577_13070C.1
aactacaccccgtcgtacaactacaacgatgatatacactagacgacacaatacaacctatgcccctacaggcagacggacacagcctacgaagggggcgacgacctcagtcgactcaagcttcgcgtggagccgttctcttctcatagccgttgcgttccaacggctaagacgaaccccttggcatggtggacccactcgagggaggagaaaaccacggggggatcaccgatggatggggttgggcagaaacagcagtatgcccagatgacgccatagggaaaagggccacaccagcagaccttagcactaattacgctgcctgaatgcagagaggtgacccgcccttagatgcccataaatcccgctcggggt

SEQ ID NO: 33668 - DNA, 266 bp, Zea mays
  Clone ID: MRT4577_130710C.1
aggattcccaattccagagagaagagtcatcgttctcgcctcacagtgcggtagccacgtcgctcccgtctccctatctccgtctgcaccgggtcaggacgccgctcctgtgacccgccgtatctctgctccttcaagcgcctccatatggaagtgtgcagcgctacgagagtgtccctgtagcggtgccacggccgcgctgactgcggggcctctttgccgagccgtgaacgagcgcaggcaccaggcttggcgtctagggaggc

SEQ ID NO: 33669 - DNA, 256 bp, Zea mays
  Clone ID: MRT4577_130711C.1
cttatggtctcggagtggactaaaccgggagagtctttgaagacgcacggaggtgcgaaaaattgactgcactataacctgtttaacgtatgcactattcgcactcgcaacactgacaagactttgaaatctatttatattaagaagtcttctactaaattgttcacctttcgacttctatgaatatagtattgtgtcacctttttaatattttctcattttatttttgttatctttctttctattttttttttct

SEQ ID NO: 33670 - DNA, 653 bp, Zea mays
  Clone ID: MRT4577_130712C.1
gccactaattcagttcctatttgcacaactcgagcggtcagtctaaaaataacaatcttcgtgtctcaaaacactaacgcttactccctccaacacaaaagaacaatatgtccatacatagttatctagatagaacaacaaaacaacctataaggctgtaatctagatagctacatgttgttgtttccaatactaatgtctgatgcataattcgttagcgacgttcatcccgtgcctcatcaacgaaacaagcaaaggctagattgttggcactggcatagtacccagaacgtgcaccctaaggactgatttggtgaccggggatcccgaggggaagaaatcctcttgctattcaaaattgaattgcaagatgattcctccccatggatcccctagggatccctaatcaccaaatcaccaaatcagccctaagtgacagttcgccctcttcctcttcctggaacatgaaagcacagacgtgttctgcttcgatacggtggctcttcacaaagaggggccatccaccaagaagccttagtcctccatggatcattgagaagttgagcttactgccgaacaggtccctgcctgcaaaaactctggtttcacacccataagtgcccagacgaccgaatatgtgtcgcccggccggc

SEQ ID NO: 33671 - DNA, 715 bp, Zea mays
  Clone ID: MRT4577_130713C.1
gggtacctcgaggccggccgggatttctactaggtagcaaattctacttcgtgcgcattgtatgtaggttgattattaggacagaaagagtctgcacacctcggaatctgcacactattgttctgcaaacgacttagtcgtctatgattgctactaggtaatagcgaaagtgcagggaactgcttctctgtttatgttatcgtgctcgtcaaaatatctcctcagtcacatcagcatgtttgttatttaccttattacctaatctgtgatacgataggaaccgcgtgcaagccaacttcccatcgtacactcatctgattatatgaccaaagaggttctaatgcatattttctgggctattggttttccaatattggatttcgcatgtacatcttacatgaccacaatgactttgagctccagatgaggttgtatagcgcagagacagtattatataatgcatctatccgagcttttttacctaaaagcgcctgaacggcagaaaaacacttatataatcaacacaaacctgtaggcttcttagtgttgccaaggaatcccactgaaatcgtcagaataatgacactaactgtgtctggaagggcttcatctcatacgtcataagtgagtatacctttaaggccaggaaaagatgatatggtctcttcactgtactatatgtactatgccacagcccacaggagcggcaccctag

SEQ ID NO: 33672 - DNA, 1340 bp, Zea mays
  Clone ID: MRT4577_130714C.1
ccccccaaagaggacaaaaaaggcgggggggggggggcatgttttttttttttgatggtatatttttttttttttgttattaaataataattattatttattttatgttttttttttattttttttttaagtgtcttatttttttttttttatgttttttttttttttttttttttgactttttttttttttttttttttttgcacaaatcacgttttcatgtacatgctaacaatgccactaattcagttcctatttgcacaactggagcggtcagtctaaaaataacaatctttgtgtcttaaaacactaacgcttactctctccaacacaaaagaacaatatgtccatacatagttatctagatagaacaacaacaactaattccagagcaagatagccacatgctgctgtttccaatactaatgtctgatgcataattcgttagcgacgttcatcccgtgcctcatcaacgaaacaagcaaaggctagattgttggcactggcatagtacccagcacgtgcaccctaagtgacagttcgccctcttcctcttcctcttcctggaacatgaaagcacacacgtgtcctgcttcgatacggtggctcttcacaaagaggggccatccaccaagaagccttagttctccatggatcattgagaagttgagcttactgccgaccaggtccctgcctgcaaaaactctggtttcacacccataagtgcccagacgaccgaatatgtgtcgcttactgaactgtcttgaaaataccatctgtctcttgacaacattagacttcttcatggtgcaaatgtatgctggaatgccagagccacaggcacgtgacaaaccaagcgcagcttcttcttgcttgggcgtaagtcttgtgcgatcgccataccataagttaggtcccacgacttttgaaaagcaagtactactttgggcttccatcactctttcttgggtggtgaccgctgatctccctgacccgcaaattttatccggagcaaaggcttccataaatatgctagattgcaaatcttttttttgtgacaggaagtagagaagtactcgcgtcgtggaggttcccctcgcactggggatctccccgccaggcgtcgacgagctggatgactccgacgcggcggcgaagtgcgacggacgagggctctgtagcggcgggggtcctacgccgcttgcgaccggttccggaggccttgacggcgcgagggggcggcgggaggtgaacagttgggacttgggaggagggaccggaatccggataacgacagtcgggcggggtgggtcccccggccggcctcgaggtacccaatg

SEQ ID NO: 33673 - DNA, 887 bp, Zea mays
  Clone ID: MRT4577_130715C.1
cattgggtacctcgaggccggccgggaaatcccttgtttcacttcttttttaatcatgtcgtcctattctcgctcgttattgcgagcatgcttagtctcctcgctttctctgctgcaaccagtgtcggcgtttgtgggaagcgcaactgtctcaagcactgttttggtcatcgctcgcgatgctacttccgcgcttaacagcgcctcacttggtcttcagggctatggcataccctatgagaccctagttgtccctcaggctggtattgccaatcttccccttctcaatgcctctgcaacaaatggcaactacggtggtatcgttgttgttggcgaagttagctacaactacgacaactcgtaccgaagcgcccttacaaccgatcaatggaatcagttgtacgcttaccagaccaactttggtgtgaggatggtccgcttggatgtctttcctaccactgaatttggtgtggttagcactggtggcagcttggacgatcaaccagtcacctttaccaatacaagtggcttcccttcggccaatctcaagacgggtgtgccgataagcattgctagcatctaccatactccggccacaatcacaaactcttcgattgcgtgggagtttgctagcttttccaatgctggaactgctgcagtcatcaaccagattgtgcacgccagcagatggcatggtttcttccgtttgcgctagactgggcgccatccagcaacattctgcagcacgcgtggatcacttggatgaccagaggcctctttccttggtttcaggcgaatctatctcagtacgcaagttgacgacatgtttcctggaaacgggcttgtacccgtcagcaggccaaaactaccgctgcacgccacaggat

SEQ ID NO: 33674 - DNA, 533 bp, Zea mays
  Clone ID: MRT4577_130716C.1
attgggtacctcgaggccggccggggagcaagtcctcctcgatcgcactccaccacagattgccaagcagcgaaatcaggaggcgtgggcgtacgatctccacacgataccaggagcgtttgggacaccactacacacacctatccatactcatctccacagcacacgacacgtgacgacacgatcctggctggtgttagcctacacgcacctatatctgcgggtcgtgcggaaggacgtctcctcctctactcccctcttgtcactcaagtcatgaatgttcgctcaccttttccctccctttcctttcctttgctttcctatcctctggggcctcgaactcgaatcgaaaaccctacccacccatgtaatagtactgcgaccggcgcacggaaccctcaatcgtggtaggcgttcacgctagatcccgctggcaggacccaacgatcctggtgctgctggtggtgacactgctgctgagcgcctcgtagtgtcttcatcgtactacgacttcatcaaagatatgtcgcagc

SEQ ID NO: 33675 - DNA, 735 bp, Zea mays
  unsure (1)..(735): unsure at all n locations
  Clone ID: MRT4577_130717C.1
cttgataatggaagaaacagagacataagataatgttattgcaattaattcctaacccctcacaatctttttttctcttttcttctatggcagtctctagaacaagtgcacagattaaagaaaacaaacaaaacataccacatcctagaggacaacccacaaagcaacaaacattcccttaaaaagcacacccacccataaggcagactggcttctttggacatcagccgcagtataaaaagagaaaaaaaacacaacacgacaaaagaaaggaccctccaaaatggggaaaaaatagacatggagggcgctctaatgccttagcactagggtcctcaacctaaatgagtcctagaaccctttttttcccagtcatcgaacaattctcgtgggaagacagctcctttgcttcatttttcccctttccccgcttccatgagaaaatggaagagaacccatgnaccaatggtggtttcttgatattgcacacatcaaacttatcatttcaggttgaagtcagttccagaggctatctcgttttccaagaccaactaaccgaggcatcatccttctgttgcaattctgttgggttgctccttgttactacaggctgcatcgtgtatttctggaacatgctgctctgctcctcatttttcttgggtgtatcaagtaccatcccaacattgntgccctgcccctcatcactcttggctctaccaacttctgggccactta

SEQ ID NO: 33676 - DNA, 326 bp, Zea mays
  Clone ID: MRT4577_130718C.1
ccgaaaaaaacaagcacaaagttggtcaacaaacttatattctctatcctccaacacattatcatggtcaccatcatatctagtggacctactaacctgacacacctcacaattcatatattaacatcatcttacaccccaacatcacaatcaatcaacccaccctaactatcatccttcgcacttaacatccctcatccatctactcaatcatatactcacacatgaatttcactacctgagcactacctacctatgcactacatcctccttctactagctgactccaactaactatttgctcatccaccccatgataacttacc

SEQ ID NO: 33677 - DNA, 663 bp, Zea mays
  Clone ID: MRT4577_130719C.1
tcccagcttctcctttcgccttctgcctccccctccggttcgggtagggtcttcgggaggctcttcggtgttcgagcgcatcgatgagcggatcgagatggctgagtaccatggtttctaccgctgcttcgtctgcggcctcgactaccactcggtccaccactccttccacaactacttcaagacctacggagacaacctcatactcaatagcatgcatccatcggtacacgcacttgtcctgcggcttcttcttcacgaccttctccacgcaggacgccatgcagaacgccatcgagggcatgatcggcaggcagctcatcagccgcaacatcacccacacccaggcccacccccgaggcggccgtggaggcggcgacggcggcggccacggaggcggccgctacggcggcggctaccgccgtgatggccgccgcgattacggcggcggctacggctacggcggcggctacggcggctacggcggcggctacggtggttacggcggcggctaccgcggcggcaactacggcaactgctacggcaactgcaacaactactgcgagaactcagcgctggcaacctatcctgcaagctatcctgttggctaccctattgcataccgctaatcatagtgcgtatcttggttggtgtcgcgcatgt

SEQ ID NO: 33678 - DNA, 584 bp, Zea mays
  unsure (1)..(584): unsure at all n locations
  Clone ID: MRT4577_13071C.1
tgtgtaanatggctgtactcctacatacatgcaatcatgtataaagnatgaaaacgtgtacatacacaaaaaaaaaaaaaaaaaaaaaaaaaaaaaaaaaaaaaaaaaaaaaaaaaaaaaaaaaaaaaaaaaaaaaaaaaaaaaaaaaaaaaaaaaaaaaaaaaaaaaaaaaaaaaaaaaaaaaaaaaaaaaaaaaaaaaaaaaaaaaaaaaaaaaaaaaaaaaaagggggggtggtttttaaaaataaaatgttatgcatcgaaaaatcggaattgtaactttttttttttgggtccctaaaattaatttatggggcaggttttttaaatgtcggaaatggaaaaaaacttgggtttcccaaattaatatgattagaaaaaaatcctttttttgctgtttggtgtaaaacaaaaagggccgaaattaaggttttttcaaaaaatttggaaacctaaaatggaaatgggaacccccctttaagggtctattaaatggggggggttggggggtttccccgaagggttccctttaattttttaaggcccaaagctcccttttttttcttttttttctttttttttt

SEQ ID NO: 33679 - DNA, 262 bp, Zea mays
  Clone ID: MRT4577_130720C.1
acgtccgcggacgcttgggcggcacgcgtggggggggggcgaagccatcaattcagttgaaggcatgactgaagactgtcttggctgggctgggcttgcttatgagcatgtgcttggagaacaaaaatacacggtgtgtggagaatgataaaaaccctgactgctgttctattgggatcaaaggacctaatgatcacaccgttgctcatataaaggctgcgagaccagatggtgtaacatctgtaaagaacacagctgatga

SEQ ID NO: 33680 - DNA, 808 bp, Zea mays
  Clone ID: MRT4577_130721C.1
ccggccggggctcaaacccaccccctctcgctcgcctccccgccactcccctcccgtccctatggcggccgttaccacagccactgccgcctacaccgagggcctcctcaacgccaagctcacgcaggacgggtgcattgtttgtccatcaacagacagcacgtttgaccttcgcaccggggagataaaagaatggtatccgaaaaaccctgtcctacgggctcttacgccagccttgaggaaactattcacctaccgcgtgaaaacagacgaagaaaacatatacatcagcttcagcggagccgacggtgcggggtcagcggagattatattcagcgggaaagctcagcctggtgtgactgcatcggatgtcaatgtggaagaggtgaggatggtcgtcgacgaggatgtcggaggcttcggcttcaccagtgacaacgagctgatcaacggaaaagccgccataatcggcttcctcctgctgatcgatttcgagcttctaactggcaagggccttctcaaggggacggggttcttggacttcatctacgcagtttcgggagctttcaactgagagtcatatgtgtgtttgttgttcgttccttggtatcaagaatgccatcgaggtgtacttgactacccttagaagcctaggttttgtcagcgtgcgattcagtcagctgtgcttgtatttgaacatcaccatgcttgtctgtgaagtgaggaagggacacgagaaagtcacatttgcggtgcttctcataaaaaaaaaaaaaaaaaaaagcggccctcgagcctcagcttttgt

SEQ ID NO: 33681 - DNA, 733 bp, Zea mays
  Clone ID: MRT4577_130722C.1
acccatctcacccactcccccccctccctcctcttgtcacaatcaatcaagaacgtactggaaggaagaaagaggagcaagaaccaagaaagaatcgtctctcttctaccccgccctcttaacgagaacgcagagtctcctttgaatctttgctagcagcggacaggccttcttccgtcatgtgctctggtccgcgcaagccgtcgaccccgccgccggtggcggcggcgccgaaggactcggcggccatggcctcgctcctcctggagctggccgcggcggataacgtggtggagtttaggcgggtcgtggaggaggagaaggcgtcccttgatgctgcggggtcgtggtatgggccgtcggctgtcggccttggccggctggccgcggagagccggacgccggccatggtcgccgcgctctacgggagcaaggccgtgctggctcacgcgctgtccgtcgcgccgggcgaggcctgccgcgcgtctgacacggacggcgccaccgcgctccacctggctgctgccggtggcgcggccaacgccgtcgcggccacgcacctgctgctcgccgcgggggcctcaacggaggcgctctcggtgtccgggctccgcgccggggacctgctcccgcgcgctgcaggcgtttcggagaagcctctccgcctgctgctcaagtcccccgccgtttcgccctcctcgtcgcccaagaagtccgcctcgccgccggcgat

SEQ ID NO: 33682 - DNA, 800 bp, Zea mays
  unsure (1)..(800): unsure at all n locations
  Clone ID: MRT4577_130723C.1
atgctcatgcatcctcctaatgtaacctgaagctttaagaaaacaaagtgctcccggaagactccaagctgcagctaccggccttcctctcccccattccaattccgagaacaggggcggcggagtcaaccaggtacgatgtgctcggtagcgaggctggcgtttgtgcttgcactggccatagccgcctcatcaattgaggttgcggagagcagagattttaatatctttgctcagggcagcttgcctgatgcaaccaagggatcgtctggtctagctgcaaccagtggaaagttgtgtcagttatgcgagcagtactcatccgaggcgctcctctatctcacacaaaacgagacccagactgagattcttagcattctacaccatgaatgtgccagccttgcccctctcaaacagcaggtctccatggttacccctgagaagttctgcgagtcgatgcatctctgcaagaaggggatgaagattagcctacccacccgggagggtactttgtggtttgtgccaccatgttgttgttgaaattcttatcatgcttaaagaccccaacatgcagctggaagtaatcgacctactcaccaaaacatgcagcaaggcgcagaactatgaacagcagtgcaagcggctggtcctcaagtatattccactntattctggtgaagggccagaaattccttgagacaacggatgtctgctctgtgatacatgcatgcaaagcaggcacacaagcatcaatggaaggcatgcctctgtctgccatgtttgtgaaggtgatgcgaatc

SEQ ID NO: 33683 - DNA, 469 bp, Zea mays
  Clone ID: MRT4577_130724C.1
cttcggcttcaccagtgacaacgagctgatcacggaaaagccgccataatcggcttcctcgtgctgatcgatttcgagcttctagctggcaagggccttctcaagggaacggggttcttgctgtgcatcgctcgagtttcgggagctttcaactgagagtcatatgtgtgtttgttgttcgttccttggtatcaagaatgccatcgaggtgtacttgactacccttagaagcctaggttttgtcagcgtgcgattcagtcagctgtgcttgtatttgaacatcaccatgcttgtctgtgaagtgaggaagggacacgagaaagtcacatttgcggtgcttcttatacacctgtccgtagcagctgcatgccttccacagagcttccatagaatcctaatgaaactggagaagtaataacaaatttgcagccacgtatagtagaaaaaaaaaaaaaaaaaaaggccccta

SEQ ID NO: 33684 - DNA, 228 bp, Zea mays
  Clone ID: MRT4577_130725C.1
caacaactcggtttcatctatcccgatcgctgtgggcaatgcacctacatacctgtaaaacaattgttgcaacagattgtaccacctctgactcaaatagctgtggcaaaccctggtgcctacttgcaacagatgctgacattcaaccaagtgactttgtctaactctgttgcgtacctactacagggacaacagttacttaatccattggacgtgggtcacccattg

SEQ ID NO: 33685 - DNA, 2498 bp, Zea mays
  Clone ID: MRT4577_130726C.1
tccggggatttaggtgacactatagaaggccgggccgggccgggaaacccaccccctctcgctcgcctccccgccactcccctcccgtccctatggcggccgttaccacagccactgccgccgcgtcctcctcctccttcctccaccgccgaagccccgcctgcctgcgcgccacgctccgcgccgcgccgcggcactgccgcaactccagctccaggctcgcctgccgcgccgccgaggtgtccggggccgagtcgtcctcggccgcggcggagggcgcgggaggaggcgggggcgcgtcgtgggtgcccgtggtgccgctcgccgcgctgccgcgcggagagcgccgcgtgatcgtgcaggacggggaggagatcctgctgctctggtacaagaaccaggtcttcgccatcgagaaccggtcgccagcggagggcgcctacaccgagggcctcctcaacgccaagctcacgcaggacgggtgcattgtttgtccatcaacagacagcacgtttgaccttcgcaccggggagataaaagaatggtatccgaaaaaccctgtcctacgggctcttacgccagccttgaggaaactattcacctaccgcgtgaaaacagacgaagaaaacatatacatcagcttcagcggagccgacggtgcggggtcagcggagattattttcagcgggaaagctcagcctggtgtgactgcatcggatgtcaatgtggaagaggtgaggatggtcgtcgacgaggatgtcggaggcttcggcttcaccagtgacaacgagctgatcaacggaaaagccgccataatcggcttcctcctgctgatcgatttcgagcttctaactggcaagggccttctcaaggggacggggttcttggacttcatctacgcagtttcgggagctttcaactgagagtcatatgtgtgtgttggtggtcggtccttggtttgttgtcggttccttcgggtcaagcgagccagcaggaaaagtcttccaggttctcccacccacacggccacacgcccacacccactgctcctctaatctcacatgctcatgcatcctcctaatgtaacctgaagctttaagaaaacaaagtgctcccggaagactccaagctgcagctaccggccttcctctcccccattccaattccgagaacaggggcggcggagtcaaccaggtacgatgtgctcggtagcgaggctggcgtttgtgcttgcactggccatagccgcctcgtcaattgaggttgcggagagcagagattttaatatctttgctcagggcagcttgcctgatgcaaccaagggatcgtctggtctagctgcaaccagtggaaagttgtgtcagttatgcgagcagtactcatccgaggcgctcctctatctcacacaaaacgagacccagactgagattcttagcattctacaccatgaatgtgccagccttgcccctctcaaacagcagtgcatcacgctggttgactactacgtaccccttttcttcttggaggtctccatggttacccctgagaagttctgcgagtcgatgcatctctgcaagaaggggatgaagattagcctacccacccgggagggtacttgtggtttgtgccaccatgttgttgttgaaattcttatcatgcttaaagaccccaacatgcagctggaagtaatcgacctactcaccaaaacatgcagcaaggcgcagaactatgaacagcagtgcaagcggctggtcctcaagtatattccacttattctggtgaagggccagaaattccttgagacaacggatgtctgctctgtgatacatgcatgcaaagcaggcacacaagcatcaatggaagccatgcctctgtctgccatgttgtgaaggtgatgcgaatcagaataaggcttatttgcctaggagatcaaattggggagaaacgatgaaaagtcagatgactgttttaagctctcttcctctattgctgaaacactattgatcggtgaaaattcgtctgtgtaaaaatcttgtgtaaatttgggggtatatccattgtttctctgaagtatacagcaactgcagctacatcaatctcttcggcattgggttgagaagttctaagcagtaattgcattttactgtatcatctatttgtttgtaactactgggagttattaattccttgtttctctgttgctctgacaaataagtttgaatacgagagaataacaacatttataaacagagatggttatttcaaaaaaaaaaaaaaaacccttggtcctccctccgtttcgttttgttgtcgctttatcgccaactaaaaagaaacggagggagtatcaagaatgccatcgaggtgtacttgactacccttagaagcctaggttttgtcagcgtgcgattcagtcagctgtgcttgtatttgaacaccatgcttgtctgtgaagtgaggaaggaacacaagaaagtcacatttgcggtgcttttctt

SEQ ID NO: 33686 - DNA, 252 bp, Zea mays
  unsure (1)..(252): unsure at all n locations
  Clone ID: MRT4577_130727C.1
cggccgctcgaggcggcgggcgggcctctccctcttcaggagcacaggccccagggaactgccgtcttctccgcgcccacggcaggccgcagaggcaccgccgccgaccccgctcctcctccggcgccagcgccagcctctccgtctccggcccggagatggatcccgccgcgcggaaggatctgtacccgcacgtcgagcccttcgacaccggccgcctcagggtctccgacgnccacaccatctactacg

SEQ ID NO: 33687 - DNA, 424 bp, Zea mays
  Clone ID: MRT4577_130729C.1
atgcacgtcgtactttagacgagcctctcgctgaagcacaatttcttatattcaagacataaagagacgcgggggtgcatatattaattgtgactgctgaactagctattacgcctatccagaagccaaaggaaatgaacatcagcattgctcaaagaattccaaatacacaatttcaagaaatcaggaggcaaaaatgtgaatatataaattggaatcatttggtttgatattaggcctcttctgaagccaacagaaatgagatctgaattcctcggggcataacaattacacagttttaagaaataaggaagcaaaactgttcatatatcaattgcaattatatggaattatatagggctatcctgttgccaaaggaaatgagatcggaatttctcgggggtaccgagctcgaattccctat

SEQ ID NO: 33688 - DNA, 268 bp, Zea mays
  Clone ID: MRT4577_13072C.1
cgcgttcgtaagacacatgagggggaagagagaggagcatcatagagaagaaggggaggctgtccagagtccacgcccgctccctccacacaatagagatggttattcggtttgctgcggcggcggtagaggctcttgttggagagataggagtgctggggccccttgctgctgggcagacgccaaactgcgcggagaaactgatcccgtgctcttcgtacatgaacacgacggggacgccgccggataccttttgcggcccgctttt

SEQ ID NO: 33689 - DNA, 208 bp, Zea mays
  Clone ID: MRT4577_130730C.1
aattccgttgctgtcgctgatcccgactgagctcgagcgcgcgtttccatatagtggagccagaccacgggcacacaaaacttcgtctctcagaacaagggtctagaagcaattcgaaggatggaaactcctattgctggtgttgggtcattgggccatatcgatctgggaaaatcttttctcctcaaccagcttctctccttatctt

SEQ ID NO: 33690 - DNA, 188 bp, Zea mays
  unsure (1)..(188): unsure at all n locations
  Clone ID: MRT4577_130731C.1
caaccctgagagagctgttgaatatttgtattccggcataccagagcaagctgaagctccacctgttacccgagagcctgcaagtgctcaacctgcanatcctccagctgctgctccacaggcagcacaaccagcatctgttccctctagtggacctaatgccaatcctttagatctccttccccagg

SEQ ID NO: 33691 - DNA, 604 bp, Zea mays
  Clone ID: MRT4577_130732C.1
attgggtaccccctcgaggtcccggccgggcactgcactgccgctcactactactgactctgaccaaggccctaaacagcaccggcctctcacatctactctgccatggatgatggccgccgccggcgccgggccatcccgcacgacggtagtacctacaccgacaccaagcgccgggatgactagcgcagggccaatatcgacgcagcgcgcgccgtcgctgacgccgagcgcactcgtcgctgagaccccggggcatggataagaagatctgactgggcgaccagccgcatgatgtcatgatcaccaacgacggtgccaacatcctctcccgcatggtgctcctccaggccgccgcgcgcatgctcacgaagctataccgcttgcaggacgccggcgatgacgacggcaccactactgttgccgtcctcgctgaaaacctcctccgacgcgcccagtagatcctctccgtcgaggcccacccaaccgacgccatcgacgatgctcaccgcctgatgacacgcgctgacatagatcctccacaggatgatcatccacattgagctatcagaccgagaatgcctcgctgaagaacacattcact

SEQ ID NO: 33692 - DNA, 125 bp, Zea mays
  Clone ID: MRT4577_130733C.1
ctattgttatattccacatcctccaagtatgatccgaaaccctatgaaacccaaacgacacggggacaaaaacagaaagcctacgccacattggcacaaaggaaacggccgcaggaaaaagacta

SEQ ID NO: 33693 - DNA, 636 bp, Zea mays
  unsure (1)..(636): unsure at all n locations
  Clone ID: MRT4577_130734C.1
tcgaggcnncggccgggacataacattataaatagaaaaattgttggcagccgttctttcctgtaccctgcacctgccttttactccattcccctcggtgcgccgccgacagaccgccccggcccgccccgcccagtagacagcgcagacatgccgctccacctaccacctggtgtcgtccccggccaccgctgccgagctcgcggcaggactgcagcgcggcgactctccgccggggccacagcttgcccccggggccgcgccacacgcatcgcgtggaccttgcgtcggacctctcggcgctggcgcgtgatgctgagaccgtggggggaaaggtgcagaccaagccgagcgcactgccgaaagaaagaagcactgagatgcgtgtatcataatacggaagtggctgatcaagatcatggtcctcaagacgtgcttcagtcactccgtcccagaggaggaacagtataccgacagcaacacccacgagatcatgtaactcaagctcaacaaatgacacaatgccctgagatgcttgagggatcatcgaaaacgttggagccaagaataaatgcagctactcctgccaggagatcacaggcagcataatttgaaggcactggaggaccatggaat

SEQ ID NO: 33694 - DNA, 327 bp, Zea mays
  Clone ID: MRT4577_130735C.1
aacaaaaccggggtcccaaatccaatgaaattttcccgcaaagggggggggcttttaccccttaaaaaccctctggggaaggaacccggggcctttacttttaaaggcgggcggtttttcccgccccacaacaaattttttccctttgtcccgaaccaattcagcatatgtgggggtgatcccccccctggggggtttccccccccaaagggttcgttttttacccaatgacaaccattggttggaaacttcttttaccggccggaaaccaaatggtcaaaaaagggcatccactacattcggcgctcttaaaacaaaggggggcgg

SEQ ID NO: 33695 - DNA, 1884 bp, Zea mays
  Clone ID: MRT4577_130736C.1
atgcgggacgcacgacttcgcctcaaccccgagaagtgtgtctttggagtccgccaagggaagatactggactacctagtgtcgcactgcgggatcgaggccaacccgaccaagatccaagcaatcatcaacatgacacccccgcagtcaaccagggatgtccagcgtctgaaaggcagattagccgcccttaacagattcatttccaagtccgcagagcggagtctacctttcctcaagacactgtgtgcctcgccatatgcagtcagcgcagcgctagtccaagagcaagacagagagggcacgacccggcagtgtctagtctactacgtctccgaagtcctcacgacctccaagtgcaacatgactgaattggaaaaaatcgcttacgcagtcgtcatggcatcacgcaagctacgccactacttcgaggcattcaaggtgcgggtcaccttggacaggggactaggagaactattcagaaacatggaggcgtccgtccgaatcgccaaatgggcagccgaactctccagatgcaccaacaacatagcagaatacaaagccgtcatcctgggccttcgcaagctgagagcgctcggtgtcaccgcctgcatagtcaagatagattccaaagtagttgccggccaggtcgaaaaagaatattcagcaaaagaccccgcactaatgcagtatctcacggctgttcgcagtctcgagagacagttcaagggcttcaccctacagcatgtggaccgcaccaggaatgaagagtctgacgcgttggctaaggaagcggccagaggatattaccacctaagtgacgtcaatgaggccaagcgcctcaagcaccgaagccgggacttcatactagtcgggggccagctatacaaaaaggggatcagtcagcccatgctaaaatgcgtgaccgaaaccgaaggcattcaaatccttcgcgaagtccacagcggaacttgtgggtcccactcagggcccagggccctcgttgccaagttcaccaagctgatcgcccacacatggccacttcaacgctgggggctggatattgtcggaccactacctacggctcaagggaacctcaaattcaccttcgtcgtcgtcgagtacttcaccaagtggatcgaggccagggcagtatccacaataatgttaaagaccgcccaaaagttcttctggcaaaacattgtttgccaattcagagtcccgtctgagctcacggtcaacaacggcaaacagtttgacagccaggacttcagagatttctgcctctccatcggcaccaagcctgccttcacctcggtataccacccgcaatccaacggcgtcgtcgagcgcgccaacggcaagattttcactaccatcaagaaaagacttctcgacaacaagaagggtaaatgggctgaccaactacctgaagtggtctgggccctaaacacgaccgaatgccgggcaaccggattcacaccttttcgtctattatatggatcggaggccatgacgccgcaggagataaagcatatgtcgcctcgaacaagcacatcagcagtccccgacgtcgacgaaccaacgtctaaagacctcatcgacggagaccgcgtcctcgccctgcaagccctcaacaaataccaagctcaaaccaaggccaggcgcgacaacgcggtcgtcccaagagagttcaacaaaggagacctcgtactcgtctggaccacccggacagagtcacggggccaactggagccgaaatgggagggtccattcatcgtcaagatgaaggcatcccccagcgcgtacaggctatcaacgccctccagcgaagacttagagcactcctggaacattgacaatctccgcaaattttttgtttaa

SEQ ID NO: 33696 - DNA, 1056 bp, Zea mays
  Clone ID: MRT4577_130737C.1
atgcgggacgcacgacttcgcctcaaccccgagaagtgtgtctttggagtccgccaagggaagatactggactacctagtgtcgcactgcgggatcgaggccaacccgaccaagatccaagcaatcatcaacatgacacccccgcagtcaaccagggatgtccagcgtctgaaaggcagattagccgcccttaacagattcatttccaagtccgcagagcggagtctacctttcctcaagacactgtgtgtcgtcatggcatcacgcaagctacgccactacttcgaggcattcaaggtgcgggtcaccttggacaggggactaggagaactattcagaaacatggaggcgtccgtccgaatcgccaaatgggcagccgaactctccagagtcccgtctgagctcacggtcaacaacggcaaacagtttgacagccaggacttcagagatttctgcctctccatcggcaccaagcctgccttcacctcggtataccacccgcaatccaacggcgtcgtcgagcgcgccaacggcaagattttcactaccatcaagaaaagacttctcgacaacaagaagggtaaatgggctgaccaactacctgaagtggtctgggccctaaacacgaccgaatgccgggcaaccggattcacaccttttcgtctattatatggatcggaggccatgacgccgcaggagataaagcatatgtcgcctcgaacaagcacatcagcagtccccgacgtcgacgaaccaacgtctaaagacctcatcgacggagaccgcgtcctcgccctgcaagccctcaacaaataccaagctcaaaccaaggccaggcgcgacaacgcggtcgtcccaagagagttcaacaaaggagacctcgtactcgtctggaccacccggacagagtcacggggccaactggagccgaaatgggagggtccattcatcgtcaagatgaaggcatcccccagcgcgtacaggctatcaacgccctccagcgaagacttagagcactcctggaacattgacaatctccgcaaattttttgtttaa

SEQ ID NO: 33697 - DNA, 793 bp, Zea mays
  Clone ID: MRT4577_130738C.1
ccggtcgacccagcgttcgctccgctccctgctcggtgcccagcctgcttgccacggatgcgggccgccgcgttgccaggctgctctctctgctgggtctcgatctctcgcgcgcggcttcctgctcctccctctgtccctgctcccgtcgtgccgcgctcctcgaattgctcagccttaatccccgtcgtgctgcgctcctccctctgtccctgctgcgccgtcggcagctggttgccgggttcgtgtcgtgtgtgcctgggcgctgcccccattggtcgcctcggtgtgaaatcgccgttgcgtccaggattttggcatgtctccccgcgccgtcatcccaaacgccgcaacagacttaccctttatgatgttcaccaagagctcgacaaaaggttcgaacaagtcgtactgccatcgtcttcgttgaatgaagccggaagacactcttatgctggccacgcgtcaccatctcgataaaaaggaatcccatgggtatctggtcaagaatagaaactgtgtgcctcgctcgtcagacgtgtgtgagcaatgacgtcaaccggaaaccgtcatcgtgcttccgactatcgcgtcgaattagtcagggtaagcaaatttgttattcgtgctagtggattgatgaatggtttgactaggtataatatttattagattgtctgagtcgctttggtaatttgatcgatgtcgtaagatgaaagaggtcgcaataggtcctagtgcttgcgggattgcaggtgttaaaaatgtgatgttttattaatatatatgtgat

SEQ ID NO: 33698 - DNA, 1155 bp, Zea mays
  Clone ID: MRT4577_130739C.1
atgcgggacacacgacttcgcctcaaccccgagaagtgcgtctttggagttcgccaggggaagatactaggctacctggtgtcgcaccgcgggatcgaggccaacccaaccaaaattcaagcaatcatcaacatgacgcctccgcagtcaaccagagatgtccagcgtctgacgggcagattagccgcccttaacagattcatttccaagtccgcagagtggattctacctttcctcaagacactgcatggtgcaaaagacttcgcatggggaccagagcaggtggcagccttcgcatcactgaagcaacacctgtcagacttggcaattctcaccagtccagaacccacgctgcctctgctgctctacattgcaggctcgccatatgcagtcagcgcagcgctagtccaagagcaagacagagagggcacgacccgacagtgtccagtctactacgtctccgaagtcctcacgacctccaagtgcaacatgactgaattggaaaaaatctcctacgcagtcgtcatggcatcgcgcaagctgcgtcactacttcgaggccttcaaggtgcgggtcacctcggacaggggactaggagaactgttcagaaatccggaggcgtccgtccgaattgccaagccgaaccctccggtcccgtccgagctcacagtcgacaacgacaaacagtttgacagccaggacttcagggacttctgcctctccatcgacaccaagcttgccttcgcctcggtataccacccacaatccaacggcgtcgtcgagcgcgccaatgacaagattttcactgccatcaagaaaagacttctcgatgacaagaagggtaaatgggccgaccaactacctgaagtagtttgggccctaaacatgaccgaatgtcgggcaaccggattcacaccttttcgtctattatatggatcagaggccatgacaccgcaggagataaagcatgggtcaccccaaacaagcacatcagcagtccccaacgtcgacgaaccaacgtctaaagacctcatcgacggagaccgcgtcctcaccctgcaggccctcaacaaattgaaagggaaatgtgcccttaggccatttctaagtattttggtgattgagtgccaacacaagtggatttatgcaaagtga

SEQ ID NO: 33699 - DNA, 637 bp, Zea mays
  Clone ID: MRT4577_13073C.1
ccttcccatggcgcagggttcccaggcgtccatcctctctcccttcttcccttgtgcaggcgcccccatctcctccccttttctgcagcaagcagcgcccagctgagccccgtccactcgcccagccctatctccctcacggcgccctcgctggtgctcgccccccctgctggacgccgctcctcaccctggtggccgagctctcccatggacgtcagccctcatcctcaggttgcccctcccaaggcgtttgttcctgcccaaccatggacgcgcccctcccttttgctgctcgtcgtggacaggcttggcgccctaatcctcaggttgcccctcccatgacggtcatggtgtcatctgttatcggaggaaaaatccctaggaatccgaaggtgatgaagtgatgccccagtgcagcgcctggtaggtgtccggtggaacgcctaagccaggactattgtcgttcttatgaacctggtatcgattgaggtacgctagttgatcacgtgatgcagaattcaagaattgagttgatctcaagatgatgaaatgatgaactactccgacaacgatgtctgtgaatcaatctactactatacaggttcttagagaaaacgtttattgtgcaataaatgat

SEQ ID NO: 33700 - DNA, 642 bp, Zea mays
  Clone ID: MRT4577_130740C.1
tttttttttttttttttttttttttttttttttttttttttttttttttttttttttttttttttttttttttttaggggaccccctacccggggtttggaaaattttagcttaccgggggggctttagcatattagcaaacattggaactttcccctttacggaaaacatgactttggggagaggccaaaagggaaccaagctgttttaagttggttggggaaaaaccaggggggaagcagttaaaaatgggggggcggcaacccaaactaggatcgactcccccaaaaaaaaccccctgcccttaaaaaaacgggctttcctaccagaaaacgggccgggggaaaaccttcgaggccgccaacgggaaccatgccctttccagctgggaacgggtttttcaatcgggaaagaaaccttgacaaaaaatatactttaaacgcccccacaagattgcttttgcctggggcatgaaaaaaaaaatcgggggcaaaaatagggggggcccttgcaaggcataagacaaaagacagggcagggccattgggaaacccccccccaagtattacatcatttgggggggccattttttttggcaaaatggggaaaccaagggccccccaaaaaacggggccggggact

SEQ ID NO: 33701 - DNA, 315 bp, Zea mays
  unsure (1)..(315): unsure at all n locations
  Clone ID: MRT4577_130741C.1
atagagtccttcagaacaattaaaagagcctgacggttctcatttctttcaatctcaatagattgctatagcttgatcggtnaaaaaaaaaaaaaaaaaaaaaaaaaaaaaaaaaaaaaaaaaaaaaaaaaaaaaaaaaaaaaaaaaaaaaaaaaaaaaaaaaaaaaaaaaaaaaaaaaaaaaaaaaaaaaaaaaaaaaaaaaaaaaaaaatggggggggcctttttaaagatccaaattttagtgcccgggtttggaaaataatatttttttttttggggcccctaaatataaaatcatggcccgttttataaa

SEQ ID NO: 33702 - DNA, 333 bp, Zea mays
  Clone ID: MRT4577_130742C.1
ggcatgttaacttaccggaacatagcccccctttgcgccccggggaacccaaagcaaaaggcccccctcgggggacccggggacccaaaacaaccccgcaacctggggggtccacccaatgccgcacccgggacccaaccttaaaaataaggtaaaacccggccaggggcccccccccccaaaaaaaacacccaggggggagccggccccgaaacggaaaaagagcggcacaccggggcggagaccccaaattagcccgggcgggcccacccgggggggagcccccgcaaggcattgggggcccggccgggggggcggacccaaagggggaaa

SEQ ID NO: 33703 - DNA, 115 bp, Zea mays
  Clone ID: MRT4577_130743C.1
tccgcctactgcgaggccggatgggagcctttcgtggccgccggtatccggtcctccacgcatgacacgcacccgccgtaactcccacagcctgggccacaagtcccgccgtgac

SEQ ID NO: 33704 - DNA, 667 bp, Zea mays
  Clone ID: MRT4577_130744C.1
caggcaaggccatcgccgccgacgtccgccgcgaggtcgccgccgatgggccgcgctctcgcggcccacggactcggccggggctggccgggcatcgggggagcaggaagttttttttttttttttttccttcgccttgcttgctcgtgtgcctctggctgccaggcgtccagcaatccagcatggtactcttgttatgttgcaattgtagcaatctctctgcttgcctgacgataccattcctttgcataccagtatctgcaggcctccaggcttgcggtccagtggatttggtctgatcctgtctccatcaagcgtacatttctgtttgatgtttgggatttgaatccttgagcgctttctcatagcaggatctgaaaatgcaactagtcaataaaattggcatccgctctgtacagtatgtcttatctgttaaccaaggggatttcatgtcatatcccaatgtcgcttctggtttggctgcgctaatagtgctttcggagctgttgcatactatgaactccccccagtagcaaattcgcacagataagtaaatggagctcaaacatagcattgctttgatcgcaaataagaatccatagctaaaaaatctgggcacgatcaatctaagctcaatgtcctccacaaaatttgaactttttgccct

SEQ ID NO: 33705 - DNA, 397 bp, Zea mays
  Clone ID: MRT4577_130745C.1
tccatcccgtactcgaaggtgagcaaaccaaacccggcccggccgcgcgtctcactcccatcgtaattcgtaacctacagacacctgttctcggcaccggtgcacgccggatcttctatcgtcggatacaccgtgagtaggcgtgatggtgcttgataccccgttttcgtgcagcttgttgctaattcgtttatagtttgaggtgatcaagaaaccacccttgtttctttcttttctttactttctttgggaacatatttatgatgtaatcaattggcaaaatctctatggaatatatttttttcaactgttaaaaatacctggccttagcacttttggagctccctttgtgttcaacgttgccaaatggttttcttttggcccctttcgaattttt

SEQ ID NO: 33706 - DNA, 857 bp, Zea mays
  unsure (1)..(857): unsure at all n locations
  Clone ID: MRT4577_130746C.1
tcgtgttccatcggcatccgcatcgtgcacgcctccatcaccaccagcagcaggaacaatgccagagtctggcaccttggtgcgatccaaatcacgggtgcctgctagcaaatctggatctctcctgctgccactgtagtagctcctggtcctgctcctacttctcctccttcgatctactctggcatcagctgaagcccagcgatcgttatgcgaataggaccttgacatcggtggtctcttcgactcatcgtagtcgcgtgtccggcggccgctacggtcagcatcaccgccaccgtcatcgttgcatttacgccttccatcaaagctgtggctcctcctgtcccaccccgacctcttggcttccctgtcgtcgtcccaccttgagccacgcccctggtcctcggctccacttccactccgccgccacctcgggccgtcgtcctcgtctctcttcctcccgtaactagagggagctagagtcggaggaggagcgggagcgggagcggggggctcagggcggtaaatgggattgtgatttgggtcctcccttgccaggagaaggtgctcggagaggaggcctttggcaaccaagtagtgagcggccagacggccggcctcgagcaggatgtcgccgcgtgaacgcctctcggcagcgggggcgaagccgttaaggagaggatcctcctcgtatcgccgtggcgggggcagctcggagctgcgcctcttccgctgtggagggggcggatcacgtgggcggcgctggtggcgcggtgatggagggggcggggatcggcgacggtagcgttctcctggcggngggggcgggggcgggtcgcggccccgaatgcgggacc

SEQ ID NO: 33707 - DNA, 372 bp, Zea mays
  unsure (1)..(372): unsure at all n locations
  Clone ID: MRT4577_130747C.1
tttnattatttctttttttttttttttttattttttgttttttttttttttattaccttttctttttttttcaggggccagaaacaaggtaattaccggtacaacaaaacggggaacgggggcccccgaaacacaatcccaccggccggggatagaaacccaaatgatttccaagccccagccggcccttcaaaaaaagggggccttttccccttgggaaaaaggaaaccaaacttgcccccccccgggtccctaatacaatgggcaccccgggggaaaaatcgggcctgggggtattgcgtaaccaaaaaaacagaacccccccacccagggaaaaaaaagccccaaaactccatggataataaatttgca

SEQ ID NO: 33708 - DNA, 1514 bp, Zea mays
  Clone ID: MRT4577_130748C.1
ttgggtacctcgaggccggccgggattcgaggccatctcttatcaccttcttcgtttcatcctctgattctccccctgctggtctgctctgctcccatcccatggagcccgacgccgcccaaaaccctagccccagccccgtccccccgcccatctccgcctactaccagacgcgcgccgaacaccacgccgtcgtaactagcgactggctcgcccacgccgccgccgcagccgcagccttccccggcgccgataccgccgatgccgccccgcccccgtcccccgggggcggcggcgtgatcgaggagttcaacttctggcgccgcaagcccgaggccgccgaggcggtggccgccatcatggctctcgccgccgtcatccgctccagcagggccaccaccatgatggagctcgagatcgagctcaagaaggcatctgacaagctcaagtcctgggatgctacatccatttctctttctgctgcttgtgatttgttcatgcggtttgtaacgaggacctcacatctggagcatgagaagtttgatgcagcaaaatcgcggctaattgagcgaggagaaaaatttggggagatatctttaaaggctcgcaagacaattgcaatgcttagtcaggattttatttatgatgggtgtactatacttgtccatgggtattccagagtagtactggaagttctaaagcttgctgcatccaatcgcaagctcttccgggtactatgcacagagggcaggccagacagaactggtttaaggatgtcaaatgaacttgcagcattagggatccctgttaaggttctaattgattcagctgttgcttattccattgatgaagttgacatggtttttgttggcgctgatggggttgttgagagcggaggaataatcaatatgatgggcacttatcagatagctcttgtggctcatactatggacaaacctgtttatgtggcagctgaaagctacaagtttgctcggctatatcccttggatcaaaaggacatgacgccagctcaccgaccaatagattttggagtcccaatacccattggtgtggaagtggagacatctgcaagagactacacacctccccaatatctcacactcctcctgaccgaccttggtgttctgacgccgtctgttgttagtgatgagctcatccaactgtatctatgatctttgcggcaggcgccgttgtttcattggcatgtaacatctacagttgagtccagggtttgccctatcagttttgactatgatgtatgcttgactttgtggtgctgatgcgatgtttagaagaatttctcggaacgattatgctgagagaaatcaacagcttgtaagagcttaaagtacagtcatggttacgaatctgccccagaccattttcagcactaacctatttgtaggacatgctctgataaaattatggttccctcaaacagtaagtgtaaatggatctccacaacagaatatgaatccattagtattgcctag

SEQ ID NO: 33709 - DNA, 2211 bp, Zea mays
  Clone ID: MRT4577_130749C.1
ccgctcgggcgcttgacatcctccgctgggccccgttcttctgggaccggccctcggtgtctgagcccgcgccggtttccgtcccggtgtagggcgcgcgcttcgaagccgggccccgttccgccctcgaccgcccccctggcgctctgccccccaccgagggcagggtcccctcgctgcgcttgctccctcgcgtcctccgcggcaccaacttttcccctgtttaccttatgaaacctggagcatatcaatttgccacttaccagatcatagcggacttcgctttcctccccttcggcggagggcctcgcaagtgcgtgggggacctggccgcgctcccggggtcgccggtggcgcgcgcccggccggccgggagttgggccggtagtaaaattcgattagccaatatgaggacaggtggaaagcccctgcaacactgacctgttatgatgtcttaatgcacagcatggctctgtctacaagcttgcttttggacccaaatcattcgttgttgtctctgaccctatcgttgctagacacatcctccgggagaacgctttctgttatgataagggagttctcgctgaaattttaaaacccataatggggaagggtcttatacctgctgaccttgatacctggaagcaaaggagaaaagttataacacctgggttccatgccttattcatagaagctatggtgaggacatttacaaaatgttcagagagaacaatatcaaagcttgaggagcttactgaaagtgaaggccgtgaacaaaattcgactattgtggaccttgaagctgagttctccaatttggcacttgatatcattggattgggtgtgttcaattttgattttgactcggttactaaggaatctcctgtaataaaggcagtgtatggaacacttttcgaagctgagcaccgttccaccttctacatcccctattggaatcttcctttgacaaaatggatagttccaaggcagcgcaagttccatagtgacctcaaagtgatcaacaattgccttgataaccttataaaaaatgcaaaggagacgagacaggaagctgatgtggaaaagctccagcaaagggactactcttctctgaaggatgccagcttgctgaggttccttgttgacatgaggggagctgacgttgatgatcgccagcttcgagatgatcttatgacaatgcttattgctggacatgaaacaactgctgctgttctgacatggtctgtttttttgctagcccagagccctaccaggatgagaaaagcccaggcagaggttgattctgttctcagcaatggggcaattactgtcgaatctcttaagaaactggagtacataaaactgattattcttgaagctcttcgcttgtatcctcagccaccattgttaatcaggcgttctctccggccagacaagttgccaggcgggtgcaatggagcaaaagagggatatgaaataccagctgggaccgatatatttgtttcggtatacaacctccacagatccccgtatttctgggaccggccaaatgagtttgaacccgagaggttttccgtcccgaagaaggacgagagcatagaaggctggtctggttttgaccctgaccggagtcctggcgcaatgtaccccaacgagatcatagcggacttcgctttcctccccttcggcggggggcctcgcaagtgcgtgggggaccagttcgcgctcctggagtcgacggtggctctggccctgctgctgcggaagttcgacgtggagctgagagggtcgcccgacgaagtggagatggtgacaggcgccacgatccacacgaagaacgggctgtggtgcaggctgaggagaaggacttgacggcccaacattagctttgcagtttgcactgagtgagaagtagctctcgtgcttgactcctgtgatgtgctttaggcgagctaaactgcatcgcagacagaccagtggatgggaaccgtgtacactgaaaacatctcttgtaggattgtagcgtaacaggtgcaaccacaacaatatattatttatctatctatctaattgagcttgacattccggtgcatgcacgcacacgaaaaaaaaaaaaaaaaaagcggccaacaaaaaaaaacaaaaaaaaaaaaaaagggcggccaaaaaaaaaggaaacaaactaacgggcgcgggcgtccaaaaaaaata

SEQ ID NO: 33710 - DNA, 1138 bp, Zea mays
  Clone ID: MRT4577_13074C.1
cccagcggcgaaaccgcgcgtgtcgccagcccatagatcagagcctagccagagccagagctgagagccgaggagggaaacgaagaagcggccatggcgatgaagcggccggcgcgcagcgacccacacctgccacccgaggaggcggcacgggtggaggccgaggttcggagctacttcgacagcgtcgcgccgaggcgcccggccaagccgccgcgcagcgacccgtcggtggacaccttcgcggaacccgccgccgtcgacgccggggaccacgacttgccggagctccgcaagctgcgcgacctcgaggcgaagccccagaagctggtgttggacggagggggaggggacgtggatggcggggaggattacgtggagacgcgatactacgatggcctcataggcatcgacaagcagcatcacacgactgggacaggctttatcaaagtggagagatccaatggcagcaccttcagtgtgatgactaacggctacccacctgccagctctgtccgctgcacgagcaatcctgcgacaaatgattggataccatcttctgaatcgatcatccctgcttcgaacaagcccagcaggagcgactcctgaccagcctttccttgccttgaagtgccgtggattgcttacctgcaaagataataaaatgcactgcttctgtgtggtagtaccgtagtagtgcagcacgcggcagagatcctgacttgacactcgagagagagagaagggaagcatactgccggagtgccgggcgcacgggttggggacacgagatgtgactacttcaacgaagaatgtgtacgggcacgggtgcgtcagcacatgttacttgttgctgcacctgcacactactgttcgagtgttgataatgaactacagaccctgaatgaatgtgcctatgtgatggtttggtactttgatgaccggtttttcttttccagcaaaccttgatgaccaggtgtgcggcgtgtgccccgtcctgatcatgatatgaatttgtgtgcaagatgcgtctgtgtaagagcaagtttaataatatagtttatagtgagtttttatgatgttgacatataacatatagacaattaaaagctcggtcatataataaccccgttataat

SEQ ID NO: 33711 - DNA, 1176 bp, Zea mays
  Clone ID: MRT4577_130750C.1
ttcgtgcccgctcgaggccaggcgggccggctctctaaaaccctagcactccgctcccctacactccctccttgcctctacgccgccagcggtccatgggcaagtcaagcaagaagtccgcggcccctactgtcgtggcgccggcggccgtccttaccaaggggaaggccgggaagaagcgcgaagccgatgacgagatcaagaaggctgtaagcgcaaagaaacagaaggctgcgccggcaaaggcggtgcccgggcccaaagaggccgccaagaaggccaagaagcagccgccgcccaagaaggttgagagcagcagctctgaggagcagtcatccgagtccgaggaggaggaggttcctaagaagactgcaaagcctgtcaaacacgagtcttcagatgatagcagcgacgattcctcctctgacgaggaacctgcaaagaagccttctgctaaacctgtgaccccagctgccagcaacggctcaaagaaaggcaagcctgagagcagctcttctagttctgaggatgagtccgatgatgacgagaaacctgctgctctggtaaagaaaacaccagtcatcgaatctgacagctccgaaagtgactcagatgatagctcagatgaggatgttcctgccaagactcctgctgctgctgccaagaaggtagattcttcagacagttctgagtcggagagtgaatctgaggatgaggagaagtcaaagaaagccgcacaggccaccaagatagctcctgcagctgctaaaagaaaggaggagcccagtgattcctcagacagtgatgagagtgatgaagagcctccccagaaaagctgaaggatgctgcgaaggttactcctaagtctgccaaaaggacagcagcagtgatgatgagctgatggctgatgatggagcgcatccccccggaccagcagcgcctcatctttgctagaaagcaactggaggacggcaggacccttgctgactacaacatccacaaagagttcaccctccaccttgtcctccgtcttcgtggaggcatgcagatctttgtgaagaccctcactgccaagaccattacccttgaggagtactcatccgacacccatccacaatgtgaaggcaactatccaggataaggaggtcatccccccgtaccagcagcgcaccatct

SEQ ID NO: 33712 - DNA, 188 bp, Zea mays
  unsure (1)..(188): unsure at all n locations
  Clone ID: MRT4577_130751C.1
tggggagacggcgagctctacgacgtcaccgaccacgggccacgcgccgccgccgccgtcgnncccatgtccacncccccgaattgaaatagctgcgagaacctcctgtgcgtccatccatccatccatccatccatccatccatccatcgcgtgttgataaccaccgttcattgtgaaaaataccaa

SEQ ID NO: 33713 - DNA, 445 bp, Zea mays
  Clone ID: MRT4577_130752C.1
gccacacgatccggccacggcgtccgtaacgcatccagcggatcgacgcgctcctgctgctcaccttctttgcccttgagctactcaaattcaacgcacttgcgcgcagtgcgacacacctcccgaccgagacataacgccggcgtcacgcaagtgatggggcttgcaccacatccccctgacgagaactagtgcaacagcgaagacggcctcaccgaccgtcactaccaacagggggcatcaagaatgaccagtgggacacgcgctacaccctggcaccaagggactcggtgggggcgtacacgcgcaacgagagcgttacactcgctaggggcgtaaccaacctgcctttggttctgttcgcgttacttgctcggcatcgtggtacgctttccaccagaagctgcaaaagcacatgctgcatccacgtctgctattacagcgc

SEQ ID NO: 33714 - DNA, 378 bp, Zea mays
  Clone ID: MRT4577_130753C.1
gacaaagtgaaaaaatggcgagtgatgttttcgtagcctcgtgtatccatggaggcacacacattgtggagagaagtgcgcccgggtatgtctacaattgctttcatatggttatattgctccagattgttatcttgtggatttacatgaacgtatacccctaaggtcaatgagaagagcatgtctacacctttggtgtcgtgcttcttgagctggtcaccgaaagaagccagtaggtgagttttgggacgacatcaacattgtccatcggatcaagttgatgacaaacacaaacaatgagcagataatcaagattattggccctaggttgttggccatgcacacaaggtcattcatgtattttgtgtcgcacttctc

SEQ ID NO: 33715 - DNA, 246 bp, Zea mays
  Clone ID: MRT4577_130754C.1
gtggtctggcctcgtcgccaacggacgtctgacgcgcacccacgccatgctctacagccgaagatgcttcgcggcggcggccaaccgggtccggacgttcgccacggccttctgcgacgcgctggcctcgcgcgcggatgcggcggccttcgggactcccaggccgcaagaacaccccgagaaggctgctgcgctgaacgatccggccgatgtgctagacgttgctatcggtggagcaggcatgtg

SEQ ID NO: 33716 - DNA, 377 bp, Zea mays
  Clone ID: MRT4577_130755C.1
cttggcccgcttaaaaaagatgaatcgtaaaaaatctgaggcgagaaggaccattgagagtcactagaaaccaccatttcaccatttctctggagagcatgccctgtcgccctactaacactatggacatttctattgattggataacaaaccttttgtagactcatgaagatatgcatccatatacatatcctacaagatgcattcgccatgcaagggcctgtgcgtccttcctcctgtgatggatacaaagactacaaagtaaccggttgcctacatatcttcgcatggtgaatcctttcttcaatgtatagagcataacatcaaccgccgcacctagatttccttccaaacataagtatttgctaagatgaaca

SEQ ID NO: 33717 - DNA, 378 bp, Zea mays
  Clone ID: MRT4577_130756C.1
tccttaaaaacgaattttaaagagtgaaaggggggttttatacataaattggcggggtagcttccaaagttcatcataatttctaaaccataccgtggggtaacacagcacccttttggcaaacaaaatttatggttacccaactcgaaaaatgaaaaaaaaacttcttaaaaacatgtttaacacttattccttacaactactaaactccttggaaaaaaatatgattaagccttgaaacttaaaacactataaagattctaggggggctataattaccatgggttatttagatatgtcatagaaaccaaatttttctcttttttttttttctcaaccgtaccaattttaaattattttaacaataatttttctttt

SEQ ID NO: 33718 - DNA, 182 bp, Zea mays
  Clone ID: MRT4577_130757C.1
ttcttaggatgattgccacccgctgtactaacgaccgcatgatccgtctggcgaaggcacgatatcttgatgtcaaaaatatttttggatggggttattttttgaaaaaacattaaaaaaagggcgcgttatagaccgctactacctgcatgcagatagtttttaggcacctaattattatg

SEQ ID NO: 33719 - DNA, 169 bp, Zea mays
  unsure (1)..(169): unsure at all n locations
  Clone ID: MRT4577_130758C.1
gactgggttttttntttttttttttttgagagtgtgagtnttaagataattggngatagaaggggtttngggtgggcccggtttactnnagngcaccacacgcttggagctnccagntgggtggactgacgcgtatgccctgcacccccgggggggggaggggtacctg

SEQ ID NO: 33720 - DNA, 2668 bp, Zea mays
  Clone ID: MRT4577_130759C.1
ccgaaattcgcctcctctcacgacgcggcccaaccaacctgccccaaaacctagctagatttagaaaaacaaaaaacctgtccccaacccgaaccgtgagatggctgagtacggcgagcgctaccagggcaacggcgaccaggccacggccgagggtggctatgcgcagaccgagtacgccgccggcgccggtggctcgccgccctccgacagcaatccctccgtgttctccgaccacgccgacggccgctcctcccagccccagcatgagacccaatcacatgacagtggttcctccaaatctcaagaaagggaccgagaacgtgataagggcaaggacagggagcgaggcagagaccgtgtccgcgaaaaggagaggggccgagacagggacaaggatcgtgaaagaggtgacagagacagggatcgtgatcgccaccacagggatcgtcgcgagcgcagcgagataagggaacaccgtgatcgttctgatgatcgtgaccgtcgcaggagtcatgattctgagaggagaagagatcgtgacagagatggccatcgtaggcatcgctcccgttccccttctaagggtcgtgaccgtgaccgcagatctagttctcattcacgctctagatcgaagagcaagcgtgtgagtggttttgaccaagcacctacacaacaggcagttcctattgttgctgctggtgttatccctggtcagctgcctggtgtcaccgctcctattcctggggttggggtgcttccaaacttgtataatttggctgcaggacagttcaacccccatgttattcagccacaagccatgacacaacaggctacccggcatgctcggcctgtctatgtgggcggacttcctccaactgctaatgagcagaccgttgccatattcttcaatggagttatggctgctattggaggaaacacagctggtccaggtgatgctgttcccagtcaaccaccgctatggcctaggggcttcattcagcagcatcctttggattgcaacatgatgagaaacattaatttttctaatgcatcctatggtccaacaacaatgtgggctcccattcagacaggaaatataagttccgaatcaaccatgctaccagccacacaatctgcagtatattggaatcattatatgaactttgtcaggaatcctcttggttcagttcaaggaaatccttttccagattcgttttcaggtacaaatactagtacacctttgcagggttcgaatacaataccttcaatacctgtcaacttggagtccgctgctgaacatagtgttcaggacatcaatagtcctataaagacttctgcccctgttacaaaaccaaagaaaacaaaggaacaaaattatactgctgctgaagaccttctactttgcacaacctggttgcaaattagcagtgatcctattgtccacactggacaaaggaagaagggactttgggcacgaatagaaaaaaggtacaacgaacaaaggggcgagtacccttgtagaatgaatcgagcccttagcagcagatgggacaagattagagcagatgttggtaagttctcaggctgttacgcaagagtgctgcgagagaaacaaagtggtttgacagacgacgataagacttccaaggcggcaactttgtttgcacatgaggagaacaaaccatttcattttatgcattgctggcataagctgaagggggaacctaaatgggagagcatttgtcaaggacctttccgaggattacatggaaaagcaattggatcttctggtggtccttttattggtgtagaagaatcagatagtgggtctgctggtttgactggtaaacggcctctctgtcgtgattcttctaaatcagagagaaagaaggctgcgtcatcaacgacgacggaatacttaagccgtcttcaagaattaactgaaaaactaattcagcgcatcatagaaaagggtgagaagaaatataagtacaatgaacaggacatggagctagagaagaagaggttggacttggaagcaaaaaaattaagcattcgtaaaagggaattgagattaaaagaactaagtatggccgaacaacaactcgagatgctggagcgtactcgtgaagacgaggtcgatccagaagtatggagtatgatgaaggagcgcaaaaaacatttgcagcagttcatatttagtttttgctaaatttactgttgtttaacatgtcgtgcttctgtttccatatccggtttgcgaagaaatttataagtgcattgtcttatttgctttctaaaacattataaagttgttgtatgcttatgtcttgcaagacatgtcagtgttattaaagtttgtaacgttaattctgaaaggaaatgggcattaactattttctattaatccaaatccacatatgttaaggccttgttcggttattctcattccatatggattggagtgtattggaatgagttttgacttgctatggatttaaacaaactcaatatcatccaatccacatggattgacgaagaaatgaacaagccctaaggtggattggggttaatactagagtatccaaactaggccttagttgaaggatttgtacttgctactagggcagcggtgatgaattcataagccgctctgttctgggtc

SEQ ID NO: 33721 - DNA, 683 bp, Zea mays
  Clone ID: MRT4577_13075C.1
gggacaggctttatcaaagtggagagatccaatggcagccccttcagtgtgatgactaagggctacccacctgccagctttgtccgctgcacgagcaatcctgcgacaaatgattggataccattttttgaatcgatcatccctgcttcgaacaagcccagcaggagcgactcctgaccagccttgccttgccttgaagtgccgtgaattgcttacctgcaaagataataaaatgccctgcttttgtgtggtagtaccgtacgcgccaaagatcgtgcctcgacactcgagaaagagaagggaagcatactgccggagtgccgggcgcgtgggtgggggaccccaaaggagtctacacaacggagagaacgcggggggtacgggtgcgtcagcacatgttacttgttgctgcacctgcatactactgttcgagtgttgataatgaactacagaccctgaatgaatgtgcctatgtgatggtttggtactttgatgaccggtttttcttttccagcaaaccttgatgaccaggtgtgcggcgtgtgccccgtcttgatcatgatatgaatgtgtgcaagatgcgtctgtgtaagagcaagtttaataatatagtttatagtgagttttaccaaaaaaaaaaaaaaaaaaaaaaaaaaaaagtactctgcgttgttaccactgct

SEQ ID NO: 33722 - DNA, 841 bp, Zea mays
  Clone ID: MRT4577_130760C.1
acctcctccgaaatcgcctccgctccccgcacgcggtccaaccaacctaccaaaacctagctagatttagagaaaaagaaaaactgtccccaacccgaaccgccgagcccggcggccggtgccgtgagatggctgagtacggcgagcgctaccagggcaacggcgaaccggccacgcccgagggtggctacgcgcagaccgagtacgccgccgccggtggctcgccgcccgccgatagcaagccctccgtgttctccgaccacgccgacggtcgctcctcccagccccaggtttgtaccgaccgctcgcttggaggcgcgcgatccgttggagttcgagctaaatgtgggctctagagggatagatcagatgcgtcggatcgatttgttccgttgcggcgttatggttgccttatgtttcagaattcgtgttgtgcagattagcatacaaacatgagactcaatcacatggcagtggttcctccaaatctcgagaaagggaccgagaacgtgataagggaaaggacagggagcgaggcagagaccgtgtccgcgaaaaggagagggaccgagacagggacaaggatcgtgaaagaggtgacagagacagggatcgtgatcgccaccacatggatcgtcgcgagcgcagcgagataagggaacaccgtgatcgttctgatgatcgtgaccgtcaccgcgatgatcgtgaccgtcgcaggagtcatgattctgagaggagaagagatcgtgacagagatggtcatcgtaggcatcgctcccgttccccttctaagagtcgtgaccgtgaccgcagatctagatctcgttcacgctctagatcg

SEQ ID NO: 33723 - DNA, 255 bp, Zea mays
  unsure (1)..(255): unsure at all n locations
  Clone ID: MRT4577_130761C.1
ggacacgaaagggatgtatataggaacgacgggggggttccagaaaaataaccgaaagaccccgaaagaacattgggcccattatatatttgcaggggtttacagattatccagagggaaatttttttgaatttactcaagccaaaagggggggggggnggttcgaccaggttaaaaaacttaagggaattgaatcccaaggggaaggtttttgggtttaaaattacccaacaattgggggctgattcaagcatt

SEQ ID NO: 33724 - DNA, 2204 bp, Zea mays
  Clone ID: MRT4577_130762C.1
cacctcctccgaaatcgcctccgctccccgcacgcggtccaaccaacctaccaaaacctagctagatttagagaaaaagaaaaactgtccccaacccgaaccgccgagcccggcggccggtgccgtgagatggctgagtacggcgagcgctaccagggcaacggcgaaccggccacgcccgagggtggctacgcgcagaccgagtacgccgccgccggtggctcgccgcccgccgatagcaagccctccgtgttctccgaccacgccgacggtcgctcctcccagccccagcatgagactcaatcacatggcagtggttcctccaaatctcgagaaagggaccgagaacgtgataagggaaaggacagggagcgaggcagagaccgtgtccgcgaaaaggagagggaccgagacagggacaaggatcgtgaaagaggtgacagagacagggatcgtgatcgccaccacatggatcgtcgcgagcgcagcgagataagggaacaccgtgatcgttctgatgatcgtgaccgtcaccgcgatgatcgtgaccgtcgcaggagtcatgattctgagaggagaagagatcgtgacagagatggtcatcgtaggcatcgctcccgttccccttctaagagtcgtgaccgtgaccgcagatctagatctcgttcacgctctagatcgaagagcaagcgcgtgagtggttttgaccaagcacctacacaacaggcacttcctattgttgctgctggtgttatccctggaggcaaacttggcccacattgtcatcggcttccactggattgagctgactgctgtagctttaatgtcagctgcctggtgtcaccgctcctattcctggggttggggtgcttccaaacttgtataatttggctgcaggacagccacaagccatgacacaacaggctaccaggcatgctcggcgtgtccgtgggggcggacttcctccaactgctaatgagcagaccgttgccatattcttcaatggagttatggctgctattggaggaaacacagctggtccaggtgatgctgttcttaatgtctacataaaccacgacaagaaatttgcttttgtggagatgagatctgtggaggaagcaagcaatgcaatggtcttagatggcataatgtttgagggagcaccggtcaagattagaagaccaacggactataatccttccctagcagctgctctgggcccgagccagccaaatccaaatctcaatctttctgctgttggcttaacacctggctctgctggaggattagaaggtccagaccggatctttgtaggtggtctaccacattacttcactgaggcccaagtgcgggagttgcttgagtcctttggacctctgcgtggatttgatcttgtaaaggatagagaaactggtaactcgaagggatatgccttctgtgtgtaccaggatcttaatgttaccgacattgcctgtgctgctcttaatggcatcaatatgggagacaagactcttactgttaggcgggcaaaccaaggagcttctcagcctaggccagagcaagaaagcatcctgttgcaagcacagcagcaggtgcaaatgcagaaattcgtataccaagttggaggtgccctgccaacaaaagttgtatgcctgacacaggtagtgacagaagatgaactgagagatgatgaggaatatgatgacattgtggaggacatgagggaggaaggacacaaatatggtaacttggtgaaagttgcaattccacggcctgaccccagcggtgctcctgttgctggtgttggaaaggtgtttttggaatatgcagatgtggagggctcaaccaaagcaaagacagggatgcatgggcggaaattcggcgggaaccaggtggtggcggtgttctaccctgaggacaagtttgcagctgagcagtacgactgaaaagttttagaacccctattctagagttgcacttgtggcacacaatgtggttgttttgaccttttgtagttaagtttggtgattgatccgctgataagcgatacaagtctcgtacccaagtattagccggaatgtagctaagatggtttcggtccatcaatcgactgacatatacaacatctaggatccagtagttaaaacattaaaatgcccattttaagcgggtttattgccaatgggaaacgagaggccgtttcc

SEQ ID NO: 33725 - DNA, 110 bp, Zea mays
  Clone ID: MRT4577_130763C.1
cccacgcgtccggtttaacactagtagtgtagcttctgcatcatattaaaagaagcttgcactgaaacctgacccgaagatgatttctcatgcaaattagtgtgtttgag

SEQ ID NO: 33726 - DNA, 437 bp, Zea mays
  Clone ID: MRT4577_130764C.1
gggaaacaaaacttcttatttctaggaggccacatacattaaccaaaaaacttctttattgaatgacaactaataagccatctaaaaaagggcccccccaatgatgtttttttggtaaaaggcttctgggtttgtcaaagcaagttggacaaagggcagcaactgttgcagttgaaaaagggttgcggggttagccacaaactgctggtaaaacggaagcaattgttgtttgctcaaaaaggaaacagggcttgttgtatctaactggccaaaggggaaaactttttgctgctggaaataaccaaaggggttcatagcggccaattggttaaatggaaaaaattgctgctgctgaaagtaagcaaaacctaactggctaaatggtaatagctgccgttgctcgaaaaaaacagcagggttcaatgtaaacaactggt

SEQ ID NO: 33727 - DNA, 429 bp, Zea mays
  Clone ID: MRT4577_130765C.1
taaattccttataatatcgcttgcttgttgagaaaggtaataatggagattgaacgccgcatttctactcaagcagaacacataagaaatcaaaatagccttatcagagcacgtgaagagaaatataaatcaaggataagagtactagaggcacttgcaagtgggacaggtggacaaatgcaaataaattcaagtgcggcaaatggaaaaataaatattgctgaagatcatgtgctccagatgatgataaacaaaagcaaaattggagaaagaagattagttgataaagatatgtcaagcttgatggctcagaaggaaagatgtagctagattgacaaaggatacggaagatatggttaaggctgctgaaagatccggaagatataattagattgatgaaagagaaggaagaactggttttgctgattt

SEQ ID NO: 33728 - DNA, 240 bp, Zea mays
  Clone ID: MRT4577_130766C.1
gtaacggttctcgcggaaacatgaccagcaacaaccgcgaagcttgtctaagaggaaacaattcccataccctcttggtggaaataaagagtctcatgaggggagatcacaccgaagtaaaatatcaacaggggaggacttttttatacccggttgcaaaaaataagccctagggaatgaaaaagcgcataccacccctggaaattttgtggtggaaaaaaaccggacaacccctctttt

SEQ ID NO: 33729 - DNA, 776 bp, Zea mays
  unsure (1)..(776): unsure at all n locations
  Clone ID: MRT4577_130767C.1
tcaccctgccgcgtggcccatttccctcagctcatctcctccagccgcgcggctctcccagcgttctgctcccgctcggtccctgctcggcagctcctgcgcgtcttctccctcatcggcagaaacgcccagccggagctccactgcatcgtgcccaagttctctccctctgcccagctcgccgagcgtcctcctggccggagcttcctgctctgttcctcctgcgtcgcgcgccctgtttttctgtcccctgcgcgcagcttgccgagcttgccctgcccacttccatggcgctcgaccaccctcctcctgctcgcccttggccgagcgctcctcctccagctccttcccttagctctccctcgctcctctttgctcgccggccacgagtccctgtccatggctcgccgcggtgctcttcctagccgtggtcagtcgagtgctcagcagctctctggcgtccctgctcgcctcaccttccatgggcgagcgctcgtctcgccattgctctagctgtcgcgctgcgctgttcttagtcgtccggccctgtgtgcttcggtgggtgttcgtcgagtcccctgcgtcgcgtcctgttccttgcgcgtgcaagctatctgttggccgcgcgagaagctatctgttcgtcgtcatcgctcggtcgcacgccaagctgactgtgtatcatgtgtcgcacattntagatcctcgntgacgtgtcattcgttttcgcactgtgtgcgacagtatcgtcgtttttcctgtccagtgctcgcgcg

SEQ ID NO: 33730 - DNA, 470 bp, Zea mays
  Clone ID: MRT4577_130768C.1
cccaaaaaaaggaccaaaggctgttcattagttacagtcctggagcgtttccagcaaaatccacgaccaactttttctcgcaaaaaaaaaaacaatgaacaaatcatcctatggccctggggcggcaacaacaaaatgatggcgtataaataacccccccatataaaaaataaaaactgcatgctctggccctaacacactcctaagtctcctcctttaaggccctggcaacaaccctgtgctggcccaggtaacggtgctgtttctgccgctgaacccggcacatggaccccttctccttgacctcctgaaaggctcccatggggtccacgtcaaacccacctgcaaactggtgtcccctgaaggcaaaccgtactccttggagcataagctcctgctcctccttttaagggcctcccttgaccacctcaacctcggaggaaacccgtttcaggtgcttcattgccagc

SEQ ID NO: 33731 - DNA, 518 bp, Zea mays
  Clone ID: MRT4577_130769C.1
tttttaaattcttttttttttttttttttttttttttttttttttttttttttttttttttcttttttttttttggaagaaaggggggcccccatttttcccccccccaaacccctaaaaaattacagaccgcccatgtttcaaaattaaggcaaaaccccagcttgactgataaaactggaactttccaatttatctaaaaatttaaggggggaaaaaaacacctctttttgaccggtcattgaaaggatttgacccccaagccctgggccctgttgaaacacccccctaattttggtttccatttccccctgttgtttctaaaggaagtctttggatgtttgctttgaacctttccccctctcactgtcattaaccttttgccccggctaattgaaaaaaactgattttggctcaaaaaaaaacacttttccaacagtcttgaaggggggggaatcatctggcaacggggaaaattcctccaaagaaggggaagcccctttcccttgggccgaatt

SEQ ID NO: 33732 - DNA, 643 bp, Zea mays
  Clone ID: MRT4577_13076C.1
ctctctctctcccaatcctctcaccgcgaatctgcgatggccgttgcgcagcgtctcaccgcgctggagctccaccattgctgctgcccaacacctcgtcatacgtcgcgcctatacttgagctcgctgcgcgctgggagccccgccgagtttgctgttgagcaccgccgcggaagtctcttcctgctgtgcgtcgtcgcaagaccgcgatccatttccgagcttcgaggaatcgacagtcaagcttcggcgaccaaaagatcgaactcttcgagttctacgaggctgaagatcctgagcatctgtttggtgaaggttgtccacattgcaaccattgctcagaagaagacgaagtcgtggaaggagacttccaggaattccaagactacgacgaattctaggtgtgggttggcggcaacccccagtcagctgcctgtgaaggccttatctttactgcgtttcgctagcactttgatttaactgttaagttgatgactatgtggatgtctatgactctgtgatgtaataagttaatacccttttatgttattattcgagcactgtgcgatgatgttcatttatgtaatcgctgtgtacgtgagttctgatcctggcacggaaaaaaaaaaaaaaaaaagcggcc

SEQ ID NO: 33733 - DNA, 211 bp, Zea mays
  Clone ID: MRT4577_130770C.1
gggcatactacgagaattctgggaaatcataaaagtcaatgtctatttcatcagagttactatattatttatacgcatcggcattcgtaccaggtgatgacgttaactgagaaactgcaagcgaaggagtcctccgcggcggcggcagaccctggagagcaaacagttgccgctcaagcgacagcctatgctgtcttggaaggagacaagc

SEQ ID NO: 33734 - DNA, 224 bp, Zea mays
  Clone ID: MRT4577_130771C.1
gcggttactatttttaacatttttttttagtaaaatcttaacatcctcttaaatcttatgagacactgcatagagaatagcaaacattacactccactttaaacatctcaggaaacacaccgtgcgttcttaacagcatactagtacacacaacaagattcagggtttctataatctacaacagggccagggctcaatatccttaggtcgagcactaaaacacc

SEQ ID NO: 33735 - DNA, 803 bp, Zea mays
  Clone ID: MRT4577_130772C.1
tggatagtcggcgccaccgccttcttcttcgtcgtcatcgtcttcgtcgcgtttctcccggagttgggcgtcttcgagcggcccaggctgacgctctcctcgcgccgcgcgggagagggacgcgtcggaggcgggattgagggccgcagcggcctcgtcatgtgggaggcgggcgtggcgtcccagttccagccgaccaggctgagggagaaatgggcgagtgagcggagggaggaggccaagagcttggcggagctcgggacgcccgtaacgaggctcggggcacggaagccgcggcttgccatggtgttcggtgacctgtatcccagcgcaatgcagcttcagatggtcagcgtcgcttcggttctggaggccatgggctacgaaatgaaggttttctcacttgaggatggcccatgtggaaatatctggagagccattggagtaccagtgagcatactacctgaggacacaaacttacctatttcagtagattggttagactatgatggcatacttgttaattctattgaggcaagaccagtattctcaagtcttctgcacgagcctttcaaatccatacctgtaatttggactgttcatgaacattctcttgcccatcgtgctaaagaatataatgcaagtggaatgattcagctcataaatgcttggaaagatgtattcagcagggcaaatgttatagttttcccaaactatatattaccggtgatgtatgctgcatttgattctggtaactatttcgtgattccaggccccccgcgacagcaacggcgacagcaacg

SEQ ID NO: 33736 - DNA, 196 bp, Zea mays
  Clone ID: MRT4577_130773C.1
gaaataacttgcgattaactaatacaataacctactaatatacaaaataagaaatcaaaagaagaggaatgggagggcggtctcatctcatccgcccttacggacgccagggtgcaccttgaggcctcgtgcatggccccccataaatccattctatggaccaataacttacaatacttcggctgggtaaacaccg

SEQ ID NO: 33737 - DNA, 324 bp, Zea mays
  Clone ID: MRT4577_130774C.1
gacaagctactgacatgtcaagacgactgtgctgccaagccagacgacgaagagcatggctaacagatcgctgctgtcttctcggctcgggaaacctcatctcaagaagtaaatcagctcaggtgatacacaaaggatattcatccacaatgggtcgacataagaactgacacatcaagatggcgattgcttatatgtcatgtgattcatgatatgatgcttaattatgatgcactgagactatggatgacattgtgcgtgtacactgagactgtattatgatgacactatgttttattatgatgcccctaaggacctaaagat

SEQ ID NO: 33738 - DNA, 1002 bp, Zea mays
  Clone ID: MRT4577_130775C.1
gcccctgcgcgcgcccagcttcgcgcacgcgcgctgccaccgcggcgcccccggcggcggccgcgccacccccgccgaggcgtagcgcccgcggcggcgcggcggcggcccgggcccggcgcggggcctgggcgaggtcgccgtcccgctgccggccccgggccccggcgcggcggcggccctgccgcgcggcggcccggacggcgtccgccatctgctgcacgtccatctggtggtacctcttgccgatcttgagcggggaagaggaagccctgggcgcgacgaagccccgcaacggacgttggcttcaaggccggcgacagactagcgctggcgccgcctccttcgcattcgcattcgcatggcaagaggagtagcagcgccggcgccgctcgtgagatggtttcacccagaagccatgcgcatcgaaagaaggggtaacttccaggatgtctcgtgttgtagtctgtagactttgtgtagttgggtggccagaaagatcaaattttccaggttatctgtcatcccttttgttacagtttatttactctttttcgtgcctgtaaaaagtgtatagcagcagccccttttgtgtgtggctaccccaaatttgtttataaaatcattcggaataaaaagcaaagaacgccgggccaccaccggcgacgaagcccccccaggacgttggcttcaaggccggcgacagactagcgctggcgccgcctccttcgcattcgcattcgcatggcaagaggagtagcagcgccggcgccgctcgtgagatggtttcacccagaagccatgcgcatcgaaagaaggggtaacttccaggatgtctcgtgttgtagtctgtagactttgtgtagttgggtggccagaaagatcaatttttccaggttatctgtcatcccttttgttacagtttatttactctttttcgtgcctgtaaaaagtgtatagcagcagccccttttgtgtgtggctaccccaaattgtttataa

SEQ ID NO: 33739 - DNA, 300 bp, Zea mays
  Clone ID: MRT4577_130776C.1
gtctgggagcctggcctcagcaaggggccttcctgacctctggctccagtgaagctgaatgtcctcactttgtgggtcacactctttacatttctgtaaggcaatcttggcacacgtggggcttaccagtggcccaggtaattttttgtttcatggactatggactctttcaaagggatctgatccttttgaattttgcacagccctagatacaatcccttttgataaaagggtctttgcttctgattacaggagcactgtggaacgtctgtaaatatgtttttataattccatgtatag

SEQ ID NO: 33740 - DNA, 670 bp, Zea mays
  Clone ID: MRT4577_130777C.1
cctcgaggccggccggatgatggggtgacataagctgaaacttgaaccagagccaatatttatcatagatatcatagaggagaatggggaagacattgttcaaagccgttattgggatccgggacgaccttatgatctaagacgtgaaatggaccctattcctttggatgtgactcttcaatccattttggagagtgtagataaaaacagatgggcgcgctacctcagtgaaattgtgaaatatgcagctgaactttgcccgagttctgtgcaggatgcaagattagaggttattagaaggcttgaacagattactcctgccgatctcggtgggaaggctcagcaaccacaagattctgaaactaaacttgaccaatggttgatatatgccatgtttgcatgctcttgtccacctgatattagagaagaattttccatcaaatcagcaagagaagtcttccatatgatttttccatcattgcgtcatggttcagaagcatatgcacttgctgctacatctgcccttggtcactcacatttagaagtatgtgaaatcatgtttggagatctggcattatttgttgaggaggtgtcatcagaaactgaaggaaaacctaaatggaaaattaaaaaaaaaaaaaaaaacaaaaaaaaaaaaaaaaaagcggcc

SEQ ID NO: 33741 - DNA, 210 bp, Zea mays
  Clone ID: MRT4577_130778C.1
ggggaacaaaaacctgggtcattcttttttgggttgggttcatagggggggcaaacaagggggacaacgggggtcccaaccccttatccaaggggggaacgggcccttacccggggacagaagcgaacggtaacccgtttcttttgatgggtaagataactcggccgaagccaggatgggcccacactttagttccttcagccgccgtcg

SEQ ID NO: 33742 - DNA, 470 bp, Zea mays
  Clone ID: MRT4577_130779C.1
gaaaattcggacgaagggggggggctttccgtttttcccccacccaaagggaaacccaccttttgttctcccggggggaaagcgggtaacttcccgtttttcccccgggccaaattaacagggaatttaacaaaagggaccgggccgtctggggtttttatttcatttccacccgatttggggccaagaccacccaccccaaaatgggccccctgtcccccgaaaaccaaaaaaccccatttttttccccggggaaaaaaaaaacattttaaagctagctagtttttaccccaaaaaattgggggtccccatttaacgggcaaaccgggggggaaattaatttttccccggccgccgttgccgcccccttgggggaggggaacccaggcccgaacacccccccccctccaatgcggtaaagggggaccctccccttaccactaaaaaaagcggggggggaataaacgggg

SEQ ID NO: 33743 - DNA, 502 bp, Zea mays
  Clone ID: MRT4577_13077C.1
tcggccgggcctaagatgaccggccgggctaggctgacttcccccagatccagatcgtttccccagatccagatcgcaggcgtgaagggcgactgttaccagattatgatccgttttcgagcttcgaggaatcgacggtcaagcttcggtgaccaagtgacctggttcttcgagttctgcaaggttgaagaccctgagcatctatttggtgaaggttgtccacattgcaaccactgctcaggagaagacgaagtcgtggaaggagacttccaggagtttcaagactacgacgaattctaggtgtgggttggcggcaacccccagtcagctgcctgtgaaggccttatctttactgtgtttcgctagcactttgatttaactgttaagttgatgactatgtggatgtctatgactctgtgatgtaataagttaataccctttcatgtttttattcgagcactgtgcgatgatgtccaaaaaaaaaaaaaaaaaatttgcggcc

SEQ ID NO: 33744 - DNA, 275 bp, Zea mays
  Clone ID: MRT4577_130780C.1
aattcggcacgaggggcaaactccacacggtacacggacacacctcgctcgctctacgctcccgtatagacgggttccttttccaagccttgctacggttatgctggggcctacgactatcctgtcaatggcccctgaggcggctggacttcagacctaataggtcacgcgagacgcgggggcgggcgtagatgattgtttcgagggagcggcaaggcactacttactttttacacggacagtgttagcgcatgactctggacaagctcgttact

SEQ ID NO: 33745 - DNA, 399 bp, Zea mays
  Clone ID: MRT4577_130781C.1
ctactttagctaatctcagatcccccccgccctagacgcaggcccatgccaggagtgggtgggttcttttatcgatattatccatatggcgagggaggagaatgtctacatggccaagctggctgagcaggccgaaaggtatgaagagatggttgagtatattgagaacgtggctaagactgtatatgttgaagagcttacttgtgaggagcgtaactctattgtcaggcgcatacaaatattttattggagctagctttgttttatgttgcattgtcatttctatttgaactaatgaggattcccttttagaactaatagcctgttaaccctatcaagggatacccgtccgaatattcaggcttaactttgctcttttttgtaatggcatatccttaa

SEQ ID NO: 33746 - DNA, 2354 bp, Zea mays
  Clone ID: MRT4577_130782C.1
ccgggcaagaagagcagcaccatccagtgcatcacgagctcttctgcaccagattagcaggccatcgcctacttttggcttccaaatcatttatttacggcgtacgtgccttctgttcaaaccccagccccgctgcaatggagtgcgacaacggccgcgtcgctgctaccaacggcgactccctgtgcatggcgctgccccgcgccgccgacccgcttaactgggggaaggcggcggaggagatgatgggcagccacctcgacgaggtgaagcggatggtggccgagtaccgccagcccctggtgaagatcgagggcgccagcctccgcatcgcgcaggtggccgcagtcgccgccggcgcgggcgaggcccgggtcgagctcgacgagtccgcccgcggccgggtcaaggcgagcagcgactgggtcagggacagcatgatgaacggcaccgacagctacggcgtcaccacaggtttcggcgccacctcccaccgccgcaccaaggagggcggcgctctccagagggagctcatcaggttcctcaacgccggcgcctttggcatcggcaccgacgccggccacgtcctgccggccgaggccacgcgcgcggccatgctcgtccgcatcaacaccctcctccagggctactccggcatccgcttcgagatcctcgaggccatcgtcaagctgctcaacgccaacgtcacgccgtgcctgccgctgcgcggcacggtcaccgcgtccggcgacctcgtgccgctctcctacattgcgggcctcgtcaccgggcgcgagaacgccgtggcggtggctcccgatggcacgaaggtgaacgccgcggaggcgttcaggatcgccggcatccaaagcggcttcttcgagctgcagcccaaggaaggtctcgccatggtgaacggcactgccgtgggctccggccttgcctccacggtgctctttgaggcaaacgtacttgccgtccttgccgaggtcctgtccgccgtgttctgcgaggtcatgaacggtaagccggagtacaccgaccacctgacctacaagctgaagcaccacccaggacagatcgaggcggctgccatcatggagcacatcttggaaggcagttcctacatgaagcttgctaagaagctcggtgagctcgacccgttgatgaagcccaagcaggacaggtacgcgctccgtacgtcgccgcagtggctcggcccgcagattgaggttatccgtgcctccaccaagtccattgagcgcgagatcaactccgtcaatgacaacccgctcatcgacgtcgcccgaagcaaggcccttcacggtggcaacttccagggcacgcccatcggggtgtccatggacaacacccgcctcgccgtcgcagccatcggcaagctcatgtttgcgcagttctctgagctcgtcaacgactactacaacaacggcttgccctccaacctgtccggcgggcgcaaccccagcttggactacggcttcaagggcgccgagatcgccatggcgtcctactgctctgagctgcagttcctggggaatccggtcaccaaccacgtccagagcgcggagcagcacaaccaggacgtgaactcgctcgggctcatctcctccaggaagactgctgaagccatcgagatcctcaagctcatgtcatccacgttcctgatcgccctgtgccaggcagtcgacctgcgccacatcgaggagaacgtcaagagcgccgtcaagagctgcgtgatgacggtggccaagaagactctgagcaccaactccaccggtggcctccacgtcgcccgcttctgcgagaaggacctgctccaggagatcgagcgcgaggcggtgttcgcgtatgccgacgacccctgcagcgctaactacccgctgatgaagaagcttcgcaacgtgctcgtggagcgcgccctcgccaatggcaccgccgagttcgacgccgagacatccgtgttcgctaaggtcgcccagttcgaggaggagctgcgcacggcgctgcccagtgcggtggaggctgcacgggcggctgtcgaaaacggcacggcagcgataccgaacagaatcaccgagtgccgctcctacccgctctaccgcttcgtacgcgaggagctcggagcagtgtacctcaccggcgagaagacgcggtctcccggcgaggagcttaacaaggtgctcgttgccatcaaccagggcaagcacatcgacccgctgctcgagtgcctcaaggagtggaacggcgagcccctgcccatctgctgaacagagaaaatacaaggagcagaagactgtattttctagctaatacgtattttttattcctaattg

SEQ ID NO: 33747 - DNA, 674 bp, Zea mays
  Clone ID: MRT4577_130783C.1
aaaaccagtcgggcagtcggcctctccgtccgaccgcccatccggtcatccctcattaaccctcgccctccgcttccatctccgcttcctagatccgacgccgccaccgttggtcttcagctatggcagaagcagaaagggcaaggtcaattgaaggcgtgtgctggtggagcaaatggctaagatttgaggactaggatctggtggaaatggaggaaacaaaaaccgtttatggacatggtggtggtggtggttctgatggcccagaggacgagtcttttaagcaatcattatatgagatgatccagattatgatagcaactgttgcgttcatgattttttctgagagcatcagcaagaaggatagcacgcaagaaggactactacggtggatcagcatcagcttcttcggagcccacgtggtggcaacagctcgttcgtcgcatgcatggaggagctctgcagaggctatttgttgcgcccgcacggcgcacgcacaggaatcgtaggccgcactgttttgtcggcctccgagttttccagctgtggtgatgtagacgagctcacgagtctgctgctagtggggtccggtgccgttggtcgccctcatactgtgtggaccgtggtcgtctgtgttggctacagaacataaaaagatgggagagatttgtgac

SEQ ID NO: 33748 - DNA, 2484 bp, Zea mays
  Clone ID: MRT4577_130784C.1
cattgggacctcgagccggccgggagcccggtcccttctcagaatcattagctatttaaacctcgccactcctgctggttctctccaggaagagcagcactagatctctctcccctacagcttcccagcaagccagttgcatacatttcactgctgttatctttctcagcttgatcagtgctttagttctctctagttgcaatggcttgcgatttcccgtgcatggcgacgccccgcgccgacccgcttaactgggggaaggcggcggaggagctgatgggcagccacctggacgaggtcaagcggatggtggccgagtaccgccaaccctcggtgaagatcgagggcgccagcctcagcatcgcgcaggtggccgctgtggccaccggcgctggcgaggctcgggtcgagctggacgagtccgcccgtagccgggtcaaggcaagcagcgactgggtcatgagcagcatgatgaacggcaccgacagctacggcgtcaccaccggcttcggcgccacgtcgcacaggaggaccaaggagggcggcgctctccagagggagctcatcaggttcctcaacgctggcgccttcggcaccggcacggacggccacgtcctcccggccgaggcgacgcgcgcggccatgctcgtccgcatcaacaccctcctccaggggtactccgggatccgcttcgagatcctcgaggcgatcgtcaagctgctcaacgccaacgtcacgccgtgcctgccgctccgcggcacggtcaccgcgtccggcgacctcgtgccgctctcctacattgccggcctcgtcaccgggcgtgagaactctgttgcggtcgctccagacggcagcaaggtgaacgctgccgaggcattcaagattgccggaatccagggcggcttcttcgagctgcagcccaaggagggtcttgcgatggtgaacggcacggccgtgggctctggcctcgcctccactgtgctcttcgaggctaacatccttgccatcctcgccgaggtcctgtccgccgtgttctgcgaagtcatgaacggcaagccggagtacaccgaccacctgacccacaagctcaagcaccacccgggacagattgaggctgctgccatcatggagcacatcttggagggcagctcctacatgaagcttgccaagaagctcggcgagctcgaccccttgatgaagcccaagcaggaccggtacgcgctccgcacgtcgccgcagtggcttggcccacaaattgaggttatccgcgccgccaccaaatccattgagcgcgagatcaactccgtcaacgacaacccgctcatcgatgtcgcccgaagcaaggcacttcacggtggcaacttccagggcacgcccatcggggtatctatggacaacacccgtctcgccatcgcagccatcggcaagctcatgtttgcgcagttctctgagctcgtcaacgactactataacaacggcttgccctccaacctgtccggtgggcgcaaccccagcttggactacggctttaagggcgccgagatcgccatggcgtcctactgctccgagctgcagtttctggggaacccggtcaccaaccacgtccagagcgcagagcagcacaaccaggacgtcaactcgctggggctcatctcctccaggaagactgctgaggccatcgagatcctgaagctcatgtcctcgacgttcctgatcgccctgtgccaggccgtggacctgcgccacatcgaggagaatgtcaagagcgccgtcaagagctgcgtgatgacggtggcgaagaagactctgagcaccgactccaccggtggcctccacgtcgcccgcttctgcgagaaggacctgctccaagagatcgagcgcgaggcggtgttcgcgtatgccgacgacccctgcagcgctaactacccgctgatgaagaagcttcgtaacgtgctcgtggagcgcgccctcgccaacggcgctgctgagttcaacgcggagacctccgtgttcgccaaggtcgcccagttcgaggaggacctgcgcgcggcgctgcccaaggcggtggaggctgcacgggcggctgtcgagaacggcacggcagcgataccgaacagaatcaccgactgccgctcctacccgctctaccgcttcgtgcgcgaggagctcggagccgtgtacctcaccggcgagaagacgcgctctcccggcgaggagctgaacaaagtgctcattgccatcaaccaaggcaagcacatcgatccgctgctcgagtgccttaaggagtggaacggcgagcccctgcccatctgctaaacagagaaacggataggaagaagactggagtgttcattgttcagtagttttgcgtggttggtagcaaaggctaatttgtcatactctacttatgaaacgttatattttcaagaaatgtgtattccattcttgttataaaaaaagaaaaaaaaaaaaaaaaaagcggcc

SEQ ID NO: 33749 - DNA, 2553 bp, Zea mays
  Clone ID: MRT4577_130785C.1
cattgggtacctcgaggccggccgggaggaagagctgcaccatcaccagctcttctccatcaagagtaacaggccatcgccttactagttctgatcccaaatcatttacggcgtaggtgcctcttgctcaaaacccagccccacagcaatggagtgcgagaacggccgcggcgttgctgcaaccaacagcgattccctgtgcatggcgacgccccgcgccgacccgcttaactgggggaaggcggcggaggagctgatgggcagccacctggacgaggtcaagcggatggtggccgagtaccgccaacccttggtgaagatcgagggcgccagcctcagcatcgcgcaggtggccgccgtggccaccggcgctggcgaggcccgggtcgagctggacgagtccgcccgtagccgggtcaaggcaagcagcgactgggtcatgagcagcatgatgaacggcaccgacagctacggcgtcaccaccggcttcggcgccacgtcgcacaggaggaccaaggagggcggcgcgctccagagggagctcatcaggttcctcaacgccggcgccttcggcaccggcgcggacggccacgtcctgccggccgaggcgacgcgcgcggccatgctcgtccgcatcaacaccctcctccaggggtactccggcatccgcttcgagatcctcgaggcgatcgtcaagctgctcaacgccaacgtcacgccgtgcctgccgctccgcggcacggtcaccgcgtccggcgacctcgtgccgctctcctacattgccggcctcgtcaccgggcgtgagaactctgttgcgctcgccccaaacggcagcaaggtcaacgccgccgaggcattcaagattgccggaatccagggtggcttcttcgagctgcagcccaaggagggtcttgcgatggtgaacggcacggccgtgggctctggccttgcctccactgtgctcttcgaggctaatatccttgccatcctcgccgaggtcctgtccgccgtgttctgcgaggtcatgaacggcaagccggagtacaccgaccacctgacccacaagctcaagcaccacccgggacagatcgaggctgctgccatcatggagcacatcttggagggcagctcctacatgaagcttgccaagaagctcggcgagctcgatcccttgatgaagcccaagcaggaccggtacgcgctccgcacgtcgccgcagtggcttggcccccagattgaggttatccgcgccgccaccaagtccattgagcgcgagatcaactccgtcaacgacaacccgctcatcgatgtcgcccgaagcaaggctcttcacggtggcaacttccagggcacgcccatcggggtgtccatggacaacacccgtctcgccatcgcagccatcggcaagctcatgtttgcgcagttctctgagctcgtcaacgactactacaacaacggcttgccctccaacctgtccggtgggcgcaaccccagcttggactacggctttaagggtgccgagatcgccatggcgtcctactgctccgagctgcagttcctggggaacccggtcaccaaccacgtgcagagcgcggagcagcacaaccaggacgtcaactcgctgggactcatctcctccaggaagactgctgaggccatcgagatcctgaagctcatgtcctcgacgttcctgatcgccctgtgccaggccgtggacctgcgccacatcgaggagaacgtcaagagcgctgtcaagagctgcgtgatgacggtggcgaagaagaccctgagcaccaactccaccggtggtctccacgtcgcccgcttctgcgagaaggacctgctccaggagattgagcgcgaggcggtgttcgcgtatgccgacgacccctgcagcgctaactacccgctgatgaagaagcttcgcaacgtgctcgtggagcgcgccctcgccaacggcgctgccgagttcaacgcggagacatccgtgttcgccaaggtcgcccagttcgaggacgacctgcgtgcggcgctgcccaaggcggtggaggctgcacgggcggctgtcgagaacggcacggcagggataccgaacagaatcgccgactgccgctcctacccgctctaccgcttcgtgcgcgaggagctcggagccgtgtacctcaccggcgagaagacgcgctctcccggcgaggagctgaacaaggtgctcgttgccatcaaccagggcaagcacatcgacccgttgctcgagtgcctcaaggagtggaacggcgagccactgcccatctgctgaacagagaaaatacaaggagcagaagactgtatttttagctaataatgctttttattcccaatttatttattgtcgttgatatgctacggattcttgtcatacagctgcaaaacgccctgtaaccaacttcgaacatgtaataggttttcgagtatgcgaatcatatttgcagttaattaaaaaaaaaaaaaaaaaaaaaaaaaaaaaaaaaaaaaaaaaaaaaaaaaaaaaaaaaaaccgagaagggggccggtacc

SEQ ID NO: 33750 - DNA, 719 bp, Zea mays
  Clone ID: MRT4577_130786C.1
ggttcagcttgctggaggtggctgatcttgctcgccattgcacggcgcgggaaccacaccagcggccagacatgtgccactgtgtgaacaggctttctagcctagtggatcagtggaagccaacgaatgttattgatgacgacgaggagggtgggacaagcgagatgggtcttcaccaacagctagagagatggagatgcggtgatttcactatatcagattcggagtcattcagcacatacaacacatcaaggaagtaccattgacaattagtgagtcctttcctttgtcatatataaatgaggaaccatgatctggggcatcaagaggctctctacagctatgtagatcacgaacagctttgaagggcaacgtgccagcctgtcaggtattgtagttaccccactgaaaacaaggttggttacttgaaaatcagcatatacattaatggctgctaacctggtttaaacttgagggaagtcgtgatacttgaaacttgtgctgtatctagcttatccagtttgtatcactgcctcactgggggcattgagaaacagtttgttaagagggaaaagacacgaaagaaaccatacttccgaaagtgcattctggtggttagttttttaggccgcagagggttgctttttgtgtacaatcaaccttgatttattattacttactccctccgtaccaaaataaaattcgttttggctaaaaaa

SEQ ID NO: 33751 - DNA, 701 bp, Zea mays
  Clone ID: MRT4577_130787C.1
aattcggcacgaggtctttttgcattcggcgattgcatgcgtatgggtatacgaagtacgtacgagtagaaagtacacgagcaaccttttgccgtggggcctgatgacggaagggacggggcatcggcgcatcgcgccggcgcaccgcggaagagtggcgcggccggccatggcggagcagctgtgtgcacgacgccagctgctcagcggcggagcaggcgcgcccaaggtaggtcaagttcctcaccacgtccgggcgcccggagttggctttaggcgtgactcacgccgcgtgaggaacgggtagtttcatgtacgagatgcatgcaagaggagccggcgcccgtagcttatggcttgttaagactactttgaacagatcctttatcttattatttttcaaacttatctctaaaaacagtgtctatttacagtctcgtctcgtgtcccctattttatagatattcaaggtgtgcctgtttttgttcagtacgacctacgcatactgctcatccaaatctaacttttcctcctttcacatttttactcaacaaaaaaggtacatttaggtcatcaagaggtcgataggagtgcacttatactataaaaatcaagtatttgctgaccaaagcccctagctggcaatgtctccttaaaacctagtagtgctaccggtacaaacccctggtccatggaccatg

SEQ ID NO: 33752 - DNA, 1372 bp, Zea mays
  Clone ID: MRT4577_130788C.1
tcgtgctcttccctgccggcaggcgctacctgctgaagctcctcaccctccgtggcccgtgcaagtccagcgtcacgctcacggtgaagggcaccctggttgcatcgccaaaccgggcggattggaccgacaatgacaggaggcactggatcgtgttccggagcatcgacaagctcactgtcaacggcggtggcgccatcgatggcaacggcgagaaatggtggcctcactcgtgcaagatcaacaaggctctcccttgcaaggaggctccgacggctctgtcattccactgctgcgtcgacctgaaagtggagaatctgaaaattatgaacagccaacagatccacatgtcagtcgaggactctgcaaatgtgctgctggcccggttgtccatcacagcgcctggcaccagccctaacactgacggcatccacatcactcgcagcaaagatgtacgcgtcacagactgcaagatcaagacaggggacgactgcatgtcaatcgagaacgggactcacaacctccatgtctccaaagttacttgtggtccagggcatgggatcagcatcggaagcctaggagacgacaactcaagagcagaagtctccggcatcaccatagattcagtgcaactacacggcacaaccaacggagcacgcatcaagacgtaccagggaggcagcggatacgccaaggacatcacgttccaaaatatggttatgtacgacgtcaagaacccgataatcatcgaccagaactactgcgacaaggctaagccatgcggagaacaagagtcagcagtgcaggtcagcggtgtcgtcttcaagaacattagagggacgaccagtaccaaggacgccatcaagatgaactgcagtgagaacgtcccatgccaaggcattaccttgcagaacatcgacctgaaaatgcaggacggcaagggcaacacaagaagcacttgtcagaatgcaaaatggacagaatttgggacagttcgcccgcagccttgcactgccataaagtagggggcaattgaagtctgttgctcgtgctttgtagtctgtacagatggagtagtcatactcatgtatatatataccgccaactctagtaacaccgtacatgcggtcatgtataatattgttttgcactgtagatgcattgtttgtagatataagtttaaaatagaaaatgagataacgagtgaaataggaagtctactagagatagtttaagatccataaaaacttcaacttataactcacttgtcaaaaaaacttataactgcgtatttgttaattggttcattcatgaccgaaatgtatagtacgtcttttatggaaataaagtagcaacagctgatatttctagg

SEQ ID NO: 33753 - DNA, 352 bp, Zea mays
  Clone ID: MRT4577_130789C.1
aattcggcacgaggagccctggtctctagcttccttagaggaaagctctcgttcctagcagccaagctagcgaatccaacccaacccgtccttttgtgcacatccccaccctcccttcgtctccgcctccgcctgcgccaccctccaatccgcgccggcgcgtcagcaccctacccgattgctacctcctcgtggagggcgccgatccgatccgcccgatccgagccggcgcctgaacaccctacccgatggctacctgcctggggtgggcccctgctcctggagtttccgcacccggagggggcggcgcttgaatggaatccgaggacgagatgcaccacgcgaacgactc

SEQ ID NO: 33754 - DNA, 523 bp, Zea mays
  Clone ID: MRT4577_13078C.1
ggcgattgggactctcgaggccggccggattcgaactctaaattttgtaggaaacatgtgaaaaaatccatatttctcccattatatcaaaaggtttttacgcatgtgtctagccgagttagttgctttaggaggtccctaatttgactcgatgtaagagcgaacgatagaattaagtttttcagcgcatgtacaattttaaaggtgccgttgtatacgtgtttggttggatgtataaaaggagatgaaaggaggcggccacattttatatggtgtttggatgaagatcacgcgggagtgaaatgaacactagagcaattttcggaagcggcgtgattctaaaaatcgaacggatggtgtcgccccctgcccctgtcgcggtcccgaaaactaggatggctgcccccgtccctcgagcagtgataggtgaccgccatccaaacaaaaaatgggaccatccaagtttgtccctctactaaaaaagtgtacaagtagcaaaaaaaaaaaaaaaaaatttgcggcc

SEQ ID NO: 33755 - DNA, 185 bp, Zea mays
  Clone ID: MRT4577_130790C.1
acttcccggaccgacccactgcggccggtaatcagctggaggatggcgcgcaccttacgtagactagcaacatccaaaaggagagcaccctccaccttgtgctccgtctccgtggtggtcagtaagtcatgggtcgtttaagctgccgatgtgtctgcatcttctggtgccctctccatatggag

SEQ ID NO: 33756 - DNA, 899 bp, Zea mays
  Clone ID: MRT4577_130791C.1
aaccgccgctctctcctccatcgccttccccatctccccagttcccctcgtcgtcgcttcttccaaccctagcggcctagcctgcctcctacctcgcccgccgacctatctctgccagtcctattccccgcggcagcgcgcgatctcctcgctcccgtcgcgccctgcccctgcgcttcaaccgctccatccaaacgagatccagcggatggaacccccggcggcgaaggaggcgccgtcaccgccgcttcagcctgcggcggaggaggacgcgatgctctctgcgacggcggccatggcgaaggaagccgctgtagcgttccagggctgccgctacgccgactgtgccgcagtgctcacgaggctgctggacaagaaagagggcgatctcaaggtccaccataacatggccatcactgaattcttcttggatgattgtcctgattcaaacaggctgcttaaaattcttggtgattttaagagaagaagtgaagagcttgcatgtgcatctagagaacaagctgattctgcaaatggggtaggaaacagcgctcattcaggatcaagagggagtggcgttgtactacctttttcctctacacataatgcgtcgacttatggggatgagtttgacacgaccataattacattcaacatggctgtcatcctatatcatcttcatgactatgaatctgcactatctgttttggacccattgtaccgaaacattgaaccaatggacgagccaactgctcttcatgtatgctttttattattggattacacattagctttgcaagatgcaacaaaggctgcggacataatacagtacatgggaagggcatttggagtagctaacataacgagccccgatgaaaatcccagcatagctcagcagc

SEQ ID NO: 33757 - DNA, 329 bp, Zea mays
  Clone ID: MRT4577_130792C.1
accctgctggggatggcccagcgcaaggatctttagttttcgaacatgcccatattgctcaacgcgcggactgtgagttatcagagagtgaagcaaacatcgcacagcgggaggccccacggatgttgtgctctcctcatgctgctgtgtgacaaaaatcaatcactggtgccctgagttgagcattgcggtctctgctcacccaactggggttatacacatttcctgatagtcattgaataactctagaaagtacatggatgacatacggcctctgaatggcatgaacccggatgatgactcagaggtctacctcatagatacgttat

SEQ ID NO: 33758 - DNA, 243 bp, Zea mays
  Clone ID: MRT4577_130793C.1
gtcaattcaaggaaaggatgctgctctggctcgtaggaacgaatgcttaggataggaatcgcgctaggggatgattcggttgggataactgatcatggggatagccttgccataccaatcattacccggtatggagggggaaagcatccaattgtatattccttactcctggattcgattaggctggtttaaaagagaaacccaccctaaagccgagccgaaaccttttaacgggataaaggt

SEQ ID NO: 33759 - DNA, 763 bp, Zea mays
  unsure (1)..(763): unsure at all n locations
  Clone ID: MRT4577_130794C.1
gggggggggggggggtggggggcacttgtctgcccccgggcgcgcagaggactccctcccccgatcgcatacccgtagacccacccaactcccacaggagccacctcccccatagaaaccagcactacagtgtcacctcggcggcaatacgtagtgtaactattagccgggtagtaggttcgtttacccccccatctcacctgagtcgcacgcacggggcggacgattgtctcgtgccacgtacctcccccagcgttccacctcttaattccgtccctgggtgtgcctataagaccagacggagccccacaggaccccgggcgtgtcgtcattgtttttactctatgaactgtgcagaggtacgaggttctctaggtctataccacgaccaactattctacctttatgaagtgtccgaaagtaattgaggctcttctgaaagagatgcagtagatcgtgctcacattcgttgttacaaccactccaattgaaactctcttattccacaactgatgtccaacgagaaccctcttgcgattcgtaaagttgtaggttcacactctaacgaccacttcgaaggtgcagacccagatgactagtaccagcaggactcccacgactcaattcgagaaggtcaaccaggtggccacgactccctgtcgtcagtacataggcagcttgggtaacgcctagaaggctactaaaagtacgaccacggagacgctgacgctatgtntgctgccgttatcaacgcgtgttaaac

SEQ ID NO: 33760 - DNA, 250 bp, Zea mays
  Clone ID: MRT4577_130795C.1
cgcacttttctttgtgtcctaggaactacaagagccaggtgtacctagcaggagtggccccaccgccaagcgcgcaggcacgtacatggacgccagcccgggcccgccgcttctacttcgcgcgcccacttctagccccagaattgacctcccctctggcaatgacaaggccgaagactcggtcagcaaagccggcacggtcgtatgcgacctgtgccgggagcccaatatccccgaaccattcatgcgg

SEQ ID NO: 33761 - DNA, 636 bp, Zea mays
  Clone ID: MRT4577_130796C.1
ctaagcaacctagagaaagcacacaccggctctgtggccaagaaagcagacctccaaggcaagcgccaccttagatacttaagcttggagtgcacaccaagagccgctggtggaaatcagatcaaagataataacacacagcaggagaaacgtcagattgaggatgtctttgatgagctctgtgcaccggtttgcctcgaaaacctctcactaatcggcttcttcggacacaagcttcctaaatggatgagctcaggcgagatggatcttaagtacctaagatcaataaaactcgaagattgcacctactgcgagcagctccccgcattgggccatctcctgagtttagatttcctgctgatcaaacatgcgccatctattatgagaattggacacgaattcttttgcagcagcaatgctacacaaatagaccctcggatgctgttcccaaggctggagaaacttggatttgataggttggatggatgggaagaatggatatgggacaaggaacttgagcaggcaatgccaaacatcttttctctcaaagtcacaaaatgcaagctcaagtatttccccacagggcttgtgcatcaaaccaggaccttgagagaattgatcatatctgaagcttgc

SEQ ID NO: 33762 - DNA, 363 bp, Zea mays
  Clone ID: MRT4577_130797C.1
gaaataaaagccaccgacggccaccaaagagagggaaggccatggagacgcgccacagagcacgggcgctgcacgcccccgcaggcagcaaggacaggccccacgaaggcaacccgaagccggcgtcaaagcgggcgcgcgcgccgcagaccgagggccgggaagccacgcgccgagccgaggcacggaggccagaccaagaacccaggggacgaagagggcgcggcggacaagaagaactagcacgggtcggggaaggcgagcgagacaccacagcacgtggagagacagagcgccgcaaagcgaccgagccggaagaacgcgcccgagagcgacgagcgggacaaggaccacgccagaaag

SEQ ID NO: 33763 - DNA, 326 bp, Zea mays
  Clone ID: MRT4577_130798C.1
cctggcgaggtgcttaaatttctttttttattttttttttttgcacgctgcaaaagctactaaacttgtattttgaacaggacggtttagcatattgaaactctaaaagacggagggtccaaaaccagaatggatcctatgtcaactggcacccgtcacattaattttgaccatatacaagcacatgagatgggctgcgacccatggccattgaggacaacccacgatagggaggcacaatattatctctatactagcccactgggtatggaacatgtggcggatcaggacaacgacgcggctgctgtacccccactcgttgccgc

SEQ ID NO: 33764 - DNA, 422 bp, Zea mays
  Clone ID: MRT4577_130799C.1
tggctccatcagtgacggaatcgccgacagtcatccagtgttcagaacacaatagcgttacttgcactagatggagatccaggggtattagatctaccccttcaaaaacgtcacgcggatgctaagatacactgctttgatccggcatagagcttagctgctcgacgtacttgctccgaggactcccaacacgcctatctcgtgtcaagggcagcccgttccagctgctgtgtcatagaatccgatcatgtgctctgtaggactcttatgtttaaagatggccttctgttgctttcttggtgatacaaagggactagagcgtcggacaaagatcaatatgcattcaaccgcgatcagttaaaactcctatgacaggcagcggcgcgagggttcgcagatgctgctattaggcgccggaggca

SEQ ID NO: 33765 - DNA, 425 bp, Zea mays
  Clone ID: MRT4577_13079C.1
cgaagaagaagaagacggcgaggcgaggcgcccgaggcagccccgcgtcgcccctcgactacagcggcgcgtccactagcggcggcgaggacggcgccttctgctcccggccagagccagcgctcccgccggccgccgcgtgccagcagctcgcggcgcccacgcctcccagcaaggtgggtggcctcgccggacggcggacgacccccccggtgccggtgccagtgccactgccaccacctcggcccgccggacagcgggcgcggaagaagatgaggctcccggagatccagcagatggtgcggtcgctgtcggtggagaacgacgccctccgcaaggagatgagagcgttgcggagggattgcacggcgctgtcccaagagaacggcaagctagagacaaggctccatcagtccgttacgctg

SEQ ID NO: 33766 - DNA, 219 bp, Zea mays
  Clone ID: MRT4577_1307C.1
ctagctagcatgcacgccgatcaccaatctctggcgtaatcttgttcatcttcgatctcctccatctccattcatcctctctctcgctgtgtgaggagaactgcctgaccctgctccctcttcagctactcctcgcgccccgctcgccattcccagacttcttttcaggccgcgatggaagactaagcccgtgagatgatggagctcaagacgctgcgt

SEQ ID NO: 33767 - DNA, 317 bp, Zea mays
  Clone ID: MRT4577_130800C.1
tacaagtttgatgtgaagtcagtttgtcctctgcaacctgcatagcatgattcctatgcatatggaatattattgtaactgaaattcatacagcagatcaaatgtctttccacatttttgctcattgtacccagtgtcatttttttggacatggtatgcatggcatgtaaaaagggtactgctgaaccatggtcctttgcccgttattcctaatgtcaacactcaacagtcaagtgtgtctgaggttcactcaagactaggaccttcttaagtctctaatctcatttactcttggtctaggtgcttgcttcgcaatg

SEQ ID NO: 33768 - DNA, 337 bp, Zea mays
  Clone ID: MRT4577_130801C.1
cgggccccccgtgccgtgagcaagtccatgcgatcccttggcaaaacaagttccccgggtcacgggcatgccgcatggggccggcgtcatctgcagcggcttgggcacgggcgcctggctcagccgcgtcgtttgtgcgcacagtcactgctgatgattctcagctgccggctcactgcaccgtgggcgcgtccgccgaaagccgtcctaatcatgcacgcaagtggaccactgggcggccgtggacctccgggatctctcacgcgcgcttcggctcggctcaccacaggtgcctcactacggttactttacgtacccgagtccattgcattggttg

SEQ ID NO: 33769 - DNA, 1539 bp, Zea mays
  Clone ID: MRT4577_130802C.1
tggagcggcatcgaaagaagatttatccttatgcaacatggtgcaactcgatttatcagttagtccagtagtactctttgaacggaaagtaggagaatcccaattagaaaatttctcgttaagtgataaccgacagcttggttcttgagttcttggctgcccagtaacactttgcaaccaatttgtctcaagtttcttccgaggtgctgtttctttcctatccaacttttctggatgagaaaaccctagaacatatatatatacgtacgtatccaacagcagcacatacatatacatgtaaggaaattaaaataatttgatatagtacgtacgccttggaaagacctgcatgcggcgtggcatcaatataatataaattataatatgcatgcagatcgatgcaagaaggtcgagaaagcgatcgatcatagtagtagccatgcatatatatatataaataattaatcgattcatgcggcggcggcggcgacggcggcgtggtgtgtgaatccgaaggcgatgtgcgccatccgaccgtactccctgtcgtgcgcggcgacggggacatcctcctcctcgcccttccacgcgtcctcgcagctctcggaggcgcccattgcggcggtcagctgctccatggccttgccgtagatcttcgccttgaggttgtccagcgcgtcgcggaggaggtcggcggcgccgccgtactgctccaggcagtggttgaagcgggcgcgcgcctgcggatccgacgacgacgccgcctccagctccgcgaggtcgtcgatcttggactcggtgctggcggcgtggtcgatggccatcctggtggccagcaccgccagcccgtgcatgttcttgttgccggcctccttgctgcgcgggtcggcgcccatcgccgccatgcagtggtcgtaggccacgccggcgtgcgtctcggacgcgccgcggcacgcctcctccacgctcaccggggtcgcgcactgctgaggcggctcgccatcgtccaccgccgtgccagcagcggcggcggcgatattatcatcagcaggcaccaactccactaccgcctgcgcaacaccaaccagaagcagcaggcggagaccgagcagtaccagcgtcacacgccggctgctgctactgctgctggcacgggtcattttcgacctaattacttagctcggatggacgatgttccctgctgctggtctcgatcggaagcccggcggctcatgatccatagtcatcgcaattgcatcagcaggcaccaactccatctccaactccaccgcctgcgccacaccaacaaccagcaggctgaggaggaccagtagcgctagcgacctcatcgccattttcgacctactgctgcttactgacttattagcttggatgaacgatcgaagatctactaatataccggccggttgcctgcctgctacctgctggctatagaaatgaaagagagagagagagaatatgattaatggtgcgcctggtgggcggacgcgtgggcggacgcgtgggcggacgcgtggg

SEQ ID NO: 33770 - DNA, 494 bp, Zea mays
  Clone ID: MRT4577_130803C.1
aaggaaaatccatcaaataaagaaaacaaatggccaacatattgcaaatgttgttgcctgcatccacctggatatatagtcagggggaattgattattatcatctaccaccttatttgtatttgcgtccacataaaccatacctaataagctcaatgccgttttcgcccaactaaaaaccaaccaaatacaccccataaaaaaaggctaacggcaggtacatttggcaaactggccacaaacgtcaaatgttcctaaaatgtacaccatcagcaagctacccctattccttcaaatatacaagaattagaagaactggccaacccctacaagggacaagtcacttcaaatcctgaacctatgcccgtcttaactaattttgactgaattccaacttggcctcctcatgaacaacctttatcctccgggactcctgctgtgctcgatgaaaacgaaacaaagcttggacacctaccactgatctattaaacctgt

SEQ ID NO: 33771 - DNA, 192 bp, Zea mays
  Clone ID: MRT4577_130804C.1
cacactttccatagcatactcaagtcgatatactgaatggtcttccaacactactatcaaccatatttatacatcattagaggattcatgcacctgcccctcaaccgtgattccagacactcaccccaaaacatcaaagagtacaaccaccaagctcttgctcacatctccatccacttcaaacatcatggc

SEQ ID NO: 33772 - DNA, 797 bp, Zea mays
  Clone ID: MRT4577_130805C.1
gtaccctcgcggcctgccgggatccagaatccaatactgggagcacaactatctctgccttatcctggggtctgatttattcttttacaaagtgctcgccaccaacaactctgactaacttcctcagcaaggctgggaatcactcacctcagcatttctcggctaattatcttattgagggaattactcttctcgcgctatcaagatcatgtatcagtttcgcagcttgcttcaaaggaccatcctggcattggttctccttcaactcgccttcttcaattccccggtgcacgcccgacatacgctgcatattcatgctcgtcactcgccatcatggaattggcttctatcgtggtttacaggtcggaattaccagccagatccccccccgctccctccggctcagcctgcccctcaggcacctacgccaccagcaccgtctccaccagcaccgtctccaccagcacctccagcgactgtggtcgcctctcgtgctccttcatctcaatccaacggaacaacagctggctgccaaatcatacgcgtccgacgcgaatggaggaagtttagcgtcaaggaacaaaccgaatatatccgcgccgtcaagtgtttggctggccttccttctaaagttcttcccgctgacgaataccgtcggtacgacgactttgaaaacgtccactctcgcatgcgccacaaaatccattggattgcgtctttcttaccttggcatcgtcattacatgttcacatatgagactgctttgagagatgaatgtggctattcaggcaacctgc

SEQ ID NO: 33773 - DNA, 186 bp, Zea mays
  unsure (1)..(186): unsure at all n locations
  Clone ID: MRT4577_130806C.1
accccgggncgaccctngcgnccggncgccattaagcaagcgctcccggggtgttggcacctaaacctacnacctgaggcccgcgtggaccanccgcccaccacactccttggagtctgccagccgcctaccacaagcaccaccacctaccgcctcaaggggtaggagagatgaagtgagggctgg

SEQ ID NO: 33774 - DNA, 183 bp, Zea mays
  Clone ID: MRT4577_130807C.1
aattcggcacgaggctgacacagtcgtcttggcactggcctatccgcgccactcaaaggttagcccaattccctcctttatcacatttatgagcaacggcgtcggtcccgccggtcaacaacagcatgggggggtggatgagaggccacatttgacaggctgcgatgctgacagaggacagaa

SEQ ID NO: 33775 - DNA, 341 bp, Zea mays
  Clone ID: MRT4577_130808C.1
tgactcaactcctccccaaacttctccctctccatcgactccctactccgcgccacgttttgcaccaaaccctcctatcatggccatggccgccgacggaggcgattgataccttcatcagcataacgggggcggacaagagcgtcgccgtacgcagacccgagcaagatggtcgtgatcgtaagccatcaatatattcacatttcaatgacggacatagcatattgaacggcatcactcaaaacgccatgcatgctactcgtgatgatatgacggagctttatggaccacctgatcattcatttcaaagatctttggtgccagagagtttccgtgcccct

SEQ ID NO: 33776 - DNA, 345 bp, Zea mays
  Clone ID: MRT4577_130809C.1
cgaagctcttcattgagctggaatcgaccacaattgacctagttgattggcatccttccgagctgacggcacttccctagaccctcaacggagcctccattgtcaggatctacaaggcaactacggccggtgacctcatcggggagctttcatgaggtacggaggttgctgatctgattactaagcttcatgagattaaaaagtgttccggcagaggaattattgctacagggccagcgcctgctggatctcgctacgacttcttcacgcgtttttactgcccaaagtctgcaatagatgaagatcctcgttgtggcaatgcgcattggagtttatcaccgtact

SEQ ID NO: 33777 - DNA, 573 bp, Zea mays
  Clone ID: MRT4577_13080C.1
ccggccggggattcaccaaaaccgctcgtctctctgcttgtctcgcggcgccgcccatctgccgaagctcaccgctaccgtccgtgctgattcgagacccaccgtccgtcgtcgcgagggtgagatcgcgattcgtttctgagctttgaggaatcgacggtcaagcttcggcgaccaaatgacccagctcttcgagttctacaaggctgaagatcctgagcatctgtttagtgaaggttgtccacattgcaaccactgctcaggagaagacgaagccgtggaaggagacttccaggagttccaagactacggcgagttctaggtgtgggttggcggcaacccccagtcagctgcctgtgaaggccctatctttactgcgtttcgcttagcactttgatttacccgttaagttgatgactatgtggatgtctctgattctgtgatgtaataagttaatactctttatgttattattcgagcactgtgcgatgatgttcatttatgtaatcgctgtgtacgtgaaaaaaaaaaaaaaaaaaaaaaaaaaagaaaaaaaaaaaaaaaaaagcggcc

SEQ ID NO: 33778 - DNA, 216 bp, Zea mays
  Clone ID: MRT4577_130810C.1
tgttgtcatacttgtccctcggcctcctatattttctatttttttggtgtttctatcttttagaaatcccttactcttgtcacttgtatcattcatatttgtattcactgatccccagtatggcaaatcaacaacccctctgctattgctttactgcatactccagacaataacactaaccatggattcatatacatgcaatggaaataattataa

SEQ ID NO: 33779 - DNA, 142 bp, Zea mays
  Clone ID: MRT4577_130811C.1
cggacgcgtgggttttaatcttcatcttgatctgtttgaaacaaaatcagatagcattacgggcatctcatagtgttgcctcctaatgcatagcatagtttgccaaagaatgatcactgaaaactccgcagtgttaccggaa

SEQ ID NO: 33780 - DNA, 428 bp, Zea mays
  Clone ID: MRT4577_130812C.1
tcgctcggcccttcttcaagggtcattcgatgcattgtacctgaacgctggacatgtgctgtactcgaatcatcgcatcacttacgattcatcctcgaattgacatgtgatctgaaaagaaagggtgcattgaacaatccatgacgtgcgtgggtcactttcatagcacgagggcgatcgacgcaagcgctgtgccacctggatcttgagctaccgttgagcacatacctgcccaacttaagcgccaggcagcgcatgtcgaactgaagatcaagatagcaccgcgtctccgctagtaagacagtgcactatctcgattaccaagtcttgattcacgatactctcaaggtaaaaggtggagacaagaccaacacaatccacattttgctgcgactcgctggatgcgcaatgctgtattcactaattgc

SEQ ID NO: 33781 - DNA, 523 bp, Zea mays
  Clone ID: MRT4577_130813C.1
ggaaagaattggggaaggggttcaaacaaaggggaagcgatgaaatggtccaagggggaatccctctctcaggggaagaacatcagggggatgcctcaattcgttaaattaaggggaaaggggggacaaagaaaaagggggcaaaaggggggtcgaatcaaaaaacatgcccacccattggaatgcccccagccatgtaactttttttcccctttgttttttcctcggcctccgggccccccggccggtttacttaatgtagtaggcaaaaaaggaggggacgggggccccaagggcggggcccacggggggcccaacgggggaggaacccttggtgggggcccgaacccgaacctccccggggagccccacgggggccccccaggcgggaacaaggaccgggcaagcaatctttttaatttccatccctaaataccgcggcggcggtggagggcgggaccgaatggaaccgaggccaggaaaaaggacgggccccggaagcaaactggctgctggctggctg

SEQ ID NO: 33782 - DNA, 380 bp, Zea mays
  Clone ID: MRT4577_130814C.1
acgcaacttatatcacactcttcttgtttttctataacataaatgtagtatataatcatctctctcatatgatttaggataatatacaaatatattatatatataaatatataaacttaattagttttgtttaaactataattattaaaatggaattgaattccaacaaaataaacggggccttatggattttctaatttgtggtttctttataatgttatgcaagtgcaatcttattttagggagctgtaatggagtatcaacagtcattccatcagtttcatgattgtaaactttgatgtgattggctcacagttctattcagcagaataatacgctgtgtttatttttttgtcgtatttgctagttgaagatttttt

SEQ ID NO: 33783 - DNA, 590 bp, Zea mays
  Clone ID: MRT4577_130816C.1
gccgttcctgtgccgcaagtgcggcaaggcgttcgccgtcaagggcgactggcgcacgcacgagaagaactgcggcaggctctggtactgcctgtgcggctccgagttcaagcacaagcgctcgctcaaggaccacgcgcgcgccttcggccacggccacggcgccttcggctgcaacaacctcgacggcgacggcgacggcgacggcggtgctggcggcggcgccaacggcctcgacgacgacgacgacgacggcgccgtctccgagatcgagcacgactactgcgccgccgcgcggtgatcgatcgtgcatcgatctgtacgtggtgggtgccagtgccacactagctagctagtagcttgcttgctctagtagtgctatatatacccggctgaccggcggtgttaatttcttgttctctcgcatgcattgttagtttgcggcggccgggctgtattacgtgttgcggccggcccggccccggcctgtcgttgtttgcttttgctctaattagggttgtggaggtcgtcctgatgatttatatccatctctaagctagctacctgaaggtacgttattagtttgtgtc

SEQ ID NO: 33784 - DNA, 314 bp, Zea mays
  Clone ID: MRT4577_130818C.1
ggtctttgacggtgagcgcagtctgaccaaggactgccagcttctcgacaagttcaaccttaacagcattgctccagctccaaagggcacaccccagatcgaggtgaccttcgatgtggacgccaacaatttcctgaacgtgaaagcgagcgacaagatcccgcgcaactcacataagatcacgatcacaaactagaaagggctgctgacccacgatgagatcgaccgcatggtgccggaggcaacagacttcaccaaggacgacaagtcagtgatggagcggatcgacacccgcaaccaaatagaaacgtaca

SEQ ID NO: 33785 - DNA, 252 bp, Zea mays
  Clone ID: MRT4577_130819C.1
aggctcctatactgcggccggcccgccctttttttttttttttttttttgacaaacaattattcatagaaatggcatggatagtatggcataaaatacacagggaaaaatttgggtaacaaatgttcacaaaaaaaggtatgtacttgtacataccaggttcaagtattataaaagttggcgaaagagccctaaatagactgattttgccccaccctgaccccatcccgcaggaaaattggcttgataatcg

SEQ ID NO: 33786 - DNA, 360 bp, Zea mays
  unsure (1)..(360): unsure at all n locations
  Clone ID: MRT4577_13081C.1
cccgggctcagcgccgcgcttgcgtngcctnccctccgctttcctggtgtgtggggcggggcgtggcggttcgggtggggccatgttcccggtgctgctgggtttacctgcggcggcttctgggtgctgggccggtgccctgttgcgcnttccctgtgcctcatgtgtgtgctgggaatctggggtcgccttatcggggtggcttgtgcctgtgttggtggcctggttctggctnccgcgtcgcctgggatgcctggccttctgncgccggtggtgccggctgtgcttgtgtggcggccctggccgtggttccgtctggctggtgtcttcttgttctttggggacagtgctggggtgatt

SEQ ID NO: 33787 - DNA, 732 bp, Zea mays
  Clone ID: MRT4577_130820C.1
cgtcttataagaatgcctggatatttattcaagtctcttactgagtctgatgggcatctctttccagcaagaacaaatgaccgtccatcgaactctaatttatctggtgtgcgaggtgacttctcaaatttatacttgaaaatcaggttcgcaagagtcaacttggcctccagaagagcaaatcgcatgccaatgcaattgcgtggtccttggacgaaggcgaggaaagcacacttatcgatggagtttttgttctcaggcatgaagcgctctggatcgaatttttctggctcaggataatattcttccgagtgatggatgtagtaaaccggggcgagaacaagagtgcctttctcaattttaaatccattggcgaaggtgtggtcttcagtgcatcgacggatgaatcgtacgatcggtggatacatcctcagtgtttcatttatgaaggcgtcaagatatttcatcgagaacaacgtttcgtagtcaaagtcacctgattcttccttgacacgtttaacttcttcgtaaagtctgtcctgacatcagggtttgtgacgagggcgtacgaagcccagaagagaaagtagaagtcgtttcgaagccagcgatgaagaaaagaatcgaattggcaattatttttcggtgtcgttaaattcaccattgggatttgtcctttgcctccatcagcagctgaaagagatctggaaattcatttgtattagatggatt

SEQ ID NO: 33788 - DNA, 497 bp, Zea mays
  Clone ID: MRT4577_130821C.1
tggaatatttataaatggggtgagcacaccagtttttttttcacctttgcattcacttgatgctgaattctccaagcccatgtggatttttggcgtcagctcctatggattccttggaatagatgacacacgtcacaaaattgtttgctcttacaggcagaatggaaagtcatgttggagtgcttgatcaagattctgagtccttcctgaaaattgacattcccttctcttctgtaactaacatagtggtatctggagatagatccttctatattgagggtgcatctgctactcttccagtatcaatagcaaaggtgacacttgatgaaaagagaactatggcaactgatttctctaatgattggtcctcctctgaggatgttgcacaatatgaatcatacttcagcttgcctgaatttgtggagttaccaaatgtgatcaatggtcagcatgcatatgcatattcatatgctccgtataataatttttttcaaggt

SEQ ID NO: 33789 - DNA, 1363 bp, Zea mays
  Clone ID: MRT4577_130822C.1
gcacgccggggctcaatctgctccgattccctccagcctttgtttcctccatcccccgcgtcaatcctgcagcctcctgctcgcgcgcttactgtagccgcagctttctccacccttggcaatggaggccgcgatcgctcacgctccatctgctccggtcctgcgccgctcgcgtagcctcaaccccacgcccgccgtccggccgcacccaaaaccctggcagggggtgctttcggcgaggcacccgtcgaacgccgtcaggtgcgagccgtcccagcgcccagaggcgcgcccgcgcctgcgcgcgacgcagccggctggtgctgacgcggcggccgggaggaagcggctggcagtgttcgtgtccggagggggatcaaacttccgggcgatccatgaggccgcgctgggcggtgccgtgcacggagatgtcgtcgcgcttgtcaccgacaagccaggttgtggtggcgcggaatatgctaggagcaatgacatccctgtgctcgtatttcccaagtccaagtctgcgcccgaggggatttcggttgctcaactgctggatactctgaggggaaacaatgtagactttgttcttcttgccggttacctgaagcttatacccactgaattgatccaggaatacccaaaatccatattaaatatccacccttctctccttccagcattcggagggaaaggtttctatggttcaaaggtgcataaagctgttattgcctctggagcaagatactcgggtccaaccgtacattttgtggatgagcactatgataccggtaaaacgttagcccagagggttgtgcctgtgttcgcagatgacacgccagagttattggctgcaagagtcctccatgaggaacatatggtctatgttgaagcagttgctgctttgtgcgaggaccgcgtcgtatggagggaagatggtgtcccacttatcaaaagtcggacaaatccagctgtgtacatctaattgacaatacggcaatagtagcactattttggagtaataatggaatttgtagagcccttgccacttttcccggtaaaaggggtacttagcagttgacgtagggttgatatacagggcacaacttatttgccaccgaaacatttccatgcgttggaagtgagaaacattgcccccaataggccgcagtatccattactgcatggaacaaggttgaaattttaccttgatttgagataactatcaaatactgcgaatgcattattcttccggaattcctttttttcttaactatcaaacggttgctcgatcttgtgatggtcttttattgattgaaggtcttgtgatggccaaaaaaaaaaaaaaaaaaggccccta

SEQ ID NO: 33790 - DNA, 657 bp, Zea mays
  Clone ID: MRT4577_130823C.1
ggccctaggggccttttttttttttttttttggtttttttttttttattttccccaatgttttaactatcacaagttacagaaacacccctcgtggataatctactctggtactaccgcaaacaattatgtggcttatttaacccctcccccctgcaaaaccaaaacaagtgtatgcaaaaacgccccaaaagataggttcctaatactgcatccgatttttgggaggcatatggggacaaatcaagtatccatcatttcgatggtgtaaatgcagaaagttcatctggggcacatatggacaaaattttaccagtgtttccgggatttacccctggacaccactttctcctcgagatttttgaccttatagccaatagcacaagcatcaggagggtccagaccatattgccgggatcctgggatctctactggcgactctgaggatggtatagccttggatccatcaaacatactgaacactgggttttccgtgagagaaagcgaattttccgaagtatgaagatcaaaccacttactcacatttcttccccggataacaagactgtataaacgggagaatatggttgatgaggtccaggaactgaaaactgccgagaatgacgtcattggaaatgggactgatgaaaccgctact

SEQ ID NO: 33791 - DNA, 378 bp, Zea mays
  Clone ID: MRT4577_130824C.1
ggaagttgtggggcaaagaagaaggtgctgtgagcgaagcactgctgagagtcacaccggcatcttcagcggtgtgagtgcatgcagcgaactaacatgctcgccatgccgtccgacagaagcttcatcgccacgtgctggtggcgtcgtgagcagggatgcttattgatgtgcacaagacaaaaggcatgtcttatcggcaagggaaggctaatcctttcttccaagtctaagtatctgcatctaaatcattatatgtgcttggaggaaggggcaatcgagcgctacttactggactcctgacctagcggtcatagtatatgagcgtgtgtgtgcgctccatccgtgtcgatttacatctagaataatgaccagttc

SEQ ID NO: 33792 - DNA, 211 bp, Zea mays
  Clone ID: MRT4577_130825C.1
cctaaaactcccaggggatattttccattcaatcagggccttagcaaaattattaggccgggtccacaaatcgtagatcatgctgtaaatggactatacaactgcgaatataagacaacacaccggggttaggaacacacttataacacccagtaaattcagccccgccctgcaatatgcacccgggatggccgatggcaaatatgaaaaa

SEQ ID NO: 33793 - DNA, 467 bp, Zea mays
  Clone ID: MRT4577_130826C.1
aaatgatctggtgcaaagacaaaatactacaaggattgactcagatctatcaacatcttgtctctggtctcgagaagatcttcatcctcatttggaggttgctgccattgtaatccaggcaccacttcataaaacgaagtccaaagaattgaaagctggatcgtcacctggtactatcaaagcggttacagcaggtggtgcacatgggttaccaagggatgatgaggcaagcccatcaccattacttgaccgtctaaagtctggtggagcctgtgattgtggtggatgggacatgtcatgcccaattgttgttcttgacaatgcatatgatggttactgggctgattccgtaatgaatgaaagcaaagctcctatggcagttatttgctcagggtaacaatagaagttctccctgccctttcgatgaaggcggatgggaatggacatttctcagtggatttccatgc

SEQ ID NO: 33794 - DNA, 833 bp, Zea mays
  Clone ID: MRT4577_130827C.1
agattcttcttccccactcccacccgctccgatggaccccgcagcggcgccgccgccgccgccgctcgcggtacacctggtcaccggcgacgcgtcctcgccggcgctatcccacctcctccagtccctcgcggccgcccgcatagtcgccttcgacgccgagtgggagccacgccggcgtgtcccttccgcccccagcgacgacgcctcgccagccccccctaatccgacgcagttgccgactgttacggttctccagatggcctgccggggagaagacgggggcaacgaggtgttcgtcgtcgacctcctcgccgtgccgctcgccgacctgtgggcgccgctgagggagctgtttgagcggcccgacgtgctgaagctggggttccggttcaagcaggacctcgtgtacctctccgccaccttcacggctgccctcggatgcgactctggattcaacagggtggagcctttcttggatgtcaccaacgtttatcactacctcaaggggcatgacatgcaaaagaaacttccaaaggagaccaagagtttggcttcaatatgtgaggaactgcttaatgtctctttatccaaggaactccaatgtagcgattggtcatgccgacccttgagcgaagggcaaatacaatatgctgcatcagatgcctactacttgctatatatatttgatttgttccatcagaaggtcagcattgaagaaaaatgttcaccaacggctgaagcttcagatgaacattgctcacaaagggcaagtgattgttcatcgtcagggaatgacattttgctttgatgggtattcgacatccatcatc

SEQ ID NO: 33795 - DNA, 351 bp, Zea mays
  Clone ID: MRT4577_130828C.1
ggcaacaaaacccaaattttaaaaaaatgggtttggataggaccacccatggacaaaaagggggcagcccacaaacattaaacggaagtaaaatttggggggcaggacgaaggggaaaaatagcaaaatggcacaattttgaaaaaaagacgttcccataaacattgggggggaaaaccccccaatccattggcaactttttgaacccacgggttaaaatcctaaaacaaaataaagggaaaaaacctggtaaaacggggcccggaaaatagggcacccccacttttgggattttatggccttaaaaaaggaaatggaaccaaccttggggccgccggggaagcaggcccc

SEQ ID NO: 33796 - DNA, 982 bp, Zea mays
  Clone ID: MRT4577_130829C.1
agtacaacctttcagcggagagctggggtttgaggtttgtcatttgagagctgaaagttgagataattaattattcaaagctaacacacgtaaataagaaaacacagcaaagcgaggggcaaggcatgatgctcccgaacatgatactccccacgacgatcacgcgttggcagtctatccctttttctgggagagcagcacctcgtggatgaccctctcgaggttagtctccgcaggcccacccggcagcgtcaccttcacggccttctccttccactcctctgcgcgccggcgcatttccctccccttctccccgtccatggcctcctttagaacgaccgtcaccttgtcgcgccgcacctcgccgccgatctccatcccgactccccactccgtgcgcttgtaccggcagttggtctgctgctccgcgaagaagggccagctcagcatgggcacccccgcgcagaggctctccagggtggagttccagccggagtgagtcaggaacaccccgaccgcctcatgctggatcgccgcctcctgcgggcaccacgtcgtcagcaacgcgcggccctcgacggcggacgcgaactccggcggcagcacggcggagtcgcccttcaccaggtccggccggatgttccacacgaacgggtacccgctgttggccaggccccacgcgaactcgagcagctgcgagttggtcatcaccgtgatgctgccgtagttcacgtacaccacggtggcgaggtggccgccgccgacgttgtcctggaggtccgcggcgctcttgaatggcacgaggccccagtcgatgaggtttctgtagttccggtagcccatgaacccgcaggcgctggcggtccagagcgcggcgacgggcacgccgatctgcctggcggcgtcgaagccgaacgacatgacggcgtccacgacgaggcaggtgaccggcggggacccggcgtcggcgtcgacctggccg

SEQ ID NO: 33797 - DNA, 908 bp, Zea mays
  Clone ID: MRT4577_13082C.1
cctgccgggctctcgtgttaacctcccgtacctgcttgagccggccacgacgctgcaaccaccactgcggccctgcctaactgcacgcataaaaaaccctggcatctctcaatcttccgccacatcagccgatctcgatgcccaccactgcgcagcccacacgctcaccatcgccgtcgcgtcgtgcctcgcctcgcctcacagttgtgcctggtcgccgttgagcagggagccagcgctaagctcgttgtgcccggactcgacctcgccaccatcaccgcctcgcccggagcagccctggcccaccgcgtcgtgccattgcctcgtccgtcgttgccatgactgtgatccatttccgagcttcgaggaatcgacagtcaagcttcagcgaccaagagatcgaactcttcgagttctacaaagtggaagaccctgagcatctgtttggtgaaggttgtccacaatgcaaccactgctcaggagaagacgaagccgtggaaggagacttccaggagttccaagactacgacgagttctaggtgtgggttggcggcaacccccagtcagctgcctatgaaggccctatctttgctgcgtttcgcttagcactttgatttactcgttgagttgatgactatgtggatgtctatgacatcatgatgtaataagttaatactcttttatgctattattcgagcactatgcgatgatgttcatttatgtaatcgttgtgtacgtgaattctgatcctggcacgtacatagttcgcattcggtttgccttccaaaaccgggtgtgacaaccttcgactaatagaatcccactatgtagtttaaatccaagaaacactagttattcaatatatatgttgtgttgcgagtcaaaaaaaaaaaaaaaaaaggccccta

SEQ ID NO: 33798 - DNA, 525 bp, Zea mays
  unsure (1)..(525): unsure at all n locations
  Clone ID: MRT4577_130830C.1
gtaccctncgaggnnccggccggggacgcacgccaccatagttcgagatgagcgaactcttactgcggactaccggctacatcagtgcggagattacgacacacgtgcgcccacctgcaccctggactgccggcgggaatgaggcgctgtttctggtcctgaacgcgggggcatggcgaaagttggtcaccttgcggctaagagccaggataacgttccggatctacctgagagctgccacgtgctgcgtgtctccacccgagcttgctgcgcatgagcgagtccttcgtcgtgggctaccggacacgcgctggtacgacctgcgcttcatggtgcattatactgctgcttcccgcagagggcggactctcgaggcactgatgaccgaccaacattcataaaggattatcgaggcaagattgagactgagctgaccaagatctgcgatgggatcctctagctgcttgagaccccatcttgtgccgtcttccactgccaccgacgccgggccttctatctcaagat

SEQ ID NO: 33799 - DNA, 416 bp, Zea mays
  Clone ID: MRT4577_130831C.1
acgcccgcggccctcatccctaaactcggttctagccctttttcttttcgccccattaacccaccagggtattttcaattttttttggtttggctaaacaaactcacctcacaaatacgtttcaacatctcatcatcctacacttaaacataatatttgagacaacttcttcaaggcttcaccaccgattagtaaaaagccacctaatgtaacccactcgttctttctctaaaattattgttcataaattcgatacattctttgattccacatgcagcaatgtgaatgacacactctctctgctgaatacgttaactttataaacatcccctatacatgttttatgggatggacattcaaaattttcccattcaaaatacttcctcttttcataaaaattcccctttattattaac

SEQ ID NO: 33800 - DNA, 160 bp, Zea mays
  unsure (1)..(160): unsure at all n locations
  Clone ID: MRT4577_130832C.1
cgccgaaaaaaagagccagcggatttagtnnagcatcagctgcaataagggtctcgttgtcatttatgttaatnaaaaagtggntctcagcggtattgttaaccgatattggtcgattacccaaannactagactttctcatatttagaaagacttaaga

SEQ ID NO: 33801 - DNA, 1801 bp, Zea mays
  Clone ID: MRT4577_130833C.1
ctcgaggccggccgggaggtataggaggaggcgagagagtagtctctcgcgcgcggccgggcgggacctttgaacgatagcctttctcactccgacacttgaaacacgttcatcaggagctcgtcctcaggcttgctagtagcttatattacctacctagctagctagctagtcaagactcaagatccatccatgcctgcaaacatgatctccaagatccttgagaagtcgtctgtccttccgctggtggacgatgttattgcacccatccatgtgaagaccgctggaggagctcctcggaccagtgtgctgcgcaatccgaacatggagaagcttcagaagggctacctgttcccggagattagcatcaagcgtgaagctcacctgaagaagtaccctgatgccaaggtcatcagcctgggcatcggcgacacaaccgaacccattccaagcgtcgtaacgtcagctatggccgagtatgtacttgcgttatccactccagaagggtaccagggttatgggccggagcaggggcaaatgaatctgcgcaaggtcatagctgaggaagtgtacccagacatggggattcaagagtccgaggtgttcatctcggacggagcgcagtgtgacatcgcccgcctccagacgctgttcgggcccaacgtgaccatagccgtccaagatcccaccttcccgggctacgtggacaacggcgtgatcgtggggcagaccggcagcgcggacgaggccggcaagtacgccggcatcgcgtacatgcggtgcgcgccggagaaccacttcttcccggacctctcccgcgtgccgcgcaccgacgtcatcttcttctgctcgcccaacaaccccacggggcacgcggcgtcggcggcgcagctgcgcgagctggtggacttcgcgcgccgcaacggctccatcatcgtgttcgacacggcgtacgcgtggtacgtgtcgtcgtcgtcggaggccgctggcgacggggacaagatgaagccgcggtccatctacgaggtgcccggcgcccgggaggtggccatcgagatctcctccttctccaagttcgccggcttcacgggcgtccgcctcggctgggcggtggtgcccgacgagctgcgctacgcggacggctcccccgtcgcgcgcgacttcgaccgcatcgtctgcacctgcttcaacggcgcctccagcgtcgcgcaggccggcggcctcgcctgcctctccacggaggaaggccgggacgccgtgcgccgcgtcgtgggcgtctacaaggagaacgcgcgggtgcttgtggacaccttcgcgtcgctcggcaaggaggtgtacggtggcaccgactcgccctacgtctgggtgcgcttcccgggccgccgctcctgggacgtgttcgccgagatactcgacaagacgcacgtcatcaccgtgccgggcagcggcttcggccccggcggcgagggcttcatccgtgtcagcgcgttcaacagcagggacagggtgctggaggccgcagctaggctcaagaagttccttcctggactcagcgctgttccgctctaagctccacgtacagatcctgcacctgcatggctgatgatatacctgccccgtactgataatctacatcgataataacattgtgcctcgtactgataatgtacattggtacatggctaataataacattgccatgcgctgagacgcagccatagtatcggatcaaaaaaaaaaaaaaaaaaaggggccgtggggggggtgtgaatgagcaagtgtacaaggattcttttcgaac

SEQ ID NO: 33802 - DNA, 307 bp, Zea mays
  Clone ID: MRT4577_130834C.1
aagaccttttttttttttttttttattgttaacgaccagtggatatcgatcggatcggcccgatcggcaacacgttcagcattttggccatacggtcatcccaaaatattgttttacatgatcatgccaatgccataggtaaaacacaaggaaaacgcacggattgagatgtgctactgcttcttgttgctgtttctttgacttggctcttggatacgtaggtttgttcaacaactgtaccacgtgctactagactaaaaatcctatgatcaaaagcaaacccaacccactctttgtctttgatcta

SEQ ID NO: 33803 - DNA, 146 bp, Zea mays
  Clone ID: MRT4577_130835C.1
gctcccattgaaattacactaggataaagctcagcatggtgatcacattgagaacagcaggttgatctgcttacaaaaggtgggcagcaagctgttagcttccttctgtacaacaacctacccaagctctgagccccccccccccc

SEQ ID NO: 33804 - DNA, 706 bp, Zea mays
  Clone ID: MRT4577_130836C.1
ttcgattatagtgaaaatattttggacttagttctgggagtgaggggatttttataaaaacgtgtatgagcccagtgaggagaggccatgaaggttctaggagtgaagggattaggatcgggaactgctgctgcatcaggcgcaacaaggcaatgaggaggatgtgtttcagggcaatgggtgttgtaggagcattgatataagtgacgccctcactgaagttggtctgacctgccttgaggtcctcctcaccaagtgaagcctcgcctcggtgaatcaggaagaatgctttacaaatccgaatataagtccagtacgatagtgcaaacagagagcatcagcactaaagaagatagggagagttcaatgcatgatgtttgatttgttgacactggaagaggcgactaattgaggccgttgtcattgccaccggtgtgcacacattctttgtcaaggctgcatatcttgtcgattcaacaaaccaagttggtcattttcagaatgcaagctaagtgtgacgccgccacagaagaccatgcccactctgttcgtgctatcggtttggaaagaacatgtggaaagccaatctcggatcttgcttccttcaggtttccacattgtagacacacaagagtccaggctgcgacaaacgctcctgcagatgatgcttgttgcagtaggttgtgacagattgctcaaagaaaag

SEQ ID NO: 33805 - DNA, 244 bp, Zea mays
  Clone ID: MRT4577_130837C.1
attcggctcgaggacaccgaagaaacattttgatgcgaggagcactactggctgggtggattcgcttcagacaagcagctagcccggttaaattgcatacacacatggtgagcattgagtgaggcacggccaactgcgctcccgagccgcagccgacgacgttgacaggacatctcattacgatgctaagcatagatagctgcggcgtaccgggttcttatcacgacgaccatcattgcatacc

SEQ ID NO: 33806 - DNA, 427 bp, Zea mays
  Clone ID: MRT4577_130838C.1
tgcttcgaacaaatgcaggcacatggaattgcatgatctactcccctgccagatgctgcgttcactctccctctgcttccctgccggtgaggtactctccccactcatctctgctgatcttgatagccgccctgttctagaggagatctcaattaaagcggaggccgattgccggacctgtgcacgccctgccccattatttgccctgaatgatcttgcaagattacccagtgctggcctagatgaagttggatctgagtgcccccgtcggctatgctcttactgcaccagcagcccccatggctctctctctgtgcgaccgattccatttgccggctataccattcactacagactttgccacgccctgcattattgccccccccacccacaaggaatccccccatcgtaccccaccactgccccc

SEQ ID NO: 33807 - DNA, 948 bp, Zea mays
  Clone ID: MRT4577_130839C.1
cccacgcgtgcgtccacgcgtccgtccacgcgttcgcggacgcgtgggcggacgcgtggatctgtcgcgtgaactgtcgcgtggttcagttccaggagttatccggtctggatcttgtaggtatttcctttgtaaacatatttagcaaaaaaactcagaagataggcatgagagctataaatatttttggaataaaaggaagaatgctttacaaattcgaatataagttcagtacgatagtgcaaacagagagcatcagctgttcgtgctatcggtttggaaagaacatgtggaaagccaatctcggatcttgcttccttcaggtttccacattgtagacacacaagagtccagcctgcgacaaacgctcctgcagcccttattcttcgtagcgggttctgccgtctggcccggttctggaattatgtggccatcagctgattgtcaacagtctcatgagattggagcctagatccagtttgctttgttggaaaacttcaagcacctctagacggaaggagattggagcctagatccagtttgctttgttggaaaacttcaagcaccactagacggaagttgtctgcactgaagatcaggacacgaagatcgcgagctttaacaaggctcgccttgtgcggaaggtgtatttcagtgagatctccaagatgaagcattagggggtcaatcgccccagattttacgcgtagctaacttagtagggcacccataatccataatttattctctgtagttgtagcagcgacatagaggtgtcattctgtagcacattgtgtaacatgtaggagagagagaaacacatatccccattctttctactgaaacaccagaaatagttgctcttgctccataattcgttaatctgaacttctgaagccatgccaaggccttatattgaacaaaaaaaaaaaaaaaaaaggggcggcc

SEQ ID NO: 33808 - DNA, 441 bp, Zea mays
  Clone ID: MRT4577_13083C.1
gagcctgggcttttatggaaaataaaatggggccaagcccacattaatccaacgggggggtcaaaaaaacgcccccccccccaggggcacaggacaaaccggaacctatcccagggggttaaaccgaaggggagaaacataaccggactttggaaggcgggaaaaaaggggggcacttggggggggggaaggccccaaaagggacaaacctgttgccgggaaacctgggggggcctttgcaataaaaaagggcggaggacccctttttgccccccccccccccctgttgaaaagggggggggggtttaaaaaccccgttaaaaaacggcccggccttgggggtttggctcaaggcataaaacccgaggcttcaagacttggaaaggggtttggcccagaactgcccccccaaccccggggtgaaaaattgggagaaccccc

SEQ ID NO: 33809 - DNA, 284 bp, Zea mays
  Clone ID: MRT4577_130840C.1
catgattatagaaggctgtcttagtgcaaaagacatacttacatttcagacatatccagagggaatactcacattttgttaagaagttgaactatgactggagtaaaccatgtattcccttatcttttactttttttctgtgacatttatgtctcatgtaatttgcattactctggtggattgttctagtactgtattgggcttcttcgttaatagattatttcatatactataattgtcaatactttgatacaaatgtttataactctagggatataaaaaca

SEQ ID NO: 33810 - DNA, 1657 bp, Zea mays
  Clone ID: MRT4577_130841C.1
gcacgagtttcagttcagattatgcacttttcatgttctatctatttgctttgtaaacagatttaccaaaaaaactcagaagataggcatgagagctataaatattcttggaataaaaggtgaggctgcatgcacttgtttggatctcatggtaggaaacgagttgttgctgctaattttccctaaaataggaaaggtagggaaattctttctggataaattatatggtatgtccaatccgttatttcgcgactacgttgatgatccgttgttaccgcagtaaggattctacaaatagtatggctctttttatccttgattgatgcggggatttattaggaactaggcaagaaagtcagatcttttatataatcttgctcattccgatttttgccctacatcctgattcgatatatagtgaaatatattttggacttagttctgggagtgaggggatttttataaaacgtgtatgagcccagtgaggagaggccatgaaggttctaggagtgaagggattaggatcgggaactgctgctgcatcaggcgcaacaaggcaatgaggaggatgtgtttcagggcaatgggtgttgtaggagcattgatataagtggcgccctcactgaagttggtctgacctgccttgaggtcctcctcaccaagtgaagcctcgcctcggtgaatcaggaagaatgctttacaaatccaaatataagttcagtacgatagtgcaaacagagagcatcagcactaaagaagatagggagagttcaatgcacgatgtttgatttgttgacactggaagaggcgactaattgaggcagttgtcattgccaccggtgtgcacacattctttgtcaaggccgcatatcttgtcgattcaacaaaccaagttggtcattttcagaaggcaagctaagtgtcatgccgccacagaagaccatgctcactgtatctatattttatactaatttttaacgtccaaaggacaccagatgtttcaatgttaacggtgctgttgttatacactgatgttttgttcttatttgcttgcaactttttgcagctgttcgtgctatcggtttggaaagaacatgtggaaagccaatctcggatcttgcttccttcaggtttccacattgtagacacacaagagtccagcctgcgacaaacgctcctgcaggagattggagcctagatccagtttgctttgttggaaaacttcaagcacctctagacggaaggagattggagcctagatccagtttgctttgttggaaaacttcaagcaccactagacggaagttgtctgcactgaagatcaggacacgaagatcgcgagctttaacaaggctcgccttgtgcggaaggtgtatttcagtgagatctccaagatgaagcattagggggtcaatcgccccagattttacgcgtagctaacttagtagggcacccataatccataatttattctctgtagttgtagcagcgacatagaggtgtcattctgtagcacattgtgtaacatgtaggagagagagaaacacatatccccattctttctactgaaacaccagaaatagttgctcttgctccataattcgttaaaaaaaaaaaaaaaaaaagcccacgcgtccgactagttctcagatcgcga

SEQ ID NO: 33811 - DNA, 765 bp, Zea mays
  Clone ID: MRT4577_130842C.1
gggagtttgctttgttggaaaacttcaagcacctctagactgaaggtaatgattttgtagccaacctcaggccaaataccttttcattcttttactctccttaaaggaccagtgactttgtgtcatttattgtttcttgatcatgtgacatgataataaaatgaaggttctgtgatatatagtatatggcaaaaaagcgtttcttaatcaaagatgacttctgacgacttttttgaatgttgatctgtttgcaggagattggagcctagatccagtttgctttgttggaaaacttcaagcaccactagacggaagctgtctgcactgaagatcaggacacgaatatcgcgagctttatcaaggctcgccttgtgcggaaggtgtatttctgtgagatctccaagatgaagcattagggggtcaatcgccccagattttacatgtagctaacttagcagggcacccataatccataatttattctctgtagttgtagcagcgacctagaggtgttattctgtagcacattgtgtaacatgtaggagagagataaacacatatccccattctttctattgaaacaccagaaatagttgctcttgctccataattcattaatgtgaacttctgaagccatgccaaggtcttatattgatcctctgttgtcatattgataaaaatagggtatgtaaaaccttttctcataacagtttaacacatattttatatataagttatcgtaatattaaaaaaaaaaaaaaaaaa

SEQ ID NO: 33812 - DNA, 768 bp, Zea mays
  Clone ID: MRT4577_130843C.1
ctggccgggccgaacacttgacaagaagaacagcaacgccatctactggtcacccaagggacgattcgttgttgtcgccgctctccagtctcagcagtcttttgaactcgagttctgggacatgagcttcgacaggcccaaggaggagtctgagaagggtgacaaggaagttaacgccaacctgcagctcatggatacagccgagcactacggtgtaaccgacattgagtgggaccctaccggccgctacgtcgccaccgttgccagtgctttccgtcatcgcatggagaacggttatcacctctatgacttcaagggtacactcctccgcgaagaagccatcgaaggcttcaagcagctcctctggcgcccacgccccccgacccttctctctaaggaggagcaggccgaaattcgcaagaacctgcgcaactactccaaggtctttgatgagcaagacgtcgccaagaagagctccgccaacaaggctgtggtggaagctcgtcgcgagatgctagatgagtggcgcagatggcgcgaggaggtcactgagaggttgcgcgacgaaggagccgacctcgagctggcaaccctcaagggagagacgcctggtcaggcggatgatgggcaccaggaagagattgaggagattgtagaggagatcatcgatgagaccgaagaggtcgtgaattaggtagttgaatgagtagagacgagtatgatagtaactcgaatgaacttgctgggaaatgatttcccgaaccatac

SEQ ID NO: 33813 - DNA, 1272 bp, Zea mays
  Clone ID: MRT4577_130844C.1
ccggccggggaccccaacaaattctctcacaagatcctggcgaaacccatcacctccgctctcctcctctaccctcgggatcctggtggccaacgtcgtcctcgttggcgagatgacctccaagctccaccagacctcgcgctccaccgacgactggaggcctctgccccttcgggatctccttattcacaaggcgtcgaggccgccgtcgaccacgtcatgccgctacgctaggaggaggcgtcgaccaacatcggcttcgcagtggcctaggcgtgccgtgctgatgtgctccgccgtttcgcccgcctccctccccaaagctgcttctaggccgtcgcgatggaggcaatcagcaacaccaggttaaccctcgagatcctggtggccgacagcgtggtcctcgtcggcgagatggtgacctccaagctcttccaaatctggcactccgctgacgtccagaggcctccgccctttgggatctccttaatcacaaggtgggacaagcaccacggcttctagctctacttgagcgacccagctggcaactacggcgggtggaaggtcgtccctattggggccaacagccagtgtgcacaagggggaacagagccgtgtggcttctggtgcccgttgaggaaaggtgaggcgaggtgctcaccatgcacctcaaggtggatgacctcacgtggccatatacgccctttgtttaagttcttgcagatcaactttatgcagagcttgtggaacctgagaagcacatgcagatattctctcgtaggaaaaatgaggtagtgagatgttacttggagaaatggtatctaaatttgtgttgctttctgttttgagttctgacctttcaacttgcagatgctaaacatactaaacaagtgtgagagaaatactacagacatttacgaatgtcacacattttttctaatactgattcatatcatattacaagtatactctacttatatttcctttatttttagcggtggagttcaattgtatctttttaacaaaatataaagggagtttcaagttcaagattatgcacttttcatgttctatctatttgctttgtaaacagatttaccaaaaaaacctcagaagataggcatgagagctataaatattcttggaataaaaggtgaggctgcatgcacttgtttggatctcatggtaggaaacgagttgttgctgctaattttccctaaaataggaaaggtagggaaattctttctggataaattatatggtatgtccaat

SEQ ID NO: 33814 - DNA, 3836 bp, Zea mays
  Clone ID: MRT4577_130845C.1
tccgttgttaccgcagtaaggattctacaaatagtatggctctttttatccttgattgatgcggggatttattaggaactaggcaagaaagtcagatcttttatataatcttgctcattccgatttttgccctacatcctgattcgatatatagtgaaatatattttggacttagttctgggagtgaggggatttttataaaaacgtgtatgagcccagtgaggagaggccatgaaggttctaggagtgaagggattaggatcgggaactgctgctgcatcaggcgcaacaaggcaatgaggaggatgtgtttcagggcaatgggtgttgtaggagcattgatataagtgacgccctcactgaagttggtctgacctgccttgaggtcctcctcaccaagtgaagcctcgcctcggtgaatcaggtcactcgcttaattctgctctgccgtactcatatcatcgaatcccttaattatagtctaccagttagctactttactgaaaatctgactctgcagtgaactaattagtacttgttttagtagtttattttgggttagttgataacagtatgaattgaaatagcacttgttccaacagttgattcagggccagttgaggacggtatgaaatgaattaggcacacagtgtggtttctgtgtgtaactcttgctcttcttttccttttcctcctcaagatggtagcaatgctaaaatagttgacttctggggctatgctttcaccttgagagtcttcagatgaatttagtggtgcaattattagatgcttcagggtcttggttttgcagttacaaccatgcttggatcatttttgttctttcaaaccaggaacagtgttacctatgatcccaaccagtacaggcttggatgttagaagtgtagtcagctcaaatcactctacacaaccacctgttttcttagctaaatgcgtgtgtggtacgagcataaggttcttatttggtttctcatttgtggtaacggtcaggaacaacaactggtctacgtgttgtacagttgtggtgtgtgcctataggcagagctaatgtagatcaagtgtcctactatagaaagttttttaggaaatattccccgcactccaaattataagacattttgacttttttagatgcattgtcttttctatgccacccctcttccataaggtaggcatatccatccatcctacatattgaattctattcattgcttggttgatcatctcactgtcaatgaaatttgaagtatctcactgttttgccccctaagttcatcctgatctttagaccctactctgaatctcgcattgcttctgcaccacctacgtcaaaattgctctaactctgttcattcacttcagtgtctttttaactgaagtaatttgtttgttaatttgatgaattaccctgccaacgaaatttgaatcacctcagtgtttaaccatcgaatttatcctaaacttcagactctcggaatctcacattgcttctatatttgccttaaaattgctctgacactgttgattcacttcggtgctattttaatataagtaatttgtttattaatttgatgaattttgatttaactgtaaactacatgatagtgattttatccacatctaacttattctctttagtgtgtttcaggaagaatgctttacaaatccgaatataagttcagtacgatagtgcaaacagagagcatcaggtactccttaggttcctattgacgttgaattgtcctaatgcggttcatctaatgttacttatccatgttctattacgaactgtatgtgtgctattttcccacaattttctaatcaaaatattcagcacaaaaggatgacctcgtatatgggatattcaattgagtgtccatgaaatttgacaaaactagaaaattgaaaaaactagcaggcctgtagatctgagcaaatgatatgaagtacatgtaattactttctcaaaacgtagattagcttttttgcaaggactttagttgaaaattggaaaatctaacatgcatgtagatctgagcagacgatatgaagtacatgttgtttctttcacaaaatgtagatgagcttttttgcatggacttcagttgttatgttgctcctcgttaacactaaaacttaacctgctcgagttacaattatacatctcaatccagatcagccttttcattgttctggttctgctcatttatcctttctggtcacataaattcttgccatttaacaccagcactaaagaagatagggagagttcaatgcatgatgtttgatttgttgacactggaagaggcgactaattgaggccgttgtcattgccaccggtgtgcacacattctttgtcaaggctgcatatcttgtcgattcaacaaaccaagttggtcattttcagaatgcaagctaagtgtgacgccgccacagaagaccatgcccactgtatctatactttatactaatttttaacgtccaaaggacaccagatgtttcaatgttaacgatgttgttgttatacactgatgttttgttcttatttgcttgcaactttttgcagctgttcgtgctatcggtttggaaagaacatgtggaaagccaatctcggatcttgcttccttcaggtttccacattgtagacacacaagagtccagcctgcgacaaacgctcctgcaggttagtccgagatggcccttcattttcctgtttcaacagataaaaaaactaaggacgcattaaaaaactgaagtatgttcaacaaatcaccaaccatgatttttctgaggcacatgggtacaatcagcacaaactccatttgccaagaaaaggttataatgcattcacaccaataaatgttcgtttcacaagacataagcaaagaacattgaggtcgcattatctaaccttttggtgattgcagttgatgcttcttccagtagtttgtgacagattgctcaaagaaaagcaagacagctcgccaatcctagaagtggaaaaaaacaacatagaataattagccagctacagggagtaaaccattaagagaagaaacatcgtaatgccatgtttccaaatgggcacaaagaaattttgcctaagacactactgtcccaattgcttcagcccttattcttcgtagcggtttctgccgtctggcccggttctggaattatgtggccatcagctgattgtcaacagtctcatgtaacccttgagttctgatactcctgtttccctgctaattcatttctgcatttgcatttgaatcaaatgctcatgatttcaaagatgacttctgacgacttttttgaatgttgatctgtttgcaggagattggagcctagatccagtttgctttgttggaaaacttcaagcacctctagacggaaggagattggagcctagatccagtttgctttgttggaaaacttcaagcaccactagacggaagttgtctgcactgaagatcaggacacgaagatcgcgagctttaacaaggctcgccttgtgcggaaggtgtatttcagtgagatctccaagatgaagcattagggggtcaatcgccccagattttacgcgtagctaacttagtagggcacccataatccataatttattctctgtagttgtagcagcgacatagaggtgtcattctgtagcacattgtgtaacatgtaggagagagagaaacacatatccccattctttctactgaaacaccagaaatagttgctcttgctccataattcgttaatctgaacttctgaagccatgccaaggccttatattgatcctctgttgtcatattgat

SEQ ID NO: 33815 - DNA, 102 bp, Zea mays
  Clone ID: MRT4577_130846C.1
cgagcgaggttgctctacagcggcggtcgaatattgcggtcgtcgaggcgcgaactacttcgggcgagtcacctgcaggtgtagtagctacgactatagtga

SEQ ID NO: 33816 - DNA, 182 bp, Zea mays
  unsure (1)..(182): unsure at all n locations
  Clone ID: MRT4577_130848C.1
ccacgggcccgcccccgccgacgcctctgccaggcccgccaccaacgtgcgaggccccctcncggcgcccgcagaggtcgacgntcggcgaggtaggacancgctcgccgtacgtcctaccgcagctttcgtcgacggcgatctggtacccgcgacgagccatctgctccaggacggatccg

SEQ ID NO: 33817 - DNA, 319 bp, Zea mays
  Clone ID: MRT4577_130849C.1
gagtagcttacccaatcccgtgcggagcgacgttagtcgtatccaatagcagcctgacgcggggcttaatttatcaacctacacgatcccaaccgttcgctcctcggaccggctccctaactcccgctgatcgcaatccctacttcctggcgttataaggacctacatgcgcatcatctgctcgccttcgacgtgcactccgacttagccctgaagatgaaccccttcctaccaaaaaccagtatatgcactagctacttttttacatccagcccttagctttcaaccacttcccattgattcatcactttcatagtcc

SEQ ID NO: 33818 - DNA, 837 bp, Zea mays
  Clone ID: MRT4577_13084C.1
cttctttgcaggtgcatggtatggattggttgaacatcagtacaatcggggcagtgtgaagttgttgcaacgctttagggagatccgcgatcttcacatcacgatcttctatccaattaagatcgtttacttccactactgcacggaaggcctgacctcgctgctggctaagaaattacacctgatccttctaacatgtggacatgctattggctcttgtgtgttccatctccttaagatctctactaggataagaagtctgtttctggatatacgtgaatccattaaggaaagagctgcttgttcaccagactgtgcttgtcaccagcagcatgactgggaaagcgaggagctcgtgctgaactctctccaggaactgaacgtttgtggacttagagcaaaccgtgacttcatgtttgtgaaacgactgctgggctggatgggagcgctcaaatcagttaccataatcttcgatcctaaagccactgtccacgaggagctctgcgaggagctactgggcctctctggaccagagacttgcgtgaagatttacctgtatcgcgatggggcaaaggtgatgtatacaccggtaggctagggcagttttaagggcggagagttctctttcgctgttgctgagtagtctcatatggctgtagcagtgtataactgtgaatccatctgcttgcttctgttctcgaagacatacaccttgtttaggttgttacaattgttaaggatttgtctggtgcagctgtagattcataaaaaaaaattgagaattgtgaaaaaactaaaatttatttggttaaagcaaatgttaactatagtttttat

SEQ ID NO: 33819 - DNA, 423 bp, Zea mays
  unsure (1)..(423): unsure at all n locations
  Clone ID: MRT4577_130850C.1
atatgtggagaattcggccttagagaggaaaaaaaacaaagaacaaagatattttttaaaaaaaaaaaaaaaaaaaaaaaagtttgtccattaaaaaataaaaaaaatgatatataaaccattttttttttcaccgaactcaaaaaaaccgatctaaaaaaaaaaagggggtgcctgggtgcccaacacattcagggcgaatctggcggtatccgggttttgtgacgggcgtggagacgatcttcagggggccccagttgccgccgtccggagcgtactccgacccaactggctctttctccctcactgcttgaacgctacacaccttatcttcctcgcncngggggagggtgtcttcggggtcactttcccagggtgcgcctcgacattccactccgggagatccgttggttgagtcgctag

SEQ ID NO: 33820 - DNA, 643 bp, Zea mays
  Clone ID: MRT4577_130851C.1
cattgggtacctcgaggccggccgagacatcatcgtctccgctcatgctccgatgaccgcgcgcgcctcaagccattaccatccatctatctatcaagatgtattctgccaaccaatgctgagtgtcgatactatatcccgatagggcaggcacgtaaaccacatgcgaacatgaagctggaccgcggagcgctctcggatcgccacgacaccagagctggaccatacccagtaggagatgactgctgggaccgccgcacgcctggaggatagaccagcacgaggaccacggctgtatcgcctgcaagcgcaatatgctctggtgtgcctagcgtcgcgtcgaccccgattgcaaccacttccgcctccccatcgtcatcgtcatagaccatcccgcacaagaaggcgacgaccgccgccgaccagatcaggtacacagatgcgatgcacaaggcgttcctcttcttcaatgcccagaaatccaggcaccttccctagaagactgccatctagtgaagcggaaactctggcactgtgatactgctcctacggcaaggactgcaaagctgccctcatactctgatagctacgactatggcgacaacatcaagatccacttgacgatggtcttctccatgacgct

SEQ ID NO: 33821 - DNA, 340 bp, Zea mays
  Clone ID: MRT4577_130852C.1
ggggaggtaaaattttggattttaatttattttggttaaggttaggagggaggttaagttttttccgggacatttaaaggggtgtggggttccacaaaatggtttttaaatttataggggcattggggggcaccgtacaaaaacagtaacacaggggataagtggctgtttaaaattcaaaatggggggggtaagaaggaaaaaattcaaagtttccaggaggacctttttttaaaaaattgtttttattggggaaaaaacgacacattacactttaagggcaacagcggcggatgataaaccacggggagggcagattaaatttggggagggaaggggg

SEQ ID NO: 33822 - DNA, 589 bp, Zea mays
  unsure (1)..(589): unsure at all n locations
  Clone ID: MRT4577_130853C.1
aggaaacaaccgctgncaacaatcatnngggatcctttcaaaaacaactgcacacatgatcctccacattccactctccaactccatcgcatttcgctgccgaaatcgatcgcagcggcggtcgggaggcattccatctccaacctcgacggaccgtcgggatacgtaggtttccaccaccctgtaagaacctcagtcctccattccatccaagttatcatttgcttcaccccgtttagttcaacgacaacgctcgccgtcccttgcatttcccctaccaaattgcacatagcgtcggccggagcgatttcatcgacgatcttagtggactatcgggattcggattagtccaccgccctaagttgctctggtattcattgtattcaacatgaagcccatcgactagccttcttgaaatcccaagaaaattaccattcaatcaagccacgaagttttcactgtcgagatcccttagttggtaaatgatgtgaacaacccgaatgagatccctgcacgccctgatgatgccacaggacaaatgaaacaaacctatattaagcgtaacacaaagcgggttataggtcatggt

SEQ ID NO: 33823 - DNA, 253 bp, Zea mays
  Clone ID: MRT4577_130854C.1
gggggaagccaaggggaaggtgacgcgagacgcgtctggaagcatcttgtgctttataaggtgcgattatacaccttgaggtgttcctggtgcagcatgtcttgtataacatgtacatgtggcctatcaaggagctggccaacaatgtccttgttaagatgcagcttaggagctttatgaagggtcatctcaagcaccgaaagccgcgtgatccattaagggtcgagaagagctttaacaggtgacaccggat

SEQ ID NO: 33824 - DNA, 121 bp, Zea mays
  Clone ID: MRT4577_130855C.1
ataacacaaataatcctccgacaataaacacagtatgcagaagtgtcatgcaacttgtctacatagggacacacagttcatcttgtttttctataacagatataaacaagtacagtacaca

SEQ ID NO: 33825 - DNA, 426 bp, Zea mays
  Clone ID: MRT4577_130856C.1
ctctcctctcactaagacactgaccatcacagtgtcacacgcagacgcttcatcggctgaatcaccagccaaggtaaagcatcaacacatacacgagcaagcaaggaaagccaagcttagctgtctccgatcacagccggccgcagagagagagagggagatgtcgagccgccgtggccggatcaccgacgaagagatcaacgagctcatctccaagatccaggcggtgctcccggaatcatcccgccgccgctccgcgagccggtcgtcggcgtcgaagctactgaaggagacgtgcggatacatcaagagcctccaccaggaggttgacgatctctccgataggctctcggagctaatgtcgaccttggacgagaccagcccccaggccgagatcatccggagccttctccgctaggcggattt

SEQ ID NO: 33826 - DNA, 207 bp, Zea mays
  unsure (1)..(207): unsure at all n locations
  Clone ID: MRT4577_130857C.1
actagttgtagatcgcgagcggccgnccntggtggtttgggttttattgagtatatgaaccncaagaacttgnataacgctgataacgacaccggttcattacaggcacacacatcttctgcttggtcttattacaggcacgagcatgacgttgcctagactcttcctcccggccgccgtccttgtatcatcagagtgggctggcaa

SEQ ID NO: 33827 - DNA, 307 bp, Zea mays
  unsure (1)..(307): unsure at all n locations
  Clone ID: MRT4577_130858C.1
tttttntntttttttttttttntttnaacgcagtgcacgaatccatccattaatatatatattaaataaacattttttattaactacataggtttttacgcaaatacaaaaggatctggattagacatgaaaacacaagcacacaaaatggcacgcacttcttttccatcgggttatcttctgtttggtggtgaacaactttaaacttgaactttgttttcttagccgcaagatggttggtaataagcttttttgggagcatggcgatgttctgctccagcttcttggaatccttttccattttctt

SEQ ID NO: 33828 - DNA, 353 bp, Zea mays
  unsure (1)..(353): unsure at all n locations
  Clone ID: MRT4577_130859C.1
tatcttttatttttttgaccccacacctaccaaaaaaanggggaagggaaaaataatgggggggtaaaccacaatccttttcataatctccaaatttattttatccccacgggcatattgaatcgtccattctgtggattatataaccacacattgttttccaaactattttagtctattatatccacatacaaagaatccaatatgccttttatactccgagaatctgtgtatccatccacatttttgtacaaaaaatccattgtaccaaccaggttgacccccctctctaaaaaaaccaccggctggggctgtctgaagcactcatgggtgaagtccatccacgcttcctc

SEQ ID NO: 33829 - DNA, 685 bp, Zea mays
  Clone ID: MRT4577_13085C.1
cactaggataacttttctctcacttttttaatccggcgatgatgttgtttcttggacgcacaggaagcgtagataggaaatcgaacggttcgcagtttagtgtgcgacgtggataggctcgttgtatccattttgaaccggttttgtaataaaggaaatttatctgcacgctgaatggtatggtcggtatcgatgtgcgtgatatatggtatggttattactgatccgaatcgattgatattgaccgtctttagggatacaacatgttttaattggtccacccatacgttagcttggtgttttttaaccatttaaagtctaaatacttcaaagaatacaaaatgcataaaatacatgatataaaacagattttattaatgaattttatgcttaagttgtataattttatttaataattaagtattttattttttaagttgaaaattttaattatttttatgagttatgtaaatttagtttgcttatgaatttatatttaataaaatggtgtgtttcattttaaataaaagtctacaaaaaagttgatgcgtgttgaggtagttgtagactaatggtaaagattgtggttagaaagatgtagtagataagggttgacaatagtccatagcgcaatcggcaagatggttgatagaagatgtggtggtcgaaaagagacggttgctct

SEQ ID NO: 33830 - DNA, 1499 bp, Zea mays
  Clone ID: MRT4577_130860C.1
ccagcacagattcgttccacgcctacctcctgccctcgcccgtgctctcagatctcgcgcgcgccccgcaaagggtaactttgagccatgggcacagttgtggatgctccagcagttgtggctgaagaggtggtcctggaagtggaaaaggcacacagtgtgccaacattgtggaacactttggattcacccatcttagtgctggagatcttttgcgtgcagagattaaatctggctctgagaatggaaccatgattgaaaacatgataaaggagggaaagattgttccatcagaggtgactataaagctgttgcaggaggcaatgataaaaaatgaaaatgacaaattcctgatcgacggatttccaaggaatgaggagaatcgtgcagcatttgagaatgttaccaaaatttctcctgcatttgtgctattctttgactgttctgagaaagagatggagaaacgtctcttgggacgcaatcagggaagagttgatgataacattgaaactatcaaaaaaaggttcaaaacctttgttgagtcaagtttgcctgtcattgagcattacaactcaagggacaaggttaaaaagattgatgctgcaaaaccaattcctgaggtgtttgaagacgtcaaaaccatttttgccccatatgctccaaaggtaattaggtttcacttttttgagcaaatgtagcatttccagatggatctcttaatctcatatttgatttagcactatctgcattgcattgaatatgttgttttccatctttgaatgtacgtctgcaaacattaaattatgttcacctttaaaaacctttgtccattatttttgcatgactaaaaatctaaaatactagtacaaatatactcatcactttgccttctctatcaggctgaatagagcagtctaaaagggacatgataaaggtgtcataggtatactccctctatattgcacctgtcctaaatgatttcgtctggttcttgccaccataagtgagattctcatagaatcttcataatcattttgcaggcaacacacaaacatatatgtgattatgaacccttcaatatagaacagaagttttggctcatatgagctaccagcgcatcagtaggcaattcgatttgttatcagcaatatttagatctgattctcaggggtcctgctagagtaacattttaccactgttgtttatgtatatcctttgatgttgtgttgtaccaatgtggaatttactttagggctagtttggacatggaaatacaggggatccatcaggcctgaggcaggaatccccttgttatttataaattaataagaggattcctgcctcatggattctctccattttcctatccaccaaaccagcccttatagagcaatgagaccttgtgcgatcccatcagatttcttgtggcattatggaaagtataaaactgctgccatattctttataaaaaaaaaaaaaaaaaaaaaaatagaataaaa

SEQ ID NO: 33831 - DNA, 347 bp, Zea mays
  Clone ID: MRT4577_130861C.1
ctaagcttagattacatctgaattccaacaaaatttaacacaaattattgacctgaagtggtgttaataaatgatggagctaattggtgataatcaaagacggaggtaattgaatttgtcgacatcatcaagattagttgtttccttctctcacgaaaaagagagaggctcaaccaggacacggagaggtgatgccactgcaagattggcctttttagagatcgcgtatttcgaaacgcatactttgcagtgtcatcaggctagaatttgttttcatcgatgtccaaaaggaccaaatccgactcatacttgaatacctcttgtatggcatttgtgaagcacgggga

SEQ ID NO: 33832 - DNA, 1488 bp, Zea mays
  Clone ID: MRT4577_130862C.1
cattgggtacctcgaggccggccgggccctcactttccatttccgtctccaccctccgcgcgcggtccgcgccgcggaccgcggaccgcggtcaccactcaccagaagcgctgcagcgccaccccagtcccccaccggccaccgaccacttgccgattgccgttgccgcgtcggcgttgctggatcctcaagcagacagcccagtccgcccggacccgggaacccgcccacgcgcttattaataacggccacctcgttcccccgcccgccccgaaggccgagggaagcgtacgcgcctagcgaccagcacagattcgttccacgcctacctcctgccctcgcccgtgctctcagatctcgcgcgcgccccgcaaagggtaactttgagccatgggcacagttgtggatgctccagcagttgtggctgaagaggtcactgaaaacatgttgggtggtaagaaagttacagttgtatttgttctaggtggtcctggaagtggaaaaggcacacagtgtgccaacattgtggaacactttggattcacccatcttagtgctggagatcttttgcgtgcagagattaaatctggctctgagaatggaaccatgattgaaaacatgataaaggagggaaagattgttccatcagaggtgactataaagctgttgcaggaggcaatgataaaaaatgaaaatgacaaattcctgatcgacggatttccaaggaatgaggagaatcgtgcagcatttgagaatgttaccaaaatttctcctgcatttgtgctattctttgactgttctgagaaagagatggagaaacgtctcttgggacgcaatcagggaagagttgatgataacattgaaactatcaaaaaaaggttcaaaacctttgttgagtcaagtttgcctgtcattgagcattacaactcaagggacaaggttaaaaagattgatgctgcaaaaccaattcctgaggtgtttgaagacgtcaaaaccatttttgccccatatgctccaaaggctgaatagagcagtctaaaagggacatgataaaggtgtcataggcaacacacaaacatatatgtgattatgaacccttcaatatagaacagaagttttggctcatatgagctaccagcgcatcagtaggcaattcgatttgttatcagcaatatttagatctgattctcaggggtcctgctagagtaacattttaccactgttgtttatgtatatcctttgatgttgtgttgtaccaatgtggaatttactttagggctagtttggacatggaaatacaggggatccatcaggcctgaggcaggaatccccttgttatttataaattaagggcttgttcggcgcctcatggattctctccattttcctatccaccaaaccagcccttatagagcaatgagaccttgtgcgatcccatcagatttcttgtggcattatggaaagtataaaactgctgccatattcttt

SEQ ID NO: 33833 - DNA, 602 bp, Zea mays
  Clone ID: MRT4577_130863C.1
ggctaaggaaattaaaacgtaaagttgatcatatccaagccacgccccactctagtaacacaacaaacttcagatcagcaaaaaaaaaaaaggcctagcctgcattctatacacagccaaaatgggacactacggtatcagcatgggggaaggggccctaaattttcatttttttttcttgcctacacttatgctttttgttcagacatcctaaaatgaagaaataagaatcaaaagaagacatgaatcacggttttcttcgaagggctgatgctgcccccattaccacagccatcacaattacatggcccgcacccagagatgcacctacagcagcagctgtaaacagagccatctgttggcgggggcttctgcttcacttgcagggacgctgctttctttctcgccagttcctcaaaggctggttcttcattggcgaggagggtttgatgtacaagttgacgaagtccttcctctgaaatggggacattgtaaaggtcacaggaagatgagcagatccgtttgcaggatccttgtttcccaacttcccagcagctgatctgatccgctgcaaactgtttctagcacttggcatcaaaaag

SEQ ID NO: 33834 - DNA, 1006 bp, Zea mays
  unsure (1)..(1006): unsure at all n locations
  Clone ID: MRT4577_130864C.1
ttgggtacctcgaggccggccgggccgtcttcccctccgcgttccgcgccgcggaccgcggtcaccactcaccagcagcgctgcagcgccaccccaccccagtccccccaccgaccacttgccgatattcgttgccgcgtcggcgttgctggatcctcaagcagacagcccagtccgcccggacctgggaacccgcccgcgcgcttattaataacggccacctcgttcccccgtctgccccgaaggccgagggaagcgtacgcgcctagcgaccagcacagattcgttccacgccccccctcctcccctctcagatctcgcgcgcgccccgcaaagggtaactttgagccatgggcacagttgtggatgccgctccagcagttgtggctgaagaggtcactgagaacatgttgggtggtaagaaagttacagttgtatttgttctaggtggtcctggaagtggaaaaggcacacagtgtgccaacattgtggaacactttggattcacccatcttagtgctggagatcttttgcgtgcagagattaaatctggctctgagaatggaaccatgattgaaaacatgataaaggagggaaagatcgttccatcagaggtgactataaagctgttgcaggaggcaatgataaaaaatgaaaatgacaaattcctgatcgacggatttccaaggaatgaggagaatcgtgcagcatttgagaatgttaccaaaatttctcctgcatttgtgctattctttgactgttctgagaaagagatggagaaacgtctcttggggcgcaatcagggaagagttgatgataacattgaaactatcaaaaaaaggttcaaaacctttgnntgagtcaagttttgcctgtcattgagcattacaactcaaggggacaaggttaaaaagattgatgctgcaaaaccatttccctgangtgggtttgaagacgtcaaacccatttttgccccatatgctccaaagcttgaatagagcagtct

SEQ ID NO: 33835 - DNA, 361 bp, Zea mays
  Clone ID: MRT4577_130865C.1
gctcggaattcggctcgagcgcaaatatcaccccccgttttatatatcacctctatccccaccaacagggggggctttatttacataatgatggctttctcccatggcatcctacaactaatccatgaccagcggcaagatgtacaccataacccaacactgccagcagtggtgcatccagcgcacacaaggtcacctcatcatacccgcacccaagctaaagactcccgccaagataagcacctcaaccccttcggcgtacctcctgaacctccccacacattcaaacaagcccacacacctacgaagctatcgaggcccccagaagccactgcccctcaatgaccgaacccttgacagc

SEQ ID NO: 33836 - DNA, 764 bp, Zea mays
  Clone ID: MRT4577_130866C.1
ttgattaaaggagattgatgggtttaaatccgttaaaaaccttttacaaattttctcaattccatctcctacataaataaccgaacagtatctaagcaacatgaacagtatgtgcatgtctccctcagttcgctaacaatttttgtgacatcgaatctccaggcaccgaaggtcccagggaaaaaaacggtctctcgttttactaagaataaacattttgttatacctgatgatcacatcaaagcgctagaaaaatattgagagggatgggggcagacaagtaagatgcagtatattctacggtaaaaaaaagtgcacgtgccagcctccggcgactttgacgggggggcgatcagagcgggaaaccttgagccatgggcacagttgtggatgccgctccagcagttgtggctgaggtcactgagaacatgttgggtggcaagaaagttacagttgtatttgtcctaggtggtcctggaagtggaaaaggcacacagtgtgccaacatcgtggagcactttggattcacccatcttagtgctggagatcttctgcgtgcagagattaaatctggctctgagaacggaaccatgattgagaacatgataaaggagggaaagattgttccatcggaggtgactataaagcttttgcaggaggcaatgataaaaagtgaaaatgacaaattcctgatcgatggatttccaaggaatgaggggaatcggattaattgtaatttttttagctggaatcgaagcaggcaa

SEQ ID NO: 33837 - DNA, 1747 bp, Zea mays
  Clone ID: MRT4577_130867C.1
ctggccggggccccgaaggccgagggaagcgtacgcgcctagcgaccagcacagattcgttccacgccccccctcctcccctctcagatctcgcgcgcgccccgcaaagggtaactttgagccatgggcacagttgtggatgccgctccagcagttgtggctgaagaggtcactgagaacatgttgggtggtaagaaagttacagttgtatttgttctaggtatatgttctatcttcagtaattttcagttatttgtgtcctaacatagaagagaatgttgtgttatttgtgtcctaccataaaagagaaggaggttataacaactttgaactcaaatagatgattttgttttgcatctgatcaagaatttacacaggtggtcctggaagtggaaaaggcacacagtgtgccaacattgtggaacactttggattcacccatcttagtgctggagatcttttgcgtgcagagattaaatctggctctgagaatggaaccatgattgaaaacatgataaaggagggaaagatcgttccatcagaggtgactataaagctgttgcaggaggcaatgataaaaaatgaaaatgacaaattcctgatcgacggatttccaaggaatgaggagaatcgtgcagcatttgagaatgttgtaaggccctcttttttgtacacaaaatttgttgattctcatgccagtttaagaaattattgctcctttcttttagttactcaaatgaattcgtagactattaattctttctcattccttcagaccaaaatttctcctgcatttgtgctattctttgactgttctgagaaagagatggagaaacgtctcttggggcgcaatcagggaagagttgatgataacattgaaactatcaaaaaaaggttcaaaacctttgttgagtcaagtttgcctgtcattgagcattacaactcaagggacaaggttaaaaagattgatgctgcaaaaccaattcctgaggtgtttgaagacgtcaaaaccatttttgccccatatgctccaaaggctgaatagagcagtctaaaagggacatgataaaggtgatacaaggtgtcataggcaacacacaaacatatttgtgattatgaacccttcaatatagaacaaaagttttggctcacatgagctaccagcgcatcagtaggcaattcgatttgttatcagcaatatttagatctgattctcaggggtcctgctagagtaacattttaccactgttgtttatgtatatcctttgatgttgtgttgtaccaatgtggaatttactttagggttagtttggacagggaaatggaggagatccatgcgacagagatccccttgttaatttgaataacaagtggattcctgccccatttaatcccttcattttcctgttcaccaaaccagcttttatggagcaatgagaccttgtgcgatcccaccagatttcttgtggcattatggaaagtataaaactgctgccatattctttatacgttgaaatatattcattgcgaaaaaagaaaaaaataaagattcctaaaccagcagagaggctcagacgagtgacgacggtgctgctacgactaaccgagagaagaaaaaaacaatgatatataggtagcttatggcgtagggtttaggataactggtagcacgagttaacctttgcattcttctccacgcttcctcgatttgttgagccagccgaaagatgtattctatatttctatc

SEQ ID NO: 33838 - DNA, 1596 bp, Zea mays
  unsure (1)..(1596): unsure at all n locations
  Clone ID: MRT4577_130868C.1
gttagtatgtatgccttgccttgttttcctgtctgattcatgcttcttaagatcaaatcaatctccatatcctttaggaatttgcgcttcctgcatgttttcatttaagagaggtcgtcctcatctcataagacttgtgctattcacaaactatggttcgtcttagaagtgtgctctatgtgcaggtcactgagaacatgttgggtggcaagaaagttacagttgtatttgttctaggtggtcctggaagtggaaaaggcacacagtgtgccaacatcgtggagcactttggattcacccatcttagtgctggagatcttctgcgtgcagagattaaatctcgctcggggaacggccgggcctctattgacatgctcgaggccggccgggccgaaggccgagggaagcgtacgcgcctagcgaccagcacagattcgttccacgcctacctcctgccctcgcccgtgctctcagatctcgcgcgcgccccgcaaagggtaactttgagccatgggcacagttgtggatgctccagcagttgtggctgaagaggtcactgagaacatgttgggtggtaagaaagttacagctgtatttgttctaggtggtcctggaagtggaaaaggcacacagtgtgccaacattgtggaacactttggattcacccatcttagtgctggagatcttttgcgtgcagagattaaatctggctctgagaatggaaccatgattgaaaacatgataaaggagggaaagattgttccatcagaggtgactataaagctgttgcaggaggcaatgataaaaaatgaaaatgacaaattcctgatcgacggatttccaaggaatgaggagaatcgtgcagcatttgagaatgttaccaaaatttctcctgcatttgtgctattctttgactgttctgagaaagagatggagaaacgtctcttggggcgcaatcagggaagagttgatgataacattgaaactatcaaaaaaaggttcaaaacctttgttgagtcaagtttgcctgtcattgagcattacaactcaagggacaaggttaaaaagattgatgctgcaaaaccaattcctgaggtgtttgaagacgtcaaaaccatttttgccccatatgctccaaaggctgaatagagcagtctaaaagggacatgataaaggtgatacaaggtgtcataggcaacacacaaacatatctgtgattatnnnnnnnnnnnnnnnnnnnnnnnnnnnnnnnnnnnnnnnnnnnnnnnnnnnnnnnnnnnnnnnnnnnnnnnnnnnnngcaatatttagatctgattctcaggggtcctgctagagtaacattttaccactgttgtttatgtatatcctttgatgttgtgttgtaccaatgtggaatttactttagggttagtttggacagggaaatggaggagatccatgcgacagagatccccttgttaatttgaataacaagtggattcctgccccatttaatcccttcattttcctgttcaccaaaccagcttttatggagcaatgagaccttgtgcgatcccaccagatttcttgtggcattatggaaagatanaactgct

SEQ ID NO: 33839 - DNA, 1294 bp, Zea mays
  Clone ID: MRT4577_130869C.1
aggcaataggcccttaggctctccagtagagttatatggttgtgcaaaatactgttttacaccatggactgcacatagaatgaagtttgaaatgtgaggtgagccagaaagccttacaactcgcttgcaattccatcacctcttctcaagcacgacttgaaattgactggcaattaacttcatacagcaggctgcaggccaatgtgatgtatagaatgatgcagttagagagtagctatttgaagataaaattgttcatgggaaattagcaacatagtactgaatgaatggatatgaacaactgaagacaatctagtttggatctcgatgtgtccacgactcttcgtccattagcccaaagcgaataattttacccccgataggggcaagaaaaatctgagcccctatggaatcaaccggtcactctgcatttttgtccagcagatttgcgtgatatgctatctcgatggatcggtactttgggcttcctctatcgtcttcacttccgtgcctctgagttatcatgcttgactactggtgcatcaatacctgcattatttggagaacttgtagtctggcttaccctgggagctcgattgttttctccagctagagctggctcactgggttcgttcttcacaggttcagcagaaggcttctccgatggtttcataggctcgtccttcacaggtccagctgaaggcttctccggtggctttacaggttcccccgtcacaggtccagatgaaggcttctctgatggtttcacaagctcatccttcacaagtccaactgaaggcttctccaatggtttcacaggttcagaagtagcaccaagcttgagcctcattttcttggatagatccattaccacatttatttctctcataatctcacgtgcagcatccgtgttgcggaaatcagtagcttcgggaacctggacgaagcgaacacgcagatcggcgacgacggcacggatcttgtagtattcggaggtgtggaaccccgcttcctcgagcttccgcttcttcggcgcgggcgcgggcgcgggcgcatcgggctgaggggcagcagcaggagagaccttttgatccagtacaggcgcagccgcggcctctgccgagggaggaggaggcggggcggcagtgtcgacggcggcggtcggagcggccatgttgggtgcgcgttgggaaacgagcgagtgtaagcgtgctgacggtgggcttgggctatgaggaaaggcacgttttgtaccggaccccagacacatcggtaaaggccggatgcattgtgc

SEQ ID NO: 33840 - DNA, 128 bp, Zea mays
  Clone ID: MRT4577_13086C.1
cagatgtacattgacagaaattttcttagtcaatcctagattgatcatgatttgtgatttctatgcaggccttggtatgattgccttttaattgctgtacaatttcttttgatttctaacttctctgg

SEQ ID NO: 33841 - DNA, 898 bp, Zea mays
  Clone ID: MRT4577_130870C.1
cattgggatcctcgaggccggccccgggcggagagatgcgcgcgggcggcggcgcgcctccccgacacgcaccactctccccgaccgcctctgccactgccacgctactagtacccgcttctgtcgccatgcccacgccgcgcctcgcacacctccgccacctcctctcattccgctccgcccttccccgcccgctgggtcccaaccaaagccacccgctccccgggtcggttcacccgtctcttctcctcccccgtgccatggctggtgtcgcgtacgcaggtctggcgacggggtcggcggaatacgaggaggtgctcgggtgccttgcgtcgctgataacgcagaaggtgcgcgcggacaccggcaaccgcggcaaccagtgggagctcatggccaagtacgtccagatactggaactggaggaatccatcgcgcagttgaaagtggttcacgttgctgggaccaaagggaagggttcaacatgcacatttgctgagtcaatccttcgatcatgtggtttccacactgggctcttcacttcaccacatttgatggatgtccgcgagcgatttcggcttgatgggctggacatttcagaagaaaagtttattaggtatttctggtggtgctggaagacactgaaggacaagactggtgatggtgtaccgatgccggcctactttaggttccttgcactgctagcattcaagatcttttcagatgagcaggtctttttaaccatttagtgggtgtaggaaggatatcccagcttctttttaaatggattttgaagccttttcccagtatgaggaatttgtagatattgcctcattttatatgaaaataaattggtagaaaagcatatcttgtgtatctgtgtacagtagtggaatat

SEQ ID NO: 33842 - DNA, 289 bp, Zea mays
  Clone ID: MRT4577_130871C.1
ctataaagtaaaatactagttgggtcaatagcttcgatgggataaaggagtaacactaggataggactacatagcacattacatgtcccattacatgttcattaaattggcggtaagccttctatgacattatggcctaaaagggtgttaaagagtaaaaaagatgggtgactaaaggcaaaggtcatgcttggactaaatttatattgggtattttatacccacgggttaacgggtatgggtgaaggcggaacgttctaatacccgtttacccattgggtgaagattt

SEQ ID NO: 33843 - DNA, 175 bp, Zea mays
  Clone ID: MRT4577_130872C.1
gcgacagcgcgacattcctggatcgggctgatttgtctctagagcgtcttatcgtcaatgagggagtcatggatgacactgagcaggatgtactgaagatacacattttccttacactcactgaatctgtgactgtggatgatcaaccagagatccctctttatgcatgttattg

SEQ ID NO: 33844 - DNA, 460 bp, Zea mays
  unsure (1)..(460): unsure at all n locations
  Clone ID: MRT4577_130873C.1
ctctaccccccccccccccccccccccccccccccccccccccctttttaaaactaaaataaagttaaaaattgggattgaacaaataaagagttcaatacgtaaatctgcaaaaaataaaataaacaaaataaaaaagaccctcggggcctattttggccgagtcaccccatgtaggcgagggggcccatcgattacaagtcaagggggttaagggattttaatcgccttcttttccgtttagcgccgccgccaccaaaaaactgtttgcccgtcaagaacccctgcccacgcaggagccgttttttccgggctaggcctcgccagggggcgccggcctgcccctttgttagcctgcaccgaggctgggccgcccccccgcgaggttgncggggtgctcccccaaggctggggctgccggggccggcacccccactaggctgtggcttgcctgcccccc

SEQ ID NO: 33845 - DNA, 303 bp, Zea mays
  Clone ID: MRT4577_130874C.1
aaggagtaagaaccttgcctgaacatccttccttcccacccatcgctgtgtgttagttcccaacatcgaatgtgtacaacttaagttggtcctttacactcaggctttcactatttcctttaaaatgaggatgattattttcaaggccctcagcatatttgtatagttgcttgcctgatataaatgcaatattaatgcctttaaagtatgaatctatgccaaagatcacttgttgttttactaaagaaagattacgtagaggaaataagaaaaatcatgtttgctctcccggttcttccagtg

SEQ ID NO: 33846 - DNA, 420 bp, Zea mays
  Clone ID: MRT4577_130875C.1
cctttttgtttttgttttttttttttggggttttggataaaatgcaattatccagctacttctcatccttctcttcttcaaaaccgaataaagcattcaggaagagtgacaaggatttcaacatccagccaaaagaacttccactagcatttcttaggcatggcactgcacgtgctgaacacggcatggagtatttgaaagatagtatttaaggttcaacacacagatagaaacttaaactaggacaactaatgtttaggtagggtgattcaactgatgcatgacgctttcggatggcactccagaatgtcgctttgcaaagttcacatgctaaacttggagatgagcttcttctttgacctcagctcgttgctgtggccgcacttctttttgcggcagtttttggacctgggaggaagg

SEQ ID NO: 33847 - DNA, 513 bp, Zea mays
  Clone ID: MRT4577_130876C.1
cgtttagttcaatccagcatagaagatgggctgctgtaagttgatcttctggtcacttttgatcggggccgccgctttcgtcgctcaaaggttcttcttctgttgcaaccaggccggaattcaagttttgatttcactcaagactactacctggggcagtcaagcatggtccataggaaaccccgattccgaaagacattgtcaaaattccgccattccaagtcgcttttaagccggaagatgtggtcatttcaaagctcgccttgctaacaccaagtacgtgcacgaatattagaatgtaaactcgttcgaacaaggatttcctttccacttcacttcgtaaagttgtcgattcattttccaaaacaaggtcgatttcaaccaaacttcaaaagaaatgaatcggtacccgcaattccctactcaagtcgaaggaatcgacttgcatttcatttacatcaagcctgaaacacccgtcaaaggtcgtttaccaatcatgctcgtccacggatt

SEQ ID NO: 33848 - DNA, 767 bp, Zea mays
  Clone ID: MRT4577_130877C.1
gaagaaaatagggtttcagtggcggcagcctccactcacgccgtcgtcgcctccgagcccgactccccgatccagacaaccaccccgcccagatctgggtccacctgtaccagatctcacagcctccgcttctgctttcctttatgtcgtcgaccgcaatgtcttgggacgggtacggcgggcagatctaccctggaggcggtgttccagcagcctgagacgacccccctgcaggcgccggtgggggagatggagctgccgagcaacgttagcgacggtgaactcatgcccatggaggagcacaaggagcgcgcgctgcggcacctactccaccgatccaagcgcccgctggaggagttcgcggccgccgttgcggacgtcgcggagcagctggtgagcgcgtatctggacctgggcgtcgagtggcacggcgcagactggcgagagcggttcttggccagtcgtacgatagcgcgagctcgatggccaggcgtaggtacccaactgtcttcttccccttccttttagattccattgagattcgtcggaacttttatgcgagttccttttttattcagccgataattatgtcagtatcttgagataagatggatgaattggattcaacacagatatatttgttgtggatgtagccacctttcttgcttcgtgaaataaaaaaaaaagatgtaattccaatggaaaatatatattattgaggttagcttcaaaaaaaaaaaaaagaaaaaaaaaaaaaaaaagcggcc

SEQ ID NO: 33849 - DNA, 295 bp, Zea mays
  Clone ID: MRT4577_130878C.1
gccaagcctacaccctaaggacactcaaattttgcctattggtgtcccccaaaatgatggcgagctctatatcagtgatatcggcatctcgatcgagtaaaatgaccatcaacaactttactggccggttgcaggtttcctttgccacctactatatgactgacaaactcttgttcgcgctcaccctatacaaccattcgcatgagatgacactgtctcaggccaccaatgtcaccgctaactcaaatcaggcgatctacatcgtttacaaagtgtatctttaattggtccatac

SEQ ID NO: 33850 - DNA, 408 bp, Zea mays
  Clone ID: MRT4577_130879C.1
attcggctcgagctgaggtacttttacgaaaccctagtacctctctacgctgctctctctgcttgtagggctttgtttatagactatagatgatgatacatatctctccttttccttttttttacagatgaatgtctattcgagcatattgttcatagctctatttgtctccatagcagctaccagcatcctagagatgcagtggggaggagtcggaatcgacgattggtggagaaacgagcagttctgggtcattggcggtgtctcctcgcacctctttgcgctgtgccaggggctcctcaaggttctcggtggcgtgagtaccaagttcagggtgactctgaagggaggcggcacggacgagttctcagagctgtacgagttcaagtggacctggctactggtccc

SEQ ID NO: 33851 - DNA, 548 bp, Zea mays
  Clone ID: MRT4577_13087C.1
aatggaaacggggaaccccctccttttttttatggccggcggaacagggccaaactgaatggaaacaaggggttattacccccggggcgggaaaatatgcccccaaaccctttgggggggaaaaaaaaaaaaaaatgggggggggaaaacccccccccattttttaagggggggccccccatttagggggcccccgattttaaagggggggaaaaaatttttttggggggctttttcgggggggggaacggttcaaaccactggggaaactccttcatggaccgggggcaatttttgtggggggcgacgaaaacaaggccaaaacggggggggaacccgggaaacctttaaaaggggcccagcaaaaaccaagcaaaggaccccggcccatttgaccccaagtttatggtttccttaaaaaaaaggaaggggcgcgggaggaaacctaccctttgggggcctttaaaggcctcccccggggggagaggggtttctttgggaaaaaaacccccaatccccttcccgggaagggaaaaaggggggttccc

SEQ ID NO: 33852 - DNA, 159 bp, Zea mays
  Clone ID: MRT4577_130880C.1
acggataattttgacagaattttcctgtctgcatcatgctctattttgctttggcttgtgttgactgtatttgtttaacttagcaaactggttgtgggataagatggcaacataaatagtatgagagtggcttggggattagactattgtggataatga

SEQ ID NO: 33853 - DNA, 1544 bp, Zea mays
  Clone ID: MRT4577_130881C.1
gatggagagaggcgatggcgggagcgggaggccgccggccgagaggaaggcggcgtggagggacggcgccgtcacctacttccacctcctcttctacatcgccatctccggcggccagatcttcttcaacaagtgggtcttatcctccaaagagatcaactttccctatcccgtggcactgactctgctgcacatggtcttctcctctgtagtgtgctttgcaatcacaaaagttttcaagatcataaagattgaggagggaatgactacagatatatatattacttcagtcattccaattggaggaatgtttgcaatgacactttggctagggaacagtgcgtacctctacatatctgtcgcatttgcacagatgttgaaggcaataatgcctgtagctgtgtttcttctgggagcagcatttggcctggaagaaatgagctataaaatgctttctatcatgtctgtgatcagtgttggagttattgtggcttctgttggtgaaattacaatcagttgggttggagtggtttaccagatgggtggagttgttgcggaagccctaagacttatcttcattgagatatttctgaagaaaaagggtgtcaagctcaacttgatatccatgatgtactatgttagcccttgcagtgctgtatgcctctttattccctggctgttcttagagaagccaaagatggatgatagtatttcatggaacttcccgccattcacattgttcttaaactgcctgtgcacctttgtactcaatatgtcggttttccttgtcatatcaaggactagtgcgctgacggctcgagttactggtgtcgtgagggattggtccgtagttttgctgtcagctgccatctttgctgatacacagcttaccttcataaacataattggttatgccatagccatagctggtgttgttgcgtataacaaccacaagctcaaggtaaaaccccaagcgaacccacagcaaggcgacgagaacaaggtcatctcaggaagcactcaagatgtggtgttatcagtgagctcagcaaaagaaacttcgtagcaccaaaagtagcacgattttgaaacaattttatttttcacaaaggagaattgcgctctctttcgttgggttggccagctctccttggactatacattcttttttccttcccctgggtctggagggaagatattttgtacaatgatatgctcaagatgatgatacgctgccttcactgtcgtaatattgctgctcaaaaaggtgggagcacgccacacagatggaaattaggccatgtaaagttgtgttttctcttgaactggtgtagcgactcatcaggtgctccaaaaatggcagccctgaatctttgtacatggttgcttggtggtggtcatgagatgtgatgtaaaacgatatatgtaagcctggcagatcaaagaattcaagatacgcaagtttctgtgtttttgaatccagcatttctcttgcgctgatagtttgcttgagatattgattctgcaatatatgtttttaaact

SEQ ID NO: 33854 - DNA, 386 bp, Zea mays
  unsure (1)..(386): unsure at all n locations
  Clone ID: MRT4577_130882C.1
agcccgcgcaggccaccgcgccnacccctccggcgcaacggcgcgccgangcgccagcacgggaggaagcacacgccccccaacgcagaacgggcaccgccggcacaagaccggacccacccaccaaggggggggggggggcncgcaccacaagagctggccacccaggcagnactagccgcaaggaggccaagcgcataaaacgcgacggcgaggccaccntacggagctacgtgaaccgaaccaactggttcacgctagcagtctgcacggggctcctagtccgcgagccacaagaacagaagggctgccgtaccagcactacatagctgcgagcaagatggatcacacgatcgtaggaggcgcagagtgataaagcatcaaga

SEQ ID NO: 33855 - DNA, 345 bp, Zea mays
  Clone ID: MRT4577_130883C.1
ctggctttgacagacccatttgacttctaccaacaacacatcattggtggtgccctggtttagattgcttattagttgtaattcaataataaagttttttagaatctggaactgtaacttcttatatctgtttcaccacatacatcatccaaagattacaagatacatttccaaattctaacaaatttacaaactgggcgctcattatacagtatccaaacttacctacgcttgcatgcaactctataacttttctatagcttaacttatatcaaatacgctggccccgatagtacttcctcatgactgctaaaactttatcgatacccagcttcagcctcttac

SEQ ID NO: 33856 - DNA, 238 bp, Zea mays
  Clone ID: MRT4577_130884C.1
aaataaaaataaataaaaaaacaaacaatataaaaaataacaaacttacatacacaatacgggcggcgtcataaaatagtgcatagtttcacctcccttcatttcacctccccatctctttacatcgtcttcactattaaaaccctcttgtcacccaacttaatctccttgcctgacatacccctttcgccacctaacttaataaccaataggcccttacccatctcccttcctaaca

SEQ ID NO: 33857 - DNA, 397 bp, Zea mays
  Clone ID: MRT4577_130885C.1
gggcggaccacaggcgtccgcgttgaaggctttgaaattcccacaggaatataccagattcggggattttgaactgcatgacctgggccttttagccaactggcaattgggggtaatattaaggggggaggctgaaccatttaaggttttgaagggggggccagatagacctgaagtggggctcgtgaatttaagggggttaaaaggcaaatttgatgggccctcatcacttaaggatcgtcttattaatataatttttgcaaaagatgtcttaggggttgttgaaggaccatccaaggggatgcagggccccttggaacacatccacagggggtggctgtttatttatgacaggcataaccttgaacatgcaggttttatttgtccaaaagcccat

SEQ ID NO: 33858 - DNA, 627 bp, Zea mays
  unsure (1)..(627): unsure at all n locations
  Clone ID: MRT4577_130886C.1
ggcggancaccccatcattattattggagcatcacaaaaacacaccaaacagaagcacactagcaacgacctaacaacaatggtcttccaacacattattcctccttctgcttcttgtccttcttgcgggaggaacaaatgcctcgataatttcaccatgctgacttcctgcgagtatcattattctacagttccccatccctagtatctataatggccttcgaacacccaactgtacaagcctcaaacgctatcaacaagccgcttgcgatcagcgcaagaaaacaaccaattagtcccaattcaacaacaatccttgacacatataaccatacaaaccattggaacacaccatcaacaaacactaactcacctaaccggggcgaaccctaatcactacttgaaacaacacctacctgcatccataccactagctactaacaaacgctgctatttaccaacaacaacaccaggaaccgcactgtttactcaggactaacaacactaaccatgcagaaccctatctactgcctacctacaaagacaacacatctttattccatccaactcactgtggcgcatggcacccacataccttattcaacagaggatatactaccagcattt

SEQ ID NO: 33859 - DNA, 845 bp, Zea mays
  unsure (1)..(845): unsure at all n locations
  Clone ID: MRT4577_130887C.1
attccattccaatcaaagcaaggcaatcagcctcaagcagtactcctcttggtgtgtgtgtatgtgtcttgtgttgcactagtgagtgcgtgtgttactagtgagttgagtgcaagtactaccgttagatagtcaggaccctctggtctcagtagttccgggctaacaacgcgccggtgcccaggcgccttgcatccatctacagcgaggtgcagacgagccgcatcgcgcacacgctgcccctcccctccgtcctccgctcccacttcacgctcgccgacgagccggccagcaccgccgctagaagccccgacgagatagccaagctgttctccagcctgcacggccgctgtccacggccgtgctgccgtcggccgagcccgtcgcgacgaagccgctcaagatcggcatcgtgcttcctggtggccaggttccagggggacaatgaatcgacttctttgtgtaacagattacctgcaggagggtgccaaaggcagcaccatgtatggattaagggaggcccgctggtgtcatgaagggcaactacgtcgagctgactgctgatttcgtgtacccctacggaaaccagtcgtcagagattcagaattcttgctgtatcatgggtgcactatcagagatggtgaatgctttagacgctctaaactttttttccccgggggagggggcctgagaggngttagcttctattggttcctctgttcacttttttttctgacgagaggttctgcaagttccctcagtggagccttatgtccaagaataaattacctacgtttgagtgcgagtaatgtacnacagnttgnaatttttcatttgtatttttc

SEQ ID NO: 33860 - DNA, 415 bp, Zea mays
  Clone ID: MRT4577_130888C.1
agacccaaaccctcaaatagattcatcagggggtttggggttttgaatcaccgggtcattatttggggccatcagggatttctcatggaacatggttgggacgacaaaagaaaagagaggcaaaagatactacccgaagcattccagagaggcttttaacacttagccagcattggcgctaagcacacgttttcacaaaaagaagggaaaagaaaagcagggggcccgcactttatgctagttgggaagggccttcagtattcctttttaccaaaggttttgcaccacaattgaaaagggattggccggactgggggaagcgggcgttgctccatctcctgggtcttggttttggacaggggggcggcatttaattggttttcctttgaacaggccttgggatttttgatttaac

SEQ ID NO: 33861 - DNA, 983 bp, Zea mays
  Clone ID: MRT4577_130889C.1
gatttcattccaatcaaagcaaggcaatcagcctcaagcagtactcctcttggtgtgtgtgtatgtgtcttgtgttgcactagtgagtgcgtgtgttactagtgagttgagtgcaagtactaccgttagatagtcaggaccctctggtctcagtagttccgggctaacaacgcgccggtgcccaggcgccttgcatccatctacagcgaggtgcagacgagccgcatcgcgcacacgctgcccctcccctccgtcctccgctcccacttcacgctcgccgacgagccggccagcaccgccgctagaagccccgacgagatagccaagccgttctccagcctgcacggccgctgtccacggccgtgctgccgtcggccgagcccgtcgcgacgaagccgctcaagatcggcatcgtgcttcctggtggccaggttccagggggacaatgaatcgacttctttggtaagtgcgactgatctctagctgtacgttcatttagcaatagttgaggccaactgaaattgaaaatcggcgtttataattgaatcggagagctcttagtgcactgtcaatctcttttctgatggaaaatctgaggataaatcttattagattttgttgtttggaggtgtttcctgaataattcctatcgttgcttgtcatgtttggtgtagtgtaacagattacctgcaggagggtgccaaaggcagcaccatgtatggattaagggaggcccgctggtgtcatgaagggcaactacgtcgagctgactgctgatttcgtgtacccctacggaaaccagtacaatgagaactggtaaattcaaggactttggttataaccatttgcaaaactggaagtggctcatcagtagagattctgttgagtcgtcagagattcagaattcttgctgtatcatgggtgcactatcagagatggtgaatgctttagacgctctaaactttttttccccgggggagggg

SEQ ID NO: 33862 - DNA, 260 bp, Zea mays
  Clone ID: MRT4577_13088C.1
atgcgttcgttctacaataggaagctaaagcgagttgtgagcttttgatgttactgcactagcaaattaggaaaaaatgaataattaagtgggggcaaaattttttattgaagaggtagataaacaagagtgacctgggattatcgcgtgacttaaagcttatggtatttgaagtttccctcaaaaaaaaacaaaattgcttatttcaggcaagggtaaaccgggctgaggttttttaagggaacggtgaaaaaaccata

SEQ ID NO: 33863 - DNA, 260 bp, Zea mays
  Clone ID: MRT4577_130890C.1
ccgggttcaacctctaggcgggcaagccgcctccctctcggtccagccgtctaggcgccgtcgccgtatgcccctgcccccacccaggccacaactcctggaataaaaatgacagaaaagaaactttatagttcgatgaatgggcagtttgccgtggttttggaataatttggacttcgtcttttttcaaaaaaaaaaaaaaaaaaaaaaaaaaaacgattggtggattttgaagtctccttttattgccaaaagttcgc

SEQ ID NO: 33864 - DNA, 133 bp, Zea mays
  Clone ID: MRT4577_130891C.1
ctgggtggtggtttttatctgctagagcggtcggttccattgcgttcaacatcacaaatctaggggttcgagaagaccatacagggaatgccatacacaacgacgcgtcaggtgattacagaacagggaagag

SEQ ID NO: 33865 - DNA, 351 bp, Zea mays
  Clone ID: MRT4577_130892C.1
ggaatggccgagaagggctatcaaatctgcaaaaatctaatgcttgggccaaaattatatgacgcagtcaagcttaccaaggctacgctccatctgtgttattttacccagacaacgatagatggaacgggtgtttaacaaaaaccctacccaaaaaatcctctacagtttacaccataaaacacttgcgggaacatggatacccttggctggaaaagaaagaacatttttcaaattagttctgtcaaaagggtagggaaaacagtcttcaccaccatttaccggaggaacaggagggtcatttgtcgatcttgattctgcccacaaggctccgccctttggggagcacgt

SEQ ID NO: 33866 - DNA, 222 bp, Zea mays
  Clone ID: MRT4577_130893C.1
ggacccactagagcggacgcccaggatcaaacccaatcgatcggataatttttttttttttgacacaacaggggcactgtcaacattaagggagggagcgttgaaaataacaccaacatggcttgtgtacgaaaacataagggaataaaataataagaggaaacaaaactggcggggagaaggacaataaaagcggataaatcgtcgaacaggcggaagcca

SEQ ID NO: 33867 - DNA, 280 bp, Zea mays
  Clone ID: MRT4577_130894C.1
cacaaacgccggcgcatactctcgctcgcgaccgacagatctccaattccccattcctcgcaccgctctacccactcgccgttctcggactcttccacagacgtcgagcgcggttgcatgatatgagccgacgattgtaatggatctcatcatcgtctacatcagactagctgatatccatgtcgacaacgcgtgctgatgtctttactacctcgagcactgcatccagcctgttcgccaagtgcctggtgataatgccgcgtgacatcacgttgatgcc

SEQ ID NO: 33868 - DNA, 560 bp, Zea mays
  Clone ID: MRT4577_130895C.1
gtatgcttttaggcagtgtggccttgaatagttgtgcaaatggagtattgatgtcaccgttcaccctaaaacatcactgttcatcgttttgtacattttagttaatggttattttatgtactgtatttcactaaggcttgctcctggcctttattttttactcatttgctagttttttttttctgtaactggcgtttacttgacttgaaacaacgttgtcatctcaggagaaacacaaagagaagaaacataagaaggacaagaaggacaaagatagaaaggaaggtaaagaaaagaaggataaagacaggagtagggataagcacaaagataagaaagatcgtaaagaaaaacacaaagacgagaagtacaaggcagaggacgaggaggtcaagaagaaggtggatgccaagaacgcgctcgagaattatgcctacaacatgaggaacaccatcaaggatgacaagatcgcctccaagctcccggctgaggacaagaagaagatcgaagatggccgtgacggcgccatcagctggctggacagcaaccagctggctgag

SEQ ID NO: 33869 - DNA, 356 bp, Zea mays
  Clone ID: MRT4577_130896C.1
gctacgcgtccggctacatgccatattatctggggctttgcaaggctatggactgagctaggcacagatgtttaacttatgaaatggcacgactgccatcatgtcggacattacagttcacatgagattgaatacaagaatgctgtaaatgatgctttgaagaccgctcttgataccttctgactctgtaaccaactatatgactcagatatggatggtgaccaggagtattagatagcgcacttactgtgcactctacacaatgctgcagacaattcaaatgagagcttaagaagggttgctgacagttctagcgatcactgtttgttgcctagtgctaaggatcatgatcaatc

SEQ ID NO: 33870 - DNA, 460 bp, Zea mays
  Clone ID: MRT4577_130897C.1
aaggggggaacatttttttcccggggcagtttatacagattttccaatgaacaaaccaaatagttttaccataacttaacatttttttggcctgaaacactcctaatatttatttttagccgaaaaatgcagttgggggggttttacccaaagcctaaaaatttcaatcataacttgaaaattgggggttgaaaatacgggccattaaaccagcctttggcaacttttttgtacccagtttcggtaatgtggatgccgtcccagttaacttacaaaaacgggttggaaaaaacctttgccccttgtttgcaaaatttttttttaaggttaaagttgtagttgccctgcctttttgcgccgaaaaacccctgaaaggccgtgttaaaaccaaattttccagggttgacaaaaaactgcagggcagccttgaagaaatctccatacatgatcttggttttgc

SEQ ID NO: 33871 - DNA, 428 bp, Zea mays
  Clone ID: MRT4577_130898C.1
ctgtagtagacgatgataaggacaagctactgatgtaagcctgctaaagggaggtcgaggcatccctagcgattaaggtacttggatactgttgctttcctgacaaagagagcataacggactccttctcatcctgtattacagctgaggtccacttcgaactttagattatctctatagatagagcgcttcgatgtccatgaacctcaaaagcacctgatgccatctactacattctttagctttagcaaggcatgagagggcatcttattgtgtactaatgaggctgcccctggactggttactcctgacccgaaagaaggcggtgatcatgtctaatccacttcatacgaagagaccagaaccattccaggagcgaatggaggcagccatcatatacctgggaagctgtcttaatgtttaatgaa

SEQ ID NO: 33872 - DNA, 366 bp, Zea mays
  Clone ID: MRT4577_130899C.1
tttgtcgcaggttaaatcacccattgagttcggaaacatagttacaagttgatgggacaatttaacaaccgggacaaaatatatccccagcccactttattatagaccccaaggggcggggaaggtggggaaatcccaaaaggggggcccccccggtcccgccatttttttataggatccaaaccctttttggggggggaaaggatttaaatggacccttgggttatttaaagggaaccttcaaatattcttggaagggaaggggggccccccaaggtcaagaaaccgaaaaggcccacaccttttaacccggggggcccgcccccccccacaaatttggggataaaggctaaccccccccccagg

SEQ ID NO: 33873 - DNA, 390 bp, Zea mays
  Clone ID: MRT4577_13089C.1
gacccgtggaggtctggcccaggctgggaagggccatccatatattggatcgggtggcagctgctgcaaggggcctcgtggatcaactatccatgcctgagcgcctccacggattctgttagagccttttctacttcgccttgtgtccgcaagtctacacattgtggacacattttattcgtatggccttaaattgtcctcatgcattgtctttatttgcgcaatgaagagttaaaaagggatattttaaccaaatttatgcgcttatattaattcttctattgtccttactttgcccttgtttgttgctttccccccattttactttttgtagatacaacgtgctggattcgcaagcccaacacctatccaagcccagtcatggccaat

SEQ ID NO: 33874 - DNA, 317 bp, Zea mays
  Clone ID: MRT4577_1308C.1
cgctatacctatgttgaggcggtctgcaacacgtccgcaccacagcatgacacattgacacgccgtcacgcgcccacgccggagttgggacgccgtctgccgcacaccgatgccggcgacgcgggtcgctctagcctggttgatgatgcccacttagaatggccgctgtggcattattccttggctagtgctctgggctagtctgaggtgtgggggaggggcgtcaaacaactgatgggcgagtcccattggcctggggtcaaggagttggcatgttagtcccaaccaacacggtcagtgcttgggctgtattacca

SEQ ID NO: 33875 - DNA, 1267 bp, Zea mays
  Clone ID: MRT4577_130900C.1
tgggctgccatcttaggtaatcatgaccaagagtcgacaatgacccgggaggagctgatgaccttcatgtctctaatggactactcggtatctcaagtaaacccacctggttttttggtacatgggtttgggaattatcatgttggcatccatgggccattcggatccgagctggtcaatactagcctgcttaacctttacttcctggatagcggtgatcgtgaaatggtgaatggagttaaaacatatggatggatcagagagtctcaactcgcctggcttcgttctacttccctggagcttcagaaaaaaatacatgccccagcattagcgttcttccacataccaatcccagaggtccgagggctctggtactcaggcttcaagggtcagtaccaggaaggggtggcttgctcatctgtacattctggtgtccttgggacccttgtctccatgggagatgtaaaatctgtctttttgggtcacgaccatcttaatgatttttgtggcaatctcaatgggatctggttctgttatggtggtggctttggttatcatgcctatggaagaccccattggccaaggagagctcggataatttacagtgaactcaaaaaggggcagaggtcgtggttggaagttgactcgatctcgacttggaagctgctagatgatgaaaagctctcaaaaattgatgaacaggttatctggagacatagcacagatgattctgaccacagagtctacttgtgaagaccatgaacctaaaactacttcctgtatgtgtcatgtgtataatgtttgtcgcaaagattcctccaattttataggtcgattgattattggtagtatgatgtggcacggacctattttaggtttcacatctggttcaatgttgatatgctaaccctggtttgggtcgctgacctgttttcgaccttcttgagaagctgccaattggtccccttgttttgggaggcatcaccacatcataatctgtttcacaacagatgattcttaattttttttttttgtaattcacggcagatgatcctgaccacaatgtttacttgtcaaggccagagccataagacaacttccagcttgtgtcatctgttccatgtataatatctgtaaacaagtatggtccagttttgtttgtgggctcgttgaattattcttggcaatatgtgtctgctaagatccgaaaatagacataacatgccatgacgatactgatatgccaattcaatttccctgattgctg

SEQ ID NO: 33876 - DNA, 173 bp, Zea mays
  Clone ID: MRT4577_130901C.1
ggccgtgcgtaccgtcttcttagtactttccttgcaagtgtcgttccgtccctgtagtgaggcagtatactttcgaatgtcttcacttcatggtcgctccactcctgttagatctggactcttatcctgcattctgtacttgccctaagcatctatgatgcctgttttaaaaa

SEQ ID NO: 33877 - DNA, 798 bp, Zea mays
  unsure (1)..(798): unsure at all n locations
  Clone ID: MRT4577_130902C.1
attgggtacctcgaggccggccgggcccatctttcgcctgcgcagttcgtcgcccccagacccctctcctcctcgtgcactgcccctcgccatggctgctccatgtctagaaaatgcacgctgcttcgacgagccgtcgagtctcatcagcatccgtggtcggtacaccctgcgatgccaagttcgtcttcgcttcgcgttgcggttagattgcgatttgttttcgtgcttcgaggaatcgaagatcaagcgttggcgaccaagtgatcaggctcttcgagttctacaagtttgaagaccctgagcatctgtttggtgaaggttgttggacaaatatggtgggcggtttcctaaggaggaggagggggaggaggagtaggacggcagacgatgaagagcaggcagcgcagcaggacgaggcagagcaggcagcgcagcagcaggcggcgcctcaagacgacgacgaccagcagcaggacgcctcaggttcaggcggctctagttcgaggagcatctacctgcgaggccccgcgagtctcccgccgcgtcccatacttcgggacagacggtcgctgattcggccggaaggggagaggtcttggacggttttggattatgctgngggtcatcgtcgcccccccaataacatcctcgacctgctgtgcagggaacacttctctggacttgtggagtacgccggagtgacgggcccagcctttcacttcgaccactacgccgtcgcccccgttgcagtagaccgggacggcagggaatttcataacaagcggagcgggtgaa

SEQ ID NO: 33878 - DNA, 1391 bp, Zea mays
  Clone ID: MRT4577_130903C.1
actcgtagtgaaaaagcaaggagaaggaaaaacgcgaaagctttccccctgctcaccacctgctggctgctgctacagtgctactgccattacgccaccacacgagcttgcgcggcgactcggcggcggtggacgaagcgggacgccatggactcccgccagggccagcagcccaactacaagatttatattaggatgatgaaaacagttctgcttgacgtgaagtccactgataccatagatcagattaagtctaagattggtgctttagaggggattgacaatagccagcaagagctcttttttgctggaagtcatttggagaaggacaacagacttgctgattacaacatcatgacaaactcttgtgtcgacctttatgtaactgatgggatgcagatctctgtcagtatcccctctgtttggaagaccatcaagctcaatgtgatgaaatcccagagtgttgctgatgtcaaggcgatgatcgaacagatggggggaattcctctggatgaacaaatcctgatgcatggatgccaaaagcttgaggacaacaagttgttgagtcagtgtggcttgagcaatggccacaccctgcatgttttggtccgccccaccgacaggctgcatatctccgtggatgttgatggtgaagaaactctgaatctggatgtcaaaagctggtatactgttgctgatgtcaagttgatgatcgacaccttggagggtttacctgcaagaacacagatactcatgcacactcaacctggtggcgctaacacagtactcaaagacattgaaacactgcagaatcaaggcatcaagaacaacgacattgtcgctctgtatcataaagtcaacttcttcgtcaagacatatgaggggaggaatctagtgttatcaatgaggacttgtgacactgcagaggaaatcatgaaggtgattgaagaaaagcttaaggtcaacacaggtgtttactacctgcactacagggggcgtgttctggctcttggggatactcttcggaagcacaagatcgagaacaattgcacggtcgatgtccgccttcggaattcacatgtaacgaagtgaaacaaaagggggtgccttgggtcttctgggtgctagaccatggggcaaaacttaaaaagttgcttagcctcagagagaactatagcttttgccattttgcggtcgtggttagttagtggatgtttgtggctcttgactgggtaaggtcttttgttacctgtctggtggttgcacctgcgtaacctctcaagcatgcattgcctgtctgatggctgtacttgtgtaacctctcaagaacggtgtctgtctggtgactggtggtaaaaatacagttctgttatatggttctagttctaccc

SEQ ID NO: 33879 - DNA, 697 bp, Zea mays
  Clone ID: MRT4577_130904C.1
ctcctatgggcgattgggttcctcgaggccggccggggcgccccctgccctcgacgcccgcgcagccagcgctcggagccaccccgtccggcatgcgctaagcacgctgctgcgccgtgcggaggagtccccgccgcgcacgccgtcattcgtcgcatgctgtcgaactctcgcgcccagagccccgccgagccaccttcgttcgagctcgccccaagattgtgatctgttcccgagtttcgaggaatcaatgatcaagatttggtgaaccactggtcccgaaatcaagttcttcgagctctacaaagttgaagaccctgagcatctttttggtgaaggttgtccatgtcgcaaccactgctcaagagaagatgaagtcgtggaggaggacttctaggagttccaagagtacgatgagttctaggagtgggttagcggcaaacccccagtcggctgcctgtgaaggctgtgttcatctacgtttcatttccgcactttgataattgtcaatgactatgtcgatgtcttggacaccatgatgataattaactattaccgtcttttatgttattatccgagcactgtgtgatgatgtccgatttatgtaactactatgtatgtgaattgctggtcctggcatgtacatggttcgcatttgctttgccttctaaaaaaataaaataaaagcggccctcga

SEQ ID NO: 33880 - DNA, 1264 bp, Zea mays
  Clone ID: MRT4577_130905C.1
ccgggctcgtgtttttttttttttttttgcctcgcgtgcgaccaggtggccgacctgcagccgtagattcaaaagttaattaacagtatcaaagtgataacgctaagacatgtttatcctgccatggcaaccctcatctggtgttacctaactaacgattgcaaggccagagtgagctatcatccggatcttgtcagcctactcgtcctcctccgacaacacactccagatcatccagaacaaggaaccatcaaacatggcggcagcttaccagggtttatgcaaattaaaaagagcacatacttaatctgtgtaactatttctttgccccgtgagtattgatgcgcagtccaatcaagctcaacaaatggcgggaatggctcacgatacacatggcgcacgctacaacagttggagcttccactgaactgaacaataaccagcctggtgcatcaatctcgctcactgttggggggaggggggggcatgttgccttttttttcctttctttttttgcctcacattgaaccagatagcctaactaacgattgcaaggccagagtgagctaccatccggatcttgtcagcctactcgtcctcctccgacaacacactccagatcatccagaacaaggacaggaacaggagaactatgaggctgactatcttaaaaaggcgccgcttcttctcacggccaagttgattaaatatctccgtcacatctaccagatgttgtcgccgctggtatagcgtataattgtagtacaccattgggagagaaagtaacagcatcgcccaatggccagataagaggaacagcacgctgagaagtgcttgtaacacaaattctggcatcacgaccttgtttattcgagaggatgaatcgaatgggttgatataatcgaactctagatccgccaagcacatcagctggtagatgacaagcacgatgagtgcgacgacgaggaagaacgcggtgagccacacgaacaccatctccgacttgcccctccgggcgggcgcggatgccacactctcgctttcgttaggggggtaggggggtgaagcggaaccctagccgagcaccgtggcgccgctgcggccgccggcgaggtggtcgtgggcggtgagctggaacgcgtgggtgggaggcgagcgggtggggtcagccagatgcgtagtttactgcggagggcttcttccaatttcggctacggcccatgccatctcaatcccctccgattccgttcggaaaccggccggc

SEQ ID NO: 33881 - DNA, 592 bp, Zea mays
  Clone ID: MRT4577_130906C.1
ggccggggctcctgtctgtgcgaggaccgaagactccttacctcaactctaatccacacctaccgagaaggcccgctgttcttcgggatggaaactggaaatgagtgagccacatatcaggccaagaacatcgcgaaaaccacacactgaaggacagggtgacccctcacagatggacgcggacgcggataacatccctacttacgagctgcttccgtgtgctaaaagccacctgccccaagagcgccatggtgctggtgataactgctgagcgaaaactggaggagctcatactgcccaaggcaatgatcaaaggcttgtcaatctagaggatacatgaccacatactggcacattcatgaacaggagaggccattgcatgcgagaatgaactgtacgacgggcagacactggatcgggcagcacacaggtctcagggacgaaaccgcatagctgtagctgtgcagggagaccactggatcgagagggaagttaacggctacgcaatggatgtgaagggttgcacaaacaaaagcaacgggctgagaagatcactgactggagcacccaaggcgtagcctatgaaccagaa

SEQ ID NO: 33882 - DNA, 334 bp, Zea mays
  unsure (1)..(334): unsure at all n locations
  Clone ID: MRT4577_130907C.1
cttcaactacnacaactttctcatagtttttttttatacgaatgcaagctccaacacattttcctttcattactttcaccccacataagctatcgatacattcaaacttatcttattttccattaaccctttcacccataatcactattacatcaaaaccgattgcttaacaaaattttcctccatatattgccccctccctcaaaaatatcatttctgcattccttaatatcctttccaacaatatatattgcttactttgtacaccaaccacatacacaattatttcccaaaacccttttttttttttttttcaattcccctacaaaaattt

SEQ ID NO: 33883 - DNA, 300 bp, Zea mays
  Clone ID: MRT4577_130908C.1
cactctatggtttggggctttagcaggagtatagatagaagatagccggccataccatatgctttgacaattcccttatgtttaatcgtagttgttcctatgcgagagataaaagtcttcaagacatgacgaatattccccctctaagaatgcttttctagtataggaagcaaactgaaacatacgatggataacgacagtgtccgcaaattatttctctatcgcggcagaacccaattttacgaggaagcaatagtaacgaccatcctatcgagattggatttgtctcctttattctca

SEQ ID NO: 33884 - DNA, 174 bp, Zea mays
  Clone ID: MRT4577_130909C.1
cgcaagcaagcaaccgtggccacgccgcggcgcgaccctgacgcccgccgtctccggcacccgataagcctcctccccacatgcctcgcgtggcttccgtggtccgtaggccggcgcggtttccttcaaagccactgcttcggctcctccttgtacttaagcgcaccggccccg

SEQ ID NO: 33885 - DNA, 108 bp, Zea mays
  Clone ID: MRT4577_13090C.1
gggtaccctaccagtcctgccgggaccagtaacaccctcacaagacagtggcaggcagtggcgttgaatctcctctgccacgcgtggcagccaagcgcaagagagaga

SEQ ID NO: 33886 - DNA, 149 bp, Zea mays
  Clone ID: MRT4577_130910C.1
ttgaccttcgtatgacctatggttctatctcaactaccatctttacaacatctaataatacaatccggcacgtctcatcaccaacaacggttcctaccatctctgaaccatctatccatgaagaaccctgcctactacttacaaagaca

SEQ ID NO: 33887 - DNA, 286 bp, Zea mays
  Clone ID: MRT4577_130911C.1
cccggttgaaccaagaggtactcggcccatcgtatctcaaaaacaagcatcgaattatcagagcctatccaatgccctatgacaggatcatctccagcggcatacctgttctccacagcaaactgatcacatggccgccatgtcactgtaccatcagaatatctcggagaacttcaacaagctcgacgtctccaacactgtggcctaactccttcacacggctaccgcgtaccgttagctcgacgacaaaccttgcgaccaacacttcgagaacgcctaactgtac

SEQ ID NO: 33888 - DNA, 308 bp, Zea mays
  Clone ID: MRT4577_130912C.1
tgccaagcgtgccttggagacactgttcgttatgcgaaggaatgggggaaggtggctggtgtgatgccattgatgacctgacgaggcttgagaaggactacaaggagggcgaccctaatttcaatgagggagaggatggccacgagtgggacgaccactagagaaggccgtcataacgcactattgcgccagcgtgctgaccttatcctggtatttgccaacatgtggtcctactatcgggtaatgtgactctgtcctgaacttttgggaggtttacaacacctgatgcaggatgatcagttaattcc

SEQ ID NO: 33889 - DNA, 262 bp, Zea mays
  unsure (1)..(262): unsure at all n locations
  Clone ID: MRT4577_130913C.1
gtgccaaacagacgttgtataaccgttgaattgttatcacaatcttccatactttttagggtcttgagttgatttcccttttccgatagttaggatatatgtgtgggatattggttgaatttcaaactcacgttgtgcatcaaagcatgactacaggatatagtgacagctcctctttgttagtgcaggattctaataaacatctagtctctaatacttctggtgtngggggacctagaacctatttgcatataaaacatta

SEQ ID NO: 33890 - DNA, 1329 bp, Zea mays
  Clone ID: MRT4577_130914C.1
cattgggaccctcgaggccggccggggcctcagcctgtctttcttgtgtgcactgcacccaccctgcctcagcttgggcttggctgcctcttcgtttcgccaggaacgcgtaggcgcagcgcagcagcccaggaagcaacacccagccgcctccggcgcaacccgtcctcttctactccagcggcacctcggcatccgccgaccggttgcctacaggtttgctggagtgcaccggcggtggggcagcaaatctgtaactgacacacgatgaatcaggaggcgaaggactcgaggccctcaaggtctcccagcgagccaaacctcttcctgcaatggggcagccggaagaggctgcgatgcgtcaagacgcgtgacgatggctcaccatcgccgtcgccgtctgaaggtcttagacgcgccataccccgtgctactaggcccctccttggagctgacattgcggcattccggcgccctagcacctttaaccgcaggaaatcagattcactagtgaacgagtacaggcactcgatggcgctatcgctggagaaggacaagtattacacaacgaggggttcaccatttgatggaaacgggttcgactttggtagcataactgaggataagggaaccacctcgttgccgagattcttcgttgcattgtcaaacaaggagaaggaggaggacttcatggcgatgaagggctgcaagctgccacagaggccaaagaagaggcccaagctgatgcagaagtgcttgcttatggtgagcccaggagcttggttatcagatctatcgcatgagagatatgaagttagagagaagaagagttctaaaaagagagctagaggcttgaaggctttgagcatggagagtgattcagaatagagtttgaggcgaatggatttttggacttgactttagctggtggcaagaatctgtagttaggtggcactgccttctgcctgtcagacaaacctcagcatctaatttggtgctatgagtgctctgatcaagatctattgatgtcaacagcaaagatgatattagattcctgatctagtgaggtgcagctccatctttctgggtagtgggcacctttgtgtgagaaaaaatggagggtgggatacaatagatggtttctcaaaaccacagaggaagtaatgttcaactgttgggaaacaatgaaagctggatgttggctgagaaccaatgaatcatgatgtttaattgtcataaacttgtagctgtaagactcatggtgaccattcaatcaagactgaccaaaattttcaattgctatgaccatgctcatccttttgaccctgc

SEQ ID NO: 33891 - DNA, 250 bp, Zea mays
  Clone ID: MRT4577_130915C.1
caattcacagaaaataggctttttttttggcaaagggttacataaaaaaaaggcctatagccaaaggggaagggacctttcccactaaaagaaaaaagggggggaccaaaacaagggagctagctgactgggccccaaaatttttttccgggtaaaaatttaaaaacctcgttaacctccatttgtcccccaactcttttttttgggaccaaatccttgggacaataatggcagcaaccaaaactggaat

SEQ ID NO: 33892 - DNA, 1253 bp, Zea mays
  Clone ID: MRT4577_130916C.1
gaccctccgaggctggccgggggctgcctgcctgtcagtcctgtctggtgtgtgcaccgcgcgtccgcgcgcccgcctggctgccttcgtctcgcccagaacgcgtaggcgcagcaacaaactaggaagcaacacccagctgcctcggcgcaacccgtcctcttctactccagaggcacctcggcatccgccgaccggtttccgagaggtttgctggagtgcaccagcggtggggcagcaaatctgtaactgacacacgatgaatcaggaggcgaaggactcgaggccctcaaggtctcccagcgagccaaacctcttcctgcaatggggcagccggaagaggctgcgatgcgtcaaggcgcgtgacgatggctcgccatcgccgtcgccgtctgaaggtcttagacgcgccataccccgtgctactaggcccctccttggagctgacattgcggcattccggcgccctagcacctttaaccgcaggaaatcagattcactagtgaacgagtacaggcactcgatggcgctatcgctggagaaggacaagtattacacaacgaggggttcaccgttcgatggaaacgggttcgactttggtagcatagctgaggagaagggaaccaccgcgttgcctagattcttcgtagcattgtcgaacaaggagaaggaggaggacttcatggcaatgaagggctgcaagctgccacagaggccaaagaagcggcccaagctgatgcagaagtgcttgcttatggtgagcccaggagcttggttatcagatttgtcgcatgagagatatgaagttagagagaagaagagttctaaaaagagagctagaggcttgaaggctttgaccatggagagtgattcagagtagaggtcgaggcgaatgaatttttgggcttgacttcagctggtggcaaaaaactgtagtttaggtggcactgcctgctgcttatcagacaaacctcagcatctaatttggtgctatgagtgctctgatcaagatctattgatgtcaacagcaaagagcatgttagattcctgatctagtgggaaacctgcagctccatctgtgggcacacctttgtgagaaacaatggaagctggatagtggatacagtatatggtttctcaaaattatatagggaggaatgttcagccgttcagaaacaatgaaagctggatgttggctgagaatcaatgaattatgatgtttaattgtcgaaaaaaaaaaaaaaaaagcggcc

SEQ ID NO: 33893 - DNA, 516 bp, Zea mays
  Clone ID: MRT4577_130917C.1
ggggccggcccgacgggctctgtgggttggagctcccgcaggcggaccggatgaatcgccctttgtatttccaaatgctgggtcatgcccttagacttaactataggtacccctctgcgagagatagcattattcaagacatgactatctcgttctatttcatgagttctcttcattctatgctcctctgctaacaaatcgacggttctggatcgaatactatctttttccactggtcaagataccctttacacaaatcttacaaatttcgaatactatcgcagtggataccgcgcttagggcgaagaatgacaacatacatttcacagatcacacgttctagcatgcaacttctagtggccaatattccttatcttgactttggatacaaaatacaggactgaaggaataggtctacgagtcaggttaagccctgccaaaacggaacggaggctcctggccaagggcacagatgttagaatccgaggtattatggaatgggtccgctccgatcga

SEQ ID NO: 33894 - DNA, 374 bp, Zea mays
  Clone ID: MRT4577_130918C.1
tgccgaggttgttgtgccggagcttggcgaccagcggcagctcgttcctcagctctttcaggccttgccccgaagccttgtccagcctcttcacggcgattcgccggccatcagaggtagatggtgaaggtggagaggaggaagataactaggaccccgaaaacaatggccactacggttgctgcatgtcctgctccccttgtcctgtttgctgcagatacaaatacaatacaatgcagttggtattttcgtaatttatctgtggccactactgttgctgctatgccgtgctgtttcattgtttgtggtgtagtggcatacgtaccgtcgtcgtggactgctgcacccggcggagccggcgtcaccggaggcgc

SEQ ID NO: 33895 - DNA, 189 bp, Zea mays
  Clone ID: MRT4577_130919C.1
cacgtgaatacctcttttgggacccacaaagggtatttgcatttaacactatcgggggggatccctatgaaaaaggggacccaaggggccactcggtaaacggggagaacctttccccaggctaatctggttatggaccgcgcccttttcctactcccgggtgggggacacccggggggggcgggccgg

SEQ ID NO: 33896 - DNA, 488 bp, Zea mays
  Clone ID: MRT4577_13091C.1
tacaaccatgagaggcaaccggaaagtgcccctccccctcggccgcaataactccgccacatccatgctcgacattcctgtgctgctgcttccttgtccctccgacgctcgggcttactggggcgcgcaacgctggccgcggtgccagtggccgaggacaccacccggcacccatcggtgtccgtgtaacagcagatggactgagacagagcgctctacgctgtgcacctaataatgcaaagcaggaacacgaaactgagcaagaagctcaaggagcacatccaggacaacgtgggacgagcggtgaccaagcactgccacctgaaccgggaggtagacatgcgcctcttcaagcgcggcaactagctctggcggacccccaacactgaccactgggagatcaccctcataaccaagcgccatggcagtactgcgcgccgacgaggacaccaagaccacctacgccagcatagacctgaacgccatca

SEQ ID NO: 33897 - DNA, 282 bp, Zea mays
  unsure (1)..(282): unsure at all n locations
  Clone ID: MRT4577_130920C.1
tcttactcacacgcactcttactgctacaagactacttctntactgtcactaccaatattcatcagacagaattctaaatctacacactaagccaatttcacattattattatcactacaacattcatatcaatctatcattaatcctactttacaataaaaaaaattacactacactctatccttacttatattaaatatatcaactctagtacctacctctactatactaaatcatacactatcgtcgataaaccatatacatcccgctactcatcacca

SEQ ID NO: 33898 - DNA, 813 bp, Zea mays
  unsure (1)..(813): unsure at all n locations
  Clone ID: MRT4577_130921C.1
cattgggtacctcgaggccggccgggaccccgcaagtcgaggccttccgctggcgctcgctcgctccgtgaccggctgcctctccgctccacccctgcgctgcgaccggaggcgaccgcgccccgcggtggcgctgcgacccgcgacacgatcagtgtgactgagaggggagggtttccagtcagtcatttatgaatcctgaggcctgtgcttactagagggagggcaaggctcgttgggatccgggatgaaggggagaaatgactcggggcacagcaagaggccggttgtgctgtgctgtgtgatgattgtgtgcctatgtctcctcttcttgtatttctcgggctccaatggacaggctgggagcgccgcatttgagtacgggaccaaattctcacggtcacttnggatggggcagtgatgatgggtgaggatggccctgaagagtccatttttggaaccggggatgcagatgatgtcaagcccaagagctttcctgaacttgatatatcaaatgaggctgaagctggatttaaacctgatggagcactatgagaggcattgccctccacctgaaaggcgttttaattgcttgattcctccaccacatggctataaggttcctataaaatggccaaaaagtcgtgatgtagtgtggaaagcaaacattccacacactcaccttgcaaaagagaagtcagaccagaactggatggntgaagctggtggaaagatcagtttccaggtggtggaaaccattttcaccatggagctgacaatatatatcaatattgcaatatgctaaatttcagg

SEQ ID NO: 33899 - DNA, 279 bp, Zea mays
  unsure (1)..(279): unsure at all n locations
  Clone ID: MRT4577_130922C.1
tttggagacggccgtcatccctcgcgcagcggctaatcgttcgacacggagacgaccgccgccggcagccgagctgatcagtctgtatctatttcccacgggagcaaaagcaaggttggcgaatgtcaaggagcatgacaggtagtctgtagcgccctggcccctgggtcgccgattcggtcgggggcgccanggaaccccgatgataaccacagcttgtttgtgccccctaacttacttgcgtctcgtttttttccttttcccgacttttatgagctg

SEQ ID NO: 33900 - DNA, 2641 bp, Zea mays
  Clone ID: MRT4577_130923C.1
ggtacccgtggcgactacccggggcaagtcgaggccttccgctggctctcgctcgctcgctcgccccgcgactggttgcctctccgccccgaccctgccctgagaccggagacgaccgcgccccgcggtggcgctgcgacccgcgatacggaaattccccgtttaattgcatattggacatgtcttgtggcgtttgattggagaatttaattcttcccaacgatttccgttcttcggaggcttccatcttggtttcagttctgcaggttgtgtgtttgtgatctgtgactgagaggggaggaattccagtcagtcgtttatgaatcctggggcctgtgcttactagagggagggcaaggcaagttaggatccgagatgagggggagaaatgactccgggaacagcaagccggttgtgctgtgctgtgtgatgatcgtgtgcctatgcctcctcttcttgtatttctcgggctccaatggacaggctgggagcaccgcatttgagtacgggaccaaattctcacggtcacttggatggggcagtgatgatggttctgaagagtccatttttggaaccggggatgcagatgatgtcaagcccaagagctttcttgtgtgtgatgaccggcactctgagctgatcccctgcttggatcggaacttgatatatcaaatgaggctgaagctggatttaaacctgatggagcactatgagaggcattgccctccacctgaaaggcgttttaattgcttgattcctccaccacatggctataaggtccctataaaatggccaaaaagtcgtgatgtagtatggaaagcaaacattccacacactcaccttgcaaaagagaagtcagaccagaactggatggttgaagctggtgaaaaaatcaagtttccaggtggtgggacccattttcaccatggagctgacaaatacatatcaaatattgcaaatatgctaaatttcaaagataacaatataaacaatgaggggatgcttcgtacagttcttgatgttggttgtggagttgctagtttcggaggataccttctttcttctaatgtgatagcaatgtctttggcaccaaatgacgtgcatcagaatcagattcagtttgcactcgaaagaggaatccctgcatatcttggtgttttgggaacaaaaaggcttccatacccgagtagatcatttgaactagcccattgttcacgttgtaggatcgactggcttcaaagagatgggattcttctgctcgaactagacagattgctacggcctggaggttattttgcttactcctctcctgaagcatatgcacaggatgaggaagatctccgaatctggaaagaaatgagtgcccttgtagaaaggatgtgctggaaaattgcagagaaaagaaaccaaactgttatttgggtgaaacccctgaacaatgattgttacaagagacgagcacatggtacaacgccacctctatgcaaaagtggcgatgatccagattcagtatggggagtgccaatggaagcttgcattactccgtatcctgaacaaatgcacagagatgggggaagtgggctagctccctggcctgctcgattaacaaccccgcctccccgtcttgctgatttgtatgttactgctgacacatttgaaaaggacacggaaatgtggcagcaacgagtagaaaaatattggagtttgttgggcccaaaggtaaaaccagacactattagaaacatcatggacatgaaagcaaattttgggtcatttgctgctgcactcaaggaaaaagacgtatgggtgatgaatgttgtgccacatgatggaccaagcaccctcaagataatctatgatagagggctgataggcagcaatcatgactggtgtgaagccttctcgacctatcctcgaacatatgatcttctccacgcatgggcagtcttctccgacctcgataaaagaggctgcagtgctgaagacctgctcctcgaaatggaccgtatcctcaggcctaccgggtttgccatcgtgagggacaagggcactgtcatcgaattcatcaagaagtacctccacgcgctccactgggaagcagtagcggctgcagatgccgagcccagctcggaatcagaggagaacgagatgatcttggtgatccggaagaagttgtggctaccagaagcaggctcgcacacgtgattcccttcccggcgtctgcagctcagaagcgaggcgccagctgcaccagccatgatttatttctagccttaatgcacacatggagatagatttattatttacgaggatacggaaaatatgtggcaggcctggattaaaaaaaggctattttttctcattctcgacagatatgtgacttgatgtttgttctctagtttggttaggaaataaacattctttttcgtcttaatgttgaggctcatttaggtgtttgatgtccatcaatggaagtctgatgtagtctgtagctagtgtatttagtgtttccttgaaaaaactcctgtacccggatacatggtttgcactaaagcctcaagcctgcgggtccctcagctcgagaccccctcatgcagatctcaacagggataaccctccaatataaacaggttccagcccc

SEQ ID NO: 33901 - DNA, 1347 bp, Zea mays
  Clone ID: MRT4577_130924C.1
cccacgcgtccgcccacgcgtccgataaatcttgagaaaatattaccaaagttagaacttttgtgtgctcaagagaaggctacaacagggataaaaaatcactggaagccaagaagccaagattggatacacgaatcggttgcccagcgagattgattataaaagtcacaccagagtgcaagtatagagtaactgattttaaagcagatcacaatcatcagctggccccaccttcaacgatgcatatgttaaggtcgcagaggatattgacagaacttcagcctggagaagcagaattatcagatgattctgtagtgacaccaacaacaaaggcaactggtgatcttgttgtgagacaagtcagttttcttcggagtttatctctcctcccagctgattacaagaattatctccgttcgaagcgtatgaaggccatgcaacctggtgatggtggagcaatattgaaatatttacagacaatgcaaatggataacccctcgttcttttacactatgcagatcgatgaggatgacaaactgacaaacttcttttgggccgaccaaaaatcgagagatgacttcaactatttcggtgatgtgctctgcttagacacaacatacaaaataaacggttatggtagaccgcttgcgttattccttggtgtgaatcaccataaacaaacgattatttttggtgcggctatgctttatgatgaatcatttgattcatacaagtggctttttgatagttttaagatcgccatgcatggaaaacagcctgcagtagctttgatagatcaatctattccattgagcagtgcaatggcagccgcctggccaagtaccactcaacgaatttgtgcttggcatgtgtatcagaattctcttaagcacctcaatcatgttttccaaggttcgaagacattcgcgaaggacttcggcaaatgtgtctttggctatgaggatgaagatgaattcgtgttttcatggagaagtatgctggagaaatatgatcttagacataatgaatggttgtctaaagtgtttgctgagaaggaacagtgggccttggcatatgatagacatatattttgcgctgacatcataagtgcacttcaagccgagagtttcagtagtattttgaagaaattcttgagtcctcaactggagctgctgtccttcttcaagcactatgaaagagcagtggacgaacatcgctatgctgagctgcaagccgacttccaagctagtcagagctatccaagaatacccccagccaagatgtcatggcaaactgctcatacatataccccggtggtatttgagatctttcgtaaagagtttgagc

SEQ ID NO: 33902 - DNA, 879 bp, Zea mays
  Clone ID: MRT4577_130925C.1
cattgggtacgtcggggagggcccggcccacattcgctcgctctacccgactaccccgcaagtcgaggccttccgctggctctcgctcgctcgctcgccccgcgactggttgcctctccgccccgaccctgccctgagaccggagacgaccgcgccccgcggtggcgctgcgacccgcgatacgatctgtgactgagaggggaggaattccagtcagtcgtttatgaatcctggggcctgtgcttactagagggagggcaaggcaagttaggatccgagatgagggggagaaatgactccgggaacagcaagccggttgtgctgtgctgtgtgatgatcgtgtgcctatgcctcctcttcttgtatttctcgggctccaatggacaggctgggagcaccgcatttgagtacgggaccaaattctcacggtcacttggatggggcagtgatgatggttctgaagagtccatttttggaaccggggatgcagatgatgtcaagcctaagagctttcttgtgtgtgatgaccggcactctgagctgatcccctgcttggatcggaacttgatatatcaaatgaggctgaagctggatttaaacctgatggagcactatgagaggcattgccctccacctgaaaggcgttttaattgcttgattcctccaccacatggctataaggtccctataaaatggccaaaaagtcgtgatgtagtatggaaagcaaacattccacacactcaccttgcaaaagagaagtcagaccagaactggatggttgaagctggtgaaaaaatcaggtttccaggtggtgggacccattttcaccatggagctgacaatacatatcaaatattgcaaatatgctaaatttcaaga

SEQ ID NO: 33903 - DNA, 316 bp, Zea mays
  unsure (1)..(316): unsure at all n locations
  Clone ID: MRT4577_130926C.1
atgtgattgggaacataccatgtaggacgtcatatatggttctggctgatggggccaaagatgaacataggtagcttataggattcatgttttttgcttcgttgaggcgtcttgttgcgctgggattgtgccacatgtgttgtcttgcacgtgagagatgcttctactcacccgcgacatgcttatgtcagtggggcaataattaatctctactccttaaagcgtcactttcgttgtgcattctncttncttncgcattcctacgggccatgcagnccacacgacacataaccacttnctcttcagtcagtgacac

SEQ ID NO: 33904 - DNA, 731 bp, Zea mays
  Clone ID: MRT4577_130927C.1
aggccggccgggacattcgctcgccacgccccgcaagtcgaggccttccgctggcgctcgctcgctccgtgaccggctgcctctccgctccacccctgcgctgcgaccggaggcgaccgcgccccgcggtggcgctgcgacccgcgacacgatcagtgtgactgagaggggagggtttccagtcagtcatttatgaatcctgaggcctgtgcttactagagggagggcaaggctcgttgggatccgggatgaaggggagaaatgactcggggcacagcaagaggccggttgtgctgtgctgtgtgatgattgtgtgcctatgtctcctcttcttgtatttctcgggctccaatggacaggctgggagcgccgcatttgagtacgggaccaaattctcacggtcacttggatggggcagtgatgatggtgaggatggctctgaagagtccatttttggaaccggggatgcagatgatgtcaagcccaagagctttcctgtgtgtgatgaccggcactctgaactgatcccctgcttggataggaacttgatatatcaaatgaggctgaagctggatttaaacctgatggagcactatgagaggcattgcccctcacctgaaaggcgttttaattgcttgattcctcccccacatggctataaggttcctataaaatggccaaaagtcgtgatgtagtgtggaaagcaaacatccacacactcaccttgcaaa

SEQ ID NO: 33905 - DNA, 591 bp, Zea mays
  Clone ID: MRT4577_130928C.1
cggggtcatagtactccatttaacacgcaccttctgtgatgatgtaattttcgtcacaatgatgtcaccaacatgtaaggtatgacaaaaatactgttgtttgtgatgtaatgttaatgtcacagaaggtataaaaggttgtagtgattgtaaaaaaaaaaaaaaaaaaaaaaaaaaaaaaaaaaaaaaaaaaaaaaaaaccaaaccgtcggacatgatgattctcgcccaatttcgaaaacggactggtccaagccgtgctcttgggcctcgcaagctcaatctcggaaagggtggccagcgcacaaaaaaaacgaccatacggccctaaaatgtggaagtgactgacaaaaagctggggtgggcaagcaatcaaaaaatgtcgcaaggtgttaagccgggaaacgcgtttacaacggcgacacgcgggggccaaaaccaaacgccggtaaggcggtttaaaaaaaaagtaccgatggaacccttttctcatcttttttttttccgaccttgtgtggcaagttgcctaaacaaaatttcctcattgatcatcggcgaaaaattttaaaatgtataaaactagttcctttg

SEQ ID NO: 33906 - DNA, 336 bp, Zea mays
  Clone ID: MRT4577_130929C.1
aatgcgggagagaaacgttgatttatgtcggtggttcaccgacgttgttacttcataaggttacacgctttatatgctgatcggtcagcgagtttggggatgtagggatcaccgactccactactggaagaatgcagtggcctagcactctctgcccattggctgtcattagacataaacaccacttgaacgaagcacccactgtgtccccaagccccatgaaacaaaaccaacacctgccaggtgtgatctaattatacaggctcattatcccccgtgccgaagttgctccataaaagataaaggacgcggggaacatgaggccttcggttacca

SEQ ID NO: 33907 - DNA, 183 bp, Zea mays
  Clone ID: MRT4577_13092C.1
gcaaccggcagagtattacaactagtactaggaataaatgaactgttagtcggcaagtgatgctctgtttgtgtttgatattaggaattcaaagaacagtttagtttccggtggaatcatgaaatattgtggctcaccaaactggaccaaaaatatttcagaccaaaaaaaaaaaaaaaaaaa

SEQ ID NO: 33908 - DNA, 622 bp, Zea mays
  Clone ID: MRT4577_130930C.1
gtgcagcggcaaaaatctggctggacatcaaacaagattagaagggttgcagttgtcaacttggtgatcagttcaagatactctattaactgcaaaatgcagggtgatcaagtcagatgtgttgtgccagtacccacgatttcagaggaagaagccggtgccgggatcgccaatgcaaagcaaaatatgacagcatcgagatcacgattcggcttgatctgcaatctcaggatattcagtacgtgacgagagaacactatgactcctgaactgaggtcgtcaatataaataatgcaggatcgctgcaaagattgcgctgccgtagagtagtgcgagttaagcagacggccgtgtcaaacaagcaggcaggttcttcatcgatcggcatcatccgagatgtctagctcgatctaatagagtctccagttttgtgcgaagatcttcagctacagcttccttactagctgacgtcttttttttccccaaagatctccaaatgtggaagatcttgcagagagtttgcagccaagatctcttcaaagatcacctgtaccttgccggactgatcttgaagccaataccaactcttccagaaaaaaaaaaaaaaaaaaaaactcgagcc

SEQ ID NO: 33909 - DNA, 806 bp, Zea mays
  Clone ID: MRT4577_130931C.1
ggccctaggggccttttttttttttttttttagagaatgagaaaaaaacagcctttttttaatccaggcctgccacatattttccgtatcctcgtaaataataaatctatctccatgtgtgcattaaggctagaaataaatcatggctggtgcagctggcgcctcgcttctgagctgcagacgccgggaagggaatcacgtgtgcgagcctgcttctggtagccacaacttcttccggatcaccaagatcatctcgttctcctctgattccgagctgggctcggcatctgcagccgctactgcttcccagtggagcgcgtggaggtacttcttgatgaattcgatgacagtgcccttgtccctcacgatggcaaacccggtaggcctgaggatacggtccatttcgaggagcaggtcttcagcactgcagcctcttttatcgaggtcggagaagactgcccatgcgtggagaagatcatatgttcgaggataggtcgagaaggcttcacacaaagtattgaaggaattcgctcctaagttatagttgcataggtcagcacagccaataggttcagcagtctttcatcataaaaattcatccgttctcttgtaagttgtaacctaaagtcagtcatgattgctgcctatcagccctctatcatagattatcttgagggtgtttggtccatcatgtggcacaacattcatcacccatacgtctttttccttgagtgcagcagcaaatgacccaaaatttgctttcatgtccatgatgtttctaatagtgtctggttttacctttgggc

SEQ ID NO: 33910 - DNA, 391 bp, Zea mays
  Clone ID: MRT4577_130932C.1
cggacgcgtgggcgactaccccgcaagtcgaggccttccgctggctctcgctcgctcgctcgcgccgcgactggttgcctctccgccccgaccctgccctgagaccggagacgaccgcgccccgcggtggcgctgcgacccgcgatacgctttgggcactgaaggttggcttacttgacaggaaattccccgtttaattgcatattggacatgtcttgtggcgtttgattggaggatttaattcttcccaacgatttccgttcttcggaggcttccatcttggtttcagttctgcaggctgtgtgtttgtgatctgtgactgagaggggaggaattccagtcagtcgtttatgaatcctggggcctgtgcttactagagggagggcaaggc

SEQ ID NO: 33911 - DNA, 328 bp, Zea mays
  Clone ID: MRT4577_130933C.1
agagggcgcttttgttcatgaggtgattctttttacttattttttatttttgttttttttttaaaaggcccaactggattggtattaaaaacagggttttaggggcaatcttgggctggcattttccaacacagattaaagttaaatcgcccttcccgaaaaccgtgcgttgggtatgtattgtggaggaagggataagtctcaaattgggctactcccttcaaatttaaaacaaaagggggctgtatataacagggtacattggggggaaattggggctttttaccactaagaggtgtgtcttggttgggtttaaacctatgggttc

SEQ ID NO: 33912 - DNA, 321 bp, Zea mays
  Clone ID: MRT4577_130934C.1
atcaacaacaaaccatatctcagttaaaaaagggttttaaatcgagtatatacccttgggccgaagaaggctggcatccataaagttctccgggggaacgacggagggcatttacaaccaaggggcggaaatcggaaggacaacataacataccccacgcagccaaacagggggggcagcttttggaagggcacaaacgaaaaagcccgctcttgactaaaaccaagggggggggcttgcagggcccaatttttgctggggggcaaagcgggaagcaccccccctagggaggaagggatcagagaacagatatgagggacc

SEQ ID NO: 33913 - DNA, 566 bp, Zea mays
  Clone ID: MRT4577_130935C.1
cgacgttttttttcgcttatcagtatttcggtcgagaaattcgcgaagggattaggggaattcgaggcaggggtttgcaagaatcagggcagtttgatgttgcttcctgtgcgcgtcgctaatttctctgttttattcgcgtgatttttagggttttatcttgagtttttcgttttctccaccgtatttcgttggcttcgttccgtgctactgtaaattcagaatcttgtcagagaaaagagaaggaaaaggaaaaacaaacaaaatagtaaggggaatttggtacctgggtgtttgctgttccttgagttggtgaatctttggagtgcctggctccgacgagatcgaaaggagggacctttccttggttcctctgctggagctgtgattgcagaggtgaaccatgtcagcgatggcggcggcgggtgaagcggagtatggtgaatgcgtgcagaaggggtccctgcagcagcaccaggcgcctcaacccagccccggcgctctattctacacccatgacggcgtcgccgtctacaggaatccggtcatgccggccttctaccaac

SEQ ID NO: 33914 - DNA, 526 bp, Zea mays
  Clone ID: MRT4577_130936C.1
gcctaattggaatttatttctatttgctactagaatatttttttatctagatcttagaagtgtaagcattcatttttaagcttctgaatcaggaatggcataaattatgttatacttgtacttcttaccatcaccattctgttctgtccactgctaatgaatctcttcaaatccgttttttccgaagacccggatcctccacgacccggatccaaccatgcatcgccagacaaagcaccggatccccattccccgccccgatcgaatgccaccgagtccgctgccggaggaggcggcggcgacggttggaacttcggcggcctcatcaaaaccctgacatcgaaatcggaatccataattgagacctaccgtcgcgatctgcaggaattcggcaccggtttgaagaaagagatcgaggtcgcgcagggttctctcgggaccgtgggccacgtcatcgatgagttcggaaacaccgtcgtgaaaggaacggctcagatcatatctcaaggtaaggacgccatcctcg

SEQ ID NO: 33915 - DNA, 283 bp, Zea mays
  Clone ID: MRT4577_130937C.1
aagcccttggcatgggaatttgattgaaggccgcccatcggttgtttatcggcccaaaagacccaatgggtttttttggaccacaaaaaaaacttgactttttttgggcaaatagggggggacttttggaagtcccccgggactaggggaatggaaatggtattcccatgggaatcctgggatgctacccccacatttttgggcccccggttttaaggaacctccaccttggccaccttcctggggaaataaaccacctttcttttgagcctttttttgtgcc

SEQ ID NO: 33916 - DNA, 233 bp, Zea mays
  Clone ID: MRT4577_130938C.1
attgataccaactagcaacatacatagtgaagtacagtagcaacatcttagcaccaatggcagtcaagatttttgccctccttgccctccttgctctttcagcaagtgttgctaccgtgactattattccacattgctcacaacaatacctctctccggtgacagccgtgagatttgaatacccaactatacattcctacaggctatctgtggccttcacagcaagcatctta

SEQ ID NO: 33917 - DNA, 587 bp, Zea mays
  Clone ID: MRT4577_130939C.1
gggtgccttgcctaaaagagtcaccagcaccaaattgggtgtgtccggtgggggcagcctgtaacgccgcccgctcgtaccgtgtcgttatccaaattataatttgtgctacgactaggacgagttgttggcgcgagtctactcctaccaccatatagaggataggagaaagcctatccgtaggccatagccacgctgggacggcacacgggagctaaggagcaagcagcagcaagtctgatcagacggcgagtaggaggggtagcggacggacgatgcaacgtagaacagggcacgacgtggtcatcaatcgtcatcaagctcgaaaaaagtccctttaacgcttggtcgtcccgtccgggctccgcggggggcacgctgtccccatcccattttcacgttctgctgcctgttcgcactatgccttgtttttcgtcagtgtgtgttgcagtgcgagggtaggccagagagcaggggagtagagtagagtatgagcagaaccgagggggggggcagggtcactggcttgctcgtgggccgctttggcgacacaggttccccgtttcaggcaggcaggcaaagatgag

SEQ ID NO: 33918 - DNA, 549 bp, Zea mays
  unsure (1)..(549): unsure at all n locations
  Clone ID: MRT4577_13093C.1
gccttctttttggacaagaaccggtggttgcttttttccaacaggttgggggttaaccccgaaaccttttaccacctccaaaattggtggcctttggtcaacttggtttggccgacaccagggggcttcttccaaccacccattattgggggggcccttttttaggatggtttattagtggtaattaattattaaggtttttgggtgaaggatgggggccacccagaaataaaaaggttcctttcccaaanaaaaaanaaaaaaanaaaaaanaaaaataaaaaagaaaaaaaaaaaataaaaaaaaaaaaaaaaaaaaaaaaaaaaaaagggggggcgtttttaaagatncaagtttacctaccggtgcttgccaactcttaacttttnttttggggcacctaattnaaattaactggccggngttttaaaaccttgggaatggaaaaaccnnggggttacccaattaaaacggtttggaaagaatcccccttttnccagtttggctaataacgaaaaagccccgcncgatcggcnttcccaaaaatt

SEQ ID NO: 33919 - DNA, 280 bp, Zea mays
  unsure (1)..(280): unsure at all n locations
  Clone ID: MRT4577_130940C.1
acttcagggttcagggagttcagggacaaagttgtagggagccaacaaaattgccaggttagcaacggttgcaaccaacaattacagtctttttttttttccaacaaaatatatttactttgggggggggggggtcctctctcnggtcctatctcttcctctcctgcgtgggctgatgtgagtntgtgaccatgtgcctaattacttgccaccacacactttggaaattccacgggctcgatgtcaccttcttcaccttctccggtttcgggggttgggg

SEQ ID NO: 33920 - DNA, 494 bp, Zea mays
  Clone ID: MRT4577_130941C.1
cattgggtacctcgaagccggccgggaagagcctgctgcattccaccgcgccagctgacctcgccccttttacttcacttctccaggcgccgcgagccggtgacccatggcgtcgaaaaggaagcctctaagcccatcaggtagacctctccgagaagatgcgcgctcccaatctccacggcataaaaggagaaacatctctccctcaccagcaaagatgtggagacctgcaatgtcctatgaccatggctctctatggctaagtacactgtgcggtcgtgtgtgatcaggcagaatgaaaaaatactccggtatgccactgtgaagttggagaaaacaaagcacctactaggacagctacttaacgtgacgtactatgaactgacaactacgaacttcacgagaacagtgtgctttgcctgatgaatccgataccagatagaacctgccatcaagcatgatacttcatgcaggatctacacaatgaagttcta

SEQ ID NO: 33921 - DNA, 488 bp, Zea mays
  unsure (1)..(488): unsure at all n locations
  Clone ID: MRT4577_130942C.1
ggagctcgagggcctaggttccttttttttttttttttttaacaaatccctnnacctctctccaatccacatattttaaatcccctacaactcaacaaacatccttattattttactacaccccacacaattattacttacacacatctaaaactcatccattcttaaataacactctactcatccacattaactacctacctacacccccctatcaacaaataataaccactccttcctccnaaacatcaacccaaacaactcnaccattatcaccttcccaccaacatcttccttctcattccanacctccccttctaaatttccataaacttactcacattatctccatantctctacccctaatctccccccaaatcaaattcctcccccaaatcccaacttcaattacctaaactccttcccacctctaactaatactacttctcccaaccatcatacctcaacctcccccacataaactcct

SEQ ID NO: 33922 - DNA, 236 bp, Zea mays
  Clone ID: MRT4577_130943C.1
ggtaaggcaaaacgcagaagcaaaaagagaaaggtgcttcgtatcggcgatggggagctcatggttctcgtgtacgcttccgaaccaccccaagctccccatcgacaatgcggtggctgccgtccagctgtaccgatggctcgaggtcaatctcgaccagtacaactgcatccatgtgcttcagactcctgtcatggactcgctaaagaatgtcgctcttgagaaatgcagactat

SEQ ID NO: 33923 - DNA, 505 bp, Zea mays
  Clone ID: MRT4577_130944C.1
gtcttattatatgcagctcaaacttgatgagcacattgcggagaaaccagaatacactgacttgcaccctaacagatgcaaacgctaaaacaggctgtaatgaagaccgctcacatacggctactaatcctacaaaggcatttaataaacacacagtacaaccagctatttttggacacgcaagacaagggcggattccctacctaagtaggaggccccctgtttgttggacaccctagaacccaccaaaaaaaaaggcatgaggacacatagtaagggaacaacctcacctgcacctccagcttgaaaaaatccaccttgacaccaaacaatatacgtgacaacacagactcttccggctacacgccaatatgctcaggtaggcaaaatggaactgacaaacacccaaacgtttttcacaaagacctaattattattggctaaaaacccaaccgggccctgctgatcatcagctgaaaatataacattgaccatcccacaccaa

SEQ ID NO: 33924 - DNA, 188 bp, Zea mays
  Clone ID: MRT4577_130945C.1
tcactcggctcacactactatcagcacgctatcatccacagccatcccctctcctcactacccttcacttactcgccaccaatatctcctcctactccttcaccctcttccttccactactcactcaccagctctcccaataatcctaactccagatctacatgtcactttcaacaattagcgcatac

SEQ ID NO: 33925 - DNA, 834 bp, Zea mays
  unsure (1)..(834): unsure at all n locations
  Clone ID: MRT4577_130946C.1
aagatcgctcgctcactggagcagcataaacagaacncgctgaagaaggggaaaaaaaccactggttcacaacgtgacagcacacttggccggatccatgccaaacctgtaggcagcagaacgcatccaccccatcgatgcaggtcaccgcagtcggtctaggagccgccttcggctctcttcctgaacacgatcctgcccagcaggctcgtgccgcgcttcttcctcctcttcgtcgggtcagcggaaccaccgtcgtccggccgcggctcggcatggacgacgacaatctgcaccgaattattgccgccggcgtcgttctcctcctgccgtgctgcgctcctcgtcgtcggcgtagcagtagcacgaacctcgccttcgtcttccttggacagcacctgtggcgtgggcgtggtgggagtgggactgggagacgtggaggcctcggcgaggatgctcgcgagcgactgcggcttgtagtcggacttcgccgagctcgtcctggggatgcaggcggaggaggcgtctagaggacctggagttgccggcgtctttagagcctgcagctgcttgctcagcatcgtgatcgtctcctggcactcggcgagcttatcagccgctgcgagaatctctgagtttgttgctaaatgattttcctcttgcactgcccgacgttccacacttgcctcagaagcagggctttgcatctcacggtatgccgccgattttctctctgaaaggatactactaccatcctcgtgttgtagggcatgtatgagttctatatcaggtttctcgagaacgattcccggccgngcctcgaggtacccaatg

SEQ ID NO: 33926 - DNA, 798 bp, Zea mays
  unsure (1)..(798): unsure at all n locations
  Clone ID: MRT4577_130947C.1
actcctatgggcgattgggtccctcgaggccggccgggctgggccggatccatgccaaacctgtaggcagcagaacgcatccaccgcatcgatgtaggtcaccgcagtcggtctaggagccgccttcggctctcttcctgaacacgatcctgcccagcaggctcgtgccgcgcttcttcctcctcttcgtcgggtcagcggaaccaccgtcgtccggccgcggctcggcgtggacgacgacaatctgcatcgaattattgccgccggcgtcgttctcctcctgccgtgctgcgctcctcgtcgtcggcgtagcagtagcacgaacctcgccttcgtcttccttggacagcacctgtggcgtgggcgtggtgggagtgggactgggagacgtggaggcctcggcgaggatgctcgcgagcgactgcggcttgtagtcggacttcgccgagctcgtcctggggatgcaggcggaggaggcgtctagaggacctggagttgccggcgtctttagagcctgcagctgcttgctcagcatcgtgatcgtctcctggcactcggcgagcttatcagccgctgcgagaatctctgagttctgcagtgaatgctgatattgtgagttcagttcatgatggtgtactaataactgtagacagactcacagacaccgtaacttactgttgctaaatgattttcctcttgcactgcccgacgttccacacttgcctcagaagcagggctgtatgatcaagagcatacatcanaaaaaaaatttgcaaaaaaaaaaaaaaaaccgcgggc

SEQ ID NO: 33927 - DNA, 2690 bp, Zea mays
  unsure (1)..(2690): unsure at all n locations
  Clone ID: MRT4577_130948C.1
aattcgggcaccaactgcaaacatcagagaagagaagagtaggggggaaattactactctacgactcgtgcgcccactcctccactgttcttgggaatctcgggggagaagaggaagaaagcagtgggtctcagcgcaccactcattattcctggctccatggcttcctgacgtccctgtgcggcggggacccggcgatgaggatcgtggtgtggttccggagggacctcagggtggaggacaacccggcgctcgcggcggcggcgcgtgccggtggggaggtggtgccggcgtacgtctggtcgccagaggaggagggcccttactaccccggccgcgtatcccggtggtggatcagccagagcctgaaccacctggacgcctcgctccgccgccttggggcgggaaagcttgtcacgcggaggtcggccgacgccgccgtcgcgctgctccagctggtccgcgacaccggcgccacgcacgtctacttcaatcatctatacgacccgatctcactggtcagggaccgccggttgaaggagatgctggcggctgagggcatcgttgtgcaatctttcaattcggatctgctgtacgagccatgggaagttgtcgatgatgaagggcagccattcaccatgttcgacccgttctggaacaggtgcctcagcatgccgtatgacccccctgcaccgcttctgcccccgaagaggatcaattcaggtgacttatcgatgtgcccatcggaggatctgatctttgaggacgagtcagagaggggaagcaacgctcttctggcccgagcgtggacgccagggtggcagaacgcagacaaggcgctgacggccttcctcaacggcccactggccgactactcagtgaaccgcaagaaggccgatagcgcgagcacgtccctgctgtcgcctcacctgcacttcggcgagcttagcgtgcgcaaggtcttccacctagttcgcatgaagcagctcgtgtggagcaacgagggcaaccacgctgccgaggagagctgcaccctgttcctccgttccatcggcctgcgggagtactcccggtacctgagcttcaatcacccgagcagccatgagaggcccctcctggcgcacctcaggttcttcccctgggtggtggacgagagctacttcaagatttggaggcagggaaggacggggtacccgctcgtcgacgctggcatgagggagctgtgggcgacggggtggctgcatgaccggatacgcgtggtggtggcaagcttcttcgtcaaggtcctccagcttccatggcgatggggtatgaagtacttttgggacacgttactggatgctgatcttgagagcgatgcgctgggctggcagtacatcactggctctcttcctgatggccgggagcttgaccgcatcgacaacccccagtttgaaggctacaagttcgacccgcatggggagtacgtccggcggtggattcctgagctcgcaaggctgccgacggagtggatacaccatccatgggacgcgcctgtctccgtgctgcaagctgcaggaatcgagctgggctccaactaccctctccccatagtggagctggacgcggccaagggcaggctgcaagcggccctgtcagagatgtggcagctggaggcggcgtcgagggccaccatgaacaacgggacggaggaaggcctcggcgactcctcggaggtcctgttccctcaagagctgcagatggaggtcgaccggcagccagccccagccgaggcagcagccaacgtgcacgtgcccgtgccgatgcctgcccggaggcgcggggaccagatggtgcccaccatgacgacctcttcgctgaacagagctggaacagaggtctccgccgatctagtagtagcgaacagcgaggaggaggacaccagggcgcaggttccgttccacgcgcatctccacccacgagccgaagccccgccagctgcgcgtagaaccaacaacggcgctcgccagcacgacgtcttccagcagcctcggaaccacaggcgagatgctctgcttgctccgtcggcgtcggaggcttcgagcagctggaccggcagagagggcgccgtggtcccggtctggtcgcctcctgcggcgtcgggccattcggacgccttcgccgccgacgaagctgacgtctctagtaggagctatctgggtaggcatccgcagtcgcaccgcctgatgaactggagccaactatcgcagtcatcgtgagctcggatgcacggacagcagcagaagattctgtgcggccaaacttaatcgagctgaagattctcgtatgtagattgtccactgaactgctcatccatagtctgatgggatggaaaccaggcggcttttcctggttgtggtggctatagctgtgtaaatctcgtcttctagaacgtgtgtggtcgatatagtgcggttggctttacaaccaaaaaaaaaaggtcgctattattgatcagacgacaaaggttttccgtatttttttagccttttttgggggaggtatgtgatgtatgtaaccgtaactgtacattcccttgtgctgaccatattgttagtttccatgcgtcttgtattgctgttttgggctgagtaacaaaaaaaaaaaaaaaaaaaaaaaaaaaaaaaccgagnggggggaaccggtgaccc

SEQ ID NO: 33928 - DNA, 364 bp, Zea mays
  Clone ID: MRT4577_130949C.1
cttttgtactgcctcggtcctaaaataattgacattcttgtttttaaaaaaaaaaaaaaaaaaggggaaattaaaaaaaaaaaaaaaaaaaaaaaaaaaagggcaaacgatataaaaagatccaatgcttacgttcggcttccatgcaaagacaaagcttatttaatagtgaaacttaaatttaatttaattggaaggggggtcccttttaaggggccagggttaacccccgcgttattcaacttaatcctttttttttgggtcccccaaatttaaaattcgtggcctggttttaaaaacccggatcgttgggaaaatcccagcggttcccaattttaatttttttaaaaaaattccccttttc

SEQ ID NO: 33929 - DNA, 611 bp, Zea mays
  Clone ID: MRT4577_13094C.1
gatgaaataaatataattttccgtgctaaataatgaactagtagtggttttgtttggttacatgttggcataaaatgggtgatctacatgttgtttacacttcagaaagaaatgttgctaatgttttgaaccgttctaccatcgaaaccaccgatacttgtatgttctctccttcagttatgacttaaaagcaattgttacctcattgatatcattgtatttgcttaactgatgtgctgctacgcatgcaaccaaaatttctgaagctcaagcgcttgaagggacccacaatcttgcaatggaagcacttcagccaaacatccaggctgggatccatactcgtaacctcccagtaaaacagcttggagggatgatctttggttgcaagccttgggaaatggttatgtggtccatctatgctgattcctgtatgatctcatcctctctttgcttatactatttatctaacttgatgtcttctagcccattacaacttattgcttggaccttgagtcagctatgtttgtattctgattaacttggtgccttttatatatacttgcagcagcatatggtgtcatcctctgtataaaaattctgcttcatataat

SEQ ID NO: 33930 - DNA, 2732 bp, Zea mays
  Clone ID: MRT4577_130950C.1
gccggccgggttcctgtcccagcagaaaccagaagcaccaactgcaaacatcagagaagagaagagtaggggggaaattattactctacgactcgtgcgcccactcctccactgttcttgggaatctcgggggagaagaggaagagagcagtgggtctcagcgcaccactcattcctggctccatggcttcctgacgtcctctcctgtcgatccaaggacaccgggggtttcttggaaacaagttcttggattggtccgccaccagcccaccaccaggcaccatgtcggtctcgccctcgtccctgtgcggcggggacccggcgatgaggatcgtggtgtggttccggagggacctcagggtggaggacaacccggcgctcgcggcggcggcgcgtgccggtggggaggtggtgccggcgtacgtctggtcgccagaggaggagggcccttactaccccggccgcgtatcccggtggtggatcagccagagcctgaaccacctggacgcctcgctccgccgccttggggcgggaaaacttgtcacgcggaggtcggccgacgccgccgtcgcgctgctccagctggtccgcgacaccggcgccacgcacgtctacttcaatcatctatacgacccgatctcactggtcagggaccgccggttgaaggagatgctggcggctgagggcatcgttgtgcaatctttcaattcggatctgctgtacgagccatgggaagttgtcgatgatgaagggcagccattcaccatgttcgacccgttctggaacaggtgcctcagcatgccgtatgacccccctgcaccgcttctgcccccgaagaggatcaattcaggtgacttatcgatgtgcccatcggaggatctgatctttgaggacgagtcagagaggggaagcaacgctcttctggcccgagcgtggacgccagggtggcagaacgcagacaaggcgctgacggccttcctcaacggcccactggccgactactcagtgaaccgcaagaaggccgatagcgcgagcacgtccctgctctcgcctcacctgcacttcggcgagcttagcgtgcgcaaggtcttccacctagttcgcatgaagcagctcgtgtggagcaacgagggcaaccacgctgccgaggagagctgcaccctgttcctccgttccatcggcctgcgggagtactcccggtacctgagcttcaatcacccgagcagccatgagaggcccctcctggcgcacctcaggttcttcccctgggtggtggacgagagctacttcaagatttggaggcagggaaggacggggtacccgctcgtcgatgctggcatgagggagctgtgggcgacggggtggctgcatgaccggatacgcgtggtggtggcaagcttcttcgtcaaggtcctccagcttccatggcgatggggtatgaagtacttttgggacacgttactggatgctgatcttgagagcgatgcgctgggctggcagtacatcactggctctcttcctgatggccgggagcttgaccgcatcgacaacccccagtttgaaggctacaagttcgacccgcatggggagtacgtccggcggtggattcctgagctcgcaaggctgccgacggagtggatacaccatccatgggacgcgcctgtctccgtgctgcaagctgcaggaatcgagctgggctccaactaccctctccccatagtggagctggacgcggccaagggcaggctgcaagcggccctgtcagagatgtggcagctggaggcggcgtcgagggccaccatgaacaacgggacggaggaaggcctcggcgactcctcggaggtcctgttccctcaagagctgcagatggaggtcgaccggcagccagccccagccgaggcagcagccaacgtgcacgtgcccgtgccgatgcctgcccggaggcgcggggaccagatggtgcccaccatgacgacctcttcgctgaacagagctggaacagaggtctccgccgatctagtagtagcgaacagcgaggaggaggacaccagggcgcaggttccgttccacgcgcatctccacccacgagccgaagccccgccagctgcgcgtagaaccaacaacggcgctcgccagcacgacgtcttccagcagcctcggaaccacaggcgagaagctctgcttgctccgtcagcgtcggaggcttcgagcagctggaccggcagagagggcgccgtggtcccggtctggtcgcctcctgcggcgtcgggccattcggacgccttcgctgccgacgaagctgacgtctctagtaggagctatttgggtaggcatccgcagtcccaccggctgatgaactggagccaactatcgcagtcatcgtgagttcagatgcacgcagcagaagattctgtgcggccaaacttaatcgagctgaagattctcgtatgtagattgtccactgaactgctcatccatagtctgatgggatggaaaccaggcggcttttcctggttgtggtggctataggctatagctgtgtaaatctcgtcttctagaacgtgtgtggtcgatatagtgcggttggctttacaacaacaacaaaaaaaagtcgctattattgatcagacgacaaaggttttccgtattttcttagccttttttggggggaggtatgtgatgtgtgtaaccgtaactgtacattcccttgtgctgaccatattgttagtttc

SEQ ID NO: 33931 - DNA, 207 bp, Zea mays
  Clone ID: MRT4577_130951C.1
ttgggtacctcgaggccggccggggaatgcattcccacctggtgcgcttcccgcattgctgtctgcctaagtgattgctacgagcgacggtgatggggtctgatcagcagccgcagtcgcgaccgcgacggcgggtctcttgcatgaatcgcttagaaggcgtactcggccgtcgtcctctagataacgtcacagcacttctccctt

SEQ ID NO: 33932 - DNA, 1145 bp, Zea mays
  Clone ID: MRT4577_130952C.1
ccgccatcttctcccctgctccgctctccgtcgatggaagggtcgctaccgccgttgccctcgccctcgcagtccatgtccatcgatggaagggtcgctacagcccttgccttcgcctccgcaatccatggacgcccccgccccgagacgtgcccacccagagagccgagccgctcgctcaccttgctaccccacacccgtcttgttctcctcctcgtcccggcgctcctactactcccctccatggcgcacagctttcaggtgccaagttcattccgacattaaagtatcccctacattggacttgaaggacgatagcaaatctgaaacttggaggatcaagatgctctatgacggtgattgcgctctctgtatgcgtgaggtaaacatgctgagggaaagaaacaaatcctatggggcaataaagtttgctgacataagctctaaagattactctccagatgacaatgaaggccttgattatgaaattatgtggcatccgaagcggagtcgtcggaggacttggttacgacttctcgttcttgatgctgttcttcacgtatggcctttgcttctacgtcggtgcgcagtttgtgcgccaggggaaaactacctttctagatgttttcaagggttttttcgcgttagttctggcagctattggagtcccgcaggcgagtgcgctggcttctgatgcgaccaaagcaagggactctgctatttccatcttcggcgttctggacagggagtccaaaattgactccagcagcggcgacgggatgacgttggagaatgtcagtggcaacatcgatttcagcaacgtcagcttcaagtacccactgcgtcctgacgtccagatattcagcaacttcaccttgtgcattcctggaaaggattccggctctcatcaagtgactcctccccctcacgttgactttgcggacagatgtctcaattctagtggtggagctacgaacaacaatccaatgtcctgatcgagagcgatggagctaatgtttgaacttgtgcgtttgaacttgtgaactatggatgagaacttgtgtgaatttgtgaacttatgtatttggacttatgtgaatttgcgaacttatatatatggacttatgtgaatttgtgatatgaac

SEQ ID NO: 33933 - DNA, 196 bp, Zea mays
  Clone ID: MRT4577_130953C.1
agctgggcagcagactccgcatagccttcacgtgtggtgatataacatctagggccctgacgattgcatatagctctattggtatgatatttccatggtggctaggcatgcgcctttcgaatgacgaggtccaacagcttgtgaggaaaatggcaaattggctgaaggtcggatgccatattttctttacagaatc

SEQ ID NO: 33934 - DNA, 247 bp, Zea mays
  Clone ID: MRT4577_130954C.1
gcgatttatattaaggatattcacacaaaaggtcgcgcggtgaacattaatcccgtacaggtgggcatgagggagaccgatgacgagggcgacagaaacatatcatagctgctcacgagaggaaacagaattcacaaagcagcataatccaaaccgggaacgtcatcgtgtatgctgcgcggggtggacgtaccacccatgccaccagagcgcgctagaaaacgaagccagcgccgtcgtaaaaccc

SEQ ID NO: 33935 - DNA, 188 bp, Zea mays
  Clone ID: MRT4577_130955C.1
ccgactgttcggaatcttcagccgcagggtactactggacaaagaggaccattagctggtctacgttaacgacgcttgaattactacgaggtaccatgaccacatgactgtgcacgaccccgggcacggacaggggaagctcagctacatcggggttaaggactccttgacgcttgtgatggggaaga

SEQ ID NO: 33936 - DNA, 954 bp, Zea mays
  Clone ID: MRT4577_130956C.1
atggcagccgccgctcctgcaagctccgtgaaggaagtgctgccgtctcccctgacctccgcctccgagccccctccccttttcgatggcaccaccaggttgtacgtggcctatctttgcccgttcgcgcagcgcgcttggattgctagaaactacaaggtggtaccatcaccatcaccaccgttctctgatttgttgaagcggttctccttaatttgtggtgtcttccgggaaagggaaactgaaacctttttctgttcctcgccgtctgtccagggtctgcaggacaagattaagatagttgccatcgatctcgctgacaggccagcgtggtacaaggagaaggtttatccagaaaacaaggtgccttctctagagcacgacaaccaggtgaaaggagagagcttggatttggttaagtacattgacagcaacttcgaaggtccatcgttgctccccgaggatcatgcaaagcagcagttcgctgaggagctgctcggatacactgacgcattcaacaaagcattttactcatgtttagtcgacagggaagatgtgtctgaggaagccgttgctgccttggacaaaatagaagacgccctggggaaattcaacgatggcccgttcttccttggtcagttcagtctggtggacgttgcgtatgtaccgttcatcgagaggtttcagatactctattccaatataaagaactatgacgtcacaaagggcagacccaaccttcagaaattcatcgaggaagtgaacaagatcgatgcgtacacacagactaaactggacccgcagtttttgcttgagcaaacaaagaagcggcttgggctaatttcaaaacatttgaccaaccttcgttttgaacatccagattgcttaaagcctgtgaccaaggacgagactttcgccagaagcaccagcgtagtagatcggagctcgttttag

SEQ ID NO: 33937 - DNA, 471 bp, Zea mays
  Clone ID: MRT4577_130957C.1
ggacctttgggctgatttatgggcttgtgggcaccaaactagcctcagcccgcccgacggcatgcgtcatctggacaattgcagcaacctcagagtcaacatgcgtaataaattttgatccttgggaggggtgtacccaccagacaaaaggtcgatgtgggtctcgtttgttgacttgacgacctacgacaatccgatggactgtatggttcctgcgttggtgatgtactacctaaaccctcgtttcactaatccctgacggcaggacaggggttcattacggcggcgatgggcgatggagaaccagggcctgaccttggagagggagttcgaaaaatggtcattatacttaaggaaagtagtaggtgtgtaaaccatttaacttcgatatggggaggcagcgataaccaacaataacattgggtgtgccagcgctcggcaaccggaacgagcataactcaaactttccaa

SEQ ID NO: 33938 - DNA, 1111 bp, Zea mays
  unsure (1)..(1111): unsure at all n locations
  Clone ID: MRT4577_130958C.1
attgggaccctcgaggccggccgggagctcttcccacctccacgctcgaagctcctccctaaccggccgcatcgtcgccatggcagccgccgctcctgcaagctccgtgaaggaagtgctgccgtctcccctgacctccgcctccgagccccctccccttttcgatggcaccaccaggttgtacgtggcctatctttgcccgttcgcgcagcgcgcttggattgctagaaactacaagggtctgcaggacaagattaagatagttgccatcgatctcgctgacaggccagcgtggtacaaggagaaggtttatccagaaaacaaggtgccttctctagagcacgacaaccaggtgaaaggagagagcttggatttggttaagtatattgacagcaacttcgaaggtccatcgttgctccccgaggatcctgcaaagcagcagttcgctgaggagctgctcggatacactgacgcattcaacaaagcattttactcatgtttagtcgacagggaagatgtgtctgaggaagccggtaacaggactagttcgcatgtttggtttgtctggaaaaaaaaatgtcttttcaataagatgctaattgcctcgttccatgtctttacatcagttgctgccttggacaaaatagaagacgccagttcagggaaattcaacgacggcccgttcttccttggccagttcagtctgattctatttgcgtatgtaccgttcatcgtgaggtttcatatactctatcacactataaagatctatgacatcaaaaagggcaaatttatgcctacacacacactacgcaggaccctgaagtttttacttgcgtacacaaaaaaccggcttgggattgcttaaagcttacgcacaagaataactctcgacaaaaataccagcatagtagatcaacacttgtttagtcatttgtgtgcttaaataatgaatactacatatatggttttcaataaaacatggtcccccacccccggttgtacttctnaancccaaccngaagaacctgatattatagctttcgtggtgtgtttacgtcactgaaaatgaaagggtggggaaaaagaataatatgccatgtattctgtc

SEQ ID NO: 33939 - DNA, 1216 bp, Zea mays
  unsure (1)..(1216): unsure at all n locations
  Clone ID: MRT4577_130959C.1
gaggttcggccgggggcagctcaccgccacctccacgctcgaagctcctcccgaaccggccgcatcgtcgccatggcagccgccgcttctgcaagctccgtgaaggaagtgctgccgtctcccctgacctccgcctccgagccccctccccttttcgatggcaccaccaggttgtacgtggcctatctttgcccgttcgcgcagcgcgcttggattgctagaaactacaagggtctacaggacaagattaagatagttgccatcgatctcgctgacaggccagcgtggtacaaggagaaggtttatccagaaaacaaggtgccttctctagagcacgacaaccaggtgaaaggagagagcttggatttggttaagtatattgacagcaacttcgaaggtccatcgttgctccccgaggatcctgcaaagcagcagttcgctgaggagctgctcggatacactgacgcattcaacaaagcattttactcatgtttagtcgacagggaagatgtgtctgaggaagccgttgctgccttggacaaaatagaagacgccctggggaaattcaacgacggcccgttcttccttggccagttcagtctggtggacattgcgtatgtaccattcatcgagaggtttcagatactctattccaacataaagaactatgacatcacaaagggcagacccaaccttcagaaattcatcgaggaagtgaacaagatcgatgcgtacacacagactaaactggacccgcagtttttgcttgagcaaacaaagaagcggcttgggattgcttaaagcctgtgaccaaggacgagactttcgccagaagcaccagcgtagtagatcggagctcgttttagtcggttgtgtgcttggatattacgtctggtcttcaataaggcatggccttctgtaatggctgtgcttctgaaaataaataaactagttgtccaggtattaacgttgctttgatgacgtgtcgatgtcactgtatatatatgaatgggtgggaaagaatgatggagggccatttgaagtgtgttttgtgcaaatgttgccgagatggaggacagtatccatgtagacattcatgtattgctcaaatcgtgacacggggcatgaaagacatggtttcgcgccccaaaaaaaaaaaaaaaaaaaaaacccccccccccccccgggcggccgtntagaggtaaaaattagtacg

SEQ ID NO: 33940 - DNA, 463 bp, Zea mays
  Clone ID: MRT4577_13095C.1
gggggtgctccaactcaatgctcgccaggggttttttcaagtgaatcaccatctgtagtgccggcttttagcacctttttaacctccataacttcaggcagccgacaactgctgaaaatggaaaactaaagcatgttggactcaaacattcataaacccaaattacttttccattagatgaccaaagtccaatgtctctttctatactcaaggccacaactactccttctagaatcgcgaacacttccacaatagggtcttggccttatacggaagctttttcaccagggaactttgcctcctttgttgtctagaacaccttcctcaaccattttgaaagctctttgatcgaataatcttccacacgtaatgctacctaatgcctttttcattgctaacatgctatccctattttagccagtagggccactggcctgtatcaacctgccttgccttatcccgc

SEQ ID NO: 33941 - DNA, 266 bp, Zea mays
  Clone ID: MRT4577_130960C.1
tataattttcttccatcacaaccacaaaaggggttctttactaccctcccaagaggtcaacaccctctccaacaaaaatacttcacgagcttggcctgacaagttctaacccattccgccaggaaggtcgatttgaagcacccaaaatgtgaggcaaaaaatcaactcacacgccctcagacgtaaaccgaaaccgaacacgcgtgacaacatcttccatgactacagttactgcccccctcctctctttatttgcccatcatctt

SEQ ID NO: 33942 - DNA, 2845 bp, Zea mays
  Clone ID: MRT4577_130961C.1
ctcgaggccggccgggagctcattgccacctccacgctcgaagctcctcccgaaccggccgcatcgccgccatggcagccgccgctcctgcaagctccgtgaaggaagtgctgccgtctcccctgacctccgcctccgagccccctccccttttcgatggcaccaccaggtaggttttcgacctatcaattaattaattactaaaaatcttcacctgtgcagaccatgagctagaagttaacccccggttcggtttttgagtctcgtgaaggttgtacgtggcctatctttgcccgttcgcgcagcgcgcttggattgctagaaactacaagggtctgcaggacaagattaagatagttgccatcgatctcgctgacaggccagcgtggtacaaggagaaggtttatccagaaaacaaggtgtgtctgactaatctgctatcccccctcctgttcagattttccaaggttcatggatactttgtcttgcatttttcattcaccctttgttttgtttcccccgtaggtgccttctctagagcacgacaaccaggtgaaaggagagagcttggatttggttaagtacattgacagcaacttcgaaggtccatcgttgctccccgaggatcatgcaaagcagcagttcgctgaggagctgctcggatacactgacgcattcaacaaagcattttactcatgtttagtcgacagggaagatgtgtctgaggcctgcgttgctgccttggacaaatcccggtaccgacgggaaaacccccgatgacaagttcttccttggtcagttcattgatctcgctgacaggcctgtatggttcatcgagaaggtttatcctaaaaacaaggtcccttctctacagcacgacaaccacaagaacaggccagcctggatttggttaagaacattgaccgcaacctccaagggccatcggtgctccccgaggatcatgcaaaagcagcagttcgttaaggacctgttggatacccacgacgccatcaacaaaacattttactcaagtttaacccacagggaaaaagtgcctgaggaagccgctgctgccttggacaaaatagaagacgccctggggaaattcaacgatggcccgttcttccttggtcagcccgggctctccctttccctcgccgcgtataaagattcgctgcccgcgacaagaagatgcagctcattaccacctccgcctccgcgatcgaagctcctcacaaactgttatcgtcgccatggcagccgccgcgcctgcaagctccgtgaaggaagtgctgccgtctcccctgacctccgcctccgagccccctcccctcttcgatggcaccaccaggctgtacgttgcctatcattgcccgtacgcgcagcgcgcttggattgccaggaactacaagggtttgcaggacaagattaagatagtcgccatcgatcttgctgacaggccagcatggtacaaggagaaggtttatccagaaaacaaggtgccttctctggagcacaacaaccaggtgaaaggtgagagtttagatctggtcaagtacattgacagcaactttgaaggcccatcgttgctcccagaggatccttcaaaaaaagcagttcgctgaggagctgcttgcatatactgatgcatttaacaaagcattatacttttgtatagtctccaaggaagatgtgtctgaggaagctgtcgctgctttggataaaatagaagacgccctcgggaaattcaacgagggtccattctcccttggtcagttcagtctggtggacattgcgtatgtaccattcatcgagaggtttcagatattctattccaacataaagaactatgatattacaaagggcagacccaaccttcagaagttcattgaggaagtggacaagattgatgcatacacacagactaaacaggacccacagtttttacttgagcagacaaagaagcggcttgggattgcttaaagcttgcggccgaggatgactctcgacagaaataccagcatagtagatcgacacttgtttagtcatttgtgtgcttgaataatgaatactacatatatggttttcaataagacatggtcctctatactgggttgtacttctgaaaacaaactagttgtcctgatattatagctttcgtggtgtgtttacgtcactgtatatgaaagggtggggagagagaatgatatgccatgtattctgtcaaatgtttttttataatgtcaagagctctgacttttaattaaaaaaaaaaaaaaaaaaacgagaggagggggccgcctctttctgttttggagaaaatataataaaaaatcgggccatgcggcccgggtccattctcaattattcagttctcattggtgtacattgcgtatgtaccattcatcgagcaatttcagatattctattccaacataaagaactatgatattacaaagcagagacccaaccttcagaagttcattgaggaagtggacaagattgatgcatacacacagactaaacaggacccacagtttttacttgagcagacaaagaagcggcttgggattgcttaaagcttgcggacgaggatgactctcgacagaaataccagcatagtagatcgacacttgtttagtcatttgtgtgcttgaataatgaatactacatatatggttttcaataagacatggtcctctatactgggttgtacttctgaaaacatactagttgtcctgatattatagctttcgtggtgtgtttacgtcactgtatatgaaagggtggggagagagaatgatatgccatgtattctgccaaaaaaaaaaaaaaaaaagcggcc

SEQ ID NO: 33943 - DNA, 402 bp, Zea mays
  Clone ID: MRT4577_130962C.1
ggcgccccgcgccactggcgcgtctatgccgtgtacgcggcctgcttcgccatcgtgtgcgcctgcgcgcgcgccgagaggaggaaaaaggcctacctcgcgggcaccgacggcgccgcggaggagtggaagaagagctgagctgcttatctcgggatacacgactagatcagaattcgggactcagtagggatttgtctgaaaaaagatcccaatatggttatggtgaaaactcggaatttaggaagaaaaggagggtataaaaggaacaaaactagaacaagctgtgattttttttccttttctacatttattattattcatataatatgttccccttttcgtgttaaaaaaaaaaaaacaccaaaaaaaaaaaaaaaaaaaaaacacaccaaaccccac

SEQ ID NO: 33944 - DNA, 1457 bp, Zea mays
  Clone ID: MRT4577_130963C.1
cctcgaggccggccgggagctcaccgccacctccacgctcgaagctcctcccgaaccggccgcatcgtcgccatggcagccgccgctcctgcaagctccgtgaaggaagtgctgccgtctcccctgacctccgcctccgagccccctccccttttcgatggcaccaccaggttgtacgtggcctatctttgcccgttcgcgcagcgcgcttggattgctagaaactacaagggtctgcaggacaagattaagatagttgccatcgatctcgctgacaggccagcgtggtacaaggagaaggtttatccagaaaacaaggtgccttctctagagcacgacaaccaggtgaaaggagagagcttggatttgcattggtacattcgcagccggccgggagctccatagtagctccgcctccgcgatcgaagctcctcacaaactgttatcgtcgccatggcagccgccgcgcctgcaagctccgtgaaggaagtgctgccgtctcccctgacctccgcctccgagccccctcccctcttcgatggcaccaccaggctgtacgttgcctatcattgcccgtacgctcagcgcgcttggattgccaggaactacaagggtttgcaggacaagattaagatagtcgccatcgatcttgctgacaggccaacatggtacaaggagaaggtttatccagaaaacaaggtgccttctctggagcacaacaaccaggtgaaaggtgagagtttagatctggtcaagtacattgacagcaactttgaaggcccatcgttgctcccagaggatccttcaaaaaagcagttcgctgaggagctgcttgcatatactgatgcatttaacaaagcattatacttttctatagtctccaaggaagatgtgtcttgaggaagctgtcgctgctttggataaaatagaagacgccctcgggaaattcaacgagggtccattctcccttggtcagttcagtctggtggacattgcgtatgtaccattcatcgagagggttcagatattctattccaacataaagaactatgatattacaaagggcagacccaaccttcagaagttcattgaggaagtgaacaagatcgatgcatatacgcagactaaactggacccagattttttacttgagcagacaaagaagcggcttgggattgcttaaagcttgtgaccaaggatgaatctctcgccagaagtacaagcatagtagattgagactagtttagtcgtttgtgtgcttgaataatgatgaatatcacagttatggttttcagtgaggcatggtcttctatattggttgtgcttctgaaataaattagttgtcactatataaaaggatcatttggtaatgtgttgatgtcactggttgtgcttctgaaaataaactagttgtcactgtataaaaggatcatttggtaatgtgttgatgtcactgt

SEQ ID NO: 33945 - DNA, 371 bp, Zea mays
  Clone ID: MRT4577_130964C.1
acgaatcggcaaatgatctcgcgaaccgtcgagtgaacatagaaacatgggggggggggggggggggggggcacacttaacacacactaccaccaccaccaccaccacccacactgacacacactacgacctggaggagacagcggcggcggcgttgatccccctggcgatgccgtagctacggccgccgagcccgatgcagccgaagaggagctggccctggcggtacggcagcgacgtccggcgccgcatctcctcggcctcggcgcgccgcgccttgtacagccgctcgtgcgcggacctccttctgcccctcccaacctttacagactgagacggggacggagacggcgccgccgcggctgggggag

SEQ ID NO: 33946 - DNA, 108 bp, Zea mays
  Clone ID: MRT4577_130965C.1
cccactcgtacgcggagaccggccgacactatctaagaagctatacggcggcagcacccacaggttagattctagatgagcgttaacttgaatcataaaggctgtaat

SEQ ID NO: 33947 - DNA, 826 bp, Zea mays
  Clone ID: MRT4577_130966C.1
cactggaacaatccccttttttttaaacatggttgccactaactagttcacagtagtgactgacgagtaaccacacacacacacacactaccaccaccaccaccacactgacacacactacgacctggaggagacagcggggggggcgttgatcccccttgcgatgccgtagctacggccgccgagcccgatgcagccgaagaggagctggccctggcggtacggcagcgacgtccggcgccgcatctcctcggcctcggcgcgccgcgcctcgtacagccgctcgtgcgcggacctcctcctgcccctcccaacctttacagacggagacggggacggagacggagacggcgccgccgcggctgggggagcgccagcgcggtggtggtgggagtgcggctgctgctggctgctcttaccgccgtccgacttgctgcggtggagcaggtccttgaggaacccgctccagcggcgggagcccctggacgacgacgcggacgaggatgcggtggacgacgacgacgacgaccgcgacgccgccgccggctgctgttgctgcgactcgccggccgactcaggcttcggcaccgggacttgggacgcggaccgccagtgcgtgcggaacggggacatggagcgcgccttgcgccgcacggagcggctccgcacgcgcccgcgctcgtccgccgcctccgcccgctgctggttctcgtgctgcgcgcccgcggcggggtccgtgtccgcgtccccgtccggctgcagcagcagcgcggcggcgaggcggatctggccgttgtggaagagctcgtcggcgcggacgcgtggg

SEQ ID NO: 33948 - DNA, 262 bp, Zea mays
  Clone ID: MRT4577_130967C.1
atgaggaacagggcacgaccgtaaggctcaatcgctgaggcatatattgcggacgagtgcttgacattttgctctaaatacatggatgatgtcgaaacaaaatttaatcgggaaccaagaaataaagggttttctaatgaggaagcctataccgttgatgtttttgggcatggagttaattttacctctgcgcctgaactagtgtatgatgatagtgccatggatcaaatggtatggtatgttctgaacaattgtagtcagg

SEQ ID NO: 33949 - DNA, 259 bp, Zea mays
  Clone ID: MRT4577_130968C.1
acttatcactttcccttcttccttcttacttcaacaacaaggatttgttttatatcaacgttttcttacaaacatatctcctttctttaaacatcaactattacttacattttacctcacaatttcactcaaccattaacaccttatccctcaaactacaatttctaccattatcatccaccctatttaataaacaatataatctttatactacaacaactatttcataatatcaaaccatacttctatttactaatat

SEQ ID NO: 33950 - DNA, 833 bp, Zea mays
  Clone ID: MRT4577_130969C.1
cgggagccgccgccgcctctatctctcccttccctcttctctctacgctcaccactctcctcccttccctcgcctcgctcctctctgtctcgaccgagcagcagcagccgaccgcgcctgcaacgaccgcgactcagctcggcgcccaggcggaccgacgccggccacccggccaggcccgcggagccgcagccacgcgcgcccagcaagtcgagcttatctgaatttgatgatcttgcgggccaccctggattcgacaagcaagggacacgcttcaagcggctcattaaagaccagaataatcataaggacctcgaggagggaattaaccgtctagttctttgctctggaaaggtgtactacgaactggatgaagaaagaaggaagacggagcgcactgatgttgctatatgtagagttgagcagctctgcccattcccctatgacctcatccagcgtgagttgaagagatatccaaggacactgaaaggcggacgtgcggattggcttatagagaaatgtattgaacttggagcttctagtgttacccctgtcctgatagaacaatgtcacacaatagcggaaaatcgggtggacaggctgcaacgccttgtgctggatgcagttaaacaatgtatggagtttgggtatcacctccgttcttggcctgttaaacaatgtacggagtttggggttaaatgattttgtaaagtgtttgcaaatatgtgcaaaacataataatgtgtaggttttgtgaatgattttgttgtggtgtttgttgatggtttatgtgatgtggatctatcattatgcaatactaattaaatttgtat

SEQ ID NO: 33951 - DNA, 531 bp, Zea mays
  Clone ID: MRT4577_13096C.1
ggagttttgacaatcaagaacactgagattgcaaagcacttgtcccttccaccagtaaagctccattgcagcatgcttgctgaggatgcgattaaagctgctgtgaaagactatgaagccaagaaggcgaagatggggcagaagggtgtagacagtccttcagagaaggctgctgaagcatgaaagtttctgccatgaagtatactgagcttatatgtttctcagtccatgactccctgccacttgttgttgccaaagataaatgcttctgtttgtgaggcgagggattgtgtgtaatgttcacaaactctggtagtacggcttgtggcttaactcttttaaggatggtgacgaccaatttcaaataaatttgctgccatcttagaattagaagaaagtacttctatgtgcatgtacaagagctgtttctagaagtgttatctgtcaacatacgtaatggaattacggtcaccgttgcacaaaggctatttttaaatattgtagtcaattttatttgtggtacggaatgcc

SEQ ID NO: 33952 - DNA, 461 bp, Zea mays
  Clone ID: MRT4577_130970C.1
ctaactagtttacagtagtgactgacgagtaaccacactgaacacacactattcaccaccaccaccacactgacacacactacgacctggaggagacagcggcggcggcgttgatccccctggcgatgccgtagctacggccgccgagcccgatgcagccgaagaggagctggccctggcggtacggcagcgacgtccggcgccgcatctcctcggctctcggcgcgccgcgcctcgtacagccgctcgtgcgcggacctcctacctgcccctcccaacctatacagacggagacggggacggagacggagacggcgccgccgcggctgggggagcgccagcgcagtggtggtggtgggagtgcggctgctgctgctgctgctgctgctggtggctgctcttgccgccgtccgacttgctgcggtggagcaggtccttgaggaacccgctccagcggcggg

SEQ ID NO: 33953 - DNA, 389 bp, Zea mays
  Clone ID: MRT4577_130971C.1
tttttggttttcatctcttgtcgtcattgaattcaaagtctaatgttgtgattctaacgttgcatccatttgcaggaaatgactactcgactcggccctgatatgaacttgcccgcttttcgccctccccaggtaacactatctgaacacttcaattccatagcaactctttctttattatcaaaactggctcgcaggcacaaggatggggacagtggtcaggacaagctccagcgtcgcagccacagtggaccggcgttgggtggacgcaggcacctccaggcacttggacgcctccaccccaaggatcgcagccagtcccgggatgggtgccaccggtctcccagccaccggcgggctctcatccatttcaagcgtggatggcaccg

SEQ ID NO: 33954 - DNA, 619 bp, Zea mays
  Clone ID: MRT4577_130972C.1
gccggccgggctgcggataacacccaacctcttacctagcttcttctaactctagataggctcgatttgctgcaacaaggtgcagatagcagcatggacgctacgacgaggactccgcctgagggccaacaagttgtcggagcgccacgccatcggcaaggcgcggcaggccacggacgacaaggactacaaggacaccccgccggcgccgctcttcaagcccggggagctccagtcactgggccttctaccgggccggaatggccgagttacgccgccaccttcctcttcctctacatctccatcctcacagtcatgggagacctccaagtccacctccaagtgcgccacacgtcggcatccaggggatcgcctgatccttcggcgtcatgatcttcgccctcgtctactgcaccgtcggcatctccggaggtgacatcaacccaggggtgaccttcgggctgttcctggcgaggaagttgtccctcaccagggcggtgttttacatcatcatgcagtgcctgggcgccatctgcgtcgcgggcgtcatcaaggtcttccagtaggggttgcacatgggaaacgtgggcgccgccaacgtctaccggatcggctacgc

SEQ ID NO: 33955 - DNA, 652 bp, Zea mays
  Clone ID: MRT4577_130973C.1
gccggccgggccggggtgagacgtctgcgttctctgccgtgctgccccgacgagcttccaccgctgacccaagcccaacaccattcggcagaacatccagtcatagctgaactaaacgcttttctttatagcgactccctctcggcctcgccgcctcatctccaccaccaccacctaccacccgcgactacaaaattaaatccgatcgatctccgagttctccaaatcccccggggaactgacaggccgagctacaaacgttgcacagaatgccccccgtctctagcggtcctctcctctgactctccgattgccctaccagactcgagagaacttgatctgaaagaactgcaagccctggtgcagaatgtgagttacccagattaatggagaacaaaaagctgatcatgttatagatatggagatgaaatctaattccctcgactggtaacgaggtgaagctaggatatgaatgccatgatggctcatagtcaccggagtacagacaggatatgcatgagtagaatcatgctcctgtgcatgccatggatcccgctgattgagggttacgccttctcaccgcggcgcttcgctagctgctacctctcggtgttcagtgtatgtgcacctgtcacggataggctcccttcga

SEQ ID NO: 33956 - DNA, 111 bp, Zea mays
  Clone ID: MRT4577_130974C.1
aacgcgggaccttggtcctagctacagctggctcgacataagggcagaatgcggatttttacaggcctgcgaattgcgttcgatagcttcctcatgacacgatgaatgaac

SEQ ID NO: 33957 - DNA, 378 bp, Zea mays
  unsure (1)..(378): unsure at all n locations
  Clone ID: MRT4577_130975C.1
cgtgaagtccacgcgtgacccaaactttctatgaaagtgtgaatcatttagtgccacaaagggcccatactcaacaccggggttattaaaccgtgggggccggcggcgtatactacngtcgtcaaaccttataaacccaatatttcctacctcctcacttaattctgccataaaacaggacacttattgtggaatcctactccttataacttaggatgcctactatcttacctattcatgcaaggtactatataatcccaacaaatgttccatgctaaacctcttttaaaaaaacttctatttcatacattactaggaaatctttatacaccacttattatataccatttaaaaccacactatgtgaacaatgccctt

SEQ ID NO: 33958 - DNA, 145 bp, Zea mays
  Clone ID: MRT4577_130976C.1
actgctgcttgcacgcaagccctccgggccaagtctagggtttgggaatctgtagaggggacaggggtgcgcgctcagggcagggtggcgaagatgatcgaggtggtgctgttcgaccgcctgtggaataaggtgcgggtgtagt

SEQ ID NO: 33959 - DNA, 461 bp, Zea mays
  Clone ID: MRT4577_130977C.1
gagctctctagtcggcggccgcccttcttttttttttttttttttttttttttacaataactatgaaatcttaagtgaaatcttaataccaagcctcaaccttaagtcacctataacatgttgtcactataagataaagataagataaaaataattacatacaacgaagcttacaggcctctagttttttaaatgaaggccaaaatgtgtatacccctaactggagaaaatatgctctgaagaggagctcatacaacggagcttaggagcctctagttcttaaacaatgggaagatggggatggtcctccttgagatgacatggttgattaggtaaaggagtccgacagattggatatggaacattatccttggcaatggcgcattgaaaaggcaagaatgggctccttgagattccccatgtcaagacaattgcaattgtgaatccaacaccaaatgcta

SEQ ID NO: 33960 - DNA, 562 bp, Zea mays
  Clone ID: MRT4577_130978C.1
cccccctcgagtttttttttttttttttttttttttttttttttttttttttttttttttttttttttggaccatgaaattaagccactgttaatcggcaatcaaagccagttttgggtacggttaacccacaagctttatacacatgacgcagggggccggctcctttttttttttttttttaaggccccgaccttgaagttgaagctgccgaggccctccttgatcagctaaagctccctggaggccacggccggggccacggacatggggcggggggggggaccccccggggggggcctcgcctgttgttcggggccggcgccggcgccttttggcccgccggccttggcccccgcgtcggccgccgggtcaacgtcaagggaggccaggttttttgggagcacaaacaccctttgaaacccgcggggctggggggggcccgggccctgaaacaacattgggggctgcggcgtgggcgtggctcccaggtaggtacggggggaaacaaaggttggccgtttgactgctgcctgcgggtgggggggcctcgggccaaatt

SEQ ID NO: 33961 - DNA, 387 bp, Zea mays
  Clone ID: MRT4577_130979C.1
tcttttttagtcgtcctcgctcctcatagcgcgggcgtcgagaagacgcgtggggacaaggacatgatcttaaggacccgttttaaggactacacacggatgccggccttaacgctcgtcaacatgaccatggcgctaaacatctatgcacttgtgactcacattactcacgatgacattaaggttttcaccccggagccggaggaccctgtcgctctgttgactaataccaaccacttgtacaagaccttctgttgcattcgaatgctaaaaatcactggtctgaattttgacgcctatcatggctacaagaacacactgctgcgggcactactgctccggatgaggcctatgatggtgatgacctggctataaccagagatgaaa

SEQ ID NO: 33962 - DNA, 301 bp, Zea mays
  Clone ID: MRT4577_13097C.1
ggcgaccgagggagacgtggagctcgagttagagactgagaccagcggccctgagcggcctcccgagaagccaaggacacatgacagtggtgctgctgacctagagcgggttactgactatgcggaggagaaagagatccagagttcgaatcttgagacggctatgtccgtcattggagacagacggtccagggagcaaaaggccaaacaggagcgggagaaggaatggcgaaggtcactatcaagaaggaagatctggagttgataatgacagaaatggagatctctcgagcagcagccg

SEQ ID NO: 33963 - DNA, 294 bp, Zea mays
  Clone ID: MRT4577_130980C.1
cgggggttttttttttttaatttttttttttttttttgggggggcaaaacaaacttgatggctttttttacttaaacaaacttaaaaaaatgcggaccatcttgcaagatgaatgtaccttaacctcgcgaaaataaggccctcactagcttatttctggagggggtgacccggaacatagggctctaggaaaaaaaaaaggggttgctatgataacaaagaatagcgcgaatttctctctattgaattttactgcaccatgcctcccccctttaaaaagaatattccgaaaac

SEQ ID NO: 33964 - DNA, 135 bp, Zea mays
  Clone ID: MRT4577_130981C.1
ataagacatattcttacaataccaatgcctattcaaaaaaatccaaagatggcccttatgtacttaacaccaggatcattgcaccttagagaaagtagggggaaaagcttttacagggacataagggatgatcct

SEQ ID NO: 33965 - DNA, 283 bp, Zea mays
  Clone ID: MRT4577_130982C.1
aattcggcacgagggtgcttcggttctgtggaccccggcggcagccgagcagctattgtcccgtccgtaaatcgactagccggtgtctctggcatggcattcctcatgtgattagctttatactggagataggagaacccacgctctgactgatatgcttcgtataggcgagtgccgagcagggacatgttgcgtgaaaatgagcacgatcatgtctctaggcgcagcacctggggccaatccccaccttcttattgtggacatgggaagttcttcactaact

SEQ ID NO: 33966 - DNA, 160 bp, Zea mays
  Clone ID: MRT4577_130983C.1
aaaaaaaaaaaagaaaaaaaaaaaaaaaaaaaatgacaatcgataatacaatgatacaagctcaaagactcgggcatccaacatcctaggtcttacatactgtaacgtaaaaccaaatcactgttcagtgacctacaatatacaaactggtaacaaccat

SEQ ID NO: 33967 - DNA, 409 bp, Zea mays
  Clone ID: MRT4577_130984C.1
cggacgcgtgggcggacgcgtggggttctagatcgcgatctagaactagtctgggtagagtacactaccgaggaagctggaggtgctgctctaaaagcaatgaatggacagatcataaacggttggatgatatgacgcgatgctgctaaaactagatcgagagaccgactatctggcggatctaataaagcatcacgaccacactatcaggctacatgactgacatatgtacagaacttacagatggcgagttgagataagtactagagccaggaatagctgggggatgccgagccagctgatctgattgtacttcattgccatcgtcttgtgctaactgctcgtaaatgaatactgccagcagacaattatgtaaatgcagctgaagtgaacgattactaacttgtac

SEQ ID NO: 33968 - DNA, 418 bp, Zea mays
  Clone ID: MRT4577_130985C.1
gtcggcaacgggtgcattaaacaaatcattgggaggatacgaatcctctttacactcgacctgacggatcaaccaatccctgcctacaaggctctgtaacccccgccggctagtgaaaaaattgggtaccaacggtcaggctaattgctcggctccatgtacattgggggagggggaagactactaccgctgctctggagcacaggtcattgtacaccgtcctcatgctaggcccctaatttacaggggggcaggaccttgagcagaccatcaacaggtcgcacatgaccctccgagactctcacagggcgatcatgtgtcactaaaaacactacgggcccaggccttccattctgcacatgagtacccagtcgggcttgacaaccgcgccgaactggactagagatgatgttctcac

SEQ ID NO: 33969 - DNA, 132 bp, Zea mays
  unsure (1)..(132): unsure at all n locations
  Clone ID: MRT4577_130986C.1
aaacggnnttgtntttttggaaacaaaaantacaccaanctcatggttatttatntaaacccaaanccatccaccancaaganatacannnnanatccatancacaaanncnaacaattantacaaaatata

SEQ ID NO: 33970 - DNA, 372 bp, Zea mays
  Clone ID: MRT4577_130987C.1
ggctcactgaccggggccgccgcgaggctgcactcgtgcaccggctctgcaagggagggtcccgacaaggtctacggcgccgtgctctgcccggcggtcaccgggggtgctgactgggccaggcgcttcccgaacgcccttggcgacatcaccgacggggacagcggctggccttgcgcgctgcacagggacgtggacaggtactccgagttgtaccagctgcggttctacgacagggatttcctcagagacttcatcaacgcgctcaaatgggtcgacgatacgaacccgggccccgatgccgtcgccgtggccgttcgggtggacgagcggttcacggagctgctgagcgcgctcgttgacgcgctcgct

SEQ ID NO: 33971 - DNA, 407 bp, Zea mays
  Clone ID: MRT4577_130988C.1
acatgcacaatctataccttattattttacagcgatcggcacatgacagacaatgttgaattatcactatgtacctttaaggtggccaggaggtgcatagtcaagtcgtgacacactagtgagtacaattccatgggaacagtacgcgggggctgcgcatgctatatataggcgcaggacccttcctgggctaaatcacatccatggcctggacattcattaccgtctcatacaaaaatgtataaggactggataggctcctaccttctaaggcagggtctttcacaccgatcgaccccaagctcttttgctcgtacgtcatgagtatggaacacctctgccactatcttttccttattatatgcgacatcccaatgaccctgcaccatagccatacttgtaagaca

SEQ ID NO: 33972 - DNA, 390 bp, Zea mays
  unsure (1)..(390): unsure at all n locations
  Clone ID: MRT4577_130989C.1
gcatgatccggcctctgtgcttcattacgggagcacggtctanctacctggtgagcgagagcgagtgatgaaccatggttgttttgtccctctcgcagggcgcgtccggggtcgggctcggcaacttcctggagatggggccgctggacgtggacctgaagccgcgcaactcgacgtggctccacaaggccgacctcatctttgtggacaacccggtcggcacagggtacagctacgtggaggacgacagcctgttcgtgaccagcgactggcagcaggccgcggacatgacgacggtggtcagggcgctggcgaaggaggtgcccaccctggcgagcagcccgctgttcctggtcgccgagtcctacggcggcaagtacgccgncacgc

SEQ ID NO: 33973 - DNA, 268 bp, Zea mays
  Clone ID: MRT4577_13098C.1
cggacgcgtggcggacgcgtggggttgtcaaaacggggcctcgacttttcttgtttcatgagcgttggactaactcaaaagtggctcagtcgtaccaatggcgtcattgatctctctaggacattcaagaaaaagcagtgtttgcacatgtgtggtggatgcccacaggcacaaaaaaatatgtgttcacctatagctgatccaacttgtactggcctgataaattaggacactatggactgttatgtaggtccttcatttttaattc

SEQ ID NO: 33974 - DNA, 1895 bp, Zea mays
  unsure (1)..(1895): unsure at all n locations
  Clone ID: MRT4577_130990C.1
gcatgatccggcctctgtgcttcattacgggagcacggtctagctacctgatgagcgagagcgagtgatcaaccatggttgttttgtccctctcgcattgggtccctcgaggccggccggggcccagcgcgcctcacagcgacacccaccacgcccccggtcgtgcatcatcatcatcgctcgcgtcttcgagttcgaggacatggacaggccgcgttgctactccccgcttgccctgcacctcctcctctgcctcgtctcgctccgcgcctgttccgccgcgtccatcacagccggcacccccgacgagtcggagctgtgggggtacgtcgaggtccggccaaaggcgcacctgttctggtggtactacaagagcccgcagaggacgtcgacgccgtccaagccatggcccacggtcctctggctgcagggtggcccgggcgcgtccggggtcgggctcggcaacttcctggagatggggccgctggacgtggacctgaagccgcgcaactcgacgtggctctacaaggccgacctcatctttgtggacaacccggtcggcacagggtacagctacgtggaggacgacagcctgttcgtgaccagcgactggcagcaggccgccgacatgacgacggtggtcagggcgctggcgaaggaggtgcccaccctggcgagcagcccgctgttcctggtcgccgagtcctacggcggcaagtacgccgccacgctcggcgcgtccatcgccagggccgtccgcgctggcgagctcaacgtcacgctcggaggtgtggcggttggagatagctggatctcgccggaggatttcacgctttcctacacaccgctgcttctgagcgtgtcgaggctggacgacaacgccggcgacgaagcaaacaagaaggcggagacggtgaaggagcaaatcgtggcggggcagtgggccgcctcgcagaagtcatggggcagcctgctagatttcatcgacacaaagagcggcaacgtcgacgtttacaatttcatgctcgactccggcatggacccggtggcactgcccgtgggttcttcatcactgatgagcagcttgcaggcgatgaagtactcgacgtacggccaggactcccagcctggctccaacaccattgacggcatcatgaatggggtcatcaagcaaaagctcaagataatccccaagaacttcacgtgggggcagcaatccgactcggtctacaacgcgctggtcaacgatttcatgaaaccgcggatcgatgagattgatgagctgctgtcttatggcattaatgtgacggtgtacaatggccagctcgacgtaatctgctcgaccaacggagcagaagcatgggttcagaagctcaaatgggatggtctgaggaccttcctgagcctgccaaggcagcccctctactgtggcgccagcaagggcaccaaggcctttgtcaggtcccacaagaacctgcatttctactggatacttggagcagggcactatgtgcctgcagaccagccctgcatcgcgctaagcatgatcagcagcataacccagtcgccagcaagctagttcactgactctatgtggtgtatgccaagaacaaaggaggcgttcaagcaggtagcgcaaggtcccggaggaccattcggcgttcttgaagtgcggtataggttggatacctgaaagacgatgcagttgacaaggacattttttttacagaaaaagatccgataaaaacatatatgatctacgtattacaaaatattgtaaagaggccggaacttgtttttttaataatagaaatgtatctggcttcaaaaaaaaaaaaaaaaaagcggcctcccgtaataaagcacagagnccggatcatnncgnacgagntgag

SEQ ID NO: 33975 - DNA, 408 bp, Zea mays
  Clone ID: MRT4577_130991C.1
gagctttctagtcggcggccgccgaggatgagcgactgcaggttgacaaggttgccaatggtgctcgggagcttctccaggtggccgcagcggagacccaggtacctgctcatacgaaaaatgcatgaccagacattaatctagcctctatatattctcactgtaagttggaatgggttgaagcgtttctaccacacttctgtggccgcaggctgcatgttcatatatatgcatcaaggctggacgcattcagcttacagagggcaaccgaatcaatctattgatggagtcctatcaatacacatggctggaatatatcctttctatctataggagattgatttcggtgattgaagaatacatgcagacatacagagaaacttctagaatattacctctaacaccccc

SEQ ID NO: 33976 - DNA, 571 bp, Zea mays
  Clone ID: MRT4577_130992C.1
ggggttggaaaaaagggaattttttaaaaaaatttttcaaatgggggggacctaaatacctttaaccctggggttggttaacccaaacccctattaccaggtcaaaagtaaaaaaaatgggaccatgggaaaacttgccagggggaattatttcctgccattttggggggcaaacaaaaaaactaataaatccccccttcctttcaaagttcacctttttccagctaaggggccccttttttttaacaaaaatttgggccctttttatgtttttggggccggttttcattttttgaattggacccaggggcaggcttccaaaatttttgggaaccactgttttgcccccaaaatttttaaaaatggtttttatcacccctttaaaagcttacataattgggggcagggggacccccttaagggtccttttcttaaacttaaacccttttctaacctttggccccaggggggttaaaatcacccccataaaaccccttttaatttttcctggaccaacccttccctttccccttttctctccccccccggggggcctttttttttttttggg

SEQ ID NO: 33977 - DNA, 598 bp, Zea mays
  Clone ID: MRT4577_130993C.1
tcgagttttttttttttttttttttttttttttttttttttttttttttttttttattttggcgggggaattttttttcccaatttttacaagttacaaaatttttttttttttttttcgggggggttttaggtttaaaataaatgctacctaaaaaaaccttcctcattaaaaagtttaggggggttccttaaccttataaaaaggccgacccccccggcctttaacccctttttcagcagcccaaaattgggccctgaaaaacaacggggaataaacccctgggtttggaattcctcaccaggttttccccgattaaggaaaaaactttaaggggtttgctggataaataggagtcagggagaggttttaccaaaaatcaatttttttttttgcaaaagtagtttattaacgggggcccttattttaaattttttaccccctttttaagttttaataaacccctttggcatttagtctaattcccatctaataaatacaacatcttttttatccatagggtccacatcctgactttaggtggcggggcagggaccaatttttttaaccggaaaggccgggaatctgaatcgatttt

SEQ ID NO: 33978 - DNA, 180 bp, Zea mays
  Clone ID: MRT4577_130994C.1
aactcaataattatttccggcttgtgctatgttgccctttttgtgagcgcaacaaatgcgtacattattgaacaatgctgacttgctgctagggccattattaaacagcaaaatcctacctattactttaatgggttttgaacacttagcttttcaacctaccaatgaccagcaagcttt

SEQ ID NO: 33979 - DNA, 733 bp, Zea mays
  unsure (1)..(733): unsure at all n locations
  Clone ID: MRT4577_130995C.1
aattcggcacgaggaccaccaccagtcgctcgcttttgcccgccagccagaaccctcgcgcgtgcacgtcgcccgctctgtctcgccccgaccccgcctgcgccgcccccgtgtccagcaacaccatggcggccgaagtaggcgccaacgaatctgtcgaccccaacacgctctacaccaagcaggaatgcataggcggcggcagctttggcaaggtctacaaaggcctcgaccgccggaccggccatacggtcgccatcaaggtcattgacgtcgagaatgcagaggacgaggtggacgacatcatgggcgaaatcatgattctctccggcatgaactcgccctatgtcacaaagtactacggctcctacctggctggcaccgacctgtggatcgtcatggaattctgctctggcgggagctgcgcagacctcatgaaaccaggcatcatagcagaggctgagattgctgtcatcctaaaggaactactcatgggcctcagctatcttcacgacgacaataagctgcacagagacatcaaggcggcaaacatactggttgggtcaaatgggcaagtgaagctcgctgattttggtgtctcgggacagctttcggccacaatgacgaagaagaatacctttgttggtacccccttttggatggacccgnagtgatcaagcagtctggctacgacggcaaggctgacatttggtctcttggtattactgcactc

SEQ ID NO: 33980 - DNA, 193 bp, Zea mays
  Clone ID: MRT4577_130996C.1
catctactgcatgatgctgctcgtagcgtgccgccgtcgcctcgccgacgagcactcgaagaacgccgcgttcggtgacctgggggacgccgtgtacggcgcgtatgggctgttcgccgtggacgagaagcctgagcacagccaatgcatcagcggcgtcggctaccgcatctgcatctccaacaccattgtt

SEQ ID NO: 33981 - DNA, 841 bp, Zea mays
  unsure (1)..(841): unsure at all n locations
  Clone ID: MRT4577_130997C.1
ggccgggccgggattaacaagtgcgtagtttggtggtagcaacgatttaacgcaagtcgcaggtccctggttcgaagctccgcgggcgcacctcttttgtcagcagaagacagcgggaaagtgacggcaggggcagcacagcagcactcctcttcgtgcggcgcggcgctgcgcggccaaagggacagcgcagcgaagaagactcttgccgtccatttcaacacggcaagcgaagcgagattctctgctccattgactggaaccgccacgcctattcgctagtgctggactccactttctgtcgttttgactgcgactgcttcatccactcgacgcactcgtccacggttccgtccggatgcgcaagctgccacttcagcacacgttgttgctgcaataacaaaacagggaggggggggcagagcagggtcagcagcgtacccattttcctatcagtggacctccggacttgacctgcatgacccccataatcgatttcccgtcgagtatcggcttcagcttccataccccgtcaagatctggaagagagaaccagtaaaaaccagaaaagctaaccaagcgtatgaatgaacaaagtaaatctcggcgcttgcagctcgtcatgctcgttgagggtgccagcagcggtttcagtttctcggtagaagagaatggatagaagcagcgccacccgccaaaactcctttatttctcggagtataagccctgaaatgttacagtgaaaagaatcagatgcagcggttagcanaaacgcaagtactgtaacgaaccanatgcgtgtatcatgacattgaacaatcnatgaagaacactgaatgat

SEQ ID NO: 33982 - DNA, 359 bp, Zea mays
  Clone ID: MRT4577_130998C.1
attcggctcgagcactatacaggcaattactttgctggaggggatctctgtcattggttcagggttaatgttatgcgatcggacggacagacagcttgaacactccagggacgacattgcttaacagaacctcgacaatgtaagatagtggacaaatgagtctggttaaagactagagcctctatactccaacgggtagtactgtgcccatggactgggtagtatggacaactcaggagagagagaaaacatacacccttacgatgcagatgggcagaggtaccctactttattccagacttaagactatgtgctcaccagaggtcaacacgcagatcctagctgagggcagcatctat

SEQ ID NO: 33983 - DNA, 550 bp, Zea mays
  Clone ID: MRT4577_130999C.1
acatcaacgaagcgagtgctagataaattaatgagcggggtatagagtgacatactaagtactccagtatatatcacggggttcactccaactacacacaggcactgctttgagttgtgaccaaggggggaaccaccctatcctgggagagtatggggtacacaaacgggtccagcaaaatgcttaccaccattaggggatcctccgtagcaaaaaaaggggcatgagacctgagaagtgtcccttcacactgaggaaaaatatgtgaggtgtgaaatgggaccgggcatcatatcggcttctgggcgatttcctgtgcgtttttcaaagaaggaggtgggtgtcggacatcattattgcgttgagccaacgtgaggtgcaacagtatcctgcgacatgtgtctgccaatcgtggataaggaggtgcgcaaaacaaaccaacttctgcgggactttcaaagggggcggccacaggttgtgcgatccgggtgctccgaagcttgatttcctcccgcggacttaactcctcttgcaggttgggtgccatgac

SEQ ID NO: 33984 - DNA, 1624 bp, Zea mays
  Clone ID: MRT4577_13099C.1
tgggtacctcgaggccggccggcgttgcgtctcacgtccgcgtagtagatcgcctgcgtcggcactagggagtacctgctctctcgctctcgcccccattgccggcagcatcagaatcgccaccgaaaattccccccaaaaaacaataagcacttgttcatcatcatcagagtaaacacagcagaaccctagcgcgccgttcctccgacgactcacatcccacccactcacccaccccatggcggccaagctctccaccagcgccgacgccccggcctcggtgcggctctccgcagcagcgcaggcggctgcgatccagccctcctccccgcgcttcttcttctcctcgctggccgggaccaacccggcctccccgcatcgccgcatcgccattgccgtcgatctctccgacgagtccgccttcgccgtcaagtgggccgtgcagaactacctccgccccggggacgccgtcgtgctgctccacgtgcgccccacctccgttctctacggcgccgactggggttccatcccggtctccgtcgctgacgaggccgacgctgccgaggacgccgccgccgccgccgagggcggcccctccgaggaggagctgcagaagaagcgggaggaggaatacgacgccttcacctctaccaaggcgcaggacctcgcgcagccgcttgtcgatgcccagatccccttcaagatccatgtcgtcaaggaccacgacatgaaggagcgcctctgcctcgaggctgagcgccttggcctgtccgctatgatcatggggagccgcggttttggggcctcccggaaaggcagcaaggggaggcttgggagtgttagtgattactgtgtacaccactgtgtatgccccgttgtggttgttcgctaccctgatgatgctgcagatgccagtggagatgcatcaggggcgacagatgagttgcacactgtaccagaggacgaacctgtttatcacgatgcgcctgaggtgcagaaagaaaactgaggcaatggccgcaagcagctgaagaacgaaggaaaacatggggcctgtagtgactagtgaggcgattctgtgtatctgaaagatgggactggctgtttatcttcgcttctgtatatcaactgcgtgtcatgatcagtggctgcttcgcgtttgagtttcatatcggagtcctagatcatcgaagtctttgttggtttgcttgtgagatgtttatgttgtgaacaccatgtagagtactcttctcgtaggtagaagctgccttgaagatgcttatgcagttatgctggggtctgggctctcttgtcttgttttgcggagccggtgatgagctttatgttctcaaatggtagttatctacacggtattatgtgctctgttcagcctgtttactgtattgcatattcgtcaatggagaatcactacttattattccctgtaaaaaaaaaaaaacaattgcttagagctagtttgaaaatctcatttttctatgggattttcattttctcttgggaaaattggaattctttgggaaaacggtgttttcaaactagccctatctatgcttgcatgctctatatttgtattttgtaagactggcatttgacgaatttttag

SEQ ID NO: 33985 - DNA, 502 bp, Zea mays
  Clone ID: MRT4577_1309C.1
gggggggggggggggggggcgtgtctgtgcctcccctcaagttgggaaaccgggcctcttccgtggggattctttttttttttttttttttttgtttgtgtgtttacagtagggattgtaagaatagggtgggagggcggggggtagcggtggagtgcttgtgtgggggcgcatgatgaatggacacgtttcatcagacgaagacatgcttttaacttacgctcgatagttcaattgttcaaagcacgaagcagcaggaagctgctgagcttgaagataagcacagcatcaagcggaggatccttgagtacaatgagagggaagaagaactgaatggagcatcccatatggcgaactagtgccaaggagctaccagaaccagcagctccttgtcaaggcattggtatctcccatgaccagtggtataattggcttattttcaaaccagggtgctatatgcaattcgccatcaagctgagataaacgctgttctcatttgata

SEQ ID NO: 33986 - DNA, 131 bp, Zea mays
  Clone ID: MRT4577_130C.1
ccggccgggatcactcattaccaacaggcggcctagcgctgcgacgtgtgcatatacagcgatggtggttctagctccatccgggagtatgagcaccaagctcatcttgtctggatcctcccgctacgcta

SEQ ID NO: 33987 - DNA, 419 bp, Zea mays
  Clone ID: MRT4577_131000C.1
agaatctggaaatgttacattctagtattggttggtcggatacattatacggaatggtacatgtgggagttccagcttatcattattctgagagcgggccctgctaattacatggagtgggtacgtggctgggggccatgctaaatcacgttggaccaagggcaacctaagctgaggctggtagagggttgttgagttagccgccaactgatacaggaaaggccaacactgacgcttagttatgacggtagatcaacgagcaaagcctagcactcgtattgtgatgattttttgcgggtgaacgtacacaatgcttactactgaaagtcaatacgatacaacgaacaggttgggtggacagagaacactgacacgataattgactacttgggcttaggctgccctctggatcaggaaga

SEQ ID NO: 33988 - DNA, 172 bp, Zea mays
  unsure (1)..(172): unsure at all n locations
  Clone ID: MRT4577_131001C.1
gctcgcatatccagctcccgtcgagcgcacgtcgtcactaacaactatctacccagctcccttcggttcaggagctcgatttcccgcgcgccgtctgccaacgagatggccgtgctgtggaagggttcggcgtcttcgccctgtgactggccggcngcagctttttccaccg

SEQ ID NO: 33989 - DNA, 1207 bp, Zea mays
  Clone ID: MRT4577_131002C.1
ggcgagtgacacacgcggcagtgcggcacgcctactatcttgcgcgcgtgcggccggccggccatggatccgttctacttcggcccggaccagctggatgccgccgccgccgtcgacgaggactacctgacgagcctcggcctggtggtcctctcgccggagccagtggcgccgttgcctggcggcgcatttgaggcgtaccagcggcgtgcgccggcgttgctggagcactccctgcagacgatgagccggcggtacagtggagagcagaacatgcaccggaggatgttcagttacctgagacgcgtagctcatgacgccggcgccgccgtggtggcggccccagcgttcccggcgcccgcgcgcgagagcgttcccggcttcggggttggcacgtcgcaggcgccgcgaagctcgcggttccggaacatcatgcgcgagcggctgcggcgggagcgcctcagccagggattcgccgacctccacgctcttctgccccacggcgcgtcgtcaaaaggtggcaagaacgacatcgtcggcgcggcggccggctacgtcagggagctggtggccaggaaggagcagctcagcgccaggaaccaggagctcctagagaaggccgcgagccgctggaagcagcagggaggcacgaggagtggtgtcgggcggggcatggtggtgaaggtgcaagccgagagccaagaccattcgatggcgcttggtgcgtttgtgagggtgctccagcggctcaaggccatggaggccgggctgcaggtgacggcgatccggacgcgcttctccgcgggaggcgtgtggatgaacatcggagtggaaggccaggtatccgcttgtgatgtggacaagtcaataacaaacgccttgatagagctggaggggaacgatccaagaagcagcaagcccagattcagctgtcaagtcgaaactgtccagatggattgatcttgtttagttgtcgatcaaaatatagtagcagctagagatgataatctatctgctgccgctttaaaccaattattcagaatgctgcagctataatttataggaacaaaatactatagaaaagtaaaggctggtggattaaagccacaacgaagaggctggatctttttccaacatctgctgaaacacaagcggaagaattcaatttataccattcttaaacatggtggatctaagaaacaccact

SEQ ID NO: 33990 - DNA, 534 bp, Zea mays
  Clone ID: MRT4577_131003C.1
cacgcctgcgtgaagcctggctcgctaataccagcggtcgacctcagcgtttcgtcaacaagtcaacataacaaagagagaatgcaaaatgcaacatacataataacagtggggaccaatatattatccataattaatgcttcttgctatttatgtatgtaggtgctaaaacgaacaagtcacccctaaatgatcacaagctgctagaggtcccttgttctgccataccttgcatgacagatggctcaatttgtgaaaacccagatgtttacgcctattagcctccaacatagcaattagcaaagaggcaacatacctttatgaccctagaggattcaacaatggtcaaccctattttttgagcagtcattggtacaaatcatgaagacacacaagctgcagaaactcgtgctacctgtgatacaaacaaatagctctggcaaacctttctgcctactctcagcaacaacaatttcttacattctaccaactgtatacactgaagcctgctgcttatttgcagcaacaactaat

SEQ ID NO: 33991 - DNA, 756 bp, Zea mays
  unsure (1)..(756): unsure at all n locations
  Clone ID: MRT4577_131004C.1
ccggccgaagctcctgcttggcgtccctctctgctcgttctccctagccaagcggatctcgtccatgctgctctctctctcctgcccctcccatggcgctcgcctggctcgccgcgcgcccaagcatccgctcatccctgcgcgtgcttcttccccatggcgagctcacccatcctctgctcgttcccatggccgtcgtgtgcagccgcgagctccagtcttcttctctgccccgcaatccatggcgcccgattgaagctccttcctgctcggcgcgcgcccgcctccctgcgtgctcaccgacgctgccttcctctacttctctttcttgctcggcctctgtcctctgcgcagcgtgcgcgcctggctcgctgcgtgtccaacctgcttgccggagctcccatcgccgcgccaactccatggctgccgtgccctgcgcgcttggccctgtttctccatggcgctcagccgcccttccctctgctcctccctcaccgtagccccaggtcgtcgagcccctgttcatctccctgcgtgtgccgcgacgctcggctccagctcgccggtcaaattctctatgtcgcgcccagctcggattttgccgcacggacctcgnccgtcgttcttcagctcgccaaatcgcgtccttgttcctctctgcgcgcgcgtctgctctttgnccgtgatcctgcgttntctgctcggtccggcattgtttttagttgacgggtcaagtgcgccccgttccctttgtct

SEQ ID NO: 33992 - DNA, 203 bp, Zea mays
  Clone ID: MRT4577_131005C.1
aagactcttctgtcgatggggcggtacattacggagcagcaccaatgcgaggacgcattaatcgcgcgctgcgtggtacacgcgtctagaccgcagcattccgtgcgtgccctgtccacacacgcgcgcgcgcggaggaattaaggtgtagtgcgccagaggatgagcgtcacttggtagtgggacattttgacccaggcaag

SEQ ID NO: 33993 - DNA, 420 bp, Zea mays
  Clone ID: MRT4577_131006C.1
aaaaacggaagccacttatggcccccgggggcctttttttttcaggggaattcccccccccggggggggactttaaaatatgcccttgccccccccctgggcttttactccccccaaaaaaataaaaaaaccaggcctgaaccattttttccgaaaaccgaaaattgtaaagcaaacccccccgaggcctcgctaaattggcagaattaatcgttacgggggccccccaaccccaattaaaatagggccggtcacccacccccccccccaaacgcaaatttctcctgaccacttaacagtgagatagaagaaaaccccccccccccccggtaaatccctaaaaagggcctgccccccaggggggccttattggcgccgccccttgaaaccccaaacccacttggggggggcgggggcccc

SEQ ID NO: 33994 - DNA, 860 bp, Zea mays
  unsure (1)..(860): unsure at all n locations
  Clone ID: MRT4577_131007C.1
ccggccgggaaaaatatccttaaatccgtaatctaatncatcatccanntcctcacacatgagagaagtcacctcaatccatgtcggtcaagctggtatccaaatcggtaatgcctgttgggagctctactgcctcgaacacggcatccagcccgatggacaaatgccatccgacaaaaccatcggaggtggtgatgatgctttcaacaccttcttctccgaaactggtgctggcaaacacgtcccaagagctgtcttcctcgacttagaacccactgtcgttgatgaagtcagaactggtacctacagacaactcttccaccctgaacaactcatctccggaaaagaagatgctgccaacaacttcgccagaggacactacaccatcggaaaagaaatcgtcgatctctgtcttgacagaatcagaaagctcgctgacaactgcactggtctgcaaggtttcttggtgttcaacgctgtcggtggtggaacaggatctggtctcggatctctcctcctcgaaagactctcagtcgactatggcaagaagtccaagctcggtttcactgtgtacccatttcctcaagtctccactgccgtcgttgagccatacaactcagtcttgtccactcactctctcctcgaacacactgatgttgctgtcatgctcgacaacgaagccatctatgacatctgcagaagacaactcgacatcgaaagacccacctacaccaacttgaacagactcgtcgctcaagtcatctcttctttgactgcctctctcagattcgatggagctttgaacgtcgatatcaccgagttccagactaacttggtgccataccccagaatccatttca

SEQ ID NO: 33995 - DNA, 148 bp, Zea mays
  Clone ID: MRT4577_131008C.1
tctccgtctcagtctccgtctcgatccctccctccagacaagacacctgcgccgccgcccccccgccagccgacccgtccataccataccatacctccgccgctcgctctattgtcccttccccgggctagattccgcggccgtgctg

SEQ ID NO: 33996 - DNA, 637 bp, Zea mays
  Clone ID: MRT4577_131009C.1
gcaacaaaagctgaaaaacattaaggccggcatgctatagtgtcacctaaatcccttttttttttttttttttttttttttttttttttttttttttttttttttttttttttttttttctttttcccaacaaaacagcataaaggggcaaggcttacttttaattttttgagctggaaggaaacaaaaaaaaaggtttgggcctttaaacttgttaaaaacaagtaaaaaagctgattggcctttgccaacggccttttgggaaactacaaaaacgggtaacagtttttttaaaagaaaaaaaccgggaggaggggggggaaccaataccggccctgccttgtttggccggtttttaggaaatggaaaactcagcagggtgggggccgatcatttaaggtttgatctaaacctggttaaacgttttgccgttgaaaaccccaaaattgtttccaattttttaagggacattgttctttttacggaaatgggttttgactggctttggtttccaacaagaagaaacatcttttttcgccttgcccaattttttgaaaagggccaggggcttccttttaaaacccctttggaaccttttcctggcccccccgggaaaaatctggacaaggtcccccgg

SEQ ID NO: 33997 - DNA, 641 bp, Zea mays
  Clone ID: MRT4577_13100C.1
agattctagccggtcagacgacttcgttgcgtgggctccggatcctcaatagactgctggctccgctgccttcgtcccttcacgtccgtctccgctgtgtccatccgctcggtagccgacgacctccgcgctaggactcgcctccggctggtctggattcttcgacacctgtgcgctccgcatcgccgacttcgctcatggggatagcttccttgatagacctgatggctatcgcagactagctgtgttgatgctgatgggcatcgtagatgctagcaggctactgcggcggactctacgctgcctgaacgaagcttgctgtccgccgtgtctggggcatcgcgttgcacgtcgtgctgcagctctctgagagatataccatgcagcgccctcgatttagtgatactgttgatgcaatcaagattgtctgcaccgatgtttgatcagagctgttcgagaaacgagattggctatgctgaacacaactgacagggatacctttgacgttctagataaccgcgcctctgtggctcactcgtgtttctctagcatcctcctatagataacactcgattcaactgaaaatgatgcgtgcagtatctgggtgacactgcgatccatacgactaccatgcttctgca

SEQ ID NO: 33998 - DNA, 331 bp, Zea mays
  Clone ID: MRT4577_131010C.1
tttttggggttttttttttgttggttatgatttacctaaaggagccttaacatttagacgaaaaagaaaggggaattccgaaccaaactagagaacaaacaagaagacacaaacgtgccgagaatgaaaaaaaatagccctaacaaaaaccaagacagtcacataaggaccgaaacctcggaaaaagggacaaatatggctgtgaacattaagggaagaaaaaaatcaaggggggagcgggtggagcctcacatctgagctgcaaacgccgggaagggaacaaggtaagcaaggcggcatatggaaggccaactttttacggatcaccaag

SEQ ID NO: 33999 - DNA, 400 bp, Zea mays
  Clone ID: MRT4577_131011C.1
cggacccgtgggctgtttaaatccacggtgctaaagtttagcactacacttttaataaactttagtacatgtaaatccaaacacgagtgttaaaaggtgctaaaagatgttaaaagtgaagtgccgaagtttagcacctgtcagtgtttggaccagtggacctaaccaactagtgaaatagtgtcgcgtgtcttggatccagatggtgatgcgagttgacacaaatgatttatcctggttcgggctatgaagggccctactttcagcagaggaaggatgtggattatattactcgcaccaaaagtgctcacagtaggggttacaagcacgacgggagagggtaggaccctaagtccctgagagtgattgagtcaagtgccaataccgtatgagagagaat

SEQ ID NO: 34000 - DNA, 302 bp, Zea mays
  Clone ID: MRT4577_131012C.1
acgcttccttgttagacgaagaaaccctcctccttttttccccctatccagctacataccgtttaggcccgtgcgtttcttccctgttctcccatgcaatccacctactccttacgccgacctatttgcttcctctatatccatctggagtctgttaagtgctcttttgctctgcgcgcactccagcgtcaggagcagttagccgtctatgttcgatccgttcgcatccccaccgcggattgattttttaggaaagagcgtgatggtcaagacaagctcgtttttttttttcaccccctccc

SEQ ID NO: 34001 - DNA, 352 bp, Zea mays
  Clone ID: MRT4577_131013C.1
cttaccttgcttccaccaatgggaggctcaacgctttttggggggggagaaccgccgctgctgaacagaggtggaatttgcccttcgactggacccccaaagtcacctaaaacccaagccctaacaccaccgtatgcggaaaaagctggcccaccctcagcaccatatggaactcgaggagagcaatgatcgcagtacccatctaccgaacgcccatccctcgaactctacacccctcctctagcctaaagacggtgctgctgtcgagccaaacaggccgacagggtatcttaacgctattcccatgatactctgcctgcactcaacattccgcaacaacccctactttatc

SEQ ID NO: 34002 - DNA, 591 bp, Zea mays
  unsure (1)..(591): unsure at all n locations
  Clone ID: MRT4577_131014C.1
ggggaaatattgtgcgtctgatagggtgatttctctgtgtaaaaatgaacgatatgcgagtactgcagaatcatgtcttattcaatnntgccatatactctttttaagcattttgcccaataggnnatggattatgctggggtaaattacctgtgatatnggtttttaaatgaagcagagggagtgaggtttggctttgagtatgccagtnncagttgttttttccaggggcatcataatatnggagtttcataacctcataggagccatctagnnctcgaattctctacnncttcttatgctttgatggaccataaatgaacccctgttggaagatgcttttggattaaatatttcttgatgcatgcttgcctcactttgggtttggcttttcattggatacccctcagttgtnntgttgtcgttaccagagaagtgatagcccaacaccctgtaaattggtttttgatgatagattagctcaagttttacccgccaggcatttgtattatttnnggcttcgtacatacccttgatggaacgccgttgattgttgctacctaaaacctgaaatagggaagtaaacattgt

SEQ ID NO: 34003 - DNA, 115 bp, Zea mays
  Clone ID: MRT4577_131015C.1
tcgagcctattttccagtaaataaagggggaaaatcttctcaagaccatcttgagtattagcataaccatcatctatttggtatttaggttcaaagctacatatccatataaaga

SEQ ID NO: 34004 - DNA, 598 bp, Zea mays
  unsure (1)..(598): unsure at all n locations
  Clone ID: MRT4577_131016C.1
gtaggaaacgctacaccaggaaggcagcccggccgccgcaaggcccaagaagctatcccattcacaaactcgcatcataccaacatgacgggtctattctatagcgtggacaaggacaggtcgaggctgatctggctcccccacgacgtggccgccgtaggcgagagccggccgccctcgtcgccgctgctgcggctgcttctcgtagctagggacagcgagagcgagcagccgtcctcctcctcgtcgtggtcgtcttctgaacccgccgacgacgtccagcagggatcgccgcctgcttgttcggccactgcgggcagcctcggcggcgtctccaggccgcagcgcgcttcggcagaggcgccatgagcgatgagagccgtgccgaccatctcgaaagggtggtcacggctgcagcagggaggagggggaggaggaggcggctgctgctcctgcgccaccacgaagcccgagaatgtgatgagctgctcngctgctgctggtgctgcgacgaagagctggcgcgggcgtgttcgccgnccttgtgcgccgggccgcgccgacgccgnctgcatntgcgcctgccgctttattcccg

SEQ ID NO: 34005 - DNA, 328 bp, Zea mays
  Clone ID: MRT4577_131017C.1
ccaggacgggaatggccaaggaaccaatcaaccaggtaaacaaaattctaaggatttaagactttccggttggcaccaggaatcccacttcgtgcccaaaattggttgtcccatccaagaaatccgccagatgaatcccttgattaatttgatttgtggtccaggggagcatatgctaaaccctaccaagaaatggaaatggggagctgcaaaccaacaaactcatttgattaaaatcgctaaccagtgtgggaatatcctggtcattgaaacatcccgaggaagcaattcgcatatgccatcggcttcccttaaggatttggaacag

SEQ ID NO: 34006 - DNA, 586 bp, Zea mays
  Clone ID: MRT4577_131018C.1
gagctctttctctcccgagcagcccctgctctagctcccactcggcgttctcctcgaagacaccactgcagcccctgcactttggccggcactctgctttacccggcagccatggcgctctcctgctccatcttccatccatggtcagccccttcccagcagccccagcatggtaccccttccctgctccatggacgcctgcacctccttctgttttcccccgcaccgcccttttccccatggtgcagctcggcctccccattagtgcagctccccgtctcctccctgcgtgcgtgctggaaacaaggttgaagaagtcccccatgagcctatgacgaatgggcccagggtcaaatggatcgccggtgatcgtcggacttcagccaccgggacgttacagggaaccggcggactaagcgcggcgttgctgggcggctgtgcgttgtgcgccacctgcacaaaggggtggcggctgcacgctgcggaggtcctcagccgctggcagtttgtatgagtacgcgggtaaagcagaaacacatgcctctctctagattctttgcgcttgcttattatctgtttggtttgc

SEQ ID NO: 34007 - DNA, 253 bp, Zea mays
  Clone ID: MRT4577_131019C.1
ctcccagaccgcctccccttccccgactccggcgcccaaggccaggccaacacctttgacgccgcaaaggaggtacaggctaaccaacccactgtccttcatacgctacgcggtcaggtccacctgagctccagcttctctgaaggtggacggagccgtaacatctgctcttctttctcaccttatgaaaggacatctgccacgccgcactacatgaccccgagcctttggggcccttcaatgtccgttagcg

SEQ ID NO: 34008 - DNA, 211 bp, Zea mays
  Clone ID: MRT4577_13101C.1
gccaaaataaaaacacttgtaacctacgctgaaaaccctggggtaaaaaaactccctagttacaaatgcccacctaaaagggttcccaaacggactggcccaccttctggagcgccctataactcgattcactccatgaaagactccggggcaggagctggggctggggggccaaatgggaggcctccagggagcggatcatggagcggaa

SEQ ID NO: 34009 - DNA, 289 bp, Zea mays
  Clone ID: MRT4577_131020C.1
aacagcttctcttttcattctacacaatttatttatttgatactccctccgtctcaaaatataattcattttagactaaacatatattcattagttaacctatgaatatagtttgtatgtatatctacattcattatcaattattcgaatgtggacggagaactatattttgggacggagggagtactacttggctttatctgataccatttatttattttgctttctacacaatttactgatgcttatttcatacaattattcagattattcaactggagttcagtca

SEQ ID NO: 34010 - DNA, 359 bp, Zea mays
  Clone ID: MRT4577_131021C.1
gcactagatgcataaattgttatatcatggtaaacattgtattagatttgtatgcacaaatttgtaaaatcaactgagaattagttaattctcagtcgaccaagacatagacacttttttatttacacgcaaatggcatagcacgaaatctatgttgcttctcctgagcagctgcccttacttgcaaggatgtggcagcacaggctcaatcagaaattggccattgcaactgtggagatgactttgtacattggctcccttaacagatgtgagcttcttgttgcttcctttcttttctgtccaaattggaaccacttcctgttgagttatcctcacttggaagttgttgatagtgagcg

SEQ ID NO: 34011 - DNA, 451 bp, Zea mays
  Clone ID: MRT4577_131022C.1
aaaacaggggaaccagcaggcctttttattcaaaaaaaaaggggccgccaattcccaccaaaggaggaaccaggccagggctgcccaaaaaccctcaaacaaggaaaaaaaacgggaagggaccaaagttttgggaaaccaaagacacaaaaccccaaaacaccactaaaaatgggaattggggggaaacaaaacaaaaagccggcgaggggtccccggcccgggcttttttttttttttttttccccggacaaaaaaaaggacaagggaacccggcttgccaggctacgggacttaagggcgaaaaaaaattcgaagaagcggggggtctcccccccctccaggggggtaacgtactttcaaaacccggaaaccccgggaaggggaaacaacctctcggagaaaaacctccagggggaccttcaaaaaattctctggaggcccccccggg

SEQ ID NO: 34012 - DNA, 457 bp, Zea mays
  Clone ID: MRT4577_131023C.1
ctcgcccccttgcgcagacccaaaactcagccaaacccctcgcatcttccctcccaccgcatcacgggcccgcttcccttccgtgggtggcgctcctccgtcgcggtctccgccacggtatccgacctactctctcccgcgccctccctcaagtcccgcctcgccgccggagacaccctgtacggtctgttcctcctctccttctcccctaccctcgccgagctcgccgccctcgccggctacgactacgtcgtcgtcgacatggagcacgggccgggcgggatccccgaggcgctcgcctgccttcgcgcgctggacgccgcgcgcacccccgccgtgctccgactcccggaggccagcgccgtctgggccaagaaggcgctggacctcggccccgcgggcctcatgctccccgccatcgagtcccccgaggccgccgcggaggcggtctcccact

SEQ ID NO: 34013 - DNA, 446 bp, Zea mays
  Clone ID: MRT4577_131024C.1
gcttctgttgggcggccgtcctgtcggtcgtcctttttttgtataaagtagccagcaaattcatggcgactattccaagccattttcacactcaaaagttgcttcatgttcttggtgttttaaaacccaacaaactggtttgtaaagccaccgttcccgaataccagctaaatttgggccattttaaacaacaacgctggaacaaggggggggtttttttttcctggaagaaacaacaggcttggagcacaaaaacccgcctccagccttcatttatcaactttgggaattgaaacataatatgcgggcctaacatttagggggggggcttaattaaaaaccggggcaatggcaatggccggcagttttagcgcacacccaccggggccgggacgaaaagaacaacccggggggtgcttaaagataagcttttaaaaattaaaaac

SEQ ID NO: 34014 - DNA, 718 bp, Zea mays
  unsure (1)..(718): unsure at all n locations
  Clone ID: MRT4577_131025C.1
aattcggcacgagggcggccgcatcccggccaaccctcccgcgaccaccaatcaacgctgcgccccacccgcgaccttccttcaacggggcatccgcccgcgaccgcatccaccccgcgtccttccatcaataccgcatcacggaccggcttccttgccgtgggcggcgctcctccatcgcggtctccgccgcggcatccgacctcctctctcccgtgccctccctcaagtcccgcctcgccgccggagacaccctgtacgttctgttcctcctctccttctcccgtaccctcgccgagctcgccgccctcgccggctacgactacgtcgtcgtcgacatggagcacgggccgtgcgcacccccgccgtgctccgcctcccggaggccagcgccgtctgggccaagaaggcgctggacctcggccccgtgggcctcatgctccccgccatcgagtcccccgaggccgctgctnagggcggtctcccactgcncgcagtgccactacccgccgcgcggngtccgcggcgctgcacaccccatcatccgcgccttggagacgaaggcggtgtgccgagccgtggcattgcgcgggcaggcggcgtgggaacgcgtaggtgggcgaacgcggcgaggagcgcgagcgtggaggggggagccgaagcaggcgtgcgcgacggagccggatgttgggtgtgccccgtgcgcgcgtcgcgcccc

SEQ ID NO: 34015 - DNA, 226 bp, Zea mays
  Clone ID: MRT4577_131026C.1
aattcggcacgagggctttttcgtacctctacttatgctcgtgttctgttttatgtcctcacgcgcatgcttgggaggggacggcagatgacatcctgctaggcgcctgcatggtctcctagcgcgcaatccatgcacacgccttccttgcctacgcgcgacgccgactactaggagccgccgtcggtgccgctcttggacgccggacacttcttgctctggtgct

SEQ ID NO: 34016 - DNA, 700 bp, Zea mays
  unsure (1)..(700): unsure at all n locations
  Clone ID: MRT4577_131027C.1
tagggncgannnattgggtaccccttcgagggcccggccgggnaaaaaaaaaaaaaaaaaaaagaaccacgtgctcgatctccatctcgaccgtcgctcaccgggaagctacgctacgacgaagcatggcgtccgtcaccgcccgcgccccggtcgcggccctgcgcccgtcggcgtctctcaagtcgtcgtcgtcgtcggcggcggccttccttggccactctagccgcctgggccgcactgctaccgagatgccgaccaggtgcagcctaaaggtggaggccaaggacaaggggatcccgctccttgcctgccccgagtacttcgagctctgcctgcacggcgacatggggcttgaacccggtatccctggcgggggcccgggcaaccctcagaagggcctcacagccccggccatgaaagtctgccagagcgatgctacacggcgtccgtatgctaagcccgcaagggcaccacaggctggagcgtgacctgcgccaaggagaagaccccgcgcctcagcgagaactgctagaggtcctgcacccgtcttccttcttgaggcgaagccccttgaaatgaatgaaccatgcatgcatgcatgtatgcatgcgccggggtgacgtgacgctcagatcaagcgctgagcgattctatacgtacgtcggaccacggctggtcacgcatgcgataaccatat

SEQ ID NO: 34017 - DNA, 439 bp, Zea mays
  Clone ID: MRT4577_131028C.1
acctggccgaaagaaaaattaacatgcggggcctcaaccctgcacaggggggtgaacagggttttttatctccgggaaacaggaaatgggggggggggggggcaatttacttttcggttaatcacccctcgggatggggaaaaaaaaaatgatgatgattttgagattttaaagcaacagggggggggggagcgtacattggacccctgcctcctccattttcccacacgggtttgttggttttttcccccttgccgggttgcaatcagggttgccccgccttaaagggccctgacaacggttacgattcgggtgacccaaagacgccttaacctttccaagggccacggggggggggggaaccacccgttcccttcccccgtattttttggttgccgaagcacgtttcttatgggtggcggggggagtagtggttggg

SEQ ID NO: 34018 - DNA, 175 bp, Zea mays
  Clone ID: MRT4577_131029C.1
tcgacccacgcgtacggacaccatatttatcattctcattagatgttccaagcaaacttactcctactttccggggcgtggcttttttatactttctcctaaatctaattcacttaccgccgctttacaaattcgtgactaattaaacaatgactttacgaaccttattattact

SEQ ID NO: 34019 - DNA, 699 bp, Zea mays
  Clone ID: MRT4577_13102C.1
ttgggacctcgaccggccgggaccgattccgtctaaatccatcacaatggccgtcggacgcagcgcagccctcaagctcgactggaccaagctcgctacgcagcttggtctcaagggtcaaaccgccgcttccctccaagccttcaagaagcgcaacgacgatgcgcgccgcaagatcgccgtcctctcggagcagtcgcagactgttgacttcgcctactaccgcagcatcctcaagaaccaggccgtcgtcgacgacatcgagaagcagttcaaggcattcaagccccagacgtacgatgtaggaaggcagatcaaggccattgaggctttcgaggcccaggccgtccagagcgcagagcagaccaagtccgtcgtcgacaaggagttgagcgatctccaaaagaccctcaagaacatcgaggaggccaggccattctctgatctcactgttgacgaggttgccgctgcccagcccgagattgacaagcgcaccgagcagctcgtctccaagggtcgctgggccgttcctggctataaggagaagtttggcgatctgtccgtcctctaaacatcttctttccctgtagtccaagtgtacccgatctgggttgtattacctacgtatttgtgaatagttccagagagtggaaatgcaatctagattctgatcataaaaaaaaaaaaaaaaaagcggcc

SEQ ID NO: 34020 - DNA, 246 bp, Zea mays
  unsure (1)..(246): unsure at all n locations
  Clone ID: MRT4577_131030C.1
atagtgagtcgtattaaacaggncaccgcgtagctcgccacggcagccacgatgacagcagcaccagttctgccgcttgagaagctcttcgggcaccatcatgtcttcgcacaacttgaccagccagacctaactcgatgggcggccagacgtgatcacggtcagtcgccatcggccttgcactcgctgcctagatcatgtacatcagcgcgcgtagagtgtagaacgtgtcccacggggttagga

SEQ ID NO: 34021 - DNA, 450 bp, Zea mays
  Clone ID: MRT4577_131031C.1
gacttattttctagagacgcccgccttattttctactttatttttccaacagtatgtctaccgctattgatgcctggaaagcttccgtaaccctaagtcgtcttctactttttagactttgtgtccaacggggcctatgactctcaagatgctaccaccaacccttgtgtgatcctcactgcctataaactgccaacttctggacagctcattggctcctccattaatgttgaaaagggaaagtccgccctcctggaggagcaggccgacaacaccatgcacgctctgcttttcatgttcagaaaggacaatcctcaagaaggtttccggtttactacccatcgaagtctatgcaccgattctccttctacgttgatgcacccaaggctgaagatacacagcacatcggtctgtacaacgatgctgatatttcaccaaaccgatttttga

SEQ ID NO: 34022 - DNA, 148 bp, Zea mays
  unsure (1)..(148): unsure at all n locations
  Clone ID: MRT4577_131032C.1
ccctttatatttttcctgaacccanaactgtctatttgtggattttaaagacnnaaccggccaacccccacaacacctaaaaaaccatccgggaggtggcactcttgctttacttttaccgagcatgtctttccttattaccctagcc

SEQ ID NO: 34023 - DNA, 573 bp, Zea mays
  Clone ID: MRT4577_131033C.1
cacctttctgaatgatctacttgtaatgtaaatcttacctgcgtttgttactttgtgatctcctgtagtatatgggggaccgggctccgcaccctggaagagataagggtgattgcagcatttccgtaattgcattgctatgttcaacagacgtttgcgttctccaccaccattaaccacttcaagatccttctgcagtaaagccttgtagtactgtttttgcatttgagacatgccaactttgagtattgtctccttttttggaggtaagcctttctctacatctgattttaacctccgaagaagaaatggtcgcagaacctacaaagatgaggtaaatgattagcataagaacttagagaataaccttgataaaatatgagtacataccttgtgaagttgttgaacaacttcttgctggtcgttttcaccagaaatttgaaaccactcgtcaaaagtttctgctgaactaaaaacctcagggagaagaaaattgagaaaggcccacaattcatggagattattctgtagtagaaacatatgaaatgaatacaatattaactcaagcaaatc

SEQ ID NO: 34024 - DNA, 191 bp, Zea mays
  Clone ID: MRT4577_131034C.1
acaattttcctccttttccagaaaaagccggaccccaaggaagcgtttttaaaacattgataccccactaatactttctgtctttgaataaacttggcgaataaaattattgttcaatttaacttcaataacacagggacaggatccctatcataatgtatcatacacagcctatcatgggtattagcctt

SEQ ID NO: 34025 - DNA, 353 bp, Zea mays
  Clone ID: MRT4577_131035C.1
ttgcaagttgatattcctgaagccgacatcttagcttccttcacagggggacctgcctcgagttcgtgtcgtcttccattctcgctgaccctgcgatcaacggcctactgttctaatgcaaggtccaaaagcaacaggccgacgcctgggagaggaattttacgatgcgcgacgtgttctggctaactctcgtgctcggaaacgtcggcttccatgacagcccggtcgccgtcgtgtacacgaacaaatccttcactcccggcacgaccgatatgctcctggtgttatctggtacaaagattactgattgagcatatggatcttcgctgagtcctataccagtaagaatactg

SEQ ID NO: 34026 - DNA, 1103 bp, Zea mays
  unsure (1)..(1103): unsure at all n locations
  Clone ID: MRT4577_131036C.1
gccggccggngtgcgacagatcctttttcaaatctcacttgtccggtagtccagtttccacgtaacccctcgctcttcttcagacttccatactaccccgttctcctctcctcttcccccaaatctgcgtgcgccgtggcaaccctagcccccgcgatccgctcgccggagggaaggagggagccccgccggcgtccatggaggtgaagctgtggaacgacaagcgcgagcgggagctcctggagagctacgcggacctgtacgcgatcatcaaggtcacggagaagctggaacgggcctacgtccgcgacctcgtctcagccgccgactacgaggcggagtgtttcaagctcatctcccagttcaactccctctcctcctcgctcgccggcaccgtcgccgtcccgcgcttcgtccaggcgtaccgtctcgattgccccgccgcgctcaaccgcctcctccagtcgggcgtcccggccaccgtcgagctccgcgccgcgtccgcctcatccgcgccggccgccaccgccgcctccgccgcagccatcgcgcactgcgtgcagaccttcatcaccgccatggacgccgtcaagctcaacatgcttgccaacgatcaggtccgccccctgctgcaggacgtcgccacatccatggccaggctcggttccttgttgccgcccgactttgaggggaaggtcaaggttaacgagtggcttggcaagctgcataaaatgggcgccacggatgagctcaccgagcagcaggccaggcagctcaacttcgacctcgactcggcctacagtgcctttttggctgcgctgcccgctgctggtctgtaaccgggcgtggatctggttcgttctatacttctattacagtactatagatatctgtaatttcggtactgctattttattgttaataagaaagttctgttttctttatatactgtaaatatgtttattgcatgatatacattcacatgacaacgcttgcaaatggcctgtagcctgtttacttgggtaaaaaaaaaaaaaaaaaagcggccaaaaaaaaatatgggtataaggtgaaatgataagaagataggtagtggtaggtga

SEQ ID NO: 34027 - DNA, 640 bp, Zea mays
  Clone ID: MRT4577_131037C.1
cctcgaggccggccgggaccagagtccagactccagactccagaggcttggtcaaagacgacttgaatcagttctctcccgtttcctccgcctcgccctcgtatcttcctcccctcctcgatcgccgctccggccatggcgaacgacgggtcgcagagcgcgcgcggcggcggcggcggcaggaggtgctgctgcggcgccctcacgcgcgtggacctcctggtcttcctcctcgccgcggcgctctgctccgcgtcctactgcctcggggtatggcacaacagccgcggcgccgcggacagccgggtcctggcgccgagcgccggcgccaacacctactgcggggacgacgcccgcgagccgctcgacttcgagacgcgccacgccgccgaggacgccgggctctccgcgcctactactacggcggcggcggcggggacgacgagcacccggcgggcgttgcgcggcgccgcggacggcggcgtccgcgtccggctcacgggcgccgtcgccgtccgagcgtaggtccgcgccatgtgcacgtggcctcggcgcgcgtcgctccggacgtcggagttggagcccccccaccccacgccgtgttcccgggtccggggctccatcccaatgaaagtcccgg

SEQ ID NO: 34028 - DNA, 1241 bp, Zea mays
  Clone ID: MRT4577_131038C.1
cggggttcctcagtgaacgcagaacaaccgcgtcgttgtcgtccagtttacacgtaacccctcgcgcttattcagaattctgaaattccaggaaaaaaaaaaaaaaaaaaaaaaaaaaaaaaaaaaaacagaaaagaaggaggggacgtaacccctcgctcttcttagacttccatactgccccgttctcctctcctcttcccccaaatctgcgtgcgccgcggcaaccctagcccccgcgatccgctcgccggaggggagggagccccgccggcgtccatggaggtgaagctgtggaacgacaagcgcgagcgggagctcctggagagctacgcggacctgtacgcgatcatcaaggtcacggagaagctggaacgggcctacgtccgcgacctcgtctcagccgccgactacgaggcggagtgcctcaagctcatctcccagttcaactccctctcctcctcgctcgccggcaccgtcgccgtcccgcgcttcgtccaggcgtaccgtctcgattgccccgccgcgctcaaccgcctcctccagtcgggcgtcccggccaccgtcgagctccgcgccgcgtccgcctcatccgcgcccgccgccacctccgcctccgccgcagccatcgcgcactgcgtgcagaccttcatcaccgccatggacgcggtcaagctcaacatgcttgccaacgaccaggtccgccccctgctgcaggacgtcgctacatccatggccaggctcggctccctactgccgcccgactttgaggggaaggtcaaggttaacgagtggcttggcaagctgcataagatgggggccgcggatgagctcaccgagcagcaggccaggcagctcaacttcgacctcgattcggcctacagtgccttcttggctgcgctgcccgctgctggtctgtaacggggtaaggatctaccagcttgatttttatttggttggttcggtctattatgcttttgacactggagcactactctccactactatagtactatagatatctgtaatttcggtactgctatttgttgtcaataagaaagttttgttttcctttgtatacagtaaatatgtttattgcatggtatacattcacattacaatgcttgcaaatgacctgtttatttggatacatttattctattctctgtggaacatatggacttataactgtttaataaaaaaaaaaaaaaaaaaaaaaaaaaaaaaaaaaaaaaaaaact

SEQ ID NO: 34029 - DNA, 583 bp, Zea mays
  Clone ID: MRT4577_131039C.1
gcgtttctgttgtcaaacgccacgccaagctctttacccttgacgcggtctacaagcacaactctcaagcaggacagctgtctcataatgcgcggcaaggtgtctgatgtgactaattttttggtacaccacccaacagtgatgatgttactgcagtctcatctggtataccttcttgtatctgcctcccactcaaccattcgcctagtctaaagactgcgtaaagcaacactggccgcgcgaatgatggcatgcagttcttgtagggtgaaaactacacgccaactatcccttctagcacgaagtatgttcccccgaaacaaccgcactactaccagcacaagactcccgagtttgtaatgaaggatcctccagtctttggttcccctggccatcctgggtttggctggtgccgttctgatgtacaccaagacccgactctgcttagcttgtgctgcccatttgcccttgcccttctgctccattgtacgactagaacttgatcgaataacctagcaacaccctgtgaggttatattacatgtgcaacttgctacaaaattcatcagatgttctcagctgct

SEQ ID NO: 34030 - DNA, 270 bp, Zea mays
  Clone ID: MRT4577_13103C.1
agagtgggacaacacgagcgccgacctgggcgtgcggtacccgttcagccagccgatgaagctctactccagcctgcggaacgccgaccgactgggcgacccgccgcgggcgcgagaagacggactggtccaacgcgcccttcgttgtttcttaccgggggggccacgtcgacagctgcgaggcctcacaggaggcgcgcttttgcagcacccagagcgcgccctggtggcaccagccgacctcacggacctccaccccgcccaacaccc

SEQ ID NO: 34031 - DNA, 1019 bp, Zea mays
  Clone ID: MRT4577_131040C.1
ccggccgggagaatacctgtgggcgccgtctgaaattccgctgttctggagacttccatactaccccgatctcctctcctcttccccgaatctcgggcgccgccgtaaccctagcccccgcgatccgctcgccggagggaaggagggatccccgcaggcgcccatggaggtgaagttgtggaacgacaagcgcgagcgggagctcctggagagctacgcggacctgtacgcgatcatcaaggccgtggagaagctggaacgggcctacgtccgggacctcgtctcagccgccgactacgaggcggagtgcctcaagcttatctcccagttcaactccctctcctcctcgctcgccggcgccgtcaccgtccctcgcttcgtccaggcgtaccgcctcgattgccccgccgcgctcaaccgcctcctccagtcgggcgtcccggccaccgtcgagctccgcgccgcgtccgcctcatccgcgccggccgccaccgccgcctccgcctcagccatcgcgcactgcgtgcagaccttcatcaccgccatggacgccgtcaagctcaacatgcttgccaacgatcaggtccgccccctgctgcaggacgtcgccacatccatggccaggctcggttccttgctgccgcccgactttgaggggaaggtcaaggttaacgagtggcttgccaagctgcataaaatgggcgccgcggatgaactcaccgagcagcaggccaggcagctcaacttcgacctcgactcggcctacagtgcctttttggctgcgctgcccgccgctggtctgtaaccgggcgtggacctgatcagtactctagacatgaactttttgtggtattttgtctgctgacgagaaagtgctgagcttatactgacctgatctcttgtcaatgagttctgcaatatttgtatgttacatgcattaccacataatttatgcatgatgccgtatacggtagaatgcttgcatatggcctgttcatttggatatatttcttaccatt

SEQ ID NO: 34032 - DNA, 712 bp, Zea mays
  Clone ID: MRT4577_131041C.1
gggtacctcgaggccggccgggaaaaggttcgttaaggcttcatagccttccgacacaccaactgcaatcatcagtaaactccatttcagctcaagaaaactgctatagaagcctagaactagaagaggtacttgaggcagcgtgcctgcctgcatacgcaaccagacagccggcgagccatctccatccgagttgggcgccatgcaatttgcaatgtcaccggacaacctcctcttcttctgctccgtaacggcgtcggtggccgcctccttcgctctcgtctcgctgtgcaggcacctggcgcaccgccgaccgcagcagcccaccgcggacggcctagcgacaagctcctcaggaggctccgccgagccagaggagctgctgccgctgagcgccgttgccgcggccgtccccacgttcatgtacaaccggctggtgaggcactgcggcaagggcgcgagctggaccgagtgcgcggtctgcctcggcaccatccaggtcggcgccatggtcaagcttctgcccgcgtgcagccatgtttaccaccgcgactgcatcgacctgtggctctcgtcgcgctccacgtgcccgctctgccgctgcagggtcggtcctccctccgagacaggcgccggccaagagaccgcccgggagcttgctcaaccttcccctccaataagatgaatcctcactcgcccgtcacagatgttt

SEQ ID NO: 34033 - DNA, 578 bp, Zea mays
  Clone ID: MRT4577_131042C.1
gggaccgggcccttcctgagtttttttttttttttttttttttttttttttttttttttttttttttttttttttttttgggaccccctgggggaaaaaggggcttctttttaaaaaggaaattaacaaaatttggtaaaacccttaaaaccaaagccaaaaaaggggcacccctttttacccccataaatgaaaggggtgggggaagggaagggaaccaccccaccccttatgggggtatattaaagggaaacaacaccagttttgcagcaaaggggggacagttttatctcctaagttttttactaagaaaacagaggccataccacacccctttttaccaaaggaaggtagggcaattataaaaccctccggggaaggccttaaacataaaaaaaagaagaagccttcgccttcgccttggccttttaaggagggggattccctccggcaagaaaaccgggggagtaaaaacaaatctttggggccctcagggcgacgaaaaacccccccgaaagcagcttcctcgtaggggggaacccctgggccgggtttccattgctacggaggggaaatgc

SEQ ID NO: 34034 - DNA, 305 bp, Zea mays
  Clone ID: MRT4577_131043C.1
gtcgtttttttttttttttttttttttttttttttttttgtttggttttttttttttttggggttgtttttggggggcaaaatacccattttttccattcgcctgggtttagctgacgctttcaaaaattggttttttccaaatttttctccggaaactggacaccaagtggtttgtttactgggacaaaagggttggacaaggcccgtttttttgactggtttaaggaccccaaacattctttgggggaggtcccctggtggcctggatttacattttacaaccgggcgttttattaaaacttt

SEQ ID NO: 34035 - DNA, 475 bp, Zea mays
  Clone ID: MRT4577_131044C.1
aaacccaatgttataggccgggcggacaaggcgccaactgcggggggtttatattgcatatgggggcaatcaaccacgagcagaggcaggccagaaaagaacagggtcacacccgagaggttggcggtgagctcacaaaccaggcatacacactgtccattctggccgatgactggattgagcgactaatagatgcaaaccagttaagatcagggcggccgggcgaagaactggtgcagaaatattcggccaaacagcgaggaaccaacaccggtaggtgggtgaacaacatatattgagaccggactgcccatatgatattgttatagcacacccagagggctctgaccagagaatgtggaggttaaaacaactgtctcttcaagaaaagagagagctgacagctcaacgagggaatgggcgtaatgccttggacaaagggcattaattgagcattgctcgcggcatcctttgc

SEQ ID NO: 34036 - DNA, 599 bp, Zea mays
  Clone ID: MRT4577_131045C.1
aagctcatgttgttcttagtgcacacactgataaccatatttcacctaaatccatccgtggggacttccgcttctagatgcacatctttgtaaaaaccctgactggcaagactatcaccctctaggtggagccgccctgacaacattgacaacgcttaggtgaacatcctctataatatacgccatcccccacagagcatgagtgtgtcttctttggtggcaaacagcttgatgactggtgcacgattgctgactacaacatctcatacacgagagcatgctccaccttgtgctcggtctcataggagagatggatatctttgtgaaaaccctgaccggtaatattatctccctctgagcgaagtcctctgactacagtgacaacgccaagggcaatatccaggacaaggagggcatccctactcaccagcatcgaatcatctttggtgtcaactcgcttgaggacgggcgcacgcttgccgactacaacatgcagaacgacagcaccctccacttgatgctgcgcctcatggaaggtatgcagatcttcatgaagagcctgacagtgaagactatcaccctctaggcggagccttcac

SEQ ID NO: 34037 - DNA, 421 bp, Zea mays
  unsure (1)..(421): unsure at all n locations
  Clone ID: MRT4577_131046C.1
gtggggtgggtggtttttttttttttttttttttttttttttttttttttttttttttttttttaaaatgggaacaatactttttttttttcatttcaattggtcattcaggggattggtcaccctgaccctgccccccatggggattcggggggggggggggggaaacatccccgctaaatgactcaactaggtagctagcccgcggctattctccagcacatagttttttcagggggggacaccccccgcagcagcgtaggggcctggagtcggttgttgtaagcccaacatcaccgtaagttggtgggctttttgggccggcaaaagccccgagacctggcccttttgngggtggttttgaaggatggactggaagaccaaacccaaaatccccttggaccggggctggtggttcacc

SEQ ID NO: 34038 - DNA, 282 bp, Zea mays
  Clone ID: MRT4577_131047C.1
aaaccgaaccagaataccgtttttcttaaaacgcgggccacgataattttggtcaccaacaaaaggttttaaccgggattccccgggacgaccacaataaattgagcagtgactgggccacccagcctctgtaggagacacccgaaactgacacaaaccgtttagtccatctctttgatttgggggcgcggggccaccgttttaagcggggggtgtttttgtttatgcccggggagcctccaatgtgggccccccgcccctggtactttttggaaaagaggg

SEQ ID NO: 34039 - DNA, 269 bp, Zea mays
  Clone ID: MRT4577_131048C.1
tcgaaaaaaaaaaaaaaaaaaaaaaaaaaaaataaaaggtctaccgataataaaaagaggcaaaggtacgtacttgtgcttgagacgtcccagctttcctatgctgtcaccgtaaattcatttcactggcctggatttaacaaaatgtattttattaaaatcatgttaataccaatcttaatgggctagcagtaaattccctttttggaaaaacctttaataacaaaaaggtaatgaccgatcgggcaatcaaacatttgcccactcaa

SEQ ID NO: 34040 - DNA, 159 bp, Zea mays
  Clone ID: MRT4577_131049C.1
aagcaatcaccctagcaaagcagcgcggagcgacgatccatcggtatttcatattagacgtacggttctccatcatctgatgcgacacgcagtgcattggctacagtactgatcacgacagagcacagcactccggcctgccatatgctgcaggatctt

SEQ ID NO: 34041 - DNA, 322 bp, Zea mays
  Clone ID: MRT4577_13104C.1
accaagcgtataccgacaactacggccttacatatgttactcccaagatataatacggggaagcacgcttgtctttctaaatgatctgaacttacgagcacattacatcacagctatcaatttctcctagctacaatatttcgctgtacccaccaactatctctaacatgggacgatgaaatcccacagtctaaatctaactgttacaacctaggcatcgatccaagaatgttacactttctataatgttgaatcgcaataactccatgtcgtctcatacataacctacagtcacattgcatcgagatcaaccacaacatca

SEQ ID NO: 34042 - DNA, 430 bp, Zea mays
  unsure (1)..(430): unsure at all n locations
  Clone ID: MRT4577_131050C.1
ngacttggagtccctctaagaggcggcgcgcgcctttnnnttttttttttnnnttttttttnntttttttttttgtgttttgggtgtttttttttttttgggttttttttttttttagggtaaaatcaaacaacatttttttatggttaaaccctttgcgggcgcacgaaaattttggggaaacagaacacaactgggccctgaaacccggttaattacggcttaagacacaaaccattcaaattctttgaaaggcaggcccctccctggggcatgggggggacccttaattaccccaattccggagggggtttaacggcgggggggttaataaccccccggaaaaccgggcccccggggggggggggcctccttttgggaattggaggccggaagggggggaccattcttcaactttttggccgggaaa

SEQ ID NO: 34043 - DNA, 738 bp, Zea mays
  Clone ID: MRT4577_131051C.1
atcacagatatttcaggagcaggaacagcccggcaggaggcggggacgagatggcgccggcggaccgcgaccacctgtgcctgcctggctgcgtgcccgtgcgcgccaagcgggccgcctccacggcggcggccacggtcaccaccacagcgagggcgtcgcggcacaacttcgtcaaggccgcggcgtcgggcctgctcgcgggggcgcactttaccaaccacgagtcgctgccgccgctgccggacgcctacgccgagttcgtcgcggcgttcccgcagtacgcccatggcgcgcttgcgcgggccgacgccatccggggcgaggagtaccagcacctggaccgccacgtgtgcctggactacaccggcatcaacctcttctcgcacgcccagatgaactcctccctgccatccacctcctccgcgccgccgccctcgtccgcctggcagccgcccttcttcgacatcgcgtacaagtccacgagcctgcgcacgcaggtgcaatgcggggacgccgcggcgggcggcatcggcgccgccgtcaccaggcgcatcatggcgtcgctcaagatccccgaggaggagtacgccatggtgtgcaccgccaacaggaccaccgcgtttcggctcctcgcggagtcctactcgttccagcccggcaagcagctgcttcccgtgtacgactacaagagcgaggccgtgggcgccatggccgacagcgcgcgccgccgggcgc

SEQ ID NO: 34044 - DNA, 268 bp, Zea mays
  Clone ID: MRT4577_131052C.1
tgatacccacgcagccggcgccagggacgggggcgacaagaggagcgagcagcaacatgcccccgacgggcacgagccacccccagacaaaaagaggcgagcagccaagcggagaaccagggaaaacaagacgggcgggaggaagcacaggaacaagaacaggagggagcgagggaaggcaaacagccaaccaacacagggcaccgcacggaaggaacaagaagaagcgagcaagctacaggcaggactggacggcccagaaagaagg

SEQ ID NO: 34045 - DNA, 297 bp, Zea mays
  Clone ID: MRT4577_131053C.1
ccttagttgacacttttggtttgaccacagaaacttattctgttcccttctcattgcttaatatggacagctcattgaacttgtccactacaatgtctgtgacaagccttaccaaggaccaaataacaaagcagacacttagggactataccttaaaccttaaacataatataacctaccaaaattacgtcttatattcggacgataatggtggggtgttccggaaagaggaaatcttctgggcactagcctatccaacttggctggagaaaaaacccaagatatctgatgtcccct

SEQ ID NO: 34046 - DNA, 491 bp, Zea mays
  Clone ID: MRT4577_131054C.1
ataaaaaaaaaaaaaaaaaaaaaaaaaaaaaaaaaaaaaaaaaaaaaaaaaaaaaaaaaaaaaaaaaaaaaaaaaaaaaaaatttgaacttagaacgaaacaacattttgggccttttttgggaatctccttaaggctgatttccgttgaagcctttattttgggggcccatttggcctttttttgagggggcttaattttccttttcgggggttttataacatttagttggggaaaattttggagttccccaatttaaaaaccttggggttaaccccctttttgccctttggggaaattcccattttgcccggtcggtttgtttttcaaaagggttgcccagtttgattttcaaatggttgcccctttttgagtggcattaggccccccctttttgggggtttttaaccacgtggccgtttctttttccacccccttacccccttttcttttccatttctttccttccttttttttcagttttttcgctt

SEQ ID NO: 34047 - DNA, 131 bp, Zea mays
  unsure (1)..(131): unsure at all n locations
  Clone ID: MRT4577_131055C.1
ctcacgactgtcgtatatctaggcatnacacttgccaaagtgcatgtctatcaatgaggacgggtagacgactatggagtgtctccccatgccccagatcgctcggncgctggcgctgctgatgcacgaca

SEQ ID NO: 34048 - DNA, 447 bp, Zea mays
  Clone ID: MRT4577_131056C.1
acgtcttgggcaaaactttcgggctaaaaatcaaccctctgggaggctttccccaaaaaaagaaccacccccggggggccccagggtgggggggggtccccaaccaaaaaaaatgggaacccttttgcttccttgcctgcgggggggccccgggggcctggaaagtttttgccaccaagaaacttttttgctttcccccagcgccccccctggtcgaagctcatcataaaacatggttaaatgcttccccccgggggggggccttcaaaaaaggcaaggaccctgtttccttgctgctttgggaggccttgctgttcatgtaaatcgcgtaaacaatcagcgggggggggccaagcccaaaccctatcccattggggaccccgaggaaaatgccggggtcaaccccccggtccttttcccaaacccctcctgggaggaagaggaaaa

SEQ ID NO: 34049 - DNA, 206 bp, Zea mays
  Clone ID: MRT4577_131057C.1
gcgcgccgtattagcagccctggacctgagcggagcaggcggtaaggcgatataaaggcgccgcggggccgcaaggcccgcgggcccacgaagaactcggtgtcgcggtcctccatggcccgggcgcacctccccgtcagccgcctcgggcggtacctcaaaaagggccggtacgcgcagcgtgtaagcacgggtgcccccgtcta

SEQ ID NO: 34050 - DNA, 246 bp, Zea mays
  Clone ID: MRT4577_131058C.1
tctggcatgagggagtcgtcaggctatgagtaagacctgtgtgatgactgatggtttggctttgctatcgatctaactctcctatatgcaccatgtgtgtagcatctgtatcagcgcgaatcagaagttgctcacaatacatcagggccagttatggcgatcactgtaaaagctattgatcaaacagccgctgtcatcttagtgattctgcatgacaggaagcagaagtgcttcatgccactcata

SEQ ID NO: 34051 - DNA, 552 bp, Zea mays
  Clone ID: MRT4577_131059C.1
ctcgaggccggccggggaaccatttcgacgagcggcgcgaggtcgtggtcgccgccgccgcggccgagccggtacgagtcgcagaagcggcgggactggcagaccttcacgcggtacctgggcgcgcaccgcccgccgctggagctgtgccgctgcagcggcgcgcacgtgctcgagttcctgcgctacctcgaccgcttcggcaagacgcgcgttcacgcgccgtcctgcgccgctgccgccgccgtactgcctcaccggtgtgcccttcgagttctgtgactatggcagcgtcctcggaggagttaccgccaacggtgcgcctggcttctacttgccatcgctgttcaacaccttcggctagctagggcatgctgcctgccatgtttgccgccatgcgtatccttgctttcggttgttcttgtgttcagacttcagagacgttattaattcatgccctagagtgtccttcctttcgcttggtgaatatggcatccaaataatataattaatttctctgttgacgatgaaaaaaaaaaaaaaaaagcggcc

SEQ ID NO: 34052 - DNA, 551 bp, Zea mays
  Clone ID: MRT4577_13105C.1
cctcccccccctcctccctccccttttttttttttttttttttttttttttttttttttttttttttttttttttttttttttttttttttttttttttttgaacaacgggctgcttctataaagaaaaacccccaaactgccttacatgagagtggatagcccgaaaacctgaagcaaaacagagccccaagctgcaggggcccacatggggccccgccccccacttccccccccagaccagacgaccccccctttttttagcccatgtcactcccagccccccccgggcaaaccaccccacagccactgttttagctcccacccactgtcccccccccaaagagggggaaaaacccccccgttcgcgttgtactgaacaaaaagcccctcccctttaggccccccccccctgagccatcaatccccccaccccttttccccccccccagggcccccccgggacacggcctcacttgttggccttctcggccacctaaggggccggataggccttttggggctccccaacggccggtttggccccccagg

SEQ ID NO: 34053 - DNA, 3430 bp, Zea mays
  Clone ID: MRT4577_131060C.1
attcaaccttcaggcctgaaatgatggaaatcgaccatcgtctcaaggcgctctatgttgacacaaacaagcttgagggcattgatagcccagtggaacaaatcatacagtggcttacaggaaatgggaaacacgatcaagaactaaacataatggccatagtgggcttcggaggtttaggcaaaactacccttgcaatgcaggtatacaataaattcaaggacaaatttgattgcacagcttttgtgtcagtgtcaagaggccccaacatcaagaaagttttgatggacttacttaaagatgtgggagctgccattgacacaacagatgatgagatgcgtctcatcaacaaactcaaaggacatctcacaaaaaagaggtattttgtagtaattgatgatttatgggatgtctcagcatggagctttattacatgtgctttccatcagaataaccgtgggagtcgaataatcataacaacgcgcaaaattgatgtggctaaggcatgttgcttgtcctctggtgatcatatttatgaaatgcaaccccttagcgttgctgcctcagaaagattattttttaagagaatttttggttctgaagaaagatgtccttctcacctaaaagaagcctccatcaaaattctaaggaagtgtggtggcctaccattggctatcattactgtatcaagcttgctagctagtaaagatctgacattggatcagtggaacagagtggcaaattctattgggtctacactcgagaataatccagacatagaggtcatgagaaagattctatctatcagttattttgatctaccacattatctgaaaacttgtcttctttatataagtatcttcccagaagattacatcataaatagaaagagtttgatagttagatggattaatgaaggatttgttcaagaagaatatgggaaaaatgcacatgatataggtgaaagttactttaatgagcttatcaatagaagactggtccaaccatggtttatcgatcatgacagtgggagtgtggtgacttgtcgagttcatgacatgattcttgatttaatcataacaaagtctgtagaggagaactttgttactttgttagactctcgagaacttacatcaagtccacagaacaagatacgaagattatctatccaatgtggtgacggagaaccaccagctttggtgctagaagagtcaacatcgctatctcatgtcagatcagtgactatctttgggcatgggaagcaactgccatctctttcaaacatgaaggctcttcgcgtgcttgacctagaaggttgtaagggattagaaaaccaccacctggaaaatatagagaggctaatccacctgaaatacttgaaccttagagaaacagaaatcacagagctcccaaagcaagtggtaaaactccagtacttggatacattggatataagaaacactggggtgagtgagttacctccggctattattcaacttcggcaattggctaggctgttcattgatcttgacaccagattaccatatgaaattggtaaaatgcaaaatttggaagagctgacacatgtcaatacgtgtatgtaccatatgaacttcctgaaaaagctggctcagctaagtaaacttagagagttggagataagttgggatcattacggaacacgagttgataaagtttcttatgcgggtattttgatacattcacttcacatactggccacacataaccttcggtctctcactgttcacatcatggacgaacagagcttccctcttcatacctggcatcctgctccttctgcacttcgaagactccacttcgacatgaacaacaacgaacaatttccaaagttccaacctgggtgggatcacttgtcaatctccaagaactaagcttccgcattacaaaaatgacacaagatgaccttgatgtacttggagatataccggctcttcgctctcttgccttccacatggaaatctgcaccaaaactacaccctgggaagatcctagacccgaggattggcttaggatcagaaaagggtttcaaagtttgaactccttccgcttcgaatgtggcccttgggagtggatgtgtctcatatttgaagctggatcgatgccaaagctcgaaatacttgaccttgaggttccatctgttgagaattacttgattcaaaaacttggttttgatcttggcatcaataacctctcctgcatctccacagttactcttagatttagtaatcggggatgcagccaagaaaatgaagttgccatcaggaaatcagtcagcatacatcgcaatagacctgcactggaaataataagaaaaaaggctcgaagttgaagaggcaaaaggaaaatctggatgggctgatagtaaacctgaaactctggtgaacttcgagttgggacttgtgagcatcagataaaggaagcaatgcagtgagttgataagagatggcgtgtgatcacaattcacagcacagacgaatccaaggaacctttccgcttttggggtttgaagatgacgcgatggaaattctcttgctgcgattgaagcgtcagccaattagaatcagaattgacacaactccggatcatgtctctctgtgctagaaacgttgattacctgtgcaaaaaaaaaagaagaagaaaaagatatcgttccaggaacaccgtggaacagctccagtgctccaaccaaacaggggcaagaggtgtttccgtgtttggcccagtagtccatgtatcctttgcatgtgaatttctccatttttctaagcgtgaatagattgggagttaggtggtgtttgttttgaagaattaattcattctatataagttgatgcatcatgagtatattctaaattagtatattctaaaaatttagtgtaatgaactcatttatcatattattactaattattagtgtataagaaatgaatcactcatttcattttccaaaccaaacaagaaagtgaaagtgagaaaatgattgttggcctcgttcctcaaaccaaacacgttgtttgtatagagttactggaggaagtttttttagtcttacaaaaaaaaatcaaggttaagagtggatttacctaactgttgcacatgcatgatctgatgaatttgactgcgtctagcttgctactgttaatctattatctcgagttctctgctgactccacattctgtacttgctaatatcgttgattgaacaacctgtacctttatttattaactttcctttggcacttttaggctggatatttcttgccacaaaatcctggttgtagtcttgtattgtagatcagatcgatggtgaggaccatggtggttttgattaatttgtgttataacagtggcattacaagtaaaactcttcttgcgacacttgagcagc

SEQ ID NO: 34054 - DNA, 1170 bp, Zea mays
  Clone ID: MRT4577_131061C.1
cgccctgccgacgcgtcagcccctagctacgagtagctcggtcacgcacctgcggcatgccagccatcctggacctctgtctgccgcgggccgcggcgtcatcgtcctccactccattggctgctgcttcacctggctagtagatagctagctgagctgacgacggccattatatatattgagcgcccgggaagcttcgtcgccgaacccatgtcgacgagcggcgcgaggtcgtggtcgccgccgccgcggccgagccggtacgagtcgcagaagcggcgggactggcagaccttcacgcggtacctgggcgcgcaccgcccgccgctggagctgtgccgctgcagcggcgcgcacgtgctcgagttcctgcgctacctcgaccgcttcggcaagacgcgcgttcacgcgccgtcctgcgcggcgtacggcggcggcggcggcggacggccggtggagcccgccgtggcgtgccagtgcccgctgcgccaggcgtggggcagcctcgacgcgctcgtcggccgcctccgcgccgctttcgaggagcgtcacggggcgcgtgggatctggacgtcgtcgcagcagcccgacggcggcgttggcgtcggcgtcggcgtcggtggcggcgacggcgccaaccccttcgccgcgcgcgccgtcagactgtacctgcgcgacgtccgcgacgcgcagtccagggcgcgcggcatctcctacagcaggaagaagaagaagaggagcaagcagctggtcgacggcgccgccgcagccgggtgcgcccgcccgcccgtgaccagcgtgacgttaatgcctgctgctgctctgccgcacgcaccgcctccaccatgtccgccgccgccgctgccgccgccgtactgcctcaccggtgtgcccttcgagttctgtgactatggcagcgtcctcggaggagttaccgccaacggtgcgcctggcttctacttgccatcgctgttcaacaccttcggctagctagggcatgctgcctgccatgtttgccgccatgcgtatccttgctttcggttgttcttgtgttcagacttcagagacgttattaattcatgccctagagtgtccttcctttcgcttggtgaatatggcatccaaataatataattaatttctctgttgacgacagcgcactttccccct

SEQ ID NO: 34055 - DNA, 1254 bp, Zea mays
  Clone ID: MRT4577_131062C.1
ccggccgggagcgctgcccccgtcgtcctctccatttccttctgtctgcttgcccttaaaccctagcccgtaccggcgtccaccttcgcgcaccctcgcctcaccaaacacccacggcgcattggcgcttccacctcttatcgtacgaaggcgagcggctttcacggtgtctctctgtcgcatgcaatggcaccgctgtttgaggggcgcccaacagctgcctgcccacggcatgctcaggggcgctggggtcccttgccgctgtccctgaagtctagcctgggttgttgatcttgccgcagatgcggtactccattacttctccgcccgcgccatcatttcggccacacctcagtctgttggtcggtcgcagatcccttgccccgtcgagcttaatatgcaatccgttgcttgtgaagattgtcgtgttttgaacaatgccaacctttgtttccgctgtgcctgccaaggttgtggcttccttgggtgatgcttatttgagaacatagctgttgtgctctgagcatgtgctgcctgctggcccttcatggttgtgatttcaaaaggctatcctatgctgctgatcagtacttaatggatgggagaagggtcagacctcagataagtacctaacttgctatttcctatttttttatcacttttattgatgcccaattgcatctaaagtgttgtccacttctattgcagcagtgcttgaggattcagtgatcagcagatctgcaaggacaaaaggaccaaaggagtgagctggtttttatattttaactgatgcacctggatgctttattgagcggtgtctatgaaatgagttggatggaagattggagaaacgcccatgggcctggcaaactgtggcatgtggctttgaactttgccaattggagacctgatgtggatcattttgggacgcgagttaagccccctgtttggagtgccagaaacaaaacagatggagaagggaaaaaggtgtcaggggataagagccagcgcctgatcaccgttttattcgtttttgagtaaactgtagcgagcaacaggtagcctataattgagacaatgctgaatggattgtagaaaaggatctgctttaatttccgttaagaagatcctatgctgctgatcttaagcgccatcaatgatgttcctagttgctagagtacatgttaagtatatttaccaacaaaaaaaaggagagggcggccgccgaaaagaaagctcgtcaacccaggaatt

SEQ ID NO: 34056 - DNA, 717 bp, Zea mays
  unsure (1)..(717): unsure at all n locations
  Clone ID: MRT4577_131063C.1
ccaaggcagacgggagcgacgaggcgcacatcgtgctgtgccgcgtgctgatcggccggccggaggttgtcccggcaggatcttcgcagttctgccccagcagccgcagntacgacagcgccgtggataagctggagatgcaacagatgcgagaatcatcagaagcggattcaaacacgaagaagccggcaccagtggctggccacctgttcccgacgcttcttgcagagatccagcagatcgtgccagacaagtgtgatctattgcaggagtcatacaaaaacttcaagatgggtcagattaagaaagaccagttcatccagttcctccgcaattacgtcggagacgaagtgctgaaaaccgtggccaagaaacttcgacgatgctaaatttctagtgcgcggtgcgacatcattatctccttgatttctactcgagctgtctgtagtagtgctcagtagagatgaggaggttcacttctgtttctgttgattcaagtttctgtcaagggcctatagggggtttggcgcgctgttcttacattaaccaacagtccaacacaaaggatagatgcagtttctgatactgagacgtttcgattcttcttttagtgtcctgcagcctgtgataatctgtacagactgaaatgatatatgcataaatggaaccattgcagagttttgccaaaaaaaaaaaaaaaaaaaaaaaggggcggcc

SEQ ID NO: 34057 - DNA, 959 bp, Zea mays
  unsure (1)..(959): unsure at all n locations
  Clone ID: MRT4577_131064C.1
ttgggtacctcgaggccggccgggatatattactagtgaatcctactcaggctctgcctcgtttgccattcacaatggaaacaaggcagcaattaacttaaacgcttcaaatgcaaggctgaagaagtcgccgctgcatatggaagacaatgctagaaggggagtagggagcatcagtggtccggaaggctttaccaagtctactatgaaatcactcaaaagaccccgtgacacccaatttcagattgatgcagaactagaaggtaccatgaggagtcctctaagaggtctaaaatctggtgctttggctcagtttgaaagttcatctttgccaaaatctggctacaccaccaaagattcaacctgcactggaggagcacttaatttattcatgttacccccagaaaagttattagtggtccctcctcagtatgtcgaccctgatcaagacttgctgctggagatacctctcaatgcacgacacccagaggcagaacttctgtgtcaaccatctcagctgatgagctctataagccgcagctccacctctatgggtggggttgctgaaggagaagggtgcctaaagcaaccatagtctcaggtcacatcagcaaggagcttaggaacagccagtagttgcagtttactttagcctcctggatcttgacgcctctatttactgatcaccaatgggcgttatgcatccgtcattccctaatttacataacaatgtgcgtcatcttccaacttggcgaattgtccgttcagctaacatttgtagcatgcttttggattgggtttcggctggctgtctgtagcatatggtccgtggagtaagtattatctccgtgtggaaaaaatatcaccttattgcaggacaatgaaaaaacataggatactggagagttaagtatgtgnaatataaaaaaaaaaaaaaagggcgcgcgcgcctatagaga

SEQ ID NO: 34058 - DNA, 814 bp, Zea mays
  unsure (1)..(814): unsure at all n locations
  Clone ID: MRT4577_131065C.1
atgggagaagggtcagacctcagataagtacctaacttgctatttcctatttttttatcacttttattgatgcccaattgcatctaaagtgttgtccacttctattgcagcagtgcttgaggattcagtgatcagcagatctgcaaggacaaaaggaccaaaggagtgagctggtttttatattttaactgatgcacctggatgctttattgagcggtgtctatgaaatgagttggatggaagattgtcgtgttttggacaatgccaacctttgtttccgctgtgcctgccaaggttgtggcttccttgggtgatgcttatttgagaacatagctgttgtgctctgagcatgtcctgtgtgcctgtcatggcggcttcttttggcgacatcataccaacatattcaatgtcaggctttaaagattggagaaacgcccatgggcctggcaaactgtggcatgtggctttgaactttgccaattggagacctgatgtggatcattttgggacgcgagttaagccccctgtttggagtgccagaaacaaaacagatggagaagggaaaaaggtgtcaggggataagagccagcgcctgatcaccgttttattcgtttttgagtaaactgtagcgagcaacaggtagcctataattgagacaatgctgaatggattgtagaaaaggatctgctttaatttccgttaatttagcgccttcagtgatgttcctagttgctggagtacatgttaagtatatttaccatttaaaaaanagacagggcggccgctggagagagagctcgtcaacccaggaatt

SEQ ID NO: 34059 - DNA, 328 bp, Zea mays
  Clone ID: MRT4577_131066C.1
ctcattctccaacaccagagcgtcgcagcagccagatccgcagccagcccagctccgatggcccgcaccaagcagactgcccgcaagtccaccggcggcaaggcgccgaggaagcagctggcgaccaaggcggcccgcaagtccgccccggccaccggcggcgtcaagaagccgcaccgcttccgcccgggaaccgtcgccctccgggagatccgcaagtaccagaagagcacggagctgctcatccgcaagctccccttccagcgcctcgtccgggagatcgcccaggacttcaagacggacctccgcttccagtcctccgccgtct

SEQ ID NO: 34060 - DNA, 734 bp, Zea mays
  unsure (1)..(734): unsure at all n locations
  Clone ID: MRT4577_131067C.1
gggcgtctccctcctatcgcactcgcgtctctttcctattcgcgccgccgccgctgctgcaagcgccagctcgccgtcgtccgaatagtacactctaacgccgccatggggcgtatgcacagccgcgggaagggtatctcgtcgtcggcgctgccgtacaagaggacgcctcctacctggctgaagaccgccgcctccgacgtggaggagatgatcacaaaggcagcgaagaagggacagatgccgtcgcagatcggcgtcctgctccgtgaccagcacggtatcccccttgtcaagagtgtcaccggcagcaaaatcctccgcatcctcaaggcccatgggctggcacccgaaatcccggaggacctgtacttcctcatcaagaaggcggtggcgataaggaagcaccttgagaggaacaggaaggacaaagactctaaattcaggctcattcttgtcgagagcaggatccaccgccttgcccgctactacaagcgcacaaagaagcttccacccacgtggaagtacgagtcaaccactgcaagcactctggtggcctaagcaaggagctcagcgtcgggcgcttgaagccgagggcattgttggaaatcattnttatgtaccgttttaagagtttggagtgaactagagatggtaccgaaggcagttgattgcttgcctncattaacacctgctatgcgagaagcttttagccttgggctgtcgggcagagg

SEQ ID NO: 34061 - DNA, 2392 bp, Zea mays
  unsure (1)..(2392): unsure at all n locations
  Clone ID: MRT4577_131068C.1
cgaggccggccgggatctgatgttccgcaaataataatgtagggtatacaagagaggcagatttgacagccgtcctactccatttgctcctagtcccaaatactagcaggcggcaggcggccaagaccggtgtccctcgacgacctgccgagtgccgaggcaagcaagacgcgaggaggctgtaagcctgccatcagcagcggcgatggcgggcgccgaggtgggagaagacaagtaccgctccttcatccacggcgagggcgagagggacaccgtgtggaggtacggcgccccgcccaactacgacgtggtcaacaagctcttcgaggaggagaggactcaggtgtggcccgagggctcgctggaggagaaggtgcagcggctgctcaagagctgggagatggagctggtgcacaaggtgcggcccgaggaccagaagaccgtcaactcggagaaatactctgccagcaccaacgggatgagcgctctgacccgggccgaggtgatggccatcggcggctacaacaacttcctgcgcaccaagctgcccccggagcaccgcatctacgacccggacagcgagaccgtggagtccgccatggccaccttcaccacggccttcccgcggggcttcgccatcgaggtgctcgacgtctacagcggcccgcccaggatcgccttcaagttccgccactggggctacatggaggggcccttcaagggccacccgccgcacggccagcgggtcgagctcttcggcgtctgcatcttccatgttgacgaggacatgaaggtagagaagtcagagtacttctacgagcgcggcaacttcctcgccggcttcttgagtgcccctgcccctgatgatggctcaggcggttgccccgtgatgcgcaggaactgaatgggcctgcaatgggacattggaagactaggcattggaacattgggattattagcattagcgatcccgaatccgcttttattacggtttaataattccatcatgtaacatgacacttgcatttgtgtttgaataaacatttcagttgcttccacatattagcagaaaaaaaaaaaaaaaaactcctatcgcactcgcgtctctttcctattcgcgccgccgccgctgctgcaagcgccagctcgccgtcgtccgaatagtacactctaacgccgccatggggcgtatgcacagccgcgggaagggtatctcgtcgtcggcgctgccgtacaagaggacgcctcctacctggctgaagaccgccgcctccgacgtggaggagatgatcacaaaggcagcgaagaagggacagatgccgtcgcagatcggcgtcctgctccgtgaccagcacggtatcccccttgtcaagagtgtcaccggcagcaaaatcctccgcatcctcaaggcccatgggctggcacccgaaatcccggaggacctgtacttcctcatcaagaaggcggtggcgataaggaagcaccttgagaggaacaggaaggacaaagactctaaattcaggctcattcttgtcgagagcaggatccaccgccttgcccgctactacaagcgcacaaagaagcttccacccacgtggaagtacgagtcaaccactgcaagcactctggtggcctaagcgaggagctcagcgtacggcgcttgaagccgagggcattgttggaaatcatttttatgtaccgttttaagagtttggagtgaactagagatggtgaatgtccctcctctggaggatgccatggaccctttttgtttacatagaactgccctgctgttaaacttttgctacttggcgaccagattttttcagctattttttttctcaaaaaaaaaaaaaaaaacccactcatcactcctcactcactcactcaaaacgaaagccagctcagctctgctcagctgctcacacctcacacccacaggcctgccgccacagcaccgcggatagcagagcagagcggcagccaggtcggtcgtcgtcgtcgtcgtcagccatgagcaaggacaagcaccacaagcacgagcaccacctgcggcgttgctgcgggtgcatggcgtcgtgcctcctggcgctggtcctcatcgtggccttcgtctcgctggtggtgtacctggcgctgcgcccctcgaagccgtccttctacctgcaggacctgcagctgcgcaggcccatctcgctgggcgacccgtcgctgacggcgtcggcgcaggtgacgctggccgcccgcaaccccaacgaccgcgtgggcatcttctacaagcgcctggacgtgttcgtcacctaccgcgacgaggccgngacggtgcccgtgtctctgccgccgcagtaccagggccaccgcgacttcaccgtctggtcccccgtgctgtcgg

SEQ ID NO: 34062 - DNA, 784 bp, Zea mays
  Clone ID: MRT4577_131069C.1
agagtaggaggactcattcatttccctcttcagttcgtctactggccagttaaaaactacagttggatgaagaatttcaatccagcagctgtcgaggaagagagggcggcgatggtgccgccgcctcctgcagcccgggaggagatcgtcgatgatccgccggcggagcatcagccgtcgccgtcatcggcaacgaagccgtgctggaagacgacgacgagcagcggcgctggagtggtcatcggcacccttatgtttcttgctttgctcgtcggcaccaattggatccaccatgacgctggtcaacagtactactcgttccacccggtcaccgacggcggcagtttcagtcggcatggacgtgctactggccgcacccgctcatccacggcgcccctcgtacacatacccttcagctgcggcaacgacacgtcgtccccgtcactctgccgccgccgcgcatcaccgccagcaccatcaccatcaccatcatcatcctcatcatcacagaaacaatactccccgggcgtgccgccaccttggtgcccggactacttccgccacatccacgcggacatggagccgtggcgcccaacggggatcacgcgagacgcgggtggagcgcgcccggcccagtgcggagttccggctcgtggtggtctccgggcgcgcctacgtggagaagtatcgcccatcgtttcagaggcgggatatcttaacgcagtggggcatcctgcagctgctcgcccgctaccccgacgcgtgccggacgtcgacatcatgt

SEQ ID NO: 34063 - DNA, 309 bp, Zea mays
  Clone ID: MRT4577_13106C.1
taggggccttttttttttttttttttctttttaattgttgttttttttttttttatttcactccctttccgttgttgttttcgtagagaaaaccaagccaacatcttctaaggccattcccttaaacgcgacagtatcactcgtggtgtgcctgcgaacatgtgcgatagtttataataccaactatatacccattcttcatacactatgaattgcaatcccggccccgcccgggtcatcgattccacgtgatgataatttcctcttaatgcgttccaagaagatgctctggcctacggtggttcggaa

SEQ ID NO: 34064 - DNA, 706 bp, Zea mays
  Clone ID: MRT4577_131070C.1
gccggccgggtccggaatgcacccgacctcgcgccctccacggcggagccgcgtcgtccccaaggccaggcgcggcgagcgccccggtgcggccgccgccgcgggagccgttccctatgctgctgcccgtgttcatcctcttcgtgctcctcctctgcttcctctccatcttcctcctgcgcgacctcctccacttcctctccctctggctgcgccgccggcgccgcctccgcgccgatgcggacgccgcgtccgacgccacgccggacacgcacgcgtcgcacaagccggccggtctggaccccgcggtcctcgccacgttccccacggtgcggtggttcgaggagacgcatcggcccgcgtcggggcaggccgagtgcgcggtctgcctgtcggagttcgccgcgggcgacgcggtccgcctgctcaccgtctgccgccacgcgttccacacggcgtgcatcgactcgtggctcggcgcacacaccacgtgccccgtgtgccgctccgaactggacgcgccggctgccacgccccgctacggcggcggtggacgcatcgcgatcctggtagacgatcagggagacggcagcgcggcggtggcggacaccgaccatgcggaatcatccccggcgaaacgttggcgtgcaatcgcgcccctgaccgatgacatacatattgtcccaaaatcgccgagtgccagacg

SEQ ID NO: 34065 - DNA, 248 bp, Zea mays
  Clone ID: MRT4577_131071C.1
gtacaatgatagtcaccttgctgatgtattcaggaaatgaacgtatttctcacctagtagagctgatatagaatgtcatactagggatatatgagaaactgataaccttagttataatctgggtaatgcaatcatgtaaataatcccctttgatggtatacgtagaggaaaggcaggcgttgtggcgtgagactattgcaacctgcagtgggatatcacatttcctcatctggttcatgctacttgtt

SEQ ID NO: 34066 - DNA, 284 bp, Zea mays
  Clone ID: MRT4577_131072C.1
taattcggcacgagggactcctgaaggtcgtaccttctctcaaaccacccgaagaactccctcctctcttctcactgctctcttgtcttcgcgcgctagtcgcctccgcaggagcagtatggcatgaccacgcgcaacgactccccctgctctctgctggtgcagctgcctgccgcgcaagcgcgccctccgcggaggggtgggaaacaggatgtggtgagcaaaggcaggcttaccatggggcttgggcaggaaagtatggcatgtcccaccgccgctgaggg

SEQ ID NO: 34067 - DNA, 493 bp, Zea mays
  Clone ID: MRT4577_131073C.1
gagggaaaacacagccgggggacatttaaaaggtcaaacgaacaatttacagggggccaacatgttcctgggggggacaagaggtttttaaaaaatcccttaccccttcaattacattacaggacgggaaaaaacccgtttaagggcaaatggaaaaaaaccccccttttgtaaaaaaaacccccattgggggggaaaacaatccaaaaggaaactttgggtcatatcccccccccctaaaagaaaggccagggggcttttttttgggggagggggtggggtttcaccccgaccgaatccacccagaggccgccttttgggggggggcagtttatttgaataatcgcgaacctgatgttcactggcctgctcgagtccttcaaaaaaaaatccccgacaggggggggggatccaaaaacccgggatcgctcaagaaacacttggactgaacatgctgtccgggggagggcgacatttggaaacgcaccggttt

SEQ ID NO: 34068 - DNA, 619 bp, Zea mays
  Clone ID: MRT4577_131074C.1
actcatgtaccattctacattaggttttctgttttaatatttcttaataatgatgcaggttcaaggttaccaaacgtgacaatcttgttacctacagaaaagaaacaagttgacattgatgaaaaggagaaaacacttaaacttgctggaagaattggtcaagcagttggctctctcctgaggcgattaggaatttcataccagggggaggaatctcatgggaggatgaggatcaatggcctcacgataaggaggtggttcaatccaaaactgaatagcaaatcctctgctgccggcccagctgacttgcttccactaccttcgcggttagccaaagggattgctggtcagcaacgcgatattagaaacctttcactcgagtagtagactagtactacacggctatcctggaagcgatctcagtaacccgtgtgataagaagcgtagtatagtaagatgtgcaaacgtgtgaagagtttgttcggtagaaggaaatacataatccatcaatctgtaatgacagtagtcgaaggaaagatatgcacgatgcatcaaacttttgtaatcatgtcaggtaaagggattttcccctgaacataatatacatatagagttacat

SEQ ID NO: 34069 - DNA, 361 bp, Zea mays
  Clone ID: MRT4577_131075C.1
ccggttacaagcgcatttattaactgacggacgcggactccacaaagatcatgaatctatcacactcaccctcacaaaacaccaaccactgcactacatgaaaccacacacgttctacattattcagacaacacaaagctcacacgtgccacactgcacataaatcacacctacctgcaaccaacgttggggagcctgacggaaccgtcaccctcataccatgctacccatcaagcgcgcaaactcatcaccataccatgccacttaccggccctagcggcgtaataaaatacccccaatcaagacgtaccccttgactagtgacgacctcaacaacctttctgtcaatagaacataatat

SEQ ID NO: 34070 - DNA, 492 bp, Zea mays
  Clone ID: MRT4577_131076C.1
gttgcccccacaatcctaggcctacccgccgcagtactgatcattctatttccccctctattgatccccacctccaaatatctcatcaacaaccgactaatcaccacccaacaatgactaatcaaactaacctcaaaacaaatgataaccatacacaacactaaaggacgaacctgatctcttatactagtatccttaatcatttttattgccacaactaacctcctcggactcctgcctcactcatttacaccaaccacccaactatctataaacctagccatggccatccccttatgagcgggcgcagtgattataggctttcgctctaagattaaaaatgccctagcccacttcttaccacaaggcacacctacaccccttatccccatactagttattatcgaaaccatcagcctactcattcaaccaatagccctggccgtacgcctaaccgctaacattactgcaggccacctctcatgcacctaa

SEQ ID NO: 34071 - DNA, 584 bp, Zea mays
  Clone ID: MRT4577_131077C.1
ggtccggaattcccgggtcgacccacgcgtccgcattctcttctgatgtttccgttctttctagaactcttcagagcacatcgttgtttgccaggtcctggtggcaaacacccgctcacagtgtttctcaaggctgccaaccccatctagttcctgcactttgtggctccgcccactccaagcctttcctctgtgtggagagggaagatccatacgtggcatttcctagtgggcttctcaacctctgatcctcagctcggtggtctccttaagaccacactgtgacagttccctgccacacatccccttcctcctacctacctgcctctgagattcatatttagcctttaacactatgcaattttgtactttgcgtagcgggggaaagaaactattatctgacacactggtgctattatttgaaatttatattttttgtgtgaatggattttgtttatcatgattatagagtaaggaatttatgtaaatatccccggtcctcctagaacggcactgtctgctcacgtctctgctcagttgtccctctcactggcacaggaacctgtaccatgcctggtcacgtc

SEQ ID NO: 34072 - DNA, 377 bp, Zea mays
  Clone ID: MRT4577_131078C.1
ctatttatcttttttaccctttaattcctgaccgtttcctttttgaacaccagcttttaccattaaataaatataactcctcactttaacaatttttaacactttttcttttctcatatacttatgcgctcccacttacacacatcctacgatcttatatcataaatccaaagcacccagtgcctaacgagccagctatctcaccataccattgcgcacaatctaaactccctactttccattaaattaaacccgccttgccctttgcttgaatcaatcttccaactcacatgactagccttcatctttcttgatcccccttgtccttctttttcagatccaggcgccatttcccaaatggtttctcttaccctaca

SEQ ID NO: 34073 - DNA, 255 bp, Zea mays
  Clone ID: MRT4577_131079C.1
gtcgacccagcgttcgggagatgagaagtacgggcggcgactcgctggagttccaggacttctacaagcaggagctcaagccgtcgctgggcgatatcgtgtgggcgtggcagggaggtgactcgccgtcaccaacgctcacgccggcggtgcctacgccaaacacgaatgcctggagggatgcaccaacgcgctggtgatcggaggcatgcctagacatgtcagacgctctggggtgactgatctgggacactg

SEQ ID NO: 34074 - DNA, 273 bp, Zea mays
  Clone ID: MRT4577_13107C.1
gtctataacacgtatcactcgcatttcggcttataaacaccagaagctttttttaattcggccttccgcccaaaaacggagacaccaccggagggccgtaagattatttcttcatctcccttcaagaaaacttgaaaatttgggtgggaaacctcaccaaaggttacaaattcacctggagaagaagggtttccagggtccctgccaaacgctctcaagatgttaaaaaaagcttttccaactaccaccttcccaaagaccacaagtttgcca

SEQ ID NO: 34075 - DNA, 435 bp, Zea mays
  Clone ID: MRT4577_131080C.1
ggacactattccgacgcacacgagtatcacggctgactcggaatgctgtgaaaactcctccgccaaatggcatcagcacaactctcacagggagaaaatgggtgcatggcctaacctcgcccaccatacatagaggtgccaaaaaatggttcagccaatggataacgtacggaaaactggtcacctctagagggaggggggaaaagcacagcctactgtctgtggtgtacaagaacgtctttggaacccctcgttgctggtggcgccttatatactccatcgtccaggaagaggaaggtctacgtattgatgaccggcaacgactgtccttgactaccctggcggggatgaagatgatctcaccatgatctgtgattgggtgctcgctcttgtcgactctcatctcgtgacgtctttcaccggtcccgagtgcaa

SEQ ID NO: 34076 - DNA, 555 bp, Zea mays
  unsure (1)..(555): unsure at all n locations
  Clone ID: MRT4577_131081C.1
gtgtcgcgtgtccgtgtctcgtgtgttcctatccccctctgtcctggcggctgcgtgcgcgcggtagactagtggcgctttccgcggcggctgtggtcacaccggaggcgccgactgagggacggtgatcgcgatgccacactcatgtggagtggtgcatacaccatcgggtggccatctgggccaatatgctggtggtgattgacttccctgatacatggctacctctgagccgtgccatggattccaatttttgctgatatggccaaaaggtccccaatgatgatttactgagatttgatgtatatgaaatgacaaccattgctgggcacttcagtgtacaggccatgccaacattcctgttcatgagggatggctacaatagagacagggttattggcgcaccttgaggaagagctagccaggcaacttgaactacacatgggctcgtctattagtgactccttgaatgtagacattcgctctaaataagcaggactctctnttcttcaactatgtacaaaactagtgacttatgtgtattgtaattcgcta

SEQ ID NO: 34077 - DNA, 502 bp, Zea mays
  Clone ID: MRT4577_131082C.1
gagcaaacagtcagcctgtggcgtagataaacactgtggctagcaacggtcaagacggtctaggatatagcgagtagcatccccaacaacgggtagtacacgtatgaatgtcgagagtatcacaaaatatgcaagatgggagggttgaggtagagactagaaccaactactgtctaataggcgacgacttgggaacaaaaggattaccaaagattataggagcaaatcgtcacctccactcgtggatgttgtatttgtcgtactccctccgaatgctccgaacgcacccatggacggctgtgcaccgggcctctgttgagtgccccaaatcgccgcctgatgcttgtctgtttccaaatccttgatgctcttcactggcccatcattggcgggagagctcgatcctgttgaagagctggatttgccaagacccatcttccacaagtcgttaaatgctccctatgacggttttgtctattttttgacgtttctagaataatct

SEQ ID NO: 34078 - DNA, 511 bp, Zea mays
  unsure (1)..(511): unsure at all n locations
  Clone ID: MRT4577_131083C.1
cggncgcgtgggcggacgcgtgcgggggggggtggacagacacgtagccccacgcttggtgcaatgcaccaaaagatggccttgccgcctccatggccttctgcaggccccccgcttatgtgcgcgcaaagcgcaaccgacagtggtccgcgcatgcgctccggcagctccacgggcagtgagggacgcccgccctaaggcttttcacgacaacaacagtgacaccatacttaacgggcttcagaacaacaacaggatcaaggataatatccggggttacaaactttgacaggggcggtgctgcatatgttgacatagcatgagacaagggctgagcaaaccatgtcatacatacttaccaacctggacttatgagagttagccatggatcctaccaaccttcatatctgagtacaatctgtagatactatggcggacaatggtaactatcaagccttatctaagatgggcaataagggaaactatgagcacattcttgagatgaccatgg

SEQ ID NO: 34079 - DNA, 243 bp, Zea mays
  Clone ID: MRT4577_131084C.1
gtccatgcaagcctctacactgagtcgtattaattgtctgtttgctacaggttgcactgtgtgtgaggttggatcatttggattcatatgttcgtggagacatgtgatcgacaagaattcggtggcagaaacttcagtttggcagattatgtagagcataattttgattcattcttaggccttttttgtttgtgccagattggtgggttggaacgattactaaccagattgtttctctaattt

SEQ ID NO: 34080 - DNA, 284 bp, Zea mays
  Clone ID: MRT4577_131085C.1
aaaaaaaaaaagccggttttagtttttttataggatcaaatcatattatcggggaccaattaatttttgggtacaggaaattcttttgggtcaacccacatggggggagacacccctgcctccatgaacccaaagactggcccccaacatgggaaaagatagcaaactgaaaaactttgttttttttttttttacacacaccaaaaaatttctttttttgggcacccgctcggccctttttttttttgttcaaccccccccccaaggcgaaaagaaaattaaca

SEQ ID NO: 34081 - DNA, 482 bp, Zea mays
  Clone ID: MRT4577_131086C.1
agttatatatcatcgtgggtagtgactgactgagccaatgagtgtttgtgagatatacctttgatgctcttcgacctatctagctactgactactggaggaggccttcctccaactgcactaataggtgaactagaatacctgtgcctggtccagaacaaggatggagttgtgtagcacgacgtgctcaaacttatgaccgaccttgccgacgaaatggacactgaccaaggtttacgaagtgaggaccaccacgcacggttaatcacggacatagatgacacatatattatcgcgcatcgtctgtactcaactctccattcttcctcctgacgaactgaactgcggcaccttacatgcgaccacgaatagccacaccgcttgttgactatggcttcatggccgacatcgaccagcgctcttcgacgacttccacgatgtcatcgccaagactatgccgactgtctgacccgctttccgctc

SEQ ID NO: 34082 - DNA, 145 bp, Zea mays
  Clone ID: MRT4577_131087C.1
gaagaatcgcatgatgtaggcgtgaagatgaagcgcactaaagatgaggcatagatccaagtaggctgatggcgatcgtggatggtggagtaggcatagttgtgctacgtttcttagatgcgtgagttcatggtgagaaggcaca

SEQ ID NO: 34083 - DNA, 383 bp, Zea mays
  unsure (1)..(383): unsure at all n locations
  Clone ID: MRT4577_131088C.1
gaaaacacaaagacccgacaaaaaaggaggcacccaaggcncaaccaaccacnacgaaaccaanacaccaaanaaagggnnnagacaancagaaaagaaaaannnanncccggaagcaccncgggggaagaaacacaacccncnnggcaggccnncaacaccccnggcaggccnccaacaggggggccaanaaccgggggcggaaaaaggggcggaacagggcgaccacccgggggcgggaaccccacccgngggcggaccaggacacaagcnnaacaaaggngccgaacaaggcaaagccagccnncgcaaaaaagaggccagacccgcggacaccccggaaaacgggggaaacaagggcccccccgacaaaacccaaaaag

SEQ ID NO: 34084 - DNA, 447 bp, Zea mays
  unsure (1)..(447): unsure at all n locations
  Clone ID: MRT4577_131089C.1
ggggggcaaaaaaggcgggggaatgggagaaggggggaaccaaaaaaccaccccccttttgggggaaaaggctccccccccaagggggaaaagggccccccggttttttgggcccgccccccggcggggaaaaaggggcaaaaaaaagggggggcccaaggtgggggcggggggggccccctttttggcccccggaaggggggaaacccggggggatggggtcgggccccctcgccacgttctcgccgggggaggtagtttctccnccggggggggacacgggtccgagctcctcgcgcacgaagcggtaaagcgggtgggagcggcagtcggggattttgttcggtatccctgccgggccgttctcgacagccgcccgggcagcccccaccgccttgggcagcgccccccgccgggcgccctcgaacggggcgaccctggcaaaca

SEQ ID NO: 34085 - DNA, 346 bp, Zea mays
  Clone ID: MRT4577_13108C.1
gttggcaaaataacaaaaaggggtgggttaccctaaaaacactttaaattcattttccaccaaacaaattaagattccctaaaacaaaaccttaggattctcattaacacttaaacaaccccattaaagaaaaccttcccaaaaacacccttttaaaatcttccctggtttcccaacaacttttcctttccaccattaaaaacaattttaccctctcttttttacttaaagtaacaaccccggtttaacttttttaaaccccacttttctctctcaataatctttttgccgccatggaactttaacttaaccccacccaaatttttttttttcttggcaaaatttt

SEQ ID NO: 34086 - DNA, 140 bp, Zea mays
  Clone ID: MRT4577_131090C.1
gcatattgattctctctgtctctctccactgagtaaaatttaacacgttatcggcgggtcgtctcaagagcagaggggagagaccttgtctctgtatcttcattgtttcggagtgaaccgttacactttggtatcgcgta

SEQ ID NO: 34087 - DNA, 646 bp, Zea mays
  unsure (1)..(646): unsure at all n locations
  Clone ID: MRT4577_131091C.1
aaagcgaaaaagggtnnggtgactccgcaccaacaggcaacagcggggagttcctctcttcctcccagacccggcctctctgtctgtgggtaacaggactcctggcccgcacgtcggtgactgcgtgccgaactctactggtgccagaagacgcttgtggtgtacgcaagggtggggaggagggccgggccccggcgcagcggcgctggctgggtccctcctcgcaggcgggacgcttgggagttgggagttcctctttcccccacggccacggcaaaggcctggccccgccccgccccgccccgccctgcggctgggccgcggccggagagtggaggggacgggagcatgacacgcgggcccaggatggcacagcgggccctgcggtccagcactgtttctccgtcgcttttgtcccctcagggcttttccctcttttgcgctgaaaagaagaaggcacgcggcacgggacgggacgggagtcgggagaagacgacggagccctgcaggacccgtgccacgtacactcggtctacaggcgccgcgggtgggctttggaattcactcagatcctgctgccgtatttggagtccacaggatttttttctgccgcgtaaagcggcagatctctgagatgcagtcttgc

SEQ ID NO: 34088 - DNA, 468 bp, Zea mays
  Clone ID: MRT4577_131092C.1
aggcaggagcacctgctggatatatatttggggaaacatgccaaaacactgggtgggtcgattaaacacgagtctcaactcaactttgtacaatggggaaacaaatgacaacactttcggggggctaagggctcctttggattaaaaaaaaataatgggtttttgaaccatttcctgggaaaataatataccatccccaaaaaaatcctacattcgaaaggaaacctaaaactcgggtgaaccaaaaactcggggaaaagggaaggcgtctttgatgttggctattccaagagcaaactgtacaagccggttaaaaccaaaaccgaaaccgggggggggaactgatccatattgccggagggccaaataccaccaaaagctctccttggtcaaaatttgctcgcctaagcgggcttaaagggaaaaaaaaagcttttccctttgggttcccccaataagctcaccaac

SEQ ID NO: 34089 - DNA, 450 bp, Zea mays
  Clone ID: MRT4577_131093C.1
cccacgcgtccggcagctcgtccccttccccccacttcttcctcagataaggagaggccccaggccagagaaaaaagcatcgaatttccccccccgttaattggcctgagccctcagccgtctaccagcagcagctagaggcagacaagctaggttttactgcttcattgagcacaaagatccgctgacctcttggtaaaaatccaaccttttttgtattgttttcttctgggaaaacctccttgtggtgcataaactgcgtagtacactctacaatttctggagaggaagctgagaactactatccatatctggcacgacccttgtcaagaaccatggctgttcacttgccatgaagctgcttgaactggaggcacctaaatgctgtggattgttcctatgcagatgatcggatcagtggtttcaggctccggggggttcgatcagatg

SEQ ID NO: 34090 - DNA, 437 bp, Zea mays
  Clone ID: MRT4577_131094C.1
aaactcgaataccacagggttatgctttttttttcttatcgcgttcgcgaggaatctccacaacttggagtctctcccccttacacttgaagttcacaaaaaagcccggggtaggggagagaagcaacccccccaaatccccagcaaaatgcccccacccatggccaaaaatcgagctcaaaagactatttcaaagttctcactaaaacggagctcgaatcactgagaatgacaaacgaatgcccaaagactgagtggggatgatcaaaaatgctctaggggtgcttgtttttttcctccatgcccctaggggtcccttttatagccccaaggcagctaggagccgttgaaaacaaaactggaaggccatccttgccttttgtcgtcgggcgcattggacagtccggtgcgcaccggaaagtgtccggtgcccgatt

SEQ ID NO: 34091 - DNA, 339 bp, Zea mays
  Clone ID: MRT4577_131095C.1
ccccggggatatgggaagggaaacaatacaaaataattttggaggaaaaggagttcaaaacactttatatccatatcctgtaaaatgggaagatataggcaccagatatttggggggccacccaagggccggttgagatttcccatggttgagaccagtgggcacataagtgtgtggtgttcatatttcgccctctcgaaatgtgaataaataccccctctttttcaaaaaaaaaaaaaaaaaaaaaaaaaaaaaaaaaaaaaaaaaaaaaaaccccaaaaaaaaaaaaaaaaaaaaaagggccctctggcgcgacccccctaagggggaaatttgtga

SEQ ID NO: 34092 - DNA, 644 bp, Zea mays
  Clone ID: MRT4577_131096C.1
tctttaaatattaatagagctcctgcagagatcttcttgtttacacgccagctactgtcgcacaccttgggccaaacttgactacttagtaaacggtacctagggccaacagtatagcccctatagggatagggacggcaggtcctccttgcccgggtggcctggctctaaaagccagaaagcgcctcaagggccactcccactcgtacagcatcgacgtccctttcgtcaaactccccggcaacacaagtaagcaccaacacgaaacagccaaaacagcacccacactgtctgcttaaaacctcttggaagctagaaacacaacacaacacccgccaaggacggacgacgctaaggttggcaagttggattcgacttgtcccacgccggttcccatgccgacggggccccaaggcctgcgtggtacaggcccccgccacggggcgtaccgtcttgttgcagttctcgccttcccaaaaaacccccgcaagggggtggagaggtaggtcctccccacgtgccgcggaggcctgcgtatagtgcaggtcctcccaccactaaacaaacgtcgccgggacagtctatccgagttactcgagccgaagttcccagaccttaaggtccactacaggttcggacagata

SEQ ID NO: 34093 - DNA, 1230 bp, Zea mays
  unsure (1)..(1230): unsure at all n locations
  Clone ID: MRT4577_131097C.1
gctccaacgaagccttctgggtctgaacgtccacgtccgattgtgtcctactccttcggtccgtccccatttcttcctttccttggcctcgactcctcccgacgtgatcgctccagagaaaatttcgcgggtttagacaaacagcgattgggatcgagatcggggcaacatgagcaaggtgttcgagggctacgagcgccagtactgcgaggcgtccgcctccctcacccgcaaatgcaccgccgccgccgccctacagggagagaagctgaagcagaaggcggcggagatccaatccggcatcgatggcgctgaggcactgataaggaagatggatcttgaagcaagaaacctgcaaccaagcattagagctgatctcctagtaaagatcagggagtacaagtcagatcttaataaccttaagggagcgctgaagagggttactagtattaatgcacaacagggggcgagggaggagttgttggagtcaggaatggcagatacattgggggtttctgctgatcaaaggtcaagattgctcagggcaaccgagagacagaaccaaacaactgataggctcagagatagccatagaactatgctggagactgaagaacttggtgtctctatcctgcatgacctgagtcaacagcgccagtctctcttgcatgctcatgatgtattggacgaagtggataacaacgtcggcaagagcaggaggaccattggaggcatgatgaggagaatggatagaaacaagtggatcatcggtctcatcatagcagttcttgtcttggctatcctcgtgattctgtatttcaagttcgtgcactagtggattgcgttgcgtacgttgcatggacggtacgtagttttctactgcgaccagaacgaagaggaaggcagctgtgaatttgcttctatctacattttgcgatttcctgtatttattttcagttttctatttctttttaaatcatatttctgggggtgtgctcgtacggtaccggatgtgttgtgtgaggaaacaagttcaggccatgacgcagagttttgtatatctgattggtttctatttaaaagaaaaactgaacggataatcaataactaagcatatttgggaattttgctgcagctttaaaataaaaagattgggtctgtaagacggcctgcgtgcctttaggctgtattgactattgaggctgctccagttattattttnggttttct

SEQ ID NO: 34094 - DNA, 388 bp, Zea mays
  Clone ID: MRT4577_131098C.1
cggattcccgcccgacgcacgcgtccgcaactatcaacataatatgctcaacagtgtaccaatcatggcttccaaaatattgcgccggcctatgctccaaggtctttctgcactattctacctactgcttccattttcccgaaatgcccgctagctcatatagcttccattatttccccctacctatcacaaactgtgtcttcagtgtgagtaaacccaattctacaaccctacatgatccaacactcaatcgcaactagcatattacgattatcaccctcgatgattcaacatgtcattagccctattacaacagctacctctggagaacatattgccacaaaacatcacgacgctacaaccacctcatcttgtgctaactaacctt

SEQ ID NO: 34095 - DNA, 352 bp, Zea mays
  Clone ID: MRT4577_131099C.1
aaagggagggggaggtggctaaagtataatacgattatattcttaacacgggatggggtgccgttgtaactatcactaagatacctataagtgaacacggtaaaactttacctagaggaacggtggataaatgacttaggctacgtatatgctccagttagataactggagcaacatgcgtcaactgtgccatctatcaaagtactagtactccgtatgcacagcgtaatacgcccttgtactgcactctacatggtcagcctattcgccatacccgtacatagcaacggctgcagcaccgtggccggcagtccgctgggtggcgtaatacgtataaatcttgcggcccgta

SEQ ID NO: 34096 - DNA, 445 bp, Zea mays
  Clone ID: MRT4577_13109C.1
acggtacattgctcctaaaggaggacccccaaaccctagctttatcaatgatcccgtcccaagcggcggcggcgcatagagatgaagcgcaagaacaaggagcagaggagggcagatggaatcaccgatagaggcagtgattcgctggagaccatgcggccgaacaagaagcagaggttgggcggtggcagcggtagcgatgaggagacctcgccctacctggtggtaggtcatgggagcgtgagccctgccttctccgtgttcaaggtggaaccctacaccgacggcggcggcgacaccccggtgagcatcccgcgccgcctcgcccgcctcaaatgcaaacactacatgtctttcgtccctttgagattgaaggaccgccgttggatcgtcggtgtcggtgtctgctccaccgagaactattacggtccggggatcttcattt

SEQ ID NO: 34097 - DNA, 1058 bp, Zea mays
  Clone ID: MRT4577_1310C.1
ccggccgggatagcaccggtaactccccacagtacgcgggggctccagacttccagcatctccgctccggctgcgctctgccttgctttcctgctacctgctctagcgcgagcgagagaggtacggcggccgatctggcggcgcaggcggagggctcggccggggccggcaagtcggcgccgaacatggggaggggccgggtcgagctcaagcggatcgagaacaagatcaaccgccaggtcaccttcgccaagcgccgcaacggcctgctcaagaaggcgtacgagctctcggtgctctgcgacgccgaggtcgcgctcatcatcttctccaaccgcggcaagctctacgagttctccagcacgcagagcatgccaaaaacacttgaaaagtaccaaaaaaaagaacaaatgttttgtgaagcaaataagtgtcttcgaagaagactggaggagagcaaccaggttatatggcagcatgcgtgggagcaaagcgagcggcattctgaagtgcagccgcagcagctcaatggcaataacttcttccatcccctcgatggtgctggtgaacccacccttcagatagggtatccttcagaggcactgactagctcatgcatgaccaccttcctgcccccgtggttgccatgagatcgaactactgcgcaattccgaattaataagcatggccgcatgcagctgcctgtgctatacgttgtgcttggagtgtactttaaggttcttgcatggcaagtatgtgtgtaacatttgtgatgaacatggaaactatccacttaattctcgaataatcaatgaactgggtaagattgtaacataaaaaaaaaaaaaagcggccaaaaaaaaaaaaataaaaaaaaaaaaaaaaaaaaaaaaaagtactctgcgttgttaccataaaaaaaaaaaaaatataataaaaaattaaaaataaataaaaaaaaaaaaagggggggcgcccttttaaaagaaccaagtttacttcccgggggtagcaaaattaaatttttttttatgggggaccaaaaattaattaaatgg

SEQ ID NO: 34098 - DNA, 971 bp, Zea mays
  Clone ID: MRT4577_131100C.1
ccggccggatttcttcctttcctaggcctcggctcctcccgcccgacgtgatcgctccagagaaaatttcgcgggtttagacaaacagcgattgggatcgagatcggggcaacatgagcaaggtgttcgagggctacgagcgccagtactgcgaggcgtccgcctccctcacccgcaaatgcaccgccgccgccgccctacagggaggtaatcctccacccctcccaaatctcttcgttttctagaagcaacctcaatctcggtaggctctccctccgaatcgtctcttggtaaaatatttggtcgcgcagagaagctgaagcagaaggcggcggagatccaatccggcatcgatggcgctgaggcactgataaggaagatggatcttgaagcaagaaacctgcaaccaagcattagagctgatctcctagtaaagatcagggagtacaagtcagatcttaataaccttaagggagcgctgaagagggttactagtattaatgcacaacagggggcgagggaggagttgttggagtcaggaatggcagatacattgggggtttctgctgatcaaaggtcaagattgctcagggcaaccgagagacagaaccaaacaactgataggctcagagatagccatagaactatgctggagactgaagaacttggtgtctctatcctgcatgacctgagtcaacagcgccagtctctcttgcatgctcatgatgtattggacgaggtggataacaacgtcggcaagagcaggaggaccattggaggcatgatgaggagaatggatagaaacaagtggatcatcggtctcatcatagcagttcttgtcttggctatcctcgtgattctgtatttcaagttcgtgcactagtggattgcgttgcgtacgttgcattggacggtacgtagttttctactgcgaccagaacgaagaggaaggcagctgtgaatttgcttct

SEQ ID NO: 34099 - DNA, 466 bp, Zea mays
  Clone ID: MRT4577_131101C.1
gacacacgcaccttcaccaccttggacaccttcatcagcaccctcaacgagctctactgcagcacacttgcagcacactgtagcacacatacaccaccagcaaacactcttgacgacacttcctccttcacgacattcatcatgacccattccacatcacacagcaagaggcgcaccaggaccgcacactcgaggaaaccatggtcctggctgggcttgaccacagctgccctcttcatgacctcgctccctctcctggccgccgcagcgccgtcatcacggctggtcaagcgcgccccggtcgagtacattgccgactcggaaccgacgatcgagctcacgtttgaggccaatgactcgtactaccttcaagccctgaccctcaaccaatgtcagaaccagctcgtcctgcccgagaacggaacgcatgttcgctcttactacgccatcgacacgccagagattg

SEQ ID NO: 34100 - DNA, 321 bp, Zea mays
  Clone ID: MRT4577_131102C.1
aaaaacaaaaaccccttttttatacaaaaaaacccttccaaaacaaaaggggaggcctttacacaaggtttcaaacctcccaaaaacctttgcccttttaaaaaaaacaccttttaatttttttttacaagggttcaaaaaaaaaaaccattggaaaattggcccaaaataaaaaacccccccccgctggaccatactaaaaaaatttttttcctaacaattaccttattattggtccccgaaccaaccttttttaatccctttatgggagggggggggattcccccctcctatgaatcaattaccctttaatgcctgagg

SEQ ID NO: 34101 - DNA, 1460 bp, Zea mays
  Clone ID: MRT4577_131103C.1
ggggtaccctcgggttcggccgggaaaacaaagccgaaaaccgcagtacgctgtacgcagctgtccctcgcagttgggcgcaccggtctactcctcgatccccgcaaggccgcaactacctagatctcgaaccctcgccgccgcttctttcccgatcgccgcggcccatggcgaaggagttccccgtgccgccggtggtcttcacgccgtccacaccgacgcaccgccggtaccctccccagggcgtgggggcctcccctccgcccgcgttcgcgccgccccgcccctccacctcatccgccgccaacccgctccccttcatgtcgttcgatgtatcagctgccgcggcctcctcctcctccgcgccacccctcttcgcggggcctatcggtgtcgccggttccggctcgtccttcgaggacgagccgccgctcctcgaggagctcggtatcaacacgcgccagatctggcggaagacgatctccatcctccacccattccgctccaccgacccctccctccacgccgacgccgacctatcgggcccgttcctcttcctcctctcctttggactcttccagctcctcgcggggaagttccacttcgggatcgtgctcggttgggtcaccgtggcgtccctcttcctctacttcgtcttttccatgctctcgggcggccgccgcggggacctcgatctttacagatgcgttagcctagtgggctactgccatgctgcccatggtcatcttctctgctgtgtccctctttctgccgcgcggtggcgggttcatatttggagtagggatggcgttcgtgatatggtccaccagggtctgcaccaggctactaggagagcttgcttccagcggagacgagcacaggggcctcatcgcttatgcgtgctggctcgtctacatgctcttctcattgctcgtcatcttctgataccgtttatggcatggaagactatgttcgcaatttgtttagcggatgatgtggacagtggactgccaccagtcactggagtgttttgctatgttgttgcagaactacatagtatctggccactttggggaattgttctgtagtgatctattagttccagtgggcatggttggtgttcggtgtagatcttagtaaaaagaaaaggaaatcgaggtccagaaacagcaaatgtgcagtaattaggtttttgccgaagtattggtggaaatcgtactctctaggcttggtcgtggtcggtgcaaatcttgtttgttatggtacttaccacgacttatatttttttaggatcaccgtggcatttcttttcttaaaaaaaaaaaaaaaaaaaaaactcgtgctggcaaagagtttttctatctttcgatatcgtggtagttagttaccgaatcatcataaatcaaaagaacgttagttttctttcatttgttacaagttgacccccgcattgagtttat

SEQ ID NO: 34102 - DNA, 202 bp, Zea mays
  unsure (1)..(202): unsure at all n locations
  Clone ID: MRT4577_131104C.1
cacgcgcacgcaagctnggatccactagaactgacgcgcgcggggagacccccccaacaacccgcaccccacggaaggagcgggacaaaaacgcaagacacaaaacgccagccgcggcacacacacaacacaccacggagaacgccggaaagcacaaaaccacacgggcaaggcgccgagcgcagctaccaagcaaagaagg

SEQ ID NO: 34103 - DNA, 683 bp, Zea mays
  unsure (1)..(683): unsure at all n locations
  Clone ID: MRT4577_131105C.1
ngatccagnagatactgctagtatcactatcgtgagttgccgactatttgtcaatggcggccttcgcaaagatcgccatggagtgcgtgcacgatcccctcatctggctacttattgcgtcggtggccttggtcatcctgcgaagacggcggctgaacccgccgctccctccgggccccaagccgctgccgatcatcggcaacatgatgatggcggaccagctgactcaccgtggcctggcggcgctggcgaagcagtacggcgggttgctgcacctccgcctgggctcgctccgcgtcttcgcggtgtcgaccccggagtacgcgcgcgaggtgctccaggcgcaggacggcgacttctggcaccgcccagcctccatcgccgtccgctacctcacctacggctgctccgacatggcgttcgcgcgcgacgggccctactggcgccagatgcgcaagctgtgcgtcacgaggctcttcagccgccggcgcgccgagacgtggctcngccgtgcgcgacgggtacggggagctcgcccgggccgtcggcaggtccggcggcgaggccgtgaacctcggcgagctcatcttcaagcacaccgtgagcgtcatcttccggnccggcttcggcgtccgcgacgtccaaggactggacgagttcatccccatgttcaaggagatctc

SEQ ID NO: 34104 - DNA, 690 bp, Zea mays
  Clone ID: MRT4577_131106C.1
cagatagaatttcccgaaccattcaagaagccttacagtggcctttctcctgaaaactgatctgtcaagaaggaaaaccagaagccacggttgatagaacccttgacaccaaggttttcaaagggtgggttgaaaccgacaatccatggacatcagatgatgagacggataatgctgagatgacttatgtgaatcttcaacttaatcctgaacgttatactggttatactggtgattcagctagaaggatatgggacgctatctacaaagaaaattgcccaaaatatccttcagaagatatgtgccaggagaagaaggcactttacaagctaatttcaggattgcactcctcaatatctgtacatattgcttatgattatcttcttgatgaatctgctaacttgtggggacataatctttcgttgttgcatgaccgtgttctgaagtacccagagcgtgtcgaaaatctgtacttcacatacctatttgttcttcgggcagtgactaaggcggcagattaccttgagcaggcagagtacaacactggcaatcctgaagaggacttgaaaacacaatctttagtgaggcaattgctttacaaccacaagttaagatctgcatgtccattaccttttgatgaagcaaactgtggcaaggtgaaaatggccctgagttaaagcaggagatcca

SEQ ID NO: 34105 - DNA, 331 bp, Zea mays
  Clone ID: MRT4577_131107C.1
cggacgcgtgggtttttccgtttcgcggcggggccaggtctccctctccccgggtgtgggccttcctattccagtggccgcgcgctacatcgccaccccgtgtgggccctagatcccgatgggctcgcgccggcgcaccctgctgaaggtcatcatcctcagcgatagaggggttggcaagacttccttgatgaaccaatatgtgaacaagaagttgagcaatcattacaaggctacgatcggcgcggatttcctcaccaaagacgtgcagcttaaggacaggctcttcactctggagatatgggacactgctggccaggaaaggtttcag

SEQ ID NO: 34106 - DNA, 176 bp, Zea mays
  Clone ID: MRT4577_131108C.1
aagtaattgtgtggttatctgccatttaaaagtatccagtatttgatcacattattataaataatgaaaaaatgattaatctgtaataaactggtttattgtgcagtgactgtaatatactagagttataataaattgtttactctgcctcaccaaacacatgctaggatataacc

SEQ ID NO: 34107 - DNA, 619 bp, Zea mays
  Clone ID: MRT4577_131109C.1
aattcggcacgagggaggcttcagcggagcacaagctggcgtccaagcaaagcccgctgaagtgtccccccctgcctttcttctctccttcactctctcgttcgtggcgacgcttgtgcgaccaccgtagcccgctcgacgccaggtattcgccgtgcagctcgccggcgacgagcaccctccagcgtaaggaggggagccggagatgttctactcgcagttcatcttggccaagaagggccccctcgggaccatatggattgccgcacacttggagcggaagctgcggaagaaccaggtcgcggacacggacatcggcgtctcagtagattccatcatattccctgacgttccaatcgcacttcggttatcaagtcatcttatgttaggcgtggtcagaatctattctcggaaggtcaactacctattccatgactgcagcgaagctttgctgaagataaaacaagctttcaggtccactgctgttgatctacctcctgaggagtcaactgctccatatcactctataactctgcctgagacattcgatcttgatgattttgaactgccagaagctgcgtttcaaggcgatactgatcatcatgtgagcacaaaagag

SEQ ID NO: 34108 - DNA, 1556 bp, Zea mays
  Clone ID: MRT4577_13110C.1
gtgccgtcccgtccccagcccatccgcgcgccgtcgtctcctccccagtcgaccggccacgcgtcgtcccgtccccagccacacgcgcgcagtctcctccccagccacacgcgcgcagtccgccgtcccgtccccagccacgcacgtctaatggttcagcaacaagttagtgcaagatttggtaaatgccttcttgaacttagcggaaacaatgccaccattgttatggatgatgcagatatccagctagatgtgcgatctgtcttgttcgctgctgttggtacagcaggacaacgctgcactacatgtcataggctgattcttcatgagaatatatatcaaaccttccttgatcagcttgttgaggtatacaaacaagtccgaattggggatccgttggagaaaggcaccttactgggaccactgcacactcctgcttcaaaagagaactttttaaaaggcattcagactatcaaatcttaggtgaaggttaaaagtagtgttacattatcggttcctacaaggccttgaacctggattaccacgttctgcaccagttgtgacaatgagactctttggtcctgtcctttatgttatgaaatttcagaccttgaaggaagcaattgaaatcaataactctgttcctcaaggattgagcagttctatatttacaaagaggccagatattatttttaagtggctcgggccccatggtagtgattgtggtatagtgaatgtgaacatacctactaatggtgctgaaattggtggagcatttggtggagaaaaagcagctggtggtggacgagaagcagggagtgattcctggaagcagtacatgaggagggcgacttggagggaggtcctagaggtagtaagtcacttgtttactccatgatgacaatagcaagcagatcgcggtggtgcctatggatgctacaacaagaaagatcaaaagttcttttggatggatgcagctagatattttgttttgtattttctccaaaagagaaatttgcaacgttgtgagtgatattataattgtgatgcttttgtgaatatataattgtggtgcttttgtgtttatgtgatggatcaatgactgtgttatactgataaactgagtctgtcggaaaaaaaaaaaaaaaaacccgcgggcgacttgtacaatcaactatgggagcgagctacctctagcccagggaatcaattttggttaatcctgcagaaatgttgcgcgtggatctcagtgttttctgcagacgtggatgccgtatggaaagaactgatgcaaccgcatttgagatctcagcagacttgagcagcatttattggcgtcagttgtgaaacttaaactgcaggagcatcttgtacataaataaaataagatgtttgttgctcgtgggccgtggcacgttttggtaccggtgtccagtctactaataaaatctaatgcaaaacggtcataactacattctcatgcagtatgattttccggccttttgatctggaattgaaatgagcgttgttcgttttgaacaaaaaaaaaaaaaaaa

SEQ ID NO: 34109 - DNA, 666 bp, Zea mays
  Clone ID: MRT4577_131111C.1
gacataacatcatttatatatccttattatataatcatggatgaataagaacaatattgaattacatttgtaccttcggcttgacagaaggcaaaagtacaagagtgacgcacgggcgagtacaagtcaacgtgaacagtacggggtactgttcatctatttatagggatagggcacagcctgtgtgaaatttcattcatgaccttcatgttcactattgacttaagaacaatctaccggcgactagatagtcttttcctccttaagtcagttcctttttctgctactgagccgaagcacccttgcgctctgcttcggcgctggttcaaccttcattccgaccctgctctccatattgtgtacagcttcatcccgagtccgaatgttcctgtacatatattaagcttgggaaacattgttaatcatgtttttgaggaccttcggaagacaaaggcccccaacagaaacaataatctatttccaaatgaagttagtttatgtcatagtttatgttatactttgaactcattatcccttatgtagtatggtgcctttgagatgattcctatgtttgtcatgtttggggggatggtcattcgtactttccaaatgtattgaatgcatgctcgctttatttagacaacgagcagtctgaggttcctgaat

SEQ ID NO: 34110 - DNA, 473 bp, Zea mays
  Clone ID: MRT4577_131112C.1
agcagtggtaacaacgcagagtacttttttttttttttttttttttttttttcttttttttttttttttttttttgatctgaaccatttgttgccgacacatgttcctacactggaggctgcaaccgaccgctacatccaaaccagggggcttaacaatggacgggcaccccggattttaaaacaaaggggggaagagacaccaggggcgaagccaccgaaaggtttttgaaacaatcctgcttaacatcgtcgccattcgagggatgggtttaactaaaaggggggatgctatccggccatcctccgggaagggatttgcctcgaaggggcctcaaagctcccatccgctcataaaacggcgctttttcagaagggaaaaatggttcccatatcttcctcagccaaaatttgtgcagggaggaaaggcacatccttattaagtcggagcggggaactggggccgaattaacc

SEQ ID NO: 34111 - DNA, 470 bp, Zea mays
  Clone ID: MRT4577_131113C.1
ggggtgggggttttttttttttgggtaatcatttttttttttttttttttttttttttttttaaaaaaaaaagggaaaaaatttttctgggggcccaataaaaaatgggggccaagaaagggaaccgggagcaccccaatggggggaaccacagcgcccttcaatgacccaaaaggggggccccaaacggggggaggggagatcaaaaggaaaaactctttttttttttttttgaacacccccccaacaaatttttttttgtggccccccccgggcccttttttatttttggtacacccccccccccacgcgcggaagaaaaaaaatcctatccggggggcggacaaccgtaggtgaaaacacacggtggggggggggcctcttgtgctataacccccccaaatagtagccgggggggggtatatacgggactcccgcagggggttcaaaaaaaaccgggggggggcctt

SEQ ID NO: 34112 - DNA, 584 bp, Zea mays
  Clone ID: MRT4577_131114C.1
atttctaaaaaaaaaaaaaaaaaaacaaaaaaaaaaaaaaaataaaataaaaataaaataaaaataatagggaatatatataaaatttcctaagaaaaaataaaataaaaaatgggaaaaatttttgctgtgtttcctcttcccggtgtgggcccgatctctttaggtggcttgttttggtggggggttttccctttcccccttgggtggggggtatcagaaatcttcactttatatgtggggcctcttctttgtgtcccctcctgtggggtgttgtgtaaaaagcttcttttttccccttttttatacccttggggcgggttaaaccttttgttttccggggctatttccccttgttggggatcctttttttttaatatggggggtttgtaatgaggggcgaatggagggcccttctgaggtttcccccaacttgacgggtgaaggggccccccttttagcggcgctttatttggggagggggcgggggttcccccctttttccccatttccttcgctacggccctagttccccccctttccgctttgtgccctaatttcggggctacgttgggggtttcccc

SEQ ID NO: 34113 - DNA, 245 bp, Zea mays
  Clone ID: MRT4577_131115C.1
tccgtccgcattcccggtcgccccgcgtccgatgtcctgcctttgttaaaagaaccttctggcaactactattcttttaatactaactgattttctcttctgatgctggctcagcatattgcactggcgtattttcagctgtagaaccatctttaaagaacattttgggcgaattgccagagctttttggggggggggctttcactgttcctcttctctctggccttcggtttgctttgcggctc

SEQ ID NO: 34114 - DNA, 565 bp, Zea mays
  Clone ID: MRT4577_131116C.1
taaaaaaaaaaaaaaaaaaaaaaaaaaaataaaaaaaaaaaaaaaaaaaaaaaaaaaaaaaaaaaaaaaaaaaaaaaaaaaaaaaaaaaaaataaattttgtgcctatggccgtttttcccttctaagggcttatttttttgggtttccctttgggggggggtggccgctctttttttgcttgtttgcggggccccttttttgggggtttggggttttcctttttcagttggcttggtccgactttttctggcggttggttttaaaaaatcccttggggttaccccctttttttgcctgggttaactttcctttttccccagttgcttttttacgggcggggccctttccatttgcctttcccaaatgttccttccctggattgggaactctccccccccttttgcgcccccttttgggggggggttttttccgtttacccggcacttttacccttccattttgcccggtccttcgcgcccgttcctttgcctcctttcctttcttttctggcccgttttttttggctttccccctttggtttttcccgttgggtttttttttgg

SEQ ID NO: 34115 - DNA, 395 bp, Zea mays
  unsure (1)..(395): unsure at all n locations
  Clone ID: MRT4577_131117C.1
ttggcttgngacctttgggctgatttatgtgcttggactgaataatcatagcatacatatctcactgactctcgcgaaccaacccagccacgaatctgactacggtgtgtttttaaaataattagaattttagggcgccttcggcttctaatactggtggtgcgatggccggttgtgctgctactgagtcgcctgttgataaggcgtttaagatggtggagaatccttggtcgtcgcgtattggagagtgtagtgcggggaagcggcttggtaagtgttcgtatcataagggtgtggtgccttattgtgcggcgtttgggcctacgcgttagggtggtgatactatggtgggtaatggtatgggtggtgagctcgtgactggcgatgtttggcat

SEQ ID NO: 34116 - DNA, 858 bp, Zea mays
  Clone ID: MRT4577_131118C.1
cgtccgcccaatccccgtccaccctcccaacaaaccctaactctacccctcaaccgagcgcaaccggcggcgatccaagatgccggcgacggcggggcgcgtccgcatgcccgcaaacaaccgcgcgcacagcagcgcggcgttgcagactcacggcatctggcagagcgccatcggatacgacccctacgcgcccgagaacgacaagcaacagccggggcggccttcgtcctccgtctccgccaacgccgccgccgcagctgccaacgacgccaacgcagcttccaggaaggaaaagaagtcgtccagccaccaccataggaacagcagcagcaagagaaaatcaaagcacacaaggagtaggagtgatgatagtgaggaggatgaaggcagaagaggccgggacaggaagaagatgtctggcagatcgaagaagcatgaaagatctgatgaggctagcagcgatgacactgattcagatagacagaggcacaggaagagcaggaaggacaggaagagcaggaaggacaggaagaggagtggccaccgcaagagtgaccacccgttggatgaggagcaagtatctggaggtgaaggaccagggcctcaaagaggagctaaagaggagcattgaattgtgctagatgcttaatcgaagggaacgatggggtcacacgggtcacaccgaggccttttgagcattgccatcaataggcgccaggcgggagtgttttatccctttatgaccagtcagtctgccgatatcaatctgctcgcatgtaaggcccctgagaactagatctcttaaaacccagtatcttatgatcttgataagatgaagcattaagttggagggct

SEQ ID NO: 34117 - DNA, 392 bp, Zea mays
  Clone ID: MRT4577_131119C.1
gggaggatgctccgggagcgcactctggctgccatgcggcaggcctaggacgcgctgggcgaggtttgtaaatcggaggccacactgtccgtgctggtggacaactggaaacgtacttgacttggttgctgtggattatgttggaagggggtgggggttactctacactattcgccatttgtggactttacatcgaaactagactttctatattatcaattttttttcttattaaatattatatattattttttttctttttttttttttaataattcttttttttaattttttttattatttattttattctttttttttacattatacactttattaattatattctttttatatctttatattaatttttttttatttttattttattt

SEQ ID NO: 34118 - DNA, 451 bp, Zea mays
  Clone ID: MRT4577_13111C.1
atgaggggcaccccccctccctgggctccttttattaaccccttgctttcatttcttcccaaaaaaactggggctggttttccaaaggaaaaaattccttggagggaaaaaaaacccgctctttaaacaattttagagcaagggacaccaaaaccctatgggcatttggcccggccgggccttttttgaaagccccacaaaacgggtgttggaaaaaaacagcacccgcatccaagaaaaattcttttgcaagatcaaggctctgggcaagctcttggggaggagcgaaatcaccatcaggggcatggggggccatggccacaacaaaaaattaaacccattcccttggttcttaaaaaaacccaaaaaaacacccaaaacccttcacccttgggaaattgcaacaaaacccacccccacaaaaaaccccccagaaaaaaaaaaggcccct

SEQ ID NO: 34119 - DNA, 1653 bp, Zea mays
  Clone ID: MRT4577_131120C.1
ccaggccggaggaggcattggccagtcagaaaatcagtgggcctagcggatcgaagctgaaatcaatccctgatccccaatccccgtccaccctccccaacaaaccctaactctacccctcaaccgagcgcaaccggcggcgatccaagatgccggcgacggcggggcgcgtccgcatgcccgcaaacaaccgcgtgcacagcagcgcggcgttgcagactcacggcatctggcagagcgccatcggatacgacccctacgcgcccgagaacgacaagcaacagccggggcggccttcgtcctccgtctccgccaacgccgccgccgcagctgccaacgacgccaacgcagccgccagcgccgccgcagcttccggatccggctcgggcgatggcaacgcctacaccagcttccagggccttctcgcgctcgcccgcatcacaggctccaactccgatgagacacgcggcgcctgcaagaagtgcggccgcctccgccaccgcaccctccaccacagcgacgcccccgccggcgacgaccggggccgggacgacgccgacgcccaggccccctcgagagcggccgcgcaagccaagttcgacgagataaaaaagaaagctgctgccggtggggatgcagatgatgcttctgatgatgtggaagaggacgaggacagcgattcctctgattcagacatcgaccctgagctggagaagataattgctcagcgcgagcgctccaggaatggagcaaggtggcccaggaaggaaaagaagtcgtccagccaccaccataggaacagcagcagcaagagaaaatcaaagcacacaaggagtaggagtgatgatagtgaggaggatgaaggcagaagaggccgggacaggaagaagatgtctggcagatcgaagaagcatgaaagatctgatgaggctagcagcgatgacactgattcagatagacagaggcacaggaagagcaggaaggacaggaagagcaggaaggacaggaagaggaggagccaccgcaggagtgacgacacgttggatgagaaggatgtatctggaggtgaagaaaggaggcatcaacgtcaccagcggagccatcactggagggatgcatctgactgtgacaatggtgacagtgattctgcacatgacaagaagcaatccagcaggcggaggaggcattgccagtcagaaaacagtgggctagatgaggatgagcgacatgaccaccggggagcaaagcgatcacggaagaatagggaccacaagaggagctaaagaggagcattgaattggtaattcatattcgatgatgttatcgagttcctgtagtcatcagctggtctgttgtcttctcataagttggaaacatttgaaatatgatgcttaatatgtgtaacaatataacatgttggtgtattactgtatgtctgaactatacgtcgagtctattatgtgttgatgattcaataattgatacattgtcaaggattttttaaatcaaaaaaaaaaaagggcggccctcgcgataatattgccttacagaattggcattagaacatttctccaacattaatggatcctttctagctatgtaagagagttattgagcattatatgagagtaataacgtggatctctacgagct

SEQ ID NO: 34120 - DNA, 331 bp, Zea mays
  Clone ID: MRT4577_131121C.1
acgatgacaagctctccacccctagggaggggccttcttggcagtgacgacatcaacccgtacccatccatactcaccaccgacgtttgatggagtctctcctcgactagcgatacattaagtcttacttatccgtcgttgataatattatggaccaccttatgcccaagccctcacgcgtagacaccccttacagcgcctacaccgacatccggtcccttccactccgtgctggccacacagacataatccttgatgtgctggctcaggaccatattctgaacgcaaatgagctgctccaatgggacaatggcttgtcattcattgacat

SEQ ID NO: 34121 - DNA, 259 bp, Zea mays
  Clone ID: MRT4577_131122C.1
gagccttcgaacttaattttatttcaatgcttacccacttcaaaactttaaacatatggaaaatacattctgaccaaaaaaaagttgatagttgattgaggctgaaaacgaagacctcgagctaacgccattatttagttaacgagatgattgctaaggcttgaaaccgatacaacaaaaattgaggattaatgaagcactgtttttcaggatctgatgaactatagggttttaaatatataaaataactttgaagaac

SEQ ID NO: 34122 - DNA, 254 bp, Zea mays
  Clone ID: MRT4577_131123C.1
cgtcgaacaatcccatacccaatgcctcaccggcgaatctttcgacctgtctgggttcacaagacaccacggcgattgttgttcctagagggctgaagaaaatccaaatggggacgcgccagcaataggtattgcacaccgaaccacgttcctagatccccaggtgccccaccaccatccgctcggagatcatcctcaataccaaggagaccagaccacaccctgctacgtcgtcacaccgacacccaactaca

SEQ ID NO: 34123 - DNA, 372 bp, Zea mays
  Clone ID: MRT4577_131124C.1
actcgagccgaatcggctcgaggctaagctaacctattctgccattgccgcttctgtcgcacaagttagtaaggaagcctgaggatgaagaccaaggcggctgggagccgagcagccgctggagctggagggttcggcagatctctcagggagcagagggccaaggtgtacatcgccatgagatgcgtcgtcatgctcctcaggtggcatgactgatctctatgcactgactcactgatccggcaagaattttgacgtctgagcatagcattctttgttttcttcttgcttgcttgttctccggttaccagaatggtagggagagcaggcaggccaggtgatgtatgtaactgcagttgtagagaactctag

SEQ ID NO: 34124 - DNA, 984 bp, Zea mays
  unsure (1)..(984): unsure at all n locations
  Clone ID: MRT4577_131125C.1
acctcgaggccggccgggccgggccccagtttcagttccgtttctcctctgcagcccaactctccgttcttaaaattccctttttgcctattccaccccgccacacctctccgcggcaccggccgtagcactagaacatcggcaggcgcgcgcctcctcccctccacgcctcgattcggatggaggcggagagcggtggcgttgtccgccggagtctgcagaagacggagtcggcggagatgcggtgggtggtcccgggcggcgccaatgaggacgtggagatcgagagctccgacgacggcagcgtggacacctccgccaccgcctcgggctcacggggcggcgggtgctccgacgaagacgaaggttacgagaacgatgagatgctgcgccagcttctcgtgcgcacgggcccgcgcgccgactccttcgacgtcgaggcgctcgatgtccccggcgtgtaccgtcaccaggaatttaccttaggcagcagtattgtgctgactcttcagacactaggcgttgtctttggggacgttggtactagtccactgtatacctttgatgtaatgttcaacaaatactcaattactgcaaaggaggatgttctcggagctctctcacttgtaatatacactctcattctgataccatttctgaagtatacactgattgttttgtggggaaacgatggcggagaaggagggacatttgctttatactcattaatatgcagaaatgcaaaggcaagcctgcttcctaaccaattaccttctgatactcgtatagcaaatttcaatctgaaggtgccttcagtagagctcgagagatctttgaagatcaaggagcgacttgagacttcatctatgctaaaaaagctgcttttgatgcttgctctttttggtacttcgatggtaatagcagatggtgttgtcacatcagcaatgtcagntatgtctgctgttaatggcctgaaggttggaa

SEQ ID NO: 34125 - DNA, 337 bp, Zea mays
  Clone ID: MRT4577_131126C.1
ctccgagggcaccggcattctctgccagagcaacgaattactacaggagctgtttcgaggtgttcgcctataattagaccgattcattaacaagcttaaggattgtgactagcagaaggccgaggttgatctggggcatagctacaaaacaggcaaggcgaaattcattgtggatcatgtttgaaacatggcgagtcatgctgataaaaatattggatacgctagacaaggacatcaataacttcttcttgctagtcaatgtatagatcgcatggcacttctctattcttgtcaagattgtggatggcgagaacatagatttcaagcttgatgagat

SEQ ID NO: 34126 - DNA, 305 bp, Zea mays
  Clone ID: MRT4577_131127C.1
ctgggggatttttttttttatattttttattttcttttttttttttttttttttgcacgaaagccaaaaccccgaatttaatatcctggccttttttttttaaaaaggtttctccgttttcctttcaccagaacaaaaaagtttttataatcaacgatttgactcaagccagtgggctaaacatctggcctttatcattctaaaaatgtttctttcgttttcctgtttaccagaacataaaaagtttagaatcaacgtcttgacacaggccgttgggggagggctttaacattaattttttccat

SEQ ID NO: 34127 - DNA, 295 bp, Zea mays
  Clone ID: MRT4577_131128C.1
ctcattgcttttgttgttttatttttatataatataactttcttggcttcacaaaaacagtatggctttacgctccatttatgatttcagaaaaaattctctttctttttttcgggacccccacagcttgagcaaaaaagctctttttttacactatgcccaactaaaagcctgtgatttgtttcccaacatcctatttattaatgctcgggaaaaactcccgaaaattcgcatcgcttaccgatcctgatgcccattttcctttttgttgtcaaattcagatccatggggaacc

SEQ ID NO: 34128 - DNA, 322 bp, Zea mays
  Clone ID: MRT4577_131129C.1
attcggctcgagggtttattagctggtattttttttggttcagttctccaaagcacggttttaggttgtgctgcttctcttggttcatgcacatgagctgtttttttttgggttcatgacctttggaacaggtgaagcataagattcggtgcttccttttgctatccagggcagatttttgtttgatgctgcttgacgcgtaggaactatatcctactgctgactttatgtctcctagtaaatttacttgttgtgctattcaagttattgagttggatctattgacgtgaggtgattgttgggttactgattggacttatga

SEQ ID NO: 34129 - DNA, 191 bp, Zea mays
  unsure (1)..(191): unsure at all n locations
  Clone ID: MRT4577_13112C.1
tttttaacaantgttttttttttggtttttttttttttttcattccacggctgccgggcccccttgagagggcaaattttaaggggtggattcaccacctattgggtaacaggtgacaactggtgaagcttctttgaaatttcaagatgaaagttccagactcgcaatgagctgacattaaaaaattgggg

SEQ ID NO: 34130 - DNA, 1105 bp, Zea mays
  Clone ID: MRT4577_131130C.1
cattgggacctcgaggccggccgggtccggatctgttcccatctcttctgcctccgtctcaatctcgaccggtcaccccatctccaccgccacatccgtcgtcttccgccgccgccgatggcccgcctcctcacgcaaaccctcaccctagcccgccccgcctcctccccctccactaccgccgcatccgcttccctccgtggcctcgccaccaaggtcgagatcatcgagatcgatctcgccgaggaagacgctggctcctcgtcccacggctccccctcctcgtccccgtcggtcgaggcggtcgggatccggcgcctggaggaggccatccacggcgtcatggtgcgccgcgccgcgcccgactggctccccttcgtgccgggagggtccttctgggtgcccccgctgcgccgcccgcacggggtcgccgagctcgttggccggatcgcggctgctgggggcaccgaagggggcgccggggccgttggtggcgcggtcgaagtcttggagctcgacgcgcccatgacggaggagcaggcgttttgtttctccaccacgcgcggctggccctcggcctctttcttcgtcgaagggaaatctacacatttgaggaaatcgaggaaaggtgcaactcaaactgatgatgaagaaagctgattcgtttgtgctatgttgcaaggggctcctacaagaaaacacagtgcagagttggatgactgccaagatcaatgtagatatggatgcaaggagcctattgctggtaaaccatggcacctgctacggttgatgctgcctcatccgtcttggaagataaatctgtaaattcggtctgaatctcaggtggttgttgtatcaagtcctggcacaaagccttcggttgtaataagcattgcatggagctgtgtgctgaatgtgtgctacggtacattcaatgctgggctcagcatcaatccagaagctgtactctaaacaaagattctggatggcttcctgtgccaactaggaacaatgtaaaatttatgcaagcatctctgcccactcctgatccatgtaaaactaagctaaaagcttaaattgttgtcatatcgacagttttaggagt

SEQ ID NO: 34131 - DNA, 770 bp, Zea mays
  Clone ID: MRT4577_131131C.1
ttggtggcgcggtcgaagtcttggagctcgacgcgcccatgacggaggagcaggcgttttgtttctccaccacgcgcggctggccctcggcctctttcttcgtcgaagggaaatctacacatttgaggaaatcgaggaaaggtgcaactcaaactgatgatgaagaaagctgattcgtttgtgctatgttgcaagggaacaaaaatgagctggaggcccaccaaattttgtagcactgtccctccatgccacagccttactgatcatacctgcaatgcattaactgctgacatgtatggcggttattgctgcctgcaccacaggctcctacaagaaaacacagtgcagagttggatgactgccaagatcaatgtagatatggatgcaaggggcctattgctggtaaaccatggcacctgctacggttgatgctgcctcatccgtcttggaagataaatctgtaaattcggtctgaatctcaggcggttgttgtatcaacaagtcctggcacaaagccttcgttgtaataatataagcattgcatggagctgtgtgctgaatgtgtgctacggtactttcaatcctgggctcagcatcaatccagaagctgtactctaaacaaagattctggatggcttcttgtgccaactaggaacaatgtaaaatttatgcaagcatttctgctcactcctgatctatgtaatactaagctaaaagcttaaagggcttaagggcttgttcgttttaaaaaaaaaaaaaaaaaagcggcc

SEQ ID NO: 34132 - DNA, 457 bp, Zea mays
  Clone ID: MRT4577_131132C.1
gacccacgcgtgcgcggacgcgtgggttctgcctccttctcattctcgaccggtcaccccatctccaccgccacagccgtcgtcttccgccgccgccgatggcccgcctcttcacgcaaaccctcaccctagcccgccccgccgcctccccctccactaccgccgcatccgcttccctccgtggcctcgccaccaaggtcgagatcatcgagatcgatctcgccgaggaagacgctggctcctcgtcccacggctccccctcctcgtccccatcggtcgaggcggtcgggatccggcgcctggaggaagccatccacggcgtcatggtgcgccgcgccgcgcccgactggctccccttcgtgccgggagggtccttctgggtgcccccactgcgccgtcagcacggggtcgccgagctcgtgggccggatcgcggctgccgtgggcaccgaaagggg

SEQ ID NO: 34133 - DNA, 280 bp, Zea mays
  Clone ID: MRT4577_131133C.1
tttctatagcattatttagctgccacaagcaatttggtgacatagcaagaaaattaatgagaaagagggaaaaatggtttcctccttgagaaatcagatctacacgcgcaacgaagacacaaaaaaccactgttttagcgttggagatgagcatccagtttccatctgtgaagcccacacacagctcacttgccgcgtcgtcacatccagatttattacgacaccacaacaaaaaaaaattagcggtgaaacttatagcttctatgagtgatttcttagt

SEQ ID NO: 34134 - DNA, 299 bp, Zea mays
  Clone ID: MRT4577_131134C.1
tccaccccacaaccacacacccacgggcgggggagcttatggccaccagcgccgaagaacccggcagcgaagcgggacacggggcctgccgaaggcgcacataagggcggcaaaggcaacggcggagacagcggcacccaaggcagcgagacgctccaggagagacgcccgccacaacatacggaaggtgggtaaggacgcgggcaggaccaggaaggcacagaagcgcgagtccaggcccagtgcaggccggacacatgacgccaaccagaagggaaagcactctgcgaacggaaagc

SEQ ID NO: 34135 - DNA, 336 bp, Zea mays
  Clone ID: MRT4577_131135C.1
gaacagcctagcggcattgcgtgcacaggatcgtaccaccgaacagcatgaagatggtgatcgtgctcatgctgcgcctggctctggcaactgccagtacctctaccatgcagatgccctgcccctgcgctgctctagcatggcttgcacggcgctgactcctgactgacgacgatgatgggcgccaacagcctgtacccctacgctgagtacctgaagcagccgtagtgcatcccgattcacgcttgatcactactactcctgcagcagtcatccgagctccatgttccagtcgctccggcaacagtgctgccagcagccgatgaggatgatcga

SEQ ID NO: 34136 - DNA, 1565 bp, Zea mays
  Clone ID: MRT4577_131136C.1
ggccgggtaaaaaaagaaacctcgagaccggccgggaccatcgacgacagcacagctaacccaatcccaaatcaatcttccatggcgccggcgaccttgctactggcgagactggccgtggcgtgcgcgctggcgctcggcgccatggcgcagctgtcgccgacgttctacgacgcgagctgccccagcctgcaggccatcgtgcgggccgggatggccgccgccgtgcagcaggagccgcggatgggggcctccatcctccgcctcttcttccacgactgcttcgtccaggggtgcgacgcgtccgtgctcctcgacgactcgccgacgctgacgggggagaagaacgcggggcccaacgccaactccctgcgcggcttcgaggtcatcgactccatcaagtcccaggtggaggccgcctgccccggcaccgtctcctgcgccgacatcctcgccctcgccgcgcgcgacggcgtcaacctgctgagcggtccgacgtgggcggtgcagctgggtcgccgggacacgcgcacggcgagccagtcggcggctaacagcaacctgccgtcgccgtcgtcgagcgcggcggcgctggtgtcggcgttcgcgtccaaggggctggactcgcgggacctggtggcgctgtcgggcgcgcacacgatcggcgcggcgcggtgcgccaccttccgcgcccgcgtgtacaacgacaccaacatcagcgccgggttcgcggcgaagcggaggcagatctgccaggcgcaggccggggccagcgacggcaacctggcgccgctggacgccatgagctccgtcaggttcgacaacggctacttccgcaacctcgtggcccagttcggcctgctccactccgaccaggagctcttcggcgccggtggcggcgccgtcgacttcatcacggcgcagtacgcgcgcaacggcgccgccttctcgcgggacttcgtcacggccgtcctcaagatgggcagcatcggcccgctcaccggctccagcggcgagatccgcgccaactgccggaagcccaactaatgacagacgtctacgtataccatagcatagacagacatcagtggcagtggtcagtttcgagattcgtgcgacacggacggacggtctggattcctcgacatggccagctaagagggccgtggctttttgcgtggaaagtgtggagtgcgttggaagggagcggcggaggcgatgatgattccgggcgatttggtgggtggagcgccgctgtcaggactagtactcatttcaggggagaggggagagctggggggggggggccagcgtgccgtcacacatcgatcaacccgcatatgagaccattgctgattttcattcttttttattttatttggccgcgttattctttcttttctctttcgtttctttgtgccacgattttagcctgtgatgagtctgtacgtacactgggcgattcatgattattattctttttttttgttcaagaaatgtacacatgcatatccaatgtgcaaccgatcatgcatgattaataataactctctggtcagaacaac

SEQ ID NO: 34137 - DNA, 106 bp, Zea mays
  Clone ID: MRT4577_131137C.1
tcaagtgctgccagatcctcgtggcgcgcggagccgacagggccgccgccaactgcaacgggtggatcccggtggacgtggccaggacgtggagctgccacaggct

SEQ ID NO: 34138 - DNA, 526 bp, Zea mays
  Clone ID: MRT4577_131138C.1
cagctaacaaaccagtttatttttgttccagacaagactccaagaggggccgctcctaaaaaacataggctttacattacgggggttaaattcccgggggggaagtcaccggcgccgctcgtggtccaggcggggccttttcgtccacaggaaacagcaaccagcggctgggcgggcctaaaggggagatggaccgggggaggaaaatgcccccgttgttgttggcccccgggtcggcgaggggggaggggaggttctccagcgggccggggccggggtcccccgactgggggccccaaaacccgacaaaggccaacggggggagggggccgttcttgatctcctggagctgtgactcctcaaacttgggggggtccttggaaaacccgagcgggtcaaaggccccgccggggtacttttttttgtcggggtccttctccatggggcgctggtgctcggggaaggcgatggccacaaactcgatcccaagatgggggaagcgggccccaggaaccggggcccccag

SEQ ID NO: 34139 - DNA, 519 bp, Zea mays
  Clone ID: MRT4577_131139C.1
ggtgggggggttttttttttttttttttttttttttttttttttttttttttttttttttttttttttttttttttttttttttttgcgaaaggagacctgccgctttaataatttaaggggccaaaaaaaggggggtcacaaaaccgggggggggggcgggaacagctcggaaaaccaaaatctcattggccccaaaaggtcaaagatcaacaaacatgggcccatcccgaaacaattttcccccttaaggggatagacccccccctggaaaaacccctggccccaaaagcgctgccccccccccgggcgaagccagggctgctccccctaaaaaaggggggaaatccccaggagccctacccttttcacccccaaaaacacccattgccccccggggaccccctttggaaccctccctatccccaaacctagggttggcttccccaaagcgagggggacccccggggcgggcacccggggggcccgaaccaaagggaccggaccggggcttggagga

SEQ ID NO: 34140 - DNA, 870 bp, Zea mays
  unsure (1)..(870): unsure at all n locations
  Clone ID: MRT4577_13113C.1
actcctatgggcgattgggaccctcgaggccggccgggaggcctcgctttcgataatccccaatcaaccaacaactttaaattaccatcacagcaggatctcggtattgtggcttctgtgtttgacaccctataacatctttgcaacttcgagagacagtcaaatactatccgtcaaaatcatggatcacgtcgacagtcacttggctcaccaagccagccaagaaaacgtatccttcttcacacctctcaatctcgtccttatctgcgccgtcctctacacaacttatgccctcatgcgctcctcgccaccgccttcgcttccccgcgacactccatcaaccgtgttccgaacatacaacccccacacactcctccccttcaacggcgaggagggacgccctgtctatctcgctgttcgcggtcgtgttttcgacgtctcacctggccgcaacttctacggccctggtggtccgtacagcaactttgccggcagggatgcgagtcgaggtcttgcatgcggcagcttcgatgaggatatgctgaccaaggatcttaatgctccgctcgataaacttgagggattggacgaggagcagatggatgcgctgcggggctgggaggagagattcttggagaagtacaatgttgttggaaagctagtttctatgcaagactacgaggcgcagaaggcttaagtcatgtagggacgtcatcgcgacgagactaggttcccagacatacagacatacagaacgcatagaacggataccatgtcacagtaaacctatggtgaaaaatatcatatcagggcacatatgtgacttgcattccttcattactataacaatannncaagaaaatcccgtat

SEQ ID NO: 34141 - DNA, 583 bp, Zea mays
  Clone ID: MRT4577_131140C.1
attccgcacctagggttttcgcgccgccgccgccgccgccgccgcagccgcaacaatgccgtcgcacaagaccttccggatcaagaagaagctggcgaagaagatgcgccagaaccgcccccatcccctactggaacccgcatgccgcactgacaatacccatcagggaacaaccgccacagcggcagggcactgggcgccccgccccaaggctcgggtttctgagagggcccggaaattggcccgcgttgcctgggttctcaaaaaggtaaaggggcccaaaaaagccaaaccccccccccccggggttaacccagggggggccacattttcccggaaaaccaaaacaaaaagggggggcaaaaaagacccctttttaaaaaaaaaacccggggggggggggggggggggggtaaaaaaaaaaaatagggcgccccccccggggggggggggccccccccacaaaaaaaccccctcccggaaatttttttttttgttgctaaaaaaaaaaaaaaacccccccccccccccccaaaaaaaaaaaaaaaggggggggggggggcccccctcttggggggggggc

SEQ ID NO: 34142 - DNA, 269 bp, Zea mays
  Clone ID: MRT4577_131141C.1
cgtctacacgcgatactagatagatatatattatatataatgttagcaggagctaaatcaataggtgccggatctgaactcgtattcagagatggcggaaatcaagtctcatgttgctcctcagaacatgcgtatagtatatagtaatagtaatagtaatagtaatagtaatagtaatctcattgggccactagattcggatgggacatacgctctagtgtatgcgacacgagcattgcgtgttgtccgcgacgttcgtgacagagtgc

SEQ ID NO: 34143 - DNA, 617 bp, Zea mays
  Clone ID: MRT4577_131142C.1
gaaaggcgaccaaaacaattgaattaaatagagagctcctagtctttttggtattttcttagggttcctcccgctcatcagtcaaatacattaaatacataaatattggtctcaatcagggccatgcctgagcccctcgtaaactcttaattcgtacaagccggcaatcaatgccagggatcttagacgtcgagaccgtcgacgacaacgcccttgttccaggtccactgaagtatcctggccacctccaacgcagtaaagtcatcgatcatagcgctgacaagatacagtgctgcatcaatgccagagctgacacctccggatgtgaccacccggagaccaccaagtcgcatagctgcgcggcgcacaatggattcacggcgggtgttggaatccttgaatgacatgcttccctttcgggctgccgaagggcggcgtccctgaccggcatcggacttgcggcggatgtatgggctctcgtcttcgccgagatcgaatcgaaggttgttgacgacatagcgagcgtcctcgaccacatcggtgcgttcttggaggttcacagtagcagcatcgctgcagatgttctcaaaggtagtgaaaaagtcggggtgggtaga

SEQ ID NO: 34144 - DNA, 546 bp, Zea mays
  unsure (1)..(546): unsure at all n locations
  Clone ID: MRT4577_131143C.1
tttgggttttttttttttttttttttttttttttttttttttttttttttttttttttttttttttttttttttttttttttttttttttttttttttttttttttgggggggggggngtttgaacgggtgccctttttgggggaaaaaagggggggccaattttcattttttgggcgggggggggggaatacattttcttctaagccttttgggtttttttctaaatttggaggacaaggaaaattggtggggccgggaaaaactttttttttcaagggtttaatttgacggggggtagcccattacaaaaaatttgggaacgggttttacttgaaggggggaaaaaaaaacggtgggttgggccccccaaattcaaaagagtttgaaaggggcccctttaaaataaattttttcttttgggggcccaccaaaattctgaaaatcaagggtttttttgggttggccaaattgggggttgggtggccccaacctgttcttataagttggattgaaaaaaaaggctttttttcaccaaaaagttccg

SEQ ID NO: 34145 - DNA, 436 bp, Zea mays
  Clone ID: MRT4577_131144C.1
ctggggctgggcgtctttcttttgacgcacccggactgtggcggtgcgggcgctcgtacataaacaccagcatggacgcttcttatatggcacactccacgtgctttctaggcggacacacgcgcacggcgctgtacttggagtaacccctgaattggaaaccacatggcggccagagaagagtcagattccttggcgcggataggcgtacacgacggtaaagaagatccgagcgcccaacggtctagctatgccgacaggtccgtatgaggagattggattttacatacaacttaccgtgcttagggggagcccttagatgggcttctggccgtacttccttcactagtactcgtgcggttggatatccgctatcttagcgcttaaccacgtactatgatggtccttttacacggtttttactgtcaatctaaaa

SEQ ID NO: 34146 - DNA, 853 bp, Zea mays
  Clone ID: MRT4577_131145C.1
attgggacctcgagccggcgggcaaaacctggaaagacgcgtctgattggtgaccacataacaattatatgttaaagtgagtggaacggcaaatagatagcacatagcagcataatacgacgaagccaaatagtagaagtaccaagggaagcaatgtgtctggtttgttcaagcctagactacataggcatgctttacatatcacgagtatgctcctcgcaagagtgcacgcatagcctagatataaccagtcactaccctagaagcaccaaaaggcatatcttgcaacaaagcacacatcatagcggtgctcatatcttacaagcatagaacggtactccttgcacaacagggaggcaagttctaagagtaacctagacgaactgggacagttcccaaaagcgagcctcagttcccaaaagcgagcttccattgctggtggtgctcgtgtccagaagcactgcaactaaaaaagggtagcagtcaactaagaagttttggcaagcacttcaagctcaaatataatgtataatttttttttttggagttttcgactaaagaagttatgaagggaatacatttgaaatcatttgactatcgatttgttgacttgttattgacatctttcctaaaaacttgctaatttctattttgatctgtattggtagaaggtaacatcactttctattttgttaatttattagttcaatggaccccatattgacctattgttagttttagaatgctttgtttgaaatatgtgatgacctcagaggatgctttgaatggtgttcctatgtatcatagggttttagttggggaaaagtcgttactactgatcatttggattttg

SEQ ID NO: 34147 - DNA, 1695 bp, Zea mays
  Clone ID: MRT4577_131146C.1
ttgggtacctcgaggccggcacgcaagtcacaacaaacaccaccaccatctctttgctcagagcatcacactccctctctctcgcgcgcgctcacaagcacgtcgtcaaccatggttgtcgagatgaaggagaacggcggagcggcgttggcggcgggcgagaaggcgccgcagctgggcgtgaagcgcggcgagccgacgctggtgccgccggcggaggcgacgccgacgggcgggcagtactacctgtccaacctggaccagaacatcgcggtgatcgtgcagacggtgtactgctacaagccctcctcgccgcccggcggcggcgaaggcaaggacgtggacgtggcagccgcgctccgcgacgcgctggcgcgcgtgctggtgcactaccacccgctggcggggcggctgggcgtcagcccggagatgaagctcaccgtggagctgaccggcgagggcgccgtgttcgtggaggccgacgccgcctgcgacctcgccgccgtcggcgacctcaccaagcccgaccccgccgcgctcggccagctcgtctactccgtccccggcgccaagcacatcctcgagatgccccccatgaccgcgcaggtgacgaggttcaagtgtgggggcttcgcgctcggcctggccatgaaccactgcatgttcgacggcatcggcgccatggagttcgtcaactcgtgggcggagacggcgcgcggcgtcgccgagctcaccgtgccgccgttcctggaccgaagcgtcctgaaggcgcgcgacccgcccgtgcccaccttcccccaccacgagttcgccgagatccccgacgtctccgacacggcggcgctctacggcgcgcaggagctgctgtaccgctccttctgcttcgacccggaccggctggagcgcgtgcgcggccttgcgctcgccgacggcgccctgggccgctgcaccaccttcgaggcgctgtcggggctggtgtggcgcgcgcgcaccaaggcgctggggctggcgcccgagcagcgcaccaagctgctgttcgccgtggacgggcggcgccggttcgcgccgccgctcccgcggggctacttcggcaacggcatcgtgctcaccaacgcccttgccacggccggcgagctgctgtccgcgcccgtgtcgcgcgcggcggggctggtgcaggacgccgtgcggatggtcaccgacgactacatgcgctcggcggtggactacttcgaggcgacgcgggcccggccgtcgctcgcgtccacgctgctcatcaccacctggtcgcgcctcgagttccacggcgccgacttcgggtggggcgagcccgtcatgtcgggcccggtcacgctgccggagaaggaagtcatcctgttcctggcgcacgggaaggagaggaagagcatcaacgtgctgctcggcctgccagccaccgcgatggacgccttccaagagctcatggacgagatatgattcattcgtcggtgatgacggacatggatgggttgctgctatacatacatatacgatgcagggtgcttatacattcttcaattgctcggtgttatagtacgaccgtgttaatactcgatctatgttgatgttgttaagtttagtggccatatgagaatttgctgtcgattgcaattgttctaatattaatggaaaatagtaaactttatttcctttcattcg

SEQ ID NO: 34148 - DNA, 410 bp, Zea mays
  Clone ID: MRT4577_131147C.1
ttcccatattcctgacatcaaactgacttctctacactttgcgaactcaaggataaataagggagctttctatccagaaagtttgatgatgctcacccgaggaattctctttttaagagatacacactgaggttgcaatgaacatgtatatttactgcgataggtttacattttgatttgaaaaggagtcaggattcccattactgtctcagtatcaatggaatactccattaccttacattgcatctttccccctcctgcagttaggatataatgacctagagacaatgtatctagtacctacatgcatgaaatgccttgtgcactccgcttcagccaaatactgttaaccagaacaaaattctaaactctctcaaataacaataaaacatggtcctagggctcgggtg

SEQ ID NO: 34149 - DNA, 207 bp, Zea mays
  unsure (1)..(207): unsure at all n locations
  Clone ID: MRT4577_131148C.1
ccggggcgncccacgcgtccgggggcccgngnngntncgcttgtgtntgtttccgccgtgtgcctcgtcngtcgggccggggggcgcccgttctcggtggctgccctgcgtggcccgtgcgctgtgcctgctctgcgggctctggncggtggcctcgcgggcctggccctgggctggnggtggctgtggtgctctgggcccggggcc

SEQ ID NO: 34150 - DNA, 435 bp, Zea mays
  Clone ID: MRT4577_131149C.1
ggccgctttttttttttttttttctttttttttttttttttttttttttttttttttatttttttttttttatgatcatttatctttctttctttactctgtggaaaacgagacaatccataggggctcagaaaaaaaggaaggccggcaaaacggaaagcgggcttgcacccgggaatcccgaaaatgctaaaaaaaaagggagggtggagaaaaggcggggcacccaacccatagggctcccgaggaacaagaaccccacatggaaacaaaaaaaaaccgggaccccctcgccgaaggggccactcaggagcacgctctgcacaatcggccaattatttttgccgaaggcgccaagagggtcacccctgcttagcaccttctgaaaaaggaacttaacagcagccccggggtgaccaacccggaccccaaggg

SEQ ID NO: 34151 - DNA, 446 bp, Zea mays
  Clone ID: MRT4577_13114C.1
gttacaaaatcaatttttatcagctaatcacttaaagaccgtatgcttccaaacgtgccttcaggaacgtcgaaacaggccttaaagcagttcgcttatagggtaacattaaaaaagcaactttcctttagcaataaatggacagaaggcgaagttcaagcttttgcacaaattaatatggaacattatataccggctcacataagaaagatggagtgggttccatttccacacgttcatgtacattcttgccatcgtacagcgaacaaactacaagtttaacattgactcatgccatgcaagttatgttaacatcgagaacctttaacttccgtgctccaatgcaactcaccagcgctcaaaacaaactagcaccctgaagacaacaacggacaaaatccataaaaccaacctgctccatgagctgatactgctggaaaggacta

SEQ ID NO: 34152 - DNA, 215 bp, Zea mays
  Clone ID: MRT4577_131150C.1
aggggacaaatcactgggggggtcatgcttttgattccttcacaggaaccaaagatgcaagggacaattgttttgttttagcccaaaatccacatggggcttgtaaggggcaacttgtgcatgctttttttcaagggttacatttcaggctccaaatgccctggaaaatggttcttaacctggttccgccaagcctttttacgaaccgtttgggg

SEQ ID NO: 34153 - DNA, 212 bp, Zea mays
  unsure (1)..(212): unsure at all n locations
  Clone ID: MRT4577_131151C.1
atactccgacatttcctcggtcctcctcggtattcaatacaacacgacttctctgttttcgcctcgctcaggcttatagaanaagaagcaacacgaggaggccgactgccagcaggctgaggacccaatcctatgcatcaataaatgcctcttcttcgacaatacttggaccatgatcatgtgctcccactgccacaactacatgataacga

SEQ ID NO: 34154 - DNA, 344 bp, Zea mays
  Clone ID: MRT4577_131152C.1
cccacgcgtacggtgatttgagggggaggagaaatcggtttggttacatggatcttggccgtggtcttggggtccaggaacgacttgacggtgttccagagcagcctgaacccttgccccgcgttgatgatgaacatccggcacagcttatgcacagggcgagcatgtagcagaaggctgcacttgttgcagttgcttggacgaacaagttcactggacgatcgaacaggacatgcagtgtggtaccttagggtagttgtctccgtcgatcttctggaggcgtccgatgaggtccctcgcagccttgtagaagttattgtacccctgggcaacaatggcgcacg
